(19) United States
(12) Patent Application Publication
(10) Pub. No.: US 2006/0194211 A1
(43) Pub. Date: Aug. 31, 2006

(54) Methods for prognosis and treatment of solid tumors

(76) Inventors: Michael E. Burczynski, Swampscott, MA (US); Natalie C. Twine, Goffstown, NH (US); William L. Trepicchio, Andover, MA (US); Andrew Strahs, Maynard, MA (US); Fred Immermann, Suffern, NY (US); Donna K. Slonim, North Andover, MA (US); Andrew J. Dorner, Lexington, MA (US)

Correspondence Address: NIXON PEABODY, LLP, 401 9TH STREET, NW, SUITE 900, WASHINGTON, DC, 20004-2128, US

(21) Appl. No.: 10/834,268

(22) Filed: Apr. 29, 2004

Related U.S. Application Data
(60) Provisional application No. 60/466,067, filed on Apr. 29, 2003.
(60) Provisional application No. 60/538,246, filed on Jan. 23, 2004.

(51) Int. Cl. C12Q 1/68; G01N 33/574

(52) U.S. Cl. 435/6; 435/7.23

(57) ABSTRACT

Solid tumor prognosis genes, and methods, systems and equipment of using these genes for the prognosis and treatment of solid tumors. Prognosis genes for a solid tumor can be identified by the present invention. The expression profiles of these genes in peripheral blood mononuclear cells (PBMCs) are correlated with clinical outcome of the solid tumor. The prognosis genes of the present invention can be used as surrogate markers for predicting clinical outcome of a solid tumor in a patient of interest. These genes can also be used to select a treatment which has a favorable prognosis for the solid tumor of the patient of interest.

### CROSS-REFERENCE TO RELATED APPLICATIONS

[0001] The present application claims priority from and incorporates by reference the entire disclosures of U.S. Provisional Patent Application Ser. No. 60/466,067, filed Apr. 29, 2003, and U.S. Provisional Patent Application Ser. No. 60/538,246, filed Jan. 23, 2004.

[0002] All materials on the compact discs labeled “Copy 1” and “Copy 2” are incorporated herein by reference in their entireties. Each of the compact discs includes the following files: “Table 3—Spearman Correlation of Baseline Expression with Clinical Outcome.txt” (298 KB, created Apr. 28, 2004), “Table 4—Qualifiers and the Corresponding Entrez and Unigene Accession Nos.txt” (179 KB, created Apr. 28, 2004), “Table 5—Genes and Gene Titles.txt” (331 KB, created Apr. 28, 2004), “Table 8—Cox Regression of Clinical Outcome on Baseline Gene Expression.txt” (294 KB, created Apr. 28, 2004), and “Sequence Listing.ST25.txt” (5,454 KB, created Apr. 28, 2004).

### TECHNICAL FIELD

[0003] The present invention relates to solid tumor prognosis genes and methods of using these genes for the prognosis or treatment of solid tumors.

### BACKGROUND

[0004] Expression profiling studies in primary tissues have demonstrated that there exist transcriptional differences between normal and malignant tissues. See, for example, Su, et al., CANCER RES, 61: 7388-7393 (2001); and Ramaswamy, et al., PROC NATL ACAD SCI U.S.A., 98: 15149-15151 (2001). Recent clinical analyses have also identified expression profiles within tumors that appear to be highly correlated with certain measures of clinical outcomes. One study has demonstrated that expression profiling of primary tumor biopsies yields prognostic “signatures” that rival or may even out-perform currently accepted standard measures of risk in cancer patients. See van de Vijver, et al., N ENGL J MED, 347: 1999-2009 (2002).

### SUMMARY OF THE INVENTION

[0005] The present invention provides methods, systems and equipment for prognosis or selection of treatment of solid tumors. Prognosis genes for a solid tumor can be identified by the present invention. The expression profiles of these genes in peripheral blood mononuclear cells (PBMCs) are correlated with clinical outcome of the solid tumor. These genes can be used as surrogate markers for predicting clinical outcome of the solid tumor in a patient of interest. These genes can also be used to identify or select treatments which have favorable prognoses for the patient of interest.

[0006] In one aspect, the present invention provides methods that are useful for the prognosis or selection of treatment of a solid tumor in a patient of interest. The methods include comparing an expression profile of one or more prognosis genes in a peripheral blood sample of the patient of interest to at least one reference expression profile of the prognosis genes. Each of the prognosis genes is differentially expressed in PBMCs of a first class of patients as compared to PBMCs of a second class of patients. Both classes of patients have a solid tumor, and each class of patients has a different clinical outcome. In many embodiments, the prognosis genes are substantially correlated with a class distinction between the two classes of patients.

[0007] Solid tumors amenable to the present invention include, but are not limited to, renal cell carcinoma (RCC), prostate cancer, head/neck cancer, and other tumors that do not have their origin in blood or lymph cells.

[0008] Clinical outcome can be measured by any clinical indicator. In one embodiment, clinical outcome is determined based on clinical classifications such as complete response, partial response, minor response, stable disease, progressive disease, non-progressive disease, or any combination thereof. In another embodiment, clinical outcome is measured by time to disease progression (TTP) or time to death (TTD). In still another embodiment, clinical outcome is prognosticated by using traditional risk assessment methods, such as Motzer risk classification for RCC. Other patient responses to a therapeutic treatment can also be used to measure clinical outcome. Examples of solid tumor treatments include, but are not limited to, drug therapy (e.g., CCI-779 therapy), chemotherapy, hormone therapy, radiotherapy, immunotherapy, surgery, gene therapy, anti-angiogenesis therapy, palliative therapy, or any combination thereof.

[0009] In many embodiments, the reference expression profile(s) includes an average expression profile of the prognosis genes in peripheral blood samples of reference patients. In many instances, the reference patients have the same solid tumor as the patient of interest, and the clinical outcome of the reference patients are either known or determinable.

[0010] The peripheral blood samples of the patient of interest and reference patients can be whole blood samples, or blood samples comprising enriched or purified PBMCs. Other types of blood samples can also be employed in the present invention. In one embodiment, all of the peripheral blood samples are baseline samples which are isolated from respective patients prior to a therapeutic treatment of the patients.

[0011] Any comparison method can be used to compare the expression profile of the patient of interest to the reference expression profile(s). In one embodiment, the comparison is based on the absolute or relative peripheral blood expression level of each prognosis gene. In another embodiment, the comparison is based on the ratios between expression levels of two or more prognosis genes. In yet another embodiment, the reference expression profiles include at least two distinct expression profiles, each being derived from a different class of reference patients. The comparison of the expression profile of the patient of interest to the reference expression profiles can be carried out by using methods including, but not limited to, hierarchical clustering, k-nearest-neighbors, or weighted-voting algorithm.

[0012] In still another embodiment, the methods of the present invention include selecting a treatment which has a favorable prognosis for the solid tumor in the patient of interest.

[0013] In another aspect, the present invention provides other methods useful for the prognosis or selection of treatment of a solid tumor in a patient of interest. These methods include comparing an expression profile of one or more prognosis genes in a peripheral blood sample of the patient of interest to at least one reference expression profile of the prognosis genes, where each of the prognosis genes is differentially expressed in PBMCs of a first class of patients as compared to PBMCs of a second class of patients. Each of the first and second classes is a subcluster formed by an unsupervised clustering analysis of gene expression profiles in PBMCs of patients who have the solid tumor. In one embodiment, the majority of the first class of patients has a first clinical outcome, and the majority of the second class of patients has a second clinical outcome.

[0014] In yet another aspect, the present invention further provides methods useful for the prognosis or selection of treatment of a solid tumor in a patient of interest. The methods include comparing an expression profile of one or more prognosis genes in a peripheral blood sample of the patient of interest to at least one reference expression profile of the prognosis genes, where the expression levels of each of the prognosis genes in PBMCs of patients having the solid tumor are correlated with clinical outcomes of these patients. The association between PBMC expression levels and clinical outcome can be determined by a statistical method (e.g., Spearman's rank correlation or Cox proportional hazard regression model) or a class-based correlation metric (e.g., neighborhood analysis). In one embodiment, the solid tumor is RCC, and clinical outcome is measured by patient response to a CCI-779 therapy. In another embodiment, the prognosis genes include at least one gene selected from Tables 6a, 6b, 6c, 6d, 9a, 9b, 9c, 9d, 10, 11, 12, 13, 16, 20, and 21.

[0015] The present invention also features systems useful for the prognosis or selection of treatment of a solid tumor in a patient of interest. The systems include (1) a memory or a storage medium comprising data that represent an expression profile of one or more prognosis genes in a peripheral blood sample of the patient of interest, (2) a storage medium comprising data that represent at least one reference expression profile of the prognosis genes, (3) a program capable of comparing the expression profile of the patient of interest to the reference expression profile, and (4) a processor capable of executing the program. The expression levels of the prognosis genes in PBMCs of patients having the solid tumor are correlated with clinical outcomes of the patients.

[0016] Moreover, the present invention features nucleic acid or protein arrays useful for the prognosis or selection of treatment of a solid tumor in a patient of interest. The nucleic acid or protein arrays include concentrated probes for solid tumor prognosis genes.

[0017] Other features, objects, and advantages of the present invention are apparent in the detailed description that follows. It should be understood, however, that the detailed description, while indicating embodiments of the present invention, is given by way of illustration only, not limitation. Various changes and modifications within the scope of the invention will become apparent to those skilled in the art from the detailed description.

### BRIEF DESCRIPTION OF THE DRAWINGS

[0018] The patent or application file contains at least one drawing executed in color. Copies of this patent or patent application publication with color drawing(s) will be provided by the Office upon request and payment of the necessary fee. The drawings are provided for illustration, not limitation.

[0019] FIG. 1A depicts expression profiles of class-correlated genes identified by nearest-neighbor analysis of patients with survival of less than 150 days versus patients with survival of greater than 550 days. The relative expression levels of the class-correlated genes (rows) are indicated for each patient (columns) according to the normalized expression level scale.

[0020] FIG. 1B shows the comparison of the signal to noise (S2N) similarity metric scores for class-correlated genes identified in FIG. 1A relative to S2N scores for the top 1%, 5%, and 50% of scores for class-correlated genes resulting from randomly permuted data sets.

[0021] FIG. 1C illustrates training set cross validation results for predictor gene sets of increasing size. Each predictor set was evaluated by cross validation to identify the predictor set with the highest accuracy for classification of the samples. In these analyses, a 58 gene predictor set (77% accuracy) was the optimal classifier.

[0022] FIG. 1D demonstrates cross validation results for each sample using the 58-gene predictor identified in FIG. 1C. A leave-one-out cross validation was performed and the prediction strengths were calculated for each sample in the analysis. For the purposes of illustration, confidence scores accompanying calls of “TTD>550 days” were assigned positive values, while prediction strengths accompanying calls of “TTD<150 days” were assigned negative values.

[0023] FIG. 2A shows the relative gene expression levels of a 42-gene classifier for the comparison of patients with intermediate versus poor Motzer risk classification.

[0024] FIG. 2B shows the relative gene expression levels for an 18-gene classifier identified in the comparison of patients with progressive disease versus any other clinical response.

[0025] FIG. 2C demonstrates the relative gene expression levels for a 6-gene classifier identified in the comparison of patients in the lower versus upper quartiles of time to disease progression.

[0026] FIG. 2D shows the relative gene expression levels for a 52-gene classifier identified in the comparison of patients in the lower versus upper quartiles of survival/time to death.

[0027] FIG. 2E depicts the relative expression levels for a 12-gene classifier identified in the comparison of patients with early (time to disease progression<106 days) versus all other times to disease progression (TTP≧106 days).

[0028] FIG. 3A illustrates the dendrogram of an unsupervised hierarchical clustering of baseline PBMC profiles in 45 RCC patients using all expressed genes present in at least one sample and possessing a frequency of greater than 10 ppm in at least one sample (5,424 genes total). PBMC expression profiles in the poor prognosis cluster are indicated by subcluster “A,” where 9 out of 12 patients with PBMC profiles in this subcluster exhibited survival of less than a year. PBMC expression profiles in the good prognosis cluster are indicated by subcluster “C,” where 10 out of 12 patients with PBMC profiles in this subcluster exhibited survival of greater than a year. The median survival for patients in subclusters A, B, C, and D is 281 days, 566 days, 573 days, and 502 days, respectively.

[0029] FIG. 3B shows baseline expression profiles of selected genes in RCC patients. The dendrogram of sample relatedness is indicated.

[0030] FIG. 4A illustrates the Kaplan-Meier survival curve for patients in the poor and good prognosis subclusters segregated on the basis of gene expression pattern.

[0031] FIG. 4B illustrates the Kaplan-Meier survival curve for patients in the poor and good prognosis subclusters segregated on the basis of Motzer risk assessment.

[0032] FIG. 5A demonstrates the result of supervised identification of a gene classifier for assigning class membership to patients in the good and poor prognosis subclusters. The relative expression levels of the most class-correlated gene (rows) are indicated for each patient (columns) according to the scale described in FIG. 1A.

[0033] FIG. 5B shows cross validation results for each sample using the gene classifier of FIG. 5A. A leave-one-out cross validation was performed and the confidence scores were calculated for each sample in the analysis. Similar to FIG. 1D, for the purposes of illustration, prediction strengths accompanying calls of “survival>1 year” were assigned positive values, while prediction strengths accompanying calls of “survival<1 year” were assigned negative values. Asterisks identify the false positives in this clinical assay designed to identify short survival times, and arrowheads indicate false negatives.

[0034] FIG. 6A shows the optimal gene classifier for year-long survival identified by nearest-neighbor analysis using a more stringent filter (at least 25% present calls, and an average frequency no less than 5 ppm). A GeneCluster gene selection approach identifies genes distinguishing patients with survival less than 365 days versus patients with survival greater than 365 days in the training set. The relative expression levels of the most class-correlated genes (rows) are indicated for each of the patients in the training set (columns) according to the scale described in FIG. 1A.

[0035] FIG. 6B evaluates prediction accuracy of gene classifiers of increasing size. Accuracy of class assignment for gene classifiers containing between 2 and 60 genes in steps of 2, and 60-200 genes in steps of 10, were evaluated by leave-one-out cross validation on the training set of samples. The smallest predictive model with the highest accuracy was selected (20 gene predictor, indicated by the arrow).

[0036] FIG. 6C demonstrates the result of evaluation of the optimal predictive model of FIG. 6B on an untested set of RCC PBMC profiles. A k-nearest-neighbors algorithm using the 20 gene classifier was used to assign class membership to the remaining 14 PBMC profiles, and the prediction strengths associated with the class assignments are presented for each sample in the analysis. For the purposes of illustration, confidence scores accompanying calls of “TTD<365 days” were assigned positive values, while confidence scores accompanying calls of “TTD>365 days” were assigned negative values. The overall accuracy of the gene classifier was 72%. By defining the clinical assay as the identification of favorable outcome, eight of eight patients with favorable outcome were correctly identified as having survival greater than one year (positive predictive value of 100%).

[0037] FIG. 7A illustrates the optimal gene classifier for greater than 106 day time to progression identified by nearest-neighbor analysis using a more stringent filter (at least 25% present calls, and an average frequency no less than 5 ppm). A GeneCluster gene selection approach identifies genes distinguishing patients with TTP less than 106 days versus patients with TTP greater than 106 days in the training set. The relative expression levels of the most class-correlated genes (rows) are indicated for each of the patients in the training set (columns) according to the scale of FIG. 1A.

[0038] FIG. 7B indicates prediction accuracy of gene classifiers of increasing size. Accuracy of class assignment for gene classifiers containing between 2 and 60 genes in steps of 2, and 60-200 genes in steps of 10, were evaluated by leave-one-out cross validation on the training set of samples. The smallest predictive model with the highest accuracy was selected (30 gene predictor, indicated by the arrow).

[0039] FIG. 7C shows the result of evaluation of the optimal predictive model of FIG. 7B on an untested set of RCC PBMC profiles. A k-nearest-neighbors algorithm using the 30 gene classifier was used to assign class membership to the remaining 14 PBMC profiles, and the prediction strengths associated with the class assignments are presented for each sample in the analysis. For the purposes of illustration, confidence scores accompanying calls of “TTP<106 days” were assigned positive values, while confidence scores accompanying calls of “TTD>106 days” were assigned negative values. The overall accuracy of the gene classifier was 85%. By defining the clinical assay as the identification of favorable outcome, eight of ten patients with favorable outcome were correctly identified as having TTP greater than one 106 days (positive predictive value of 80%) and three of three patients with poor outcome were correctly predicted to have TTP less than 106 days (negative predictive value 100%).

### DETAILED DESCRIPTION

[0040] The present invention provides methods that are useful for prognosis or selection of treatment of solid tumors. These methods employ prognosis genes that are differentially expressed in peripheral blood samples of solid tumor patients who have different clinical outcomes. In many embodiments, the peripheral blood expression profiles of these prognosis genes are correlated with patients' clinical outcome or prognosis under a statistical method or a correlation model. In many other embodiments, solid tumor patients can be divided into at least two classes based on patients' clinical outcome or prognosis, and the prognosis genes are substantially correlated with a class distinction between these two classes of patients under a neighborhood analysis.

[0041] The prognosis genes of the present invention can be used as surrogate markers for the prediction of clinical outcome of solid tumors. The prognosis genes of the present invention can also be used for the identification of optimal treatments of solid tumors. Different patients may have distinct clinical responses to a therapeutic treatment due to individual heterogeneity of the molecular mechanism of the disease. The identification of gene expression patterns that correlate with patient response allows clinicians to select treatments based on predicted patient responses and thereby avoid adverse reactions. This provides improved power and safety of clinical trials and increased benefit/risk ratio for drugs and other therapeutic treatments. Peripheral blood is a tissue that can be routinely obtained from patients in a minimally invasive manner. By determining the correlation between patient outcome and gene expression profiles in peripheral blood samples, the present invention represents a significant advance in clinical pharmacogenomics and solid tumor treatment.

[0042] Various aspects of the invention are described in further detail in the following subsections. The use of subsections is not meant to limit the invention. Each subsection may apply to any aspect of the invention. In this application, the use of “or” means “and/or” unless stated otherwise.

I. General Methods for Identifying Solid Tumor Prognosis Genes

[0043] Previous studies demonstrated that baseline expression profiles in PBMCs from solid tumor patients were significantly distinct from those of disease-free subjects. See U.S. Provisional Application Ser. No. 60/459,782, filed Apr. 3, 2003, U.S. Provisional Application Ser. No. 60/427,982, filed Nov. 21, 2002, and U.S. patent application Ser. No. 10/717,597, filed Nov. 21, 2003, all of which are incorporated herein by reference. Studies also showed that gene expression profiles in PBMCs were predictive of anti-cancer drug activity in vivo. See U.S. Provisional Application Ser. No. 60/446,133, filed Feb. 11, 2003, and U.S. patent application Ser. No. 10/775,169, filed Feb. 11, 2004, both of which are incorporated herein by reference. In addition, studies indicated that PBMC baseline expression profiles were correlated with clinical outcomes of RCC or other non-blood diseases. See U.S. Provisional Application Ser. No. 60/466,067, filed Apr. 29, 2003, which is incorporated herein by reference.

[0044] The present invention further evaluates the correlation between peripheral blood gene expression and clinical outcome of solid tumors. Prognosis genes for a variety of solid tumors can be identified by the present invention. These genes are differentially expressed in peripheral blood samples of solid tumor patients who have different clinical outcomes. In many embodiments, the peripheral blood expression profiles of the prognosis genes of the present invention are correlated with patient outcome under statistical methods or correlation models. Exemplary statistical methods and correlation models include, but are not limited to, Spearman's rank correlation, Cox proportional hazard regression model, ANOVA/t test, nearest-neighbor analysis, and other rank tests, survival models or class-based correlation metrics.

[0045] Solid tumors amenable to the present invention include, without limitation, RCC, prostate cancer, head/neck cancer, ovarian cancer, testicular cancer, brain tumor, breast cancer, lung cancer, colon cancer, pancreas cancer, stomach cancer, bladder cancer, skin cancer, cervical cancer, uterine cancer, and liver cancer. In one embodiment, the solid tumors do not have their origin in blood or lymph (hematopoetic) cells. Solid tumors can be measured or evaluated using direct or indirect visualization procedures. Suitable visualization methods include, but are not limited to, scans (such as X-rays, computerized axial tomography (CT), magnetic resonance imaging (MRI), positron emission tomography (PET), or ultrasonography (U/S)), biopsy, palpation, endoscopy, laparoscopy, and other suitable means as appreciated by those skilled in the art.

[0046] Clinical outcome of solid tumors can be assessed by numerous criteria. In many embodiments, clinical outcome is assessed based on patients' response to a therapeutic treatment. Examples of clinical outcome measures include, without limitation, complete response, partial response, minor response, stable disease, progressive disease, time to disease progression (TTP), time to death (TTD or Survival), or any combination thereof. Examples of solid tumor treatments include, without limitation, drug therapy (e.g., CCI-779 therapy), chemotherapy, hormone therapy, radiotherapy, immunotherapy, surgery, gene therapy, anti-angiogenesis therapy, palliative therapy, or any combination thereof, or other conventional or non-conventional therapies.

[0047] In one embodiment, clinical outcome is evaluated based on the WHO Reporting Criteria, such as those described in WHO Publication, No. 48 (World Health Organization, Geneva, Switzerland, 1979). Under the Criteria, uni- or bidimensionally measurable lesions are measured at each assessment. When multiple lesions are present in any organ, up to 6 representative lesions can be selected, if available.

[0048] In another embodiment, clinical outcome is determined based on a classification system composed of clinical categories such as complete response, partial response, minor response, stable disease, progressive disease, or any combination thereof. “Complete response” (CR) means complete disappearance of all measurable and evaluable disease, determined by two observations not less than 4 weeks apart. There is no new lesion and no disease related symptom. “Partial response” (PR) in reference to bidimensionally measurable disease means decrease by at least about 50% of the sum of the products of the largest perpendicular diameters of all measurable lesions as determined by 2 observations not less than 4 weeks apart. “Partial response” in reference to unidimensionally measurable disease means decrease by at least about 50% in the sum of the largest diameters of all lesions as determined by 2 observations not less than 4 weeks apart. It is not necessary for all lesions to have regressed to qualify for partial response, but no lesion should have progressed and no new lesion should appear. The assessment should be objective. “Minor response” in reference to bidimensionally measurable disease means about 25% or greater decrease but less than about 50% decrease in the sum of the products of the largest perpendicular diameters of all measurable lesions. “Minor response” in reference to unidimensionally measurable disease means decrease by at least about 25% but less than about 50% in the sum of the largest diameters of all lesions.

[0049] “Stable disease” (SD) in reference to bidimensionally measurable disease means less than about 25% decrease or less than about 25% increase in the sum of the products of the largest perpendicular diameters of all measurable lesions. “Stable disease” in reference to unidimensionally measurable disease means less than about 25% decrease or less than about 25% increase in the sum of the diameters of all lesions. No new lesions should appear. “Progressive disease” (PD) refers to a greater than or equal to about a 25% increase in the size of at least one bidimensionally (product of the largest perpendicular diameters) or unidimensionally measurable lesion or appearance of a new lesion. The occurrence of pleural effusion or ascites is also considered as progressive disease if this is substantiated by positive cytology. Pathological fracture or collapse of bone is not necessarily evidence of disease progression.

[0050] In yet another embodiment, overall subject tumor response for uni- and bidimensionally measurable disease is determined according to Table 1.

TABLE 1
Overall Subject Tumor Response

| Response in | Response in | |
|---|---|---|
| Bidimensionally | Unidimensionally | Overall Subject |
| Measurable Disease | Measurable Disease | Tumor Response |
| PD | Any | PD |
| Any | PD | PD |
| SD | SD or PR | SD |
| SD | CR | PR |
| PR | SD or PR or CR | PR |
| CR | SD or PR | PR |
| CR | CR | CR |

[0051] Overall subject tumor response for non-measurable disease can be assessed, for instance, in the following situations:
[0052] a) Overall complete response: if non-measurable disease is present, it should disappear completely. Otherwise, the subject cannot be considered as an “overall complete responder.”
[0053] b) Overall progression: in case of a significant increase in the size of non-measurable disease or the appearance of a new lesion, the overall response will be progression.

[0054] Clinical outcome can also be assessed by other criteria. For instance, clinical outcome can be measured by TTP or TTD. TTP refers to the interval from the date of initiation of a therapeutic treatment until the first day of measurement of progressive disease. TTD refers to the interval from the date of initiation of a therapeutic treatment to the time of death, or censored at the last date known alive.

[0055] Moreover, clinical outcome can include prognoses based on traditional clinical risk assessment methods. In many cases, these risk assessment methods employ numerous prognostic factors to classify patients into different prognosis or risk groups. One example is Motzer risk assessment for RCC, as described in Motzer, et al., J CLIN ONCOL, 17: 2530-2540 (1999). Patients in different risk groups may have different responses to a therapy.

[0056] Peripheral blood samples employed in the present invention can be isolated from solid tumor patients at any disease or treatment stage. In one embodiment, the peripheral blood samples are isolated from solid tumor patients prior to a therapeutic treatment. These blood samples are “baseline samples” with respect to the therapeutic treatment.

[0057] A variety of peripheral blood samples can be used in the present invention. In one embodiment, the peripheral blood samples are whole blood samples. In another embodiment, the peripheral blood samples comprise enriched PBMCs. By “enriched,” it means that the percentage of PBMCs in the sample is higher than that in whole blood. In some cases, the PBMC percentage in an enriched sample is at least 1, 2, 3, 4, 5 or more times higher than that in whole blood. In some other cases, the PBMC percentage in an enriched sample is at least 90%, 95%, 98%, 99%, 99.5%, or more. Blood samples containing enriched PBMCs can be prepared using any method known in the art, such as Ficoll gradients centrifugation or CPTs (cell purification tubes).

[0058] The relationship between peripheral blood gene expression profiles and patient outcome can be evaluated using global gene expression analyses. Methods suitable for this purpose include, but are not limited to, nucleic acid arrays (such as cDNA or oligonucleotide arrays), 2-dimensional SDS-polyacrylamide gel electrophoresis/mass spectrometry, and other high throughput nucleotide or polypeptide detection techniques.

[0059] Nucleic acid arrays allow for quantitative detection of the expression levels of a large number of genes at one time. Examples of nucleic acid arrays include, but are not limited to, Genechip® microarrays from Affymetrix (Santa Clara, Calif.), cDNA microarrays from Agilent Technologies (Palo Alto, Calif.), and bead arrays described in U.S. Pat. Nos. 6,288,220 and 6,391,562.

[0060] The polynucleotides to be hybridized to nucleic acid arrays can be labeled with one or more labeling moieties to allow for detection of hybridized polynucleotide complexes. The labeling moieties can include compositions that are detectable by spectroscopic, photochemical, biochemical, bioelectronic, immunochemical, electrical, optical or chemical means. Exemplary labeling moieties include radioisotopes, chemiluminescent compounds, labeled binding proteins, heavy metal atoms, spectroscopic markers such as fluorescent markers and dyes, magnetic labels, linked enzymes, mass spectrometry tags, spin labels, electron transfer donors and acceptors, and the like. Unlabeled polynucleotides can also be employed. The polynucleotides can be DNA, RNA, or a modified form thereof.

[0061] Hybridization reactions can be performed in absolute or differential hybridization formats. In the absolute hybridization format, polynucleotides derived from one sample, such as PBMCs from a patient in a selected outcome class, are hybridized to the probes on a nucleic acid array. Signals detected after the formation of hybridization complexes correlate to the polynucleotide levels in the sample. In the differential hybridization format, polynucleotides derived from two biological samples, such as one from a patient in a first outcome class and the other from a patient in a second outcome class, are labeled with different labeling moieties. A mixture of these differently labeled polynucleotides is added to a nucleic acid array. The nucleic acid array is then examined under conditions in which the emissions from the two different labels are individually detectable. In one embodiment, the fluorophores Cy3 and Cy5 (Amersham Pharmacia Biotech, Piscataway N.J.) are used as the labeling moieties for the differential hybridization format.

[0062] Signals gathered from nucleic acid arrays can be analyzed using commercially available software, such as those provide by Affymetrix or Agilent Technologies. Controls, such as for scan sensitivity, probe labeling and cDNA/cRNA quantitation, can be included in the hybridization experiments. In many embodiments, the nucleic acid array expression signals are scaled or normalized before being subject to further analysis. For instance, the expression signals for each gene can be normalized to take into account variations in hybridization intensities when more than one array is used under similar test conditions. Signals for individual polynucleotide complex hybridization can also be normalized using the intensities derived from internal normalization controls contained on each array. In addition, genes with relatively consistent expression levels across the samples can be used to normalize the expression levels of other genes. In one embodiment, the expression levels of the genes are normalized across the samples such that the mean is zero and the standard deviation is one. In another embodiment, the expression data detected by nucleic acid arrays are subject to a variation filter which excludes genes showing minimal or insignificant variation across all samples.

[0063] The gene expression data collected from nucleic acid arrays can be correlated with clinical outcome using a variety of methods. Suitable correlation methods include, but are not limited to, statistical methods (such as Spearman's rank correlation, Cox proportional hazard regression model, ANOVA/t test, or other suitable rank tests or survival models) and class-based correlation metrics (such as nearest-neighbor analysis).

[0064] In one aspect, class-based correlation metrics are used to identify the correlation between peripheral blood gene expression and clinical outcome. In one embodiment, patients with a specified solid tumor are divided into at least two classes based on their clinical stratifications. The correlation between peripheral blood gene expression (e.g., in PBMCs) and clinical outcome is analyzed by a supervised cluster algorithm. Exemplary supervised clustering algorithms include, but are not limited to, nearest-neighbor analysis, support vector machines, and SPLASH. Under the supervised cluster algorithms, clinical outcome of each class of patients is either known or determinable. Genes that are differentially expressed in peripheral blood cells (e.g., PBMCs) of one class of patients relative to the other class of patients can be identified. In many cases, the genes thus identified are substantially correlated with a class distinction between the two classes of patients. The genes thus identified can be used as surrogate markers for predicting clinical outcome of the solid tumor in a patient of interest.

[0065] In another embodiment, patients with a specified solid tumor can be divided into at least two classes based on gene expression profiles in their peripheral blood cells. Methods suitable for this purpose include unsupervised clustering algorithms, such as self-organized maps (SOMs), k-means, principal component analysis, and hierarchical clustering. A substantial number (e.g., at least 50%, 60%, 70%, 80%, 90%, or more) of patients in one class may have a first clinical outcome, and a substantial number of patients in the other class may have a second clinical outcome. Genes that are differentially expressed in the peripheral blood cells of one class of patients relative to the other class of patients can be identified. These genes are prognosis genes for the solid tumor.

[0066] In yet another embodiment, patients with a specified solid tumor can be divided into three or more classes based on their clinical stratifications or peripheral blood gene expression profiles. Multi-class correlation metrics can be employed to identify genes that are differentially expressed in these classes. Exemplary multi-class correlation metrics include, but are not limited to, GeneCluster 2 software provided by MIT Center for Genome Research at Whitehead Institute (Cambridge, Mass.).

[0067] In a further embodiment, nearest-neighbor analysis (also known as neighborhood analysis) is used to analyze gene expression data gathered from nucleic acid arrays. The algorithm for neighborhood analysis is described in Golub, et al., SCIENCE, 286: 531-537 (1999), Slonim, et al., PROCS. OF THE FOURTH ANNUAL INTERNATIONAL CONFERENCE ON COMPUTATIONAL MOLECULAR BIOLOGY, Tokyo, Japan, April 8-11, p263-272 (2000), and U.S. Pat. No. 6,647,341, all of which are incorporated herein by reference. Under one form of the neighborhood analysis, the expression profile of each gene can be represented by an expression vector g=(e₁, e₂, e₃, . . . , eₙ), where eᵢ corresponds to the expression level of gene “g” in the ith sample. A class distinction can be represented by an idealized expression pattern c=(c₁, c₂, c₃, . . . , cₙ), where cᵢ=1 or −1, depending on whether the ith sample is isolated from class 0 or class 1. Class 0 may include patients having a first clinical outcome, and class 1 includes patients having a second clinical outcome. Other forms of class distinction can also be employed. Typically, a class distinction represents an idealized expression pattern, where the expression level of a gene is uniformly high for samples in one class and uniformly low for samples in the other class.

[0068] The correlation between gene “g” and the class distinction can be measured by a signal-to-noise score:
P(g,c)=[μ₁(g)−μ₂(g)]/[(σ₁(g)+σ₂(g)]
where μ₁(g) and μ₂(g) represent the means of the log-transformed expression levels of gene “g” in class 0 and class 1, respectively, and σ₁(g) and σ₂(g) represent the standard deviation of the log-transformed expression levels of gene “g” in class 0 and class 1, respectively. A higher absolute value of a signal-to-noise score indicates that the gene is more highly expressed in one class than in the other. In one embodiment, the samples used to derive the signal-to-noise score comprise enriched or purified PBMCs. Thus, the signal-to-noise score P(g,c) can represent a correlation between the class distinction and the expression level of gene “g” in PBMCs.

[0069] The correlation between gene “g” and the class distinction can also be measured by other methods, such as by the Pearson correlation coefficient or the Euclidean distance, as appreciated by those skilled in the art.

[0070] The significance of the correlation between peripheral blood gene expression patterns and the class distinction can be evaluated using a random permutation test. An unusually high density of genes within the neighborhoods of the class distinction, as compared to random patterns, suggests that many genes have expression patterns that are significantly correlated with the class distinction. The correlation between genes and the class distinction can be diagrammatically viewed through a neighborhood analysis plot, in which the y-axis represents the number of genes within various neighborhoods around the class distinction and the x-axis indicates the size of the neighborhood (i.e., P(g,c)). Curves showing different significance levels for the number of genes within corresponding neighborhoods of randomly permuted class distinctions can also be included in the plot.

[0071] In one embodiment, the prognosis genes of the present invention are substantially correlated with a class distinction between two outcome classes. In one example, the prognosis genes are above the median significance level in the neighborhood analysis plot. This means that the correlation measure P(g,c) for each prognosis gene is such that the number of genes within the neighborhood of the class distinction having the size of P(g,c) is greater than the number of genes within the corresponding neighborhoods of randomly permuted class distinctions at the median significance level. In another example, the employed prognosis genes are above the 10%, 5%, 2%, or 1% significance level. As used herein, x % significance level means that x % of random neighborhoods contain as many genes as the real neighborhood around the class distinction.

[0072] Class predictors can be constructed using the prognosis genes of the present invention. These class predictors are useful for assigning class membership to solid tumor patients. In one embodiment, the prognosis genes in a class predictor are limited to those shown to be significantly correlated with the class distinction by the permutation test, such as those at above the 1%, 2%, 5%, 10%, 20%, 30%, 40%, or 50% significance level. In another embodiment, the expression level of each prognosis gene in a class predictor is substantially higher or substantially lower in PBMCs of one class of patients than in the other class of patients. In still another embodiment, the prognosis genes in a class predictor have top absolute values of P(g,c). In yet another embodiment, the p-value under a Student's t-test (e.g., two-tailed distribution, two sample unequal variance) for each differentially expressed prognosis gene is no more than 0.05, 0.01, 0.005, 0.001, 0.0005, 0.0001, or less.

[0073] In a further embodiment, the class predictors of the present invention have at least 50% accuracy for leave-one-out cross validation. In another embodiment, the class predictors of the present invention have at least 60%, 70%, 80%, 90%, 95%, or 99% accuracy for leave-one-out cross validation.

[0074] In another aspect, the correlation between peripheral blood gene expression profiles and clinical outcome can be evaluated by statistical methods. Clinical outcome suitable for these analyses includes, but are not limited to, TTP, TTD, and other time-associated clinical indicators. One exemplary statistical method employs Spearman's rank correlation coefficient, which has the formula of:
rₛ=SS_{UV}/(SS_{UU}SS_{VV})^{1/2}
where SS_{UV}=ΣUᵢVᵢ−[(ΣUᵢ)(ΣVᵢ)]/n, SS_{UU}=ΣVᵢ²−[(ΣVᵢ)²]/n, and SS_{VV}=ΣUᵢ²−[(ΣUᵢ)²]/n. Uᵢ is the expression level ranking of a gene of interest, Vᵢ is the ranking of the clinical outcome, and n represents the number of patients. The shortcut formula for Spearman's rank correlation coefficient is rₛ=1−(6×Σdᵢ²)/[n(n²−1)], where dᵢ=Uᵢ−Vᵢ. The Spearman's rank correlation is similar to the Pearson's correlation except that it is based on ranks and is thus more suitable for data that is not normally distributed. See, for example, Snedecor and Cochran, STATISTICAL METHODS, Eight edition, Iowa State University Press, Ames, Iowa, 503 pp, 1989. The correlation coefficient is tested to assess whether it differs significantly from a value of 0 (i.e., no correlation).

[0075] The correlation coefficients for each prognosis gene identified by the Spearman's rank correlation can be either positive or negative, provided that the correlation is statistically significant. In many embodiments, the p-value for each prognosis gene thus identified is no more than 0.05, 0.01, 0.005, 0.001, 0.0005, 0.0001, or less. In many other embodiments, the Spearman correlation coefficients of the prognosis genes thus identified have absolute values of at least 0.3, 0.4, 0.5, 0.6, 0.7, 0.8, 0.9, or more.

[0076] Another exemplary statistical method is Cox proportional hazard regression model, which has the formula of:
log hᵢ(t)=α(t)+βⱼxᵢⱼ
where hᵢ(t) is the hazard function that assesses the instantaneous risk of demise at time t, conditional on survival to that time, α(t) is the baseline hazard function, and xᵢⱼ is a covariate which may represent, for example, the expression level of prognosis gene j in a peripheral blood sample. See Cox, JOURNAL OF THE ROYAL STATISTICAL SOCIETY, SERIES B 34: 187 (1972). Additional covariates, such as interactions between covariates, can also be included in Cox proportional hazard model. As used herein, the terms “demise” or “survival” are not limited to real death or survival. Instead, these terms should be interpreted broadly to cover any type of time-associated events, such as TTP. In many cases, the p-values for the correlation under Cox proportional hazard regression model are no more than 0.05, 0.01, 0.005, 0.001, 0.0005, 0.0001, or less. The p-values for the prognosis genes identified under Cox proportional hazard regression model can be determined by the likelihood ratio test, Wald test, the Score test, or the log-rank test. In one embodiment, the hazard ratios for the prognosis genes thus identified are at least 1.5, 2, 3, 4, 5, or more. In another embodiment, the hazard ratios for the prognosis genes thus identified are no more than 0.67, 0.5, 0.33, 0.25, 0.2, or less.

[0077] Other rank tests, scores, measurements, or models can also be employed to identify prognosis genes whose expression profiles in peripheral blood samples are correlated with clinical outcome of solid tumors. These tests, scores, measurements, or models can be either parametric or nonparametric, and the regression may be either linear or non-linear. Many statistical methods and correlation/regression models can be carried out using commercially available programs.

[0078] Other methods capable of identifying genes differentially expressed in peripheral blood cells of one class of patients relative to another class of patients can be used. These methods include, but are not limited, RT-PCR, Northern Blot, in situ hybridization, and immunoassays such as ELISA, RIA or Western Blot. The expression levels of genes thus identified can be substantially higher or substantially lower in peripheral blood cells (e.g., PBMCs) of one class of patients than in another class of patients. In some cases, the average peripheral blood expression level of a prognosis gene in PBMCs of one class of patients can be at least 2, 3, 4, 5, 10, 20, or more folds higher or lower than that in another class of patients. In many embodiments, the p-value of an appropriate statistical significance test (e.g., Student's t-test) for the difference between average expression levels is no more than 0.05, 0.01, 0.005, 0.001, 0.0005, 0.0001, or less.

[0079] Prognosis genes for other non-blood diseases can be similarly identified according to the present invention, provided that the correlation between peripheral blood gene expression and clinical outcome of these diseases is statistically significant. The peripheral blood expression patterns of the prognosis genes thus identified are indicative of clinical outcome of these diseases.

II. Identification of RCC Prognosis Genes

[0080] RCC comprises the majority of all cases of kidney cancer and is one of the ten most common cancers in industrialized countries, comprising 2% of adult malignancies and 2% of cancer-related deaths. Several prognostic factors and scoring indices have been developed for patients diagnosed with RCC, typified by multivariate assessments of several key indicators. As an example, one prognostic scoring system employs the five prognostic factors proposed by Motzer, et al., supra—namely, Karnofsky performance status, serum lactate dehydrognease, hemoglobin, serum calcium, and presence/absence of prior nephrectomy.

[0081] The present invention identifies numerous RCC prognosis genes whose peripheral blood expression profiles correlate with patient outcome in CCI-779 therapy. In a clinical trial, the cytostatic mTOR inhibitor CCI-779 was evaluated in RCC patients for its anti-cancer effect. PBMCs collected prior to CCI-779 therapy were analyzed on oligonucleotide arrays in order to determine whether mononuclear cells from RCC patients possessed transcriptional patterns predictive of patient outcome. The results of both supervised and unsupervised analyses indicated that transcriptional profiles in the surrogate tissue of PBMCs from RCC patients prior to treatment with CCI-779 are significantly correlated with patient outcome.

[0082] PBMCs were isolated prior to CCI-779 therapy from peripheral blood of 45 advanced RCC patients (18 females and 27 males) participating in a phase 2 clinical trial study. Written informed consent for the pharmacogenomic portion of the clinical study was received for all individuals and the project was approved by the local Institutional Review Boards at the participating clinical sites. RCC tumors of patients were classified at the clinical sites as conventional (clear cell) carcinomas (24), granular (1), papillary (3), or mixed subtypes (7). Ten tumors were classified as unknown. RCC patients were primarily of Caucasian descent (44 Caucasian, 1 African-American) and had a mean age of 58 years (range of 40-78 years). Inclusion criteria included patients with histologically confirmed advanced renal cancer who had received prior therapy for advanced disease, or who had not received prior therapy for advanced disease but were not appropriate candidates to receive high doses of IL-2 therapy. Other inclusion criteria included patients with (1) bi-dimensionally measurable evidence of disease; (2) evidence of progression of the disease prior to study entry; (3) an age of 18 years or older; (4) ANC>1500 μL, platelet>100,000 μL and hemoglobin>8.5 g/dL; (5) adequate renal function evidenced by serum creatinine<1.5×upper limit of normal; (6) adequate hepatic function evidenced by biliruubin<1.5×upper limit of normal and AST<3×upper limit of normal (or AST<5×upper limit of normal if liver metastases were present); (7) serum cholesterol<350 mg/dL, triglycerides<300 mg/dL; (8) ECOG performance status 0-1; and (9) a life expectancy of at least 12 weeks. Exclusion criteria included patients who had (1) the presence of known CNS metastases; (2) surgery or radiotherapy within 3 weeks of start of dosing; (3) chemotherapy or biologic therapy for RCC within 4 weeks of start of dosing; (4) treatment with a prior investigational agent within 4 weeks of start of dosing; (5) immunocompromised status including those known to be HIV positive, or receiving concurrent use of immunosuppressive agents including corticosteroids; (6) active infections; (7) required treatment with anticonvulsant therapy; (8) presence of unstable angina/myocardial infarction within 6 months/ongoing treatment of life-threatening arrythmia; (9) history of prior malignancy in past 3 years; (10) hypersensitivity to macrolide antibiotics; and (11) pregnancy or any other illness which would substantially increase the risk associated with participation in the study.

[0083] These advanced RCC patients were treated with one of 3 doses of CCI-779 (25 mg, 75 mg, or 250 mg) administered as a 30 minute intravenous (IV) infusion once weekly for the duration of the trial. CCI-779 is an ester analog of the immunosuppressant rapamycin and as such is a potent, selective inhibitor of the mammalian target of rapamycin. The mammalian target of rapamycin (mTOR) activates multiple signaling pathways, including phosphorylation of p70s6kinase, which results in increased translation of 5′ TOP mRNAs encoding proteins involved in translation and entry into the G1 phase of the cell cycle. By virtue of its inhibitory effects on mTOR and cell cycle control, CCI-779 functions as a cytostatic and immunosuppressive agent.

[0084] Clinical staging and size of residual, recurrent or metastatic disease were recorded prior to treatment and every 8 weeks following initiation of CCI-779 therapy. Tumor size was measured in centimeters and reported as the product of the longest diameter and its perpendicular. Measurable disease was defined as any bidimensionally measurable lesion where both diameters>1.0 cm by CT-scan, X-ray or palpation. Tumor response was determined by the sum of the products of all measurable lesions. The categories for assignment of clinical response were given by the clinical protocol definitions (i.e., progressive disease, stable disease, minor response, partial response, and complete response). The category for assignment of prognosis under the Motzer risk assessment (favorable vs intermediate vs poor) was also used. Among the 45 RCC patients, 6 were assigned a favorable risk assessment, 17 patients possessed an intermediate risk score, and 22 patients received a poor prognosis classification. In addition to the categorical classifications, overall survival and time to disease progression were also monitored as clinical endpoints.

[0085] HgU95A genechips (manufactured by Affymetrix) were used to detect baseline expression profiles in PBMCs of the RCC patients prior to the CCI-779 therapy. Each HgU95A genechip comprises over 12,600 human sequences according to the Affymetrix Expression Analysis Technical Manual. RNA transcripts were first isolated from PBMCs of the RCC patients. cRNA was then prepared and hybridized to the genechips according to protocols described in the Affymetrix's Expression Analysis Technical Manual. Hybridization signals were collected, scaled, and normalized before being subject to further analysis. In one example, the log of the expression level for each gene was normalized across the samples such that the mean is zero and the standard deviation is one.

[0086] The expression profiling analysis revealed that of the 12,626 genes on the HgU95A chip, 5,424 genes met the initial criteria (i.e., at least 1 present call across the data set and at least 1 frequency≧10 ppm). On average, 4,023 transcripts were detected as “present” in any given RCC PBMC profile.

[0087] In an initial assessment of the expression data in baseline PBMCs, pairwise correlations were calculated to assess the association between gene expression levels measured by HgU95A Affymetrix microarrays and continuous measures of clinical outcome. Correlations were run using expression levels from each of 5,424 qualifiers that passed the initial criteria. Correlations were run for two clinical measures (TTD and TTP) and for one measure of baseline expression level (log₂-transformed scaled frequency in units of ppm).

[0088] In one example, Spearman's rank correlations were computed. The p-value for the hypothesis that the correlation was equal to 0 was calculated for each pairwise correlation. For each comparison between clinical outcome and gene expression, the number of tests that were nominally significant out of the 5,424 tests performed was calculated for five Type I (i.e. false-positive) error levels. To adjust for the fact that 5,424 non-independent tests were performed, a permutation-based approach was employed to evaluate how often the observed number of significance tests would be found under the null hypothesis of no correlation.

[0089] The overall results for Spearman's rank correlation comparisons of clinical outcome with baseline expression levels (log₂-transformed scaled frequency) are summarized in Tables 2a and 2b. Each table shows alpha confidence levels (“α”), the observed numbers of transcripts that have nominally significant Spearman correlations with the clinical outcome of interest (“Observed Number”), and the percentage of permutations for which number of nominally significant Spearman correlations equals or exceeds the number observed (“%-age of Permutations”). Evidence for association between clinical outcome and baseline gene expression in PBMCs was significant for both TTD and TTP.

TABLE 2a
Spearman Correlations of Clinical Outcome with Baseline
Expression Levels in PBMCs of RCC Patients in CCI-779
Therapy (n = 45 patients)
Time to Disease Progression

| | Observed Number of | %-age of Permutations for |
|---|---|---|
| | Nominally | which Number of Nominally |
| | Significant | Significant Spearman |
| | Spearman | Correlations equals or |
| α | Correlations* | exceeds observed number |
| 0.1 | 1127 | 5.3% (53/1000) |
| 0.05 | 749 | 3.8% (38/1000) |
| 0.01 | 248 | 3.1% (31/1000) |
| 0.005 | 159 | 2.6% (26/1000) |
| 0.001 | 51 | 2.5% (25/1000) |

*based on 5,424 genes (filtered by at least one Present and at least one frequency ≧ 10 ppm)

[0090] TABLE 2b
Spearman Correlations of Clinical Outcome with
Baseline Expression Levels in PBMCs of RCC Patients
in CCI-779 Therapy (n = 45 patients)
Time to Death

| | Observed Number of | %-age of Permutations for which Number |
|---|---|---|
| | Nominally | of Nominally Significant Spearman |
| | Significant Spearman | Correlations equals or exceeds observed |
| α | Correlations* | number |
| 0.1 | 1604 | 0.1% (1/1000) |
| 0.05 | 1117 | 0.1% (1/1000) |
| 0.01 | 436 | 0.1% (1/1000) |
| 0.005 | 289 | 0.1% (1/1000) |
| 0.001 | 105 | 0.3% (3/1000) |

*based on 5,424 genes (filtered by at least one Present and at least one frequency ≧ 10 ppm)

[0091] Table 3 lists the results of the Spearman's rank correlation analyses for all of the 5,424 genes that met the initial criteria. Each gene has a corresponding qualifier on the HgU95A genechip, and each qualifier represents multiple oligonucleotide probes that are stably attached to discrete regions on the HgU95A genechip. According to the design, RNA transcripts of a gene, or the complements thereof, are expected to hybridize under nucleic acid array hybridization conditions to the corresponding qualifier on the HgU95A genechip. As used herein, a polynucleotide can hybridize to a qualifier if the polynucleotide, or the complement thereof, can hybridize to at least one oligonucleotide probe of the qualifier. In many embodiments, the polynucleotide or the complement thereof can hybridize to at least 50%, 60%, 70%, 80%, 90% or 100% of all of the oligonucleotide probes of the qualifier.

[0092] Each gene or qualifier in Table 3 may have a corresponding SEQ ID NO or Entrez accession number from which the oligonucleotide probes of the qualifier can be derived. In many instances, a polypeptide capable of hybridizing to a qualifier can also hybridize to the sequence of the corresponding SEQ ID NO or Entrez accession number, or the complement thereof. The sequence of each Entrez accession number can be obtained from the Entrez nucleotide database at the National Center of Biotechnology Information (NCBI). The Entrez nucleotide database collects sequences from several sources, including GenBank, RefSeq, and PDB. Each SEQ ID NO may be derived from the sequence of the corresponding Entrez accession number. Table 4 shows the Entrez and Unigene accession numbers for all of the qualifiers on the HgU95A genechip that met the initial criteria.

[0093] Any ambiguous residue (“n”) in a SEQ ID NO can be determined by a variety of methods. In one embodiment, the ambiguous residues in a SEQ ID NO are determined by aligning the SEQ ID NO to a corresponding genomic sequence obtained from a human genome sequence database. In another embodiment, the ambiguous residues in a SEQ ID NO are determined based on the sequence of the corresponding Entrez accession number. In yet another embodiment, the ambiguous residues are determined by re-sequencing the SEQ ID NO.

[0094] Genes associated with each qualifier on the HgU95A genechip can be identified based on the annotations provided by Affymetrix. All of the genes thus identified are listed in Tables 3 and 5. These genes can also be identified based on their corresponding Entrez or Unigene accession numbers. In addition, these genes can be determined by BLAST searching their corresponding SEQ ID NOs, or the unambiguous segments thereof, against a human genome sequence database. Suitable human genome sequence databases for this purpose include, but are not limited to, the NCBI human genome database. The NCBI provides BLAST programs, such as “blastn,” for searching its sequence databases.

[0095] In one embodiment, the BLAST search of the NCBI human genome database is carried out by using an unambiguous segment (e.g., the longest unambiguous segment) of a SEQ ID NO. Gene(s) that aligns to the unambiguous segment with significant sequence identity can be identified. In many cases, the identified gene(s) has at least 95%, 96%, 97%, 98%, 99%, or more sequence identity with the unambiguous segment.

[0096] On the basis of Spearman's rank correlation, prognosis genes that are highly correlated with TTP or TTD were identified. Table 6a lists examples of genes whose expression levels are positively correlated with TTP. Table 6b depicts examples of genes whose expression levels are negatively correlated with TTP. Table 6c provides examples of genes whose expression levels are positively correlated with TTD. Table 6d shows examples of genes whose expression levels are negatively correlated with TTD. Correlation coefficients, p-values, and the corresponding qualifiers are also indicated for each gene in Tables 6a, 6b, 6c, and 6d.

TABLE 6a
Prognosis Genes Positively Correlated with TTP

| HgU95A Qualifier | Correlation Coefficient | P-Value | Gene Name |
|---|---|---|---|
| 38518_at | 0.6019 | 0.0000 | SCML2 |
| 37343_at | 0.5932 | 0.0000 | ITPR3 |
| 41174_at | 0.5925 | 0.0000 | RANBP2L1 |
| 41669_at | 0.5908 | 0.0000 | KIAA0191 |
| 40584_at | 0.5602 | 0.0001 | NUP88 |
| 41767_r_at | 0.5591 | 0.0001 | KIAA0855 |
| 38256_s_at | 0.5551 | 0.0001 | DKFZP564O092 |
| 39829_at | 0.5508 | 0.0001 | ARL7 |
| 35802_at | 0.5475 | 0.0001 | KIAA1014 |
| 32169_at | 0.5407 | 0.0001 | KIAA0875 |
| 41562_at | 0.5272 | 0.0002 | BMI1 |
| 35753_at | 0.5226 | 0.0002 | PRP8 |
| 40905_s_at | 0.5223 | 0.0002 | DKFZP566J153 |
| 41547_at | 0.5189 | 0.0003 | BUB3 |
| 37416_at | 0.5177 | 0.0003 | ARHH |
| 37585_at | 0.5157 | 0.0003 | SNRPA1 |
| 34716_at | 0.5143 | 0.0003 | TASR |
| 32183_at | 0.5034 | 0.0004 | SFRS11 |
| 39426_at | 0.4977 | 0.0005 | CA150 |
| 35815_at | 0.4975 | 0.0005 | HYPB |
| 36403_s_at | 0.4972 | 0.0005 | UNK_AI434146 |
| 40828_at | 0.4963 | 0.0005 | P85SPR |
| 35364_at | 0.4947 | 0.0006 | APPBP1 |
| 33861_at | 0.4931 | 0.0006 | UNK_AI123426 |
| 36474_at | 0.4927 | 0.0006 | KIAA0776 |
| 35764_at | 0.4908 | 0.0006 | CXORF5 |
| 39129_at | 0.4904 | 0.0006 | UNK_AF052134 |
| 32508_at | 0.4893 | 0.0006 | KIAA1096 |
| 35842_at | 0.4862 | 0.0007 | UNK_AL049265 |
| 41737_at | 0.4862 | 0.0007 | SRM160 |
| 36303_f_at | 0.4833 | 0.0008 | ZNF85 |
| 34256_at | 0.4829 | 0.0008 | SIAT9 |
| 33845_at | 0.4828 | 0.0008 | HNRPH1 |
| 40048_at | 0.4822 | 0.0008 | UNK_D43951 |
| 37625_at | 0.4801 | 0.0008 | IRF4 |
| 33234_at | 0.4779 | 0.0009 | UNK_AA887480 |
| 2000_at | 0.4777 | 0.0009 | ATM |
| 37078_at | 0.4760 | 0.0010 | CD3Z |
| 38778_at | 0.4744 | 0.0010 | KIAA1046 |

[0097] TABLE 6b
Prognosis Genes Negatively Correlated with TTP

| HgU95A Qualifier | Correlation Coefficient | P-Value | Gene Name |
|---|---|---|---|
| 935_at | −0.6319 | 0.0000 | CAP |
| 34498_at | −0.5385 | 0.0001 | VNN2 |
| 37023_at | −0.5292 | 0.0002 | LCP1 |
| 286_at | −0.5189 | 0.0003 | H2AFO |
| 38831_f_at | −0.5152 | 0.0003 | UNK_AF053356 |
| 268_at | −0.5126 | 0.0003 | PECAM1 |
| 38893_at | −0.5006 | 0.0005 | NCF4 |
| 34319_at | −0.4950 | 0.0005 | S100P |
| 37328_at | −0.4931 | 0.0006 | PLEK |
| 181_g_at | −0.4925 | 0.0006 | UNK_S82470 |
| 38894_g_at | −0.4852 | 0.0007 | NCF4 |
| 32736_at | −0.4805 | 0.0008 | UNK_W68830 |

[0098] TABLE 6c
Prognosis Genes Positively Correlated with TTD

| HgU95A Qualifier | Correlation Coefficient | P-Value | Gene Name |
|---|---|---|---|
| 37385_at | 0.6524 | 0.0000 | CYP |
| 41606_at | 0.6155 | 0.0000 | DRG1 |
| 33420_g_at | 0.6043 | 0.0000 | API5 |
| 35353_at | 0.5969 | 0.0000 | PSMC2 |
| 38017_at | 0.5942 | 0.0000 | CD79A |
| 31851_at | 0.5854 | 0.0000 | RFP2 |
| 35319_at | 0.5817 | 0.0000 | CTCF |
| 38702_at | 0.5702 | 0.0000 | UNK_AF070640 |
| 36474_at | 0.5654 | 0.0001 | KIAA0776 |
| 34256_at | 0.5649 | 0.0001 | SIAT9 |
| 34763_at | 0.5575 | 0.0001 | CSPG6 |
| 33831_at | 0.5561 | 0.0001 | CREBBP |
| 229_at | 0.5499 | 0.0001 | CBF2 |
| 37381_g_at | 0.5478 | 0.0001 | GTF2B |
| 40092_at | 0.5436 | 0.0001 | BAZ2A |
| 39746_at | 0.5428 | 0.0001 | POLR2B |
| 41174_at | 0.5424 | 0.0001 | RANBP2L1 |
| 32508_at | 0.5397 | 0.0001 | KIAA1096 |
| 33403_at | 0.5390 | 0.0001 | DKFZP547E1010 |
| 39809_at | 0.5381 | 0.0001 | HBP1 |
| 34829_at | 0.5373 | 0.0001 | DKC1 |
| 37625_at | 0.5350 | 0.0002 | IRF4 |
| 35656_at | 0.5336 | 0.0002 | RNF6 |
| 39509_at | 0.5328 | 0.0002 | UNK_AI692348 |
| 33543_s_at | 0.5324 | 0.0002 | PNN |
| 38082_at | 0.5318 | 0.0002 | KIAA0650 |
| 36303_f_at | 0.5311 | 0.0002 | ZNF85 |
| 1885_at | 0.5300 | 0.0002 | ERCC3 |
| 32194_at | 0.5285 | 0.0002 | CBF2 |
| 41621_i_at | 0.5264 | 0.0002 | ZNF266 |
| 33151_s_at | 0.5239 | 0.0002 | UNK_W25932 |
| 32169_at | 0.5212 | 0.0002 | KIAA0875 |
| 36845_at | 0.5203 | 0.0002 | KIAA0136 |
| 36231_at | 0.5197 | 0.0003 | UNK_AC002073 |
| 35163_at | 0.5172 | 0.0003 | KIAA1041 |
| 40905_s_at | 0.5170 | 0.0003 | DKFZP566J153 |
| 39431_at | 0.5164 | 0.0003 | NPEPPS |
| 41669_at | 0.5160 | 0.0003 | KIAA0191 |
| 35294_at | 0.5150 | 0.0003 | SSA2 |
| 39401_at | 0.5139 | 0.0003 | UNK_W28264 |
| 34716_at | 0.5137 | 0.0003 | TASR |
| 40563_at | 0.5136 | 0.0003 | DKFZP564A043 |
| 38667_at | 0.5124 | 0.0003 | UNK_AA189161 |
| 38122_at | 0.5107 | 0.0003 | SLC23A1 |
| 37585_at | 0.5096 | 0.0004 | SNRPA1 |
| 32183_at | 0.5079 | 0.0004 | SFRS11 |
| 40816_at | 0.5074 | 0.0004 | PWP1 |
| 33818_at | 0.5055 | 0.0004 | UNK_AC004472 |
| 37703_at | 0.5042 | 0.0004 | RABGGTB |
| 38016_at | 0.5039 | 0.0004 | HNRPD |
| 37737_at | 0.4997 | 0.0005 | PCMT1 |
| 36872_at | 0.4976 | 0.0005 | ARPP-19 |
| 39415_at | 0.4975 | 0.0005 | HNRPK |
| 40252_g_at | 0.4970 | 0.0005 | HRB2 |
| 39727_at | 0.4966 | 0.0005 | DUSP11 |
| 1728_at | 0.4966 | 0.0005 | BMI1 |
| 34967_at | 0.4956 | 0.0005 | UNK_AF001549 |
| 39864_at | 0.4949 | 0.0005 | CIRBP |
| 32758_g_at | 0.4947 | 0.0006 | RAE1 |
| 35753_at | 0.4943 | 0.0006 | PRP8 |
| 1857_at | 0.4916 | 0.0006 | MADH7 |
| 35764_at | 0.4915 | 0.0006 | CXORF5 |
| 32372_at | 0.4911 | 0.0006 | CTSB |
| 33485_at | 0.4892 | 0.0006 | RPL4 |
| 34647_at | 0.4887 | 0.0007 | DDX5 |
| 1442_at | 0.4886 | 0.0007 | ESR2 |
| 41506_at | 0.4875 | 0.0007 | MAPKAPK5 |
| 34879_at | 0.4873 | 0.0007 | DPM1 |
| 39512_s_at | 0.4869 | 0.0007 | UNK_AA457029 |
| 36783_f_at | 0.4865 | 0.0007 | H-PLK |
| 35479_at | 0.4860 | 0.0007 | ADAM28 |
| 40308_at | 0.4858 | 0.0007 | UNK_AI830496 |
| 38462_at | 0.4852 | 0.0007 | NDUFA5 |
| 781_at | 0.4851 | 0.0007 | RABGGTB |
| 38102_at | 0.4850 | 0.0007 | UNK_W28575 |
| 38256_s_at | 0.4829 | 0.0008 | DKFZP564O092 |
| 32850_at | 0.4817 | 0.0008 | NUP153 |
| 35286_r_at | 0.4815 | 0.0008 | RY1 |
| 36456_at | 0.4815 | 0.0008 | DKFZP564I052 |
| 38924_s_at | 0.4813 | 0.0008 | SSH3BP1 |
| 35805_at | 0.4809 | 0.0008 | DKFZP434D156 |
| 40086_at | 0.4805 | 0.0008 | KIAA0261 |
| 34274_at | 0.4801 | 0.0008 | KIAA1116 |
| 39897_at | 0.4793 | 0.0009 | DDX16 |
| 41665_at | 0.4792 | 0.0009 | KIAA0824 |
| 38114_at | 0.4785 | 0.0009 | RAD21 |
| 41166_at | 0.4782 | 0.0009 | IGHM |
| 41569_at | 0.4781 | 0.0009 | KIAA0974 |
| 33440_at | 0.4774 | 0.0009 | TCF8 |
| 36459_at | 0.4767 | 0.0009 | KIAA0879 |
| 216_at | 0.4765 | 0.0009 | PTGDS |
| 41199_s_at | 0.4760 | 0.0009 | SFPQ |
| 40051_at | 0.4756 | 0.0010 | KIAA0057 |
| 38019_at | 0.4754 | 0.0010 | CSNK1E |
| 36690_at | 0.4746 | 0.0010 | NR3C1 |
| 41547_at | 0.4742 | 0.0010 | BUB3 |
| 38105_at | 0.4734 | 0.0010 | UNK_W26521 |
| 40828_at | 0.4732 | 0.0010 | P85SPR |
| 41809_at | 0.4729 | 0.0010 | UNK_AI656421 |
| 36210_g_at | 0.4727 | 0.0010 | FSRG1 |

[0099] TABLE 6d
Prognosis Genes Negatively Correlated with TTD

| HgU95A Qualifier | Correlation Coefficient | P-Value | Gene Name |
|---|---|---|---|
| 286_at | −0.5871 | 0.0000 | H2AFO |
| 32609_at | −0.5841 | 0.0000 | H2AFO |
| 38483_at | −0.5464 | 0.0001 | HSA011916 |
| 769_s_at | −0.5036 | 0.0004 | ANXA2 |
| 1131_at | −0.4876 | 0.0007 | MAP2K2 |
| 32378_at | −0.4818 | 0.0008 | PKM2 |
| 956_at | −0.4770 | 0.0009 | TUBB |
| 37311_at | −0.4760 | 0.0010 | TALDO1 |
| 37148_at | −0.4744 | 0.0010 | LILRB3 |
| 36199_at | −0.4725 | 0.0010 | DAP |

[0100] In addition to the specific genes described herein, the present invention contemplates the use of any other gene that can hybridize under stringent or nucleic acid array hybridization conditions to a qualifier identified in the present invention. These genes may include hypothetical or putative genes that are supported by EST or mRNA data. The expression profiles of these genes may correlate with patient clinical outcome. As used herein, a gene can hybridize to a qualifier if an RNA transcript of the gene can hybridize to at least one oligonucleotide probe of the qualifier. In many cases, an RNA transcript of the gene can hybridize to at least 50%, 60%, 70%, 80%, 90%, or more oligonucleotide probes of the qualifier.

[0101] The oligonucleotide probe sequences of each qualifier on HgU95A genechips may be obtained from Affymetrix or from the sequence files maintained at Affymetrix website “www.affymetrix.com/support/technical/byproduct.affx?product=hgu95sequence.” For instance, the oligonucleotide probe sequences can be found in the sequence file “HG_U95A Probe Sequences, FASTA” at the website. This sequence file is incorporated herein by reference in its entirety.

[0102] In another example, a Cox proportional hazard regression model was employed to assess the correlation between baseline PBMC gene expression levels and clinical outcome. Cox model can take into account the effects of censoring on correlations of gene expression with TTD (or Survival as of last known date alive) and TTP (or progression-free status as of last known date alive). Of the 45 RCC patients with baseline PBMC expression levels, 4 had censored data for TTP and 15 had censored data for TTD. Similar to the Spearman's assessment of the data, Cox regression can identify genes significantly correlated with survival and disease progression for any given α-confidence level. A similar permutation strategy can be used to affirm any correlation between baseline expression profiles and clinical outcome.

[0103] In one embodiment, models were fit using expression levels from each of the 5,424 qualifiers that passed the initial filtering criteria in the 45 baseline samples. TTP and TTD were tested for their association with log2-transformed scaled frequency at baseline. A SAS program was used to generate the estimates in Tables 7a and 7b. Tables 7a and 7b demonstrate a strong correlation between TTP/TTD and baseline gene expression.

TABLE 7a
Cox Regressions of Clinical Outcome on Baseline
Expression Levels in PBMCs of RCC Patients in
CCI-779 Therapy (n = 45 patients)
Time to Progression

| | | Percentage of Permutations for |
|---|---|---|
| | | which Number of Nominally |
| | Observed Number of | Significant Cox Regressions |
| | Nominally Significant | Equals or Exceeds Observed |
| ∀ | Cox Regressions* | Number** |
| 0.1 | 1439 | 0.8% (4/500) |
| 0.05 | 950 | 0.8% (3/500) |
| 0.01 | 342 | 0.8% (4/500) |
| 0.005 | 217 | 0.8% (4/500) |
| 0.001 | 53 | 1.0% (5/500) |

*for 5,424 genes (filtered by at least one Present call and at least one frequency ≧ 10 ppm)
**based on 500 random permutations

[0104] TABLE 7b
Cox Regressions of Clinical Outcome on Baseline
Expression Levels in PBMCs of RCC Patients in
CCI-779 Therapy (n = 45 patients)
Time to Death

| | | Percentage of Permutations for |
|---|---|---|
| | | which Number of Nominally |
| | Observed Number of | Significant Cox Regressions |
| | Nominally Significant | Equals or Exceeds Observed |
| ∀ | Cox Regressions* | Number** |
| 0.1 | 1948 | <0.2% (0/500) |
| 0.05 | 1383 | <0.2% (0/500) |
| 0.01 | 602 | <0.2% (0/500) |
| 0.005 | 404 | <0.2% (0/500) |
| 0.001 | 142 | <0.2% (0/500) |

*for 5,424 genes (filtered by at least one Present call and at least one frequency ≧ 10 ppm)
**based on 500 random permutations

[0105] Table 8 lists the results of Cox proportional hazard modeling for all of the 5,424 genes that met the initial criteria. Hazard ratios and p-values (for the hypothesis that the risk coefficient was equal to 1, i.e., no risk) are indicated for each gene. Examples of genes that are indicative of high risk for TTP or TTD are shown in Tables 9a or 9c, respectively. These genes have hazard ratios of at least 3. Examples of genes that are indicative of low risk for TTP or TTD are described in Tables 9b or 9d, respectively. These genes have hazard ratios of no more than 0.333.

TABLE 9a
Prognosis Genes Indicative of High Risk for TTP

| HgU95A Qualifier | Hazard Ratio | P-Value | Gene Name |
|---|---|---|---|
| 37023_at | 6.1066 | 0.0001 | LCP1 |
| 935_at | 5.8829 | 0.0000 | CAP |
| 40771_at | 4.9503 | 0.0586 | MSN |
| 37298_at | 4.6595 | 0.0046 | GABARAP |
| 31820_at | 4.2099 | 0.0061 | HCLS1 |
| 676_g_at | 4.1051 | 0.0016 | IFITM1 |
| 33906_at | 3.9750 | 0.0106 | SSSCA1 |
| 32736_at | 3.8093 | 0.0013 | UNK_W68830 |
| 40169_at | 3.5692 | 0.0243 | TIP47 |
| 39811_at | 3.4197 | 0.1074 | UNK_AA402538 |
| 1309_at | 3.3680 | 0.0053 | PSMB3 |
| 39814_s_at | 3.2703 | 0.0029 | UNK_AI052724 |
| 38605_at | 3.1625 | 0.0592 | NDUFB1 |
| 38831_f_at | 3.0853 | 0.0092 | UNK_AF053356 |

[0106] TABLE 9b
Prognosis Genes Indicative of Low Risk for TTP

| HgU95A Qualifier | Hazard Ratio | P-Value | Gene Name |
|---|---|---|---|
| 39415_at | 0.0818 | 0.0002 | HNRPK |
| 35753_at | 0.1608 | 0.0001 | PRP8 |
| 33667_at | 0.1650 | 0.0890 | PPIA |
| 33845_at | 0.1657 | 0.0024 | HNRPH1 |
| 36186_at | 0.1661 | 0.0040 | RNPS1 |
| 1420_s_at | 0.1662 | 0.0009 | EIF4A2 |
| 31950_at | 0.1724 | 0.0071 | PABPC1 |
| 34647_at | 0.1831 | 0.0010 | DDX5 |
| 36515_at | 0.2094 | 0.0002 | GNE |
| 36111_s_at | 0.2147 | 0.0031 | SFRS2 |
| 39180_at | 0.2154 | 0.0009 | FUS |
| 32758_g_at | 0.2186 | 0.0010 | RAE1 |
| 31952_at | 0.2211 | 0.0076 | RPL6 |
| 38527_at | 0.2258 | 0.0016 | NONO |
| 32831_at | 0.2298 | 0.0006 | TIM17 |
| 37609_at | 0.2321 | 0.0016 | NUBP1 |
| 34695_at | 0.2330 | 0.0035 | GA17 |
| 39730_at | 0.2331 | 0.0005 | ABL1 |
| 35808_at | 0.2385 | 0.0037 | SFRS6 |
| 32751_at | 0.2386 | 0.0013 | UNK_AF007140 |
| 41737_at | 0.2393 | 0.0023 | SRM160 |
| 32205_at | 0.2431 | 0.0009 | PRKRA |
| 40252_g_at | 0.2473 | 0.0033 | HRB2 |
| 35325_at | 0.2540 | 0.0030 | UNK_AF052113 |
| 41292_at | 0.2549 | 0.0014 | HNRPH1 |
| 32658_at | 0.2553 | 0.0010 | UNK_AL031228 |
| 33307_at | 0.2569 | 0.0008 | UNK_AL022316 |
| 40426_at | 0.2587 | 0.0306 | BCL7B |
| 41562_at | 0.2595 | 0.0010 | BMI1 |
| 34315_at | 0.2638 | 0.0149 | AFG3L2 |
| 33920_at | 0.2665 | 0.0549 | DIAPH1 |
| 33706_at | 0.2698 | 0.0114 | SART1 |
| 35170_at | 0.2706 | 0.0053 | MAN2C1 |
| 229_at | 0.2715 | 0.0064 | CBF2 |
| 33485_at | 0.2724 | 0.0169 | RPL4 |
| 1728_at | 0.2736 | 0.0103 | BMI1 |
| 38105_at | 0.2748 | 0.0017 | UNK_W26521 |
| 1361_at | 0.2801 | 0.0059 | TERF1 |
| 32171_at | 0.2831 | 0.0040 | EIF5 |
| 36456_at | 0.2834 | 0.0015 | DKFZP564I052 |
| 838_s_at | 0.2841 | 0.0616 | UBE2I |
| 1706_at | 0.2852 | 0.0144 | ARAF1 |
| 38778_at | 0.2882 | 0.0012 | KIAA1046 |
| 39378_at | 0.2896 | 0.1463 | BECN1 |
| 34225_at | 0.2911 | 0.0126 | UNK_AF101434 |
| 32833_at | 0.2918 | 0.0016 | CLK1 |
| 34285_at | 0.2938 | 0.0021 | KIAA0795 |
| 35743_at | 0.2968 | 0.0133 | NAR |
| 39165_at | 0.2971 | 0.0086 | NIFU |
| 36685_at | 0.2979 | 0.0045 | AMD1 |
| 37557_at | 0.2985 | 0.0038 | SLC4A2 |
| 36303_f_at | 0.2987 | 0.0018 | ZNF85 |
| 33392_at | 0.3019 | 0.0030 | DKFZP434J154 |
| 40160_at | 0.3031 | 0.0038 | DKFZP586P2220 |
| 34337_s_at | 0.3047 | 0.0009 | M96 |
| 37506_at | 0.3053 | 0.0006 | UNK_Z78308 |
| 38256_s_at | 0.3053 | 0.0002 | DKFZP564O092 |
| 37690_at | 0.3053 | 0.0120 | ILVBL |
| 1020_s_at | 0.3060 | 0.0069 | SIP2-28 |
| 36862_at | 0.3066 | 0.0147 | KIAA1115 |
| 39141_at | 0.3069 | 0.0074 | ABCF1 |
| 32592_at | 0.3071 | 0.0280 | KIAA0323 |
| 39044_s_at | 0.3076 | 0.0141 | DGKD |
| 40596_at | 0.3076 | 0.0058 | TCOF1 |
| 34369_at | 0.3078 | 0.0454 | KIAA0214 |
| 33188_at | 0.3090 | 0.0006 | PPIL2 |
| 41220_at | 0.3110 | 0.0404 | MSF |
| 38445_at | 0.3125 | 0.0057 | ARHGEF1 |
| 36783_f_at | 0.3125 | 0.0064 | H-PLK |
| 37717_at | 0.3126 | 0.0130 | NAGR1 |
| 36198_at | 0.3167 | 0.0058 | KIAA0016 |
| 35125_at | 0.3171 | 0.0540 | RPS6 |
| 32438_at | 0.3172 | 0.0557 | RPS20 |
| 37030_at | 0.3181 | 0.0006 | KIAA0887 |
| 37703_at | 0.3183 | 0.0011 | RABGGTB |
| 1711_at | 0.3199 | 0.0463 | TP53BP1 |
| 41691_at | 0.3216 | 0.0006 | KIAA0794 |
| 32079_at | 0.3219 | 0.0037 | KIAA0639 |
| 39865_at | 0.3230 | 0.0151 | UNK_AI890903 |
| 34326_at | 0.3232 | 0.0025 | COPB |
| 34808_at | 0.3244 | 0.0188 | KIAA0999 |
| 36129_at | 0.3244 | 0.0014 | UNK_AB007857 |
| 37672_at | 0.3249 | 0.0077 | USP7 |
| 32208_at | 0.3257 | 0.0098 | KIAA0355 |
| 35298_at | 0.3266 | 0.0973 | EIF3S7 |
| 36982_at | 0.3267 | 0.0018 | USP14 |
| 31573_at | 0.3292 | 0.0566 | RPS25 |
| 36603_at | 0.3292 | 0.0015 | GCN1L1 |
| 36189_at | 0.3310 | 0.0661 | ILF2 |
| 39155_at | 0.3325 | 0.0433 | PSMD3 |

[0107] TABLE 9c
Prognosis Genes Indicative of High Risk for TTD

| | Hazard | | |
|---|---|---|---|
| HgU95A Qualifier | Ratio | P-Value | Gene Name |
| 40771_at | 9.6763 | 0.0122 | MSN |
| 39811_at | 8.0370 | 0.0149 | UNK_AA402538 |
| 37298_at | 7.6453 | 0.0021 | GABARAP |
| 38483_at | 6.7764 | 0.0001 | HSA011916 |
| 1878_g_at | 6.1122 | 0.0004 | ERCC1 |
| 33994_g_at | 4.9451 | 0.0009 | MYL6 |
| 32318_s_at | 4.9169 | 0.0027 | ACTB |
| 37012_at | 4.8396 | 0.0057 | CAPZB |
| 1199_at | 4.7016 | 0.0103 | EIF4A1 |
| 36641_at | 4.5981 | 0.0042 | CAPZA2 |
| 34160_at | 4.5693 | 0.0086 | ACTG1 |
| 34091_s_at | 4.4114 | 0.0158 | VIM |
| 286_at | 4.2492 | 0.0000 | H2AFO |
| 35770_at | 4.1617 | 0.0083 | ATP6S1 |
| 33341_at | 4.0632 | 0.0102 | GNB1 |
| 33659_at | 4.0505 | 0.0074 | CFL1 |
| 935_at | 4.0159 | 0.0016 | CAP |
| 40134_at | 3.8316 | 0.0043 | ATP5J2 |
| 37346_at | 3.8205 | 0.0126 | ARF5 |
| 37023_at | 3.8170 | 0.0059 | LCP1 |
| 38451_at | 3.8077 | 0.0034 | UQCR |
| 34836_at | 3.7786 | 0.0080 | RABL |
| 35263_at | 3.6729 | 0.0558 | EIF4EBP2 |
| 41724_at | 3.6595 | 0.0026 | DXS1357E |
| 33679_f_at | 3.5643 | 0.0134 | TUBB2 |
| 33121_g_at | 3.5151 | 0.0007 | RGS10 |
| 40872_at | 3.4884 | 0.0013 | COX6B |
| 1315_at | 3.4428 | 0.0026 | UNK_D78361 |
| 36574_at | 3.4083 | 0.1032 | IDH3G |
| 1131_at | 3.3872 | 0.0002 | MAP2K2 |
| 31444_s_at | 3.3199 | 0.0016 | ANXA2P2 |
| 36963_at | 3.3124 | 0.0060 | PGD |
| 35083_at | 3.2546 | 0.0517 | UNK_AL031670 |
| 32145_at | 3.2308 | 0.0012 | ADD1 |
| AFFX- | 3.1377 | 0.0060 | BACTIN3_Hs_AFFX |
| HSAC07/X00351_3_at | | | |
| 769_s_at | 3.1358 | 0.0006 | ANXA2 |
| 35783_at | 3.0738 | 0.0592 | UNK_H93123 |
| 32609_at | 3.0361 | 0.0000 | H2AFO |
| 1695_at | 3.0329 | 0.0225 | NEDD8 |

[0108] TABLE 9d
Prognosis Genes Indicative of Low Risk for TTD

| HgU95A Qualifier | Hazard Ratio | P-Value | Gene Name |
|---|---|---|---|
| 41606_at | 0.0322 | 0.0000 | DRG1 |
| 38016_at | 0.0547 | 0.0003 | HNRPD |
| 39274_at | 0.1030 | 0.0004 | NUP62 |
| 36189_at | 0.1100 | 0.0029 | ILF2 |
| 35353_at | 0.1140 | 0.0000 | PSMC2 |
| 1728_at | 0.1250 | 0.0001 | BMI1 |
| 40252_g_at | 0.1265 | 0.0003 | HRB2 |
| 36210_g_at | 0.1287 | 0.0003 | FSRG1 |
| 34315_at | 0.1288 | 0.0028 | AFG3L2 |
| 34647_at | 0.1295 | 0.0001 | DDX5 |
| 38702_at | 0.1333 | 0.0000 | UNK_AF070640 |
| 39415_at | 0.1428 | 0.0019 | HNRPK |
| 33818_at | 0.1433 | 0.0011 | UNK_AC004472 |
| 37509_at | 0.1447 | 0.0001 | UNK_AF046059 |
| 31952_at | 0.1466 | 0.0025 | RPL6 |
| 37385_at | 0.1538 | 0.0000 | CYP |
| 33485_at | 0.1591 | 0.0010 | RPL4 |
| 34695_at | 0.1620 | 0.0013 | GA17 |
| 37609_at | 0.1625 | 0.0004 | NUBP1 |
| 32807_at | 0.1675 | 0.0012 | DKFZP566C134 |
| 33614_at | 0.1694 | 0.0017 | RPL18A |
| 32758_g_at | 0.1727 | 0.0010 | RAE1 |
| 32766_at | 0.1742 | 0.0056 | G22P1 |
| 36872_at | 0.1763 | 0.0001 | ARPP-19 |
| 34401_at | 0.1764 | 0.0095 | UQCRFS1 |
| 36186_at | 0.1791 | 0.0047 | RNPS1 |
| 35319_at | 0.1792 | 0.0000 | CTCF |
| 755_at | 0.1796 | 0.0023 | ITPR1 |
| 40370_f_at | 0.1809 | 0.0104 | HLA-G |
| 37353_g_at | 0.1824 | 0.0013 | SP100 |
| 41295_at | 0.1825 | 0.0005 | GPX3 |
| 36845_at | 0.1886 | 0.0001 | KIAA0136 |
| 229_at | 0.1887 | 0.0008 | CBF2 |
| 39766_r_at | 0.1906 | 0.0016 | POLR2K |
| 40426_at | 0.1909 | 0.0183 | BCL7B |
| 38456_s_at | 0.1912 | 0.0240 | UNK_AL049650 |
| 35595_at | 0.1945 | 0.0000 | CGRP-RCP |
| 35656_at | 0.1945 | 0.0001 | RNF6 |
| 35753_at | 0.1955 | 0.0014 | PRP8 |
| 37367_at | 0.1965 | 0.0429 | ATP6E |
| 38590_r_at | 0.1981 | 0.0171 | PTMA |
| 35125_at | 0.2004 | 0.0120 | RPS6 |
| 37381_g_at | 0.2014 | 0.0003 | GTF2B |
| 36946_at | 0.2024 | 0.0004 | DYRK1A |
| 38068_at | 0.2027 | 0.0010 | AMFR |
| 32175_at | 0.2049 | 0.0156 | CDC10 |
| 31538_at | 0.2057 | 0.0031 | RPLP0 |
| 39727_at | 0.2079 | 0.0003 | DUSP11 |
| 36456_at | 0.2120 | 0.0003 | DKFZP564I052 |
| 37672_at | 0.2121 | 0.0013 | USP7 |
| 41288_at | 0.2154 | 0.0060 | CALM1 |
| 38114_at | 0.2167 | 0.0036 | RAD21 |
| 33543_s_at | 0.2190 | 0.0002 | PNN |
| 35325_at | 0.2193 | 0.0043 | UNK_AF052113 |
| 39562_at | 0.2197 | 0.0018 | CGGBP1 |
| 37737_at | 0.2226 | 0.0004 | PCMT1 |
| 33740_at | 0.2241 | 0.0061 | UNK_AF023268 |
| 1361_at | 0.2250 | 0.0030 | TERF1 |
| 1020_s_at | 0.2250 | 0.0020 | SIP2-28 |
| 38102_at | 0.2281 | 0.0001 | UNK_W28575 |
| 35294_at | 0.2308 | 0.0003 | SSA2 |
| 40700_at | 0.2309 | 0.0022 | SP140 |
| 39020_at | 0.2310 | 0.0067 | SIVA |
| 1449_at | 0.2311 | 0.0025 | PSMA4 |
| 34821_at | 0.2319 | 0.0007 | DKFZP586D0623 |
| 36783_f_at | 0.2319 | 0.0010 | H-PLK |
| 39740_g_at | 0.2329 | 0.0085 | NACA |
| 39155_at | 0.2333 | 0.0138 | PSMD3 |
| 39864_at | 0.2344 | 0.0002 | CIRBP |
| 39099_at | 0.2361 | 0.0011 | SEC23A |
| 32208_at | 0.2365 | 0.0036 | KIAA0355 |
| 39027_at | 0.2377 | 0.0174 | COX4 |
| 39774_at | 0.2390 | 0.0207 | OXA1L |
| 40449_at | 0.2391 | 0.0006 | RFC1 |
| 40369_f_at | 0.2395 | 0.0154 | UNK_AL022723 |
| 33151_s_at | 0.2407 | 0.0002 | UNK_W25932 |
| 37625_at | 0.2410 | 0.0000 | IRF4 |
| 35055_at | 0.2415 | 0.0223 | BTF3 |
| 33845_at | 0.2416 | 0.0065 | HNRPH1 |
| 33451_s_at | 0.2418 | 0.0128 | RPL22 |
| 38527_at | 0.2425 | 0.0064 | NONO |
| 40563_at | 0.2425 | 0.0001 | DKFZP564A043 |
| 36975_at | 0.2427 | 0.0037 | UNK_W26659 |
| 38854_at | 0.2445 | 0.0037 | KIAA0635 |
| 35163_at | 0.2485 | 0.0001 | KIAA1041 |
| 38817_at | 0.2492 | 0.0087 | SPAG7 |
| 41787_at | 0.2502 | 0.0004 | KIAA0669 |
| 649_s_at | 0.2504 | 0.0001 | CXCR4 |
| 37715_at | 0.2510 | 0.0002 | SNW1 |
| 33403_at | 0.2511 | 0.0000 | DKFZP547E1010 |
| 34172_s_at | 0.2512 | 0.0013 | UNK_M99578 |
| 32576_at | 0.2522 | 0.0151 | EIF3S5 |
| 39378_at | 0.2550 | 0.1231 | BECN1 |
| 35286_r_at | 0.2554 | 0.0009 | RY1 |
| 37350_at | 0.2559 | 0.0102 | UNK_AL031177 |
| 38123_at | 0.2559 | 0.0025 | D123 |
| 41506_at | 0.2559 | 0.0001 | MAPKAPK5 |
| 40140_at | 0.2559 | 0.0004 | ZFP103 |
| 38073_at | 0.2561 | 0.0018 | RNMT |
| 31872_at | 0.2563 | 0.0029 | SSXT |
| 34349_at | 0.2564 | 0.0035 | SEC63L |
| 39792_at | 0.2568 | 0.0002 | HNRPR |
| 35187_at | 0.2578 | 0.0061 | UNK_AL080216 |
| 1220_g_at | 0.2578 | 0.0003 | IRF2 |
| 33706_at | 0.2584 | 0.0209 | SART1 |
| 34809_at | 0.2588 | 0.0102 | KIAA0999 |
| 39342_at | 0.2588 | 0.0499 | MARS |
| 40874_at | 0.2593 | 0.0541 | EDF1 |
| 40814_at | 0.2597 | 0.0009 | IDS |
| 39809_at | 0.2597 | 0.0000 | HBP1 |
| 37226_at | 0.2599 | 0.0014 | BNIP1 |
| 34370_at | 0.2604 | 0.0020 | ARCN1 |
| 40651_s_at | 0.2604 | 0.0010 | CRHR1 |
| 40816_at | 0.2607 | 0.0004 | PWP1 |
| 35195_at | 0.2613 | 0.0051 | RPC |
| 40110_at | 0.2621 | 0.0108 | IDH3B |
| 33886_at | 0.2625 | 0.0019 | SSH3BP1 |
| 34879_at | 0.2639 | 0.0015 | DPM1 |
| 36968_s_at | 0.2660 | 0.0019 | OIP2 |
| 36303_f_at | 0.2669 | 0.0006 | ZNF85 |
| 40219_at | 0.2670 | 0.0103 | HIS1 |
| 38942_r_at | 0.2670 | 0.0105 | UNK_W28610 |
| 32487_s_at | 0.2672 | 0.0061 | KPNA4 |
| 36754_at | 0.2675 | 0.0001 | ADCYAP1 |
| 39739_at | 0.2683 | 0.0496 | MYH9 |
| 33443_at | 0.2687 | 0.0004 | UNK_Z99129 |
| 31950_at | 0.2687 | 0.0321 | PABPC1 |
| 39059_at | 0.2689 | 0.0145 | DHCR7 |
| 33831_at | 0.2702 | 0.0001 | CREBBP |
| 35368_at | 0.2703 | 0.0006 | ZNF207 |
| 35227_at | 0.2706 | 0.0057 | RBBP8 |
| 41296_s_at | 0.2713 | 0.0009 | GPX3 |
| 40596_at | 0.2717 | 0.0047 | TCOF1 |
| 35910_f_at | 0.2720 | 0.0113 | MMPL1 |
| 34018_at | 0.2722 | 0.0014 | COL19A1 |
| 36949_at | 0.2722 | 0.0033 | CSNK1D |
| 33394_at | 0.2730 | 0.0011 | DDX19 |
| 34231_at | 0.2734 | 0.0036 | UNK_AF074606 |
| 32288_r_at | 0.2738 | 0.0014 | KLRC3 |
| 38903_at | 0.2742 | 0.0007 | GJB5 |
| 38040_at | 0.2743 | 0.0093 | SPF30 |
| 39126_at | 0.2749 | 0.0043 | UNK_AL080101 |
| 35321_at | 0.2752 | 0.0034 | TLK2 |
| 36546_r_at | 0.2755 | 0.0142 | UNK_AB011114 |
| 39746_at | 0.2755 | 0.0000 | POLR2B |
| 41256_at | 0.2762 | 0.0054 | EEF1D |
| 41789_r_at | 0.2781 | 0.0012 | KIAA0669 |
| 35630_at | 0.2784 | 0.0025 | LLGL2 |
| 40984_at | 0.2789 | 0.0384 | UNK_W28255 |
| 35199_at | 0.2789 | 0.0035 | KIAA0982 |
| 40308_at | 0.2791 | 0.0003 | UNK_AI830496 |
| 40803_at | 0.2793 | 0.0014 | UNK_AL050161 |
| 322_at | 0.2801 | 0.0045 | PIK3R3 |
| 1885_at | 0.2804 | 0.0008 | ERCC3 |
| 193_at | 0.2814 | 0.0330 | TAF2G |
| 38668_at | 0.2819 | 0.0141 | KIAA0553 |
| 39730_at | 0.2819 | 0.0088 | ABL1 |
| 38256_s_at | 0.2821 | 0.0009 | DKFZP564O092 |
| 39290_f_at | 0.2832 | 0.0013 | DKFZP564M2423 |
| 34326_at | 0.2833 | 0.0020 | COPB |
| 38923_at | 0.2838 | 0.0075 | FRG1 |
| 34225_at | 0.2845 | 0.0092 | UNK_AF101434 |
| 35258_f_at | 0.2846 | 0.0023 | SFRS2IP |
| 31546_at | 0.2847 | 0.0090 | RPL18 |
| 37659_at | 0.2855 | 0.0180 | IMMT |
| 37717_at | 0.2861 | 0.0090 | NAGR1 |
| 32592_at | 0.2862 | 0.0215 | KIAA0323 |
| 35978_at | 0.2871 | 0.0215 | UNK_AF009242 |
| 31330_at | 0.2873 | 0.0243 | RPS19 |
| 33388_at | 0.2881 | 0.0289 | UNK_AL080223 |
| 40036_at | 0.2883 | 0.0041 | MAGOH |
| 41808_at | 0.2888 | 0.0023 | UNK_AF052102 |
| 1683_at | 0.2891 | 0.0021 | WIT-1 |
| 36198_at | 0.2895 | 0.0014 | KIAA0016 |
| 38689_at | 0.2897 | 0.0146 | DJ149A16.6 |
| 39141_at | 0.2904 | 0.0053 | ABCF1 |
| 32593_at | 0.2904 | 0.0090 | KIAA0084 |
| 32801_at | 0.2914 | 0.0052 | KIAA0317 |
| 37894_at | 0.2919 | 0.0054 | CUL2 |
| 38443_at | 0.2921 | 0.0015 | UNK_U79291 |
| 493_at | 0.2924 | 0.0026 | CSNK1D |
| 41569_at | 0.2925 | 0.0022 | KIAA0974 |
| 38455_at | 0.2928 | 0.0066 | UNK_AL049650 |
| 1660_at | 0.2932 | 0.0010 | UBE2N |
| 1981_s_at | 0.2932 | 0.0017 | MAX |
| 31879_at | 0.2942 | 0.0014 | FUBP3 |
| 38612_at | 0.2944 | 0.0011 | TSPAN-3 |
| 1857_at | 0.2950 | 0.0002 | MADH7 |
| 39047_at | 0.2957 | 0.0010 | KIAA0156 |
| 35805_at | 0.2962 | 0.0028 | DKFZP434D156 |
| 160_at | 0.2964 | 0.0027 | STAM |
| 1627_at | 0.2969 | 0.0101 | UNK_Z25437 |
| 38106_at | 0.2972 | 0.0009 | YR-29 |
| 37703_at | 0.2973 | 0.0008 | RABGGTB |
| 35748_at | 0.2982 | 0.0103 | EEF1B2 |
| 40086_at | 0.2983 | 0.0016 | KIAA0261 |
| 40103_at | 0.2985 | 0.0053 | VIL2 |
| 38122_at | 0.2997 | 0.0008 | SLC23A1 |
| 32590_at | 0.2999 | 0.0113 | NCL |
| 35254_at | 0.3009 | 0.0040 | FLN29 |
| 33660_at | 0.3013 | 0.0292 | RPL5 |
| 34763_at | 0.3015 | 0.0001 | CSPG6 |
| 39431_at | 0.3016 | 0.0001 | NPEPPS |
| 41097_at | 0.3019 | 0.0257 | TERF2 |
| 32352_at | 0.3022 | 0.0045 | PNMT |
| 35743_at | 0.3029 | 0.0183 | NAR |
| 39471_at | 0.3036 | 0.0070 | M11S1 |
| 41413_at | 0.3044 | 0.0131 | CLPTM1 |
| 1110_at | 0.3048 | 0.0020 | TRD@ |
| 34600_s_at | 0.3056 | 0.0011 | TUB |
| 38014_at | 0.3059 | 0.0113 | ADAR |
| 34215_at | 0.3059 | 0.0131 | DXYS155E |
| 1017_at | 0.3067 | 0.0048 | MSH6 |
| 31851_at | 0.3068 | 0.0000 | RFP2 |
| 34745_at | 0.3071 | 0.1447 | UNK_AF070570 |
| 35298_at | 0.3073 | 0.1084 | EIF3S7 |
| 31894_at | 0.3080 | 0.0015 | CENPC1 |
| 39923_at | 0.3090 | 0.0079 | UNK_AI935420 |
| 35939_s_at | 0.3097 | 0.0023 | POU4F1 |
| 1240_at | 0.3098 | 0.0003 | CASP2 |
| 33661_at | 0.3102 | 0.0017 | RPL5 |
| 41514_s_at | 0.3105 | 0.0039 | UNK_W26628 |
| 35186_at | 0.3115 | 0.0016 | PAF65B |
| 34256_at | 0.3121 | 0.0001 | SIAT9 |
| 37986_at | 0.3124 | 0.0163 | EPOR |
| 40828_at | 0.3136 | 0.0010 | P85SPR |
| 40515_at | 0.3137 | 0.0178 | EIF2B2 |
| 40277_at | 0.3140 | 0.0022 | KIAA1080 |
| 1228_s_at | 0.3143 | 0.0070 | MGEA6 |
| 39917_at | 0.3146 | 0.0341 | GCP2 |
| 36111_s_at | 0.3146 | 0.0655 | SFRS2 |
| 36474_at | 0.3157 | 0.0006 | KIAA0776 |
| 32831_at | 0.3160 | 0.0095 | TIM17 |
| 1512_at | 0.3161 | 0.0348 | DYRK1A |
| 38478_at | 0.3162 | 0.0107 | SFRS8 |
| 38450_at | 0.3167 | 0.0096 | SSB |
| 37030_at | 0.3170 | 0.0018 | KIAA0887 |
| 37585_at | 0.3170 | 0.0000 | SNRPA1 |
| 40905_s_at | 0.3174 | 0.0001 | DKFZP566J153 |
| 35431_g_at | 0.3177 | 0.0004 | MED6 |
| 40054_at | 0.3180 | 0.0043 | KIAA0082 |
| 1420_s_at | 0.3186 | 0.0283 | EIF4A2 |
| 33307_at | 0.3194 | 0.0073 | UNK_AL022316 |
| 37984_s_at | 0.3204 | 0.0236 | ARF6 |
| 41601_at | 0.3205 | 0.0015 | UNK_AA142964 |
| 38492_at | 0.3206 | 0.0026 | KYNU |
| 32751_at | 0.3208 | 0.0181 | UNK_AF007140 |
| 38075_at | 0.3211 | 0.0018 | SYPL |
| 32508_at | 0.3214 | 0.0008 | KIAA1096 |
| 38426_at | 0.3220 | 0.0073 | TAF2I |
| 35327_at | 0.3230 | 0.0203 | EIF3S3 |
| 1102_s_at | 0.3233 | 0.0037 | NR3C1 |
| 31463_s_at | 0.3235 | 0.0168 | UNK_AL022097 |
| 31722_at | 0.3236 | 0.0236 | RPL3 |
| 1009_at | 0.3237 | 0.0110 | HINT |
| 38667_at | 0.3239 | 0.0.002 | UNK_AA189161 |
| 36375_at | 0.3244 | 0.0095 | ODF1 |
| 1793_at | 0.3252 | 0.0049 | CDC2L5 |
| 41235_at | 0.3256 | 0.1646 | ATF4 |
| 38816_at | 0.3262 | 0.0006 | TACC2 |
| 36239_at | 0.3265 | 0.0143 | POU2AF1 |
| 31951_s_at | 0.3270 | 0.0280 | PABPC1 |
| 38424_at | 0.3271 | 0.0057 | KIAA0747 |
| 41562_at | 0.3273 | 0.0033 | BMI1 |
| 1920_s_at | 0.3277 | 0.0055 | CCNG1 |
| 35175_f_at | 0.3288 | 0.0125 | EEF1A2 |
| 40980_at | 0.3288 | 0.0016 | UNK_W26477 |
| 40833_r_at | 0.3289 | 0.0084 | DKFZP586G011 |
| 1151_at | 0.3290 | 0.0176 | RPL22 |
| 32150_at | 0.3294 | 0.0074 | GOLGA4 |
| 38105_at | 0.3294 | 0.0104 | UNK_W26521 |
| 32394_s_at | 0.3294 | 0.0249 | RPL23 |
| 33420_g_at | 0.3297 | 0.0003 | API5 |
| 39742_at | 0.3298 | 0.0007 | TANK |
| 32854_at | 0.3303 | 0.0074 | KIAA0696 |
| 41337_at | 0.3311 | 0.0088 | AES |
| 35471_g_at | 0.3316 | 0.0113 | HTR2A |
| 1796_s_at | 0.3322 | 0.0161 | BCL3 |
| 32541_at | 0.3323 | 0.0013 | PPP3CC |

[0109] In another effort, nearest-neighbor analysis was employed to identify multivariate expression patterns in PBMCs of patients that were correlated with clinical responses. This approach included nearest-neighbor-based identification of transcripts most correlated with the class distinction of interest, random permutation of the sample labels to determine the significance of the discovered gene classifiers, and evaluation of the accuracy of various predictive models containing different numbers of genes by leave-one-out cross validation.

[0110] In one embodiment, nearest-neighbor analysis and supervised class prediction were performed using Genecluster version 2.0 which has been described by Golub, et al., supra, and is available at www.genome.wi.mit.edu/cancer/software/genecluster2.html. For the analysis, all raw expression data were log transformed and normalized to have a mean value of zero and a variance of one. Class prediction was carried out using a k-nearest-neighbors algorithm as described in Armstrong, et al., NATURE GENETICS, 30: 41-47 (2002), which is incorporated herein by reference. This algorithm assigns a test sample to a class by identifying the k-nearest samples in the training set and then choosing the most common class among these k-nearest-neighbors. See Armstrong, et al., supra. For this purpose, distances can be defined by a Euclidean metric on the basis of the expression levels of a specified number of genes.

[0111] FIGS. 1A-1D illustrate the comparison of short and long term survivors. The class distinction is between RCC patients who had TTD of less than 150 days (the “shorter” class) and RCC patients who had TTD of greater than 550 days (the “longer” class). The relative expression levels of the class-correlated gene (rows in FIG. 1A) were indicated for each patient (columns in FIG. 1A) according to the normalized expression level scale. FIG. 1B depicts the comparison of the signal to noise similarity metric scores (S2N, i.e., |P(g,c)|) for class-correlated genes identified in this clinical stratification relative to S2N scores for the top 1%, 5% and 50% of scores for class-correlated genes resulting from randomly permuted data sets. Examples of the genes that are significantly correlated with the shorter survival-longer survival class distinction are demonstrated in Table 10. Each gene depicted in Table 10 is a prognosis gene and can be used to assign a survival class membership to an RCC patient. Table 10 also shows the HgU95A qualifier for each gene (“Qualifier”), the rank of each gene (“Rank #”), the class within which the gene is more highly expressed (“Class”), the S2N score (“Score”), the S2N score under a random permutation analysis at the 1% significance level (“Perm 1%”), the S2N score under a random permutation analysis at the 5% significance level (“Perm 5%”), and the S2N score under a random permutation analysis at the median significance level (“Perm (user)”). The genes are ranked based on their respective S2N scores. Genes more highly expressed in PBMCs of patients in the “shorter” survival class are ranked from 1 to 29, and genes more highly expressed in PBMCs of patients in the “longer” survival class are ranked from 30 to 58.

TABLE 10
Genes for Predicting Shorter versus Longer Survival

| Qualifier | Gene Name | Rank # | Class | Score | Perm 1% | Perm 5% | Perm (user) |
|---|---|---|---|---|---|---|---|
| 1020_s_at | SIP2-28 | 35 | Longer | 1.08 | 1.1401024 | 1.0009979 | 0.7793364 |
| 1665_s_at | ECGF1 | 12 | Shorter | 0.98 | 1.1285181 | 0.9662982 | 0.7793773 |
| 1815_g_at | TGFBR2 | 38 | Longer | 1.04 | 1.0241055 | 0.9226947 | 0.7515544 |
| 1878_g_at | ERCC1 | 27 | Shorter | 0.88 | 0.9426583 | 0.881932 | 0.7000415 |
| 214_at | MSX1 | 1 | Shorter | 1.07 | 1.6155937 | 1.4316087 | 1.0612979 |
| 31432_g_at | FCGRT | 19 | Shorter | 0.91 | 1.0264453 | 0.9054481 | 0.7332006 |
| 32166_at | KIAA1027 | 22 | Shorter | 0.9 | 0.9880754 | 0.8991979 | 0.7198438 |
| 32193_at | PLXNC1 | 7 | Shorter | 1 | 1.1596018 | 1.0244524 | 0.834095 |
| 32318_s_at | ACTB | 11 | Shorter | 0.98 | 1.1415896 | 0.9838351 | 0.7869063 |
| 32475_at | UNK_AF025529 | 10 | Shorter | 0.99 | 1.1436108 | 0.9918097 | 0.7958006 |
| 32569_at | PAFAH1B1 | 39 | Longer | 1.02 | 1.0132701 | 0.9045167 | 0.7348747 |
| 32593_at | KIAA0084 | 50 | Longer | 0.91 | 0.9281602 | 0.8635805 | 0.6594012 |
| 32807_at | DKFZP566C134 | 47 | Longer | 0.92 | 0.9647906 | 0.8758416 | 0.6699242 |
| 33151_s_at | UNK_W25932 | 46 | Longer | 0.93 | 0.9712016 | 0.8771132 | 0.6791526 |
| 33354_at | UNK_AA630312 | 56 | Longer | 0.9 | 0.8798124 | 0.794554 | 0.6361411 |
| 33443_at | UNK_Z99129 | 44 | Longer | 0.94 | 0.9718646 | 0.8817559 | 0.6883464 |
| 33679_f_at | TUBB2 | 24 | Shorter | 0.89 | 0.9583792 | 0.8932177 | 0.7133438 |
| 33777_at | TBXAS1 | 29 | Shorter | 0.88 | 0.9330735 | 0.8570948 | 0.6878592 |
| 33908_at | CAPN1 | 18 | Shorter | 0.93 | 1.0345246 | 0.9114115 | 0.7411601 |
| 34033_s_at | LILRA2 | 6 | Shorter | 1.01 | 1.1651943 | 1.0473512 | 0.8420641 |
| 34256_at | SIAT9 | 53 | Longer | 0.91 | 0.9039352 | 0.7969334 | 0.6420804 |
| 34774_at | PPT | 16 | Shorter | 0.94 | 1.0374199 | 0.9192994 | 0.7528306 |
| 34786_at | KIAA0742 | 32 | Longer | 1.17 | 1.2469592 | 1.0692165 | 0.8567256 |
| 34891_at | PIN | 23 | Shorter | 0.9 | 0.9736318 | 0.8943665 | 0.7149921 |
| 35268_at | UNK_AL050171 | 49 | Longer | 0.92 | 0.933529 | 0.8717929 | 0.6601154 |
| 36091_at | SKAP-HOM | 4 | Shorter | 1.05 | 1.3414925 | 1.0789346 | 0.8906151 |
| 36231_at | UNK_AC002073 | 31 | Longer | 1.17 | 1.2800804 | 1.1628039 | 0.890024 |
| 36403_s_at | UNK_AI434146 | 51 | Longer | 0.91 | 0.9177859 | 0.8269876 | 0.6537137 |
| 36650_at | CCND2 | 40 | Longer | 1.02 | 1.0060078 | 0.8974235 | 0.7254431 |
| 36780_at | CLU | 3 | Shorter | 1.05 | 1.3704714 | 1.1416388 | 0.9158475 |
| 36963_at | PGD | 9 | Shorter | 1 | 1.1566645 | 0.9935466 | 0.8085569 |
| 37012_at | CAPZB | 21 | Shorter | 0.9 | 1.0171863 | 0.9049488 | 0.7224556 |
| 37215_at | PYGL | 25 | Shorter | 0.89 | 0.9504848 | 0.8895108 | 0.711156 |
| 37307_at | GNAI2 | 15 | Shorter | 0.96 | 1.0398792 | 0.9262021 | 0.7620184 |
| 37381_g_at | GTF2B | 57 | Longer | 0.89 | 0.8785508 | 0.7906994 | 0.6284431 |
| 37397_at | PECAM1 | 2 | Shorter | 1.06 | 1.4123416 | 1.195739 | 0.9664123 |
| 37625_at | IRF4 | 33 | Longer | 1.1 | 1.2122538 | 1.0414076 | 0.8297089 |
| 37647_at | AOAH | 26 | Shorter | 0.89 | 0.9455904 | 0.8832746 | 0.704616 |
| 38397_at | UNK_U09196 | 20 | Shorter | 0.9 | 1.0259999 | 0.9053201 | 0.7286741 |
| 38462_at | NDUFA5 | 58 | Longer | 0.88 | 0.8780158 | 0.7896803 | 0.6253915 |
| 38475_at | DCTN-50 | 13 | Shorter | 0.96 | 1.0638589 | 0.9525263 | 0.7732195 |
| 38483_at | HSA011916 | 8 | Shorter | 1 | 1.1577479 | 1.0015978 | 0.8165922 |
| 38518_at | SCML2 | 45 | Longer | 0.93 | 0.9717825 | 0.8807355 | 0.6834326 |
| 38589_i_at | PTMA | 52 | Longer | 0.91 | 0.9170299 | 0.8153701 | 0.6481305 |
| 38831_f_at | UNK_AF053356 | 5 | Shorter | 1.02 | 1.3394433 | 1.0626743 | 0.864975 |
| 39047_at | KIAA0156 | 41 | Longer | 1.01 | 1.0031965 | 0.8962379 | 0.7150707 |
| 39062_at | PPGB | 17 | Shorter | 0.94 | 1.0372473 | 0.9187932 | 0.7441102 |
| 39809_at | HBP1 | 36 | Longer | 1.05 | 1.0694007 | 0.9784921 | 0.7662489 |
| 40610_at | UNK_AI743507 | 42 | Longer | 0.99 | 0.9986351 | 0.8919035 | 0.7074118 |
| 40861_at | KIAA0026 | 48 | Longer | 0.92 | 0.9440813 | 0.8742373 | 0.6670547 |
| 41045_at | SECTM1 | 28 | Shorter | 0.88 | 0.939004 | 0.8613926 | 0.6939691 |
| 41166_at | IGHM | 37 | Longer | 1.04 | 1.0626456 | 0.9303607 | 0.764905 |
| 41288_at | CALM1 | 43 | Longer | 0.96 | 0.9838136 | 0.8910337 | 0.6987405 |
| 41471_at | S100A9 | 14 | Shorter | 0.96 | 1.0545503 | 0.9338488 | 0.7635493 |
| 41669_at | KIAA0191 | 34 | Longer | 1.1 | 1.1760652 | 1.0059531 | 0.8003741 |
| 432_s_at | TRA@ | 55 | Longer | 0.9 | 0.8808494 | 0.7956162 | 0.6383929 |
| 649_s_at | CXCR4 | 30 | Longer | 1.43 | 1.385432 | 1.2324574 | 0.9647334 |
| 760_at | DYRK2 | 54 | Longer | 0.9 | 0.8822472 | 0.7956202 | 0.6396517 |

[0112] The genes that are significantly correlated with the shorter-longer survival class distinction were used to construct gene classifiers for predicting the survival class membership of an RCC patient. Each predictor set was evaluated by cross validation to identify the predictor set with the highest accuracy for classification of the samples. In these analyses, a 58 gene predictor set (77% accuracy) was identified as the optimal classifier, as shown in FIG. 1C. Table 10 describes these 58 genes. FIG. 1D demonstrates the cross validation results for each sample using the 58-gene predictor. A leave-one-out cross validation was performed and the prediction strengths (PS) were calculated for each sample in the analysis. For the purposes of illustration, confidence scores accompanying calls of “TTD>550 days” were assigned positive values, while prediction strengths accompanying calls of “TTD<150 days” were assigned negative values.

[0113] A variety of other clinically relevant stratifications were also performed and relative expression levels of the optimally-sized gene classifiers in each analysis are summarized in FIGS. 2A-2E. The relative expression levels of the genes (rows) in each classifier are indicated for each patient (columns) according to the scale of FIG. 1A. FIG. 2A shows the relative gene expression levels of a 42-gene classifier for the comparison of patients with intermediate versus poor Motzer risk classification. Genes in this classifier are described in Table 11. The baseline expression levels of these genes in PBMCs of RCC patients are predictive of a patient's classification under Motzer risk assessment. FIG. 2B shows the relative gene expression levels for an 18-gene classifier identified in the comparison of patients with progressive disease versus any other clinical response. FIG. 2C demonstrates the relative gene expression levels for a 6-gene classifier identified in the comparison of patients in the lower versus upper quartiles of time to disease progression. Genes in this classifier are illustrated in Table 12. FIG. 2D shows the relative gene expression levels for a 52-gene classifier identified in the comparison of patients in the lower versus upper quartiles of survival/time to death. Finally, FIG. 2E depicts the relative expression levels for a 12-gene classifier identified in the comparison of patients with early (time to disease progression<106 days) versus all other times to disease progression (TTP>106 days). Genes in this classifier are described in Table 13.

TABLE 11
Prognosis Genes for Intermediate Versus Poor Prognosis Motzer Risk

| Qualifier | Gene Name | Rank # | Class | Score | Perm 1% | Perm 5% | Perm (user) |
|---|---|---|---|---|---|---|---|
| 1158_s_at | CALM3 | 23 | Poor | 0.66 | 0.8522128 | 0.8104463 | 0.6502731 |
| 31620_at | TBX10 | 39 | Poor | 0.49 | 0.6641291 | 0.6259432 | 0.5179407 |
| 31979_at | PFKFB4 | 27 | Poor | 0.62 | 0.7544583 | 0.7037743 | 0.584796 |
| 31982_at | KIAA0894 | 11 | Intermediate | 0.69 | 0.7164902 | 0.6715787 | 0.5530081 |
| 32153_s_at | UNK_U49869 | 42 | Poor | 0.49 | 0.6595597 | 0.6149676 | 0.5025353 |
| 32274_r_at | UNK_AF052148 | 35 | Poor | 0.53 | 0.6744095 | 0.6432421 | 0.5315566 |
| 32530_at | YWHAQ | 6 | Intermediate | 0.74 | 0.7697572 | 0.7312037 | 0.5964533 |
| 32576_at | EIF3S5 | 17 | Intermediate | 0.67 | 0.6919704 | 0.624558 | 0.5205478 |
| 32621_at | DR1 | 9 | Intermediate | 0.72 | 0.7232364 | 0.6892603 | 0.5680586 |
| 32766_at | G22P1 | 18 | Intermediate | 0.67 | 0.6909188 | 0.6235876 | 0.5156429 |
| 33178_at | JAG1 | 31 | Poor | 0.54 | 0.716195 | 0.6647701 | 0.554687 |
| 33361_at | GNG3LG | 38 | Poor | 0.51 | 0.6721476 | 0.6284547 | 0.5196677 |
| 33443_at | UNK_Z99129 | 10 | Intermediate | 0.69 | 0.7216778 | 0.680077 | 0.5610381 |
| 34430_at | GPT | 25 | Poor | 0.65 | 0.8082772 | 0.7274678 | 0.6092486 |
| 34787_at | NRD1 | 37 | Poor | 0.52 | 0.6737965 | 0.6314609 | 0.5246186 |
| 35256_at | UNK_AL096737 | 29 | Poor | 0.59 | 0.7415469 | 0.6820045 | 0.5739685 |
| 35299_at | MKNK1 | 24 | Poor | 0.65 | 0.8203746 | 0.757703 | 0.6259301 |
| 35319_at | CTCF | 8 | Intermediate | 0.72 | 0.7329379 | 0.7102606 | 0.5762622 |
| 35327_at | EIF3S3 | 12 | Intermediate | 0.69 | 0.7115967 | 0.671292 | 0.5470585 |
| 36019_at | STK19 | 40 | Poor | 0.49 | 0.6610853 | 0.6217781 | 0.5113894 |
| 36189_at | ILF2 | 16 | Intermediate | 0.67 | 0.6935341 | 0.6311355 | 0.524226 |
| 36391_at | CCNT1 | 32 | Poor | 0.53 | 0.6823648 | 0.6549823 | 0.548012 |
| 36956_at | SLC20A2 | 33 | Poor | 0.53 | 0.6811736 | 0.6523389 | 0.5410793 |
| 37625_at | IRF4 | 21 | Intermediate | 0.65 | 0.6670918 | 0.6195184 | 0.5060937 |
| 38064_at | LRP | 41 | Poor | 0.49 | 0.6599081 | 0.6185175 | 0.5034915 |
| 38075_at | SYPL | 2 | Intermediate | 0.87 | 0.8830003 | 0.8203846 | 0.6704754 |
| 38188_s_at | MAN2A2 | 28 | Poor | 0.6 | 0.7427558 | 0.6900191 | 0.5792173 |
| 38233_at | HOMER-3 | 30 | Poor | 0.55 | 0.7166691 | 0.6707653 | 0.5600951 |
| 38449_at | UNK_W28931 | 36 | Poor | 0.52 | 0.6744089 | 0.635525 | 0.5289256 |
| 38455_at | UNK_AL049650 | 4 | Intermediate | 0.81 | 0.7940041 | 0.7523503 | 0.6209757 |
| 38456_s_at | UNK_AL049650 | 5 | Intermediate | 0.75 | 0.7851316 | 0.7383793 | 0.6078528 |
| 38483_at | HSA011916 | 22 | Poor | 0.71 | 0.9953936 | 0.8946025 | 0.7231015 |
| 38738_at | SMT3H1 | 14 | Intermediate | 0.68 | 0.7003638 | 0.6569433 | 0.5350646 |
| 39057_at | KNS2 | 19 | Intermediate | 0.66 | 0.6841608 | 0.6235478 | 0.5114179 |
| 40071_at | CYP1B1 | 7 | Intermediate | 0.73 | 0.7407701 | 0.717859 | 0.5875649 |
| 40122_at | NSAP1 | 20 | Intermediate | 0.66 | 0.6713382 | 0.6201956 | 0.5080141 |
| 40130_at | FSTL1 | 34 | Poor | 0.53 | 0.6744496 | 0.6458221 | 0.5366854 |
| 40189_at | SET | 15 | Intermediate | 0.67 | 0.69604 | 0.6381373 | 0.5306426 |
| 40494_at | DEDD | 13 | Intermediate | 0.68 | 0.7072377 | 0.6653894 | 0.5396373 |
| 40610_at | UNK_AI743507 | 3 | Intermediate | 0.82 | 0.8709571 | 0.7766898 | 0.6476374 |
| 727_at | OATL3 | 26 | Poor | 0.63 | 0.7856346 | 0.7178927 | 0.5941055 |
| 859_at | CYP1B1 | 1 | Intermediate | 0.88 | 1.0227921 | 0.8774775 | 0.7251933 |

[0114] TABLE 12
Prognosis Genes tor Lower versus Upper Quartiles of TTP

| Qualifier | Gene Name | Rank # | Class | Score | Perm 1% | Perm 5% | Perm (user) |
|---|---|---|---|---|---|---|---|
| 32635_at | KIAA1113 | 6 | Upper | 1.16 | 1.3744625 | 1.0978256 | 0.871069 |
| 33777_at | TBXAS1 | 3 | Lower | 0.92 | 1.4119021 | 1.1079456 | 0.8730354 |
| 37343_at | ITPR3 | 5 | Upper | 1.17 | 1.4312017 | 1.1718279 | 0.9049279 |
| 39593_at | FGL2 | 2 | Lower | 0.95 | 1.4426517 | 1.2094518 | 0.9016392 |
| 41634_at | UNK_D87445 | 4 | Upper | 1.17 | 1.4784068 | 1.2896696 | 0.9924999 |
| 935_at | CAP | 1 | Lower | 0.98 | 1.5250124 | 1.2581625 | 0.9758878 |

[0115] TABLE 13
Prognosis Genes for Longer (≧106 days) versus Shorter (<106 days) TTP

| Qualifier | Gene Name | Rank# | Class | Score | Perm 1% | Perm 5% | Perm (user) |
|---|---|---|---|---|---|---|---|
| 1653_at | RPS3A | 12 | Longer | 0.67 | 0.8055016 | 0.7561978 | 0.6425947 |
| 1665_s_at | ECGF1 | 1 | Shorter | 0.85 | 1.0884173 | 1.014112 | 0.8190228 |
| 1815_g_at | TGFBR2 | 9 | Longer | 0.7 | 0.9029855 | 0.8274894 | 0.6774455 |
| 31675_s_at | PTENP1 | 2 | Shorter | 0.85 | 0.98265 | 0.8774547 | 0.7430871 |
| 31993_f_at | UNK_U80764 | 7 | Longer | 0.77 | 1.0337092 | 0.970009 | 0.7476342 |
| 32569_at | PAFAH1B1 | 11 | Longer | 0.7 | 0.8284972 | 0.7577868 | 0.647478 |
| 33660_at | RPL5 | 10 | Longer | 0.7 | 0.8362634 | 0.782186 | 0.6625283 |
| 37148_at | LILRB3 | 4 | Shorter | 0.77 | 0.9059746 | 0.8105006 | 0.6940544 |
| 37343_at | ITPR3 | 8 | Longer | 0.76 | 0.9370008 | 0.8503211 | 0.7099578 |
| 38397_at | UNK_U09196 | 3 | Shorter | 0.84 | 0.961974 | 0.841938 | 0.710196 |
| 40607_at | DPYSL2 | 5 | Shorter | 0.75 | 0.8795726 | 0.7939292 | 0.6816332 |
| 41045_at | SECTM1 | 6 | Shorter | 0.74 | 0.8546471 | 0.791536 | 0.6672204 |

[0116] Leave-one-out cross validation using the above-described gene classifiers for the clinical stratifications of intermediate versus poor prognosis Motzer risk, early progressors (TTP<106 days) versus all other patients, lower quartile TTP versus upper quartile TTP, and short term (survival<150 days) versus long term survivors (survival>550 days) yielded 74.4%, 77.8%, 77.3% and 79% overall accuracy for class assignment, respectively. Performance characteristics of the above-described classifiers are summarized in Table 14. The accuracy, sensitivity, and specificity for class assignment under each classifier using leave-one-out cross validation are demonstrated in the table. The k-nearest-neighbors algorithm as described in Armstrong, et al., supra, was employed for all evaluations.

TABLE 14
Performance Characteristics of Gene Classifiers
from Supervised Approaches

| | Size of | | | |
|---|---|---|---|---|
| | Optimal Gene | Accuracy | Sensitivity | Specificity |
| Classification | Classifier | (%) | (%) | (%) |
| Motzer risk Poor vs | 42 | 74.4 | 72.7 | 76.5 |
| Intermediate | | | | |
| Progressive disease | 18 | 66.7 | 22.2 | 78.7 |
| vs any clinical | | | | |
| response | | | | |
| Lowest quartile | 52 | 63.6 | 54.5 | 72.7 |
| survival vs | | | | |
| highest quartile | | | | |
| survival | | | | |
| Lowest quartile | 6 | 77.3 | 81.8 | 72.7 |
| TTP vs | | | | |
| highest quartile | | | | |
| TTP | | | | |
| Short term | 58 | 79.0 | 57.4 | 85.7 |
| survival (TTD < | | | | |
| 150 days) vs | | | | |
| long term | | | | |
| survival | | | | |
| (survival > 550 | | | | |
| days) | | | | |
| Early progression | 12 | 77.8 | 45.5 | 88.2 |
| TTP < 106 | | | | |
| days vs all other | | | | |
| patients | | | | |

[0117] “Sensitivity” as used herein refers to the ratio of correct positive calls over the total of true positive calls plus false negative calls. “Specificity” refers to the ratio of correct negative calls over the total of true negative calls plus false positive calls. The genes identified in FIGS. 1A and 2A-2E and Tables 10-13, or the classifiers derived therefrom, can be used to assign an RCC patient to a respective clinical class selected from Table 14.

[0118] In yet another approach, unsupervised clustering was employed to identify genes that are correlated with survival. One of the primary endpoints of a clinical trial or a therapeutic treatment is survival. The above-described gene classifiers do not predict short term survival with supreme sensitivity and specificity (such as over 90%, 95%, or more). This might be due to heterogeneity in PBMC expression patterns from patients binned arbitrarily into different survival categories that precludes highly accurate prediction using forced-type supervised approaches. A pharmacogenomic assay capable of identifying short-term and long-term survivors in a significant fraction of the intended treatment population would still have obvious benefit, in terms of clinical prognosis. In an attempt to identify a more limited subset of patients with similar clinical outcomes for which class assignment would be more robust, an unsupervised hierarchical clustering approach using all genes passing the initial criteria (5,424 genes total) was employed.

[0119] The unsupervised hierarchical clustering was performed according to the procedure described in Eisen, et al., PROC NATL ACAD SCI U.S.A., 95: 14863-14868 (1998). For hierarchical clustering, data were log transformed and normalized to have a mean value of zero and a variance of one. Hierarchical clustering results were generated using average linkage clustering and an uncentered correlation similarity metric.

[0120] The dendrogram in FIG. 3A shows that sample relationships grouped the RCC PBMCs (n=45) into four roughly equivalent sized subclusters designated A through D. The majority of patients in cluster A possessed significantly shorter survival than the majority of patients in cluster C, suggesting that expression differences in these two subclusters of patients could be predictive of survival in the majority of patients in these subpopulations. RCC patient PBMC expression profiles in the poor prognosis cluster (“A”) are indicated by the box around subcluster “A” in which 9 out of 12 patients exhibited survival of less than 365 days. RCC patient PBMC expression profiles in the good prognosis cluster (“C”) are indicated by the box around subcluster “C” in which 10 out of 12 patients exhibited survival of 365 or more days. In addition, prognostic Motzer scores were distinct between subclusters A and C, as indicated in FIG. 3A.

[0121] FIG. 3B shows the baseline expression patterns of a group of selected genes in subclusters A-D. Elevated or decreased expression values relative to the average expression value across all experiments are indicated according to the scale of FIG. 1A.

[0122] Kaplan-Meier analysis demonstrated that patients in the four subclusters possessed significant differences in survival (p=0.021, Wilcoxon test). Kaplan-Meier analysis showed that prognosis by PBMC gene expression signature in subgroups A (“Poor signature”) and C (“Good Signature”) yielded more significant differences in survival (p=0.0025, Wilcoxon test) than prognosis by the Motzer risk assessment (p=0.0125, Wilcoxon test). See FIG. 4A and FIG. 4B.

[0123] The above finding suggests that there exist biologically distinct differences in expression patterns of PBMCs that are predictive of survival in patients with RCC. Because it was possible that the observed differences in expression were driven by differences in patient demographics or even by technical differences in the samples, technical and demographical characteristics between these two subclusters (cluster “A” versus cluster “C”) were compared in Table 15 Comparison of technical and demographic parameters indicated no significant difference between these subgroups of patients, and the only significant differences between these groups appear to be the prognostic Motzer risk classification and the primary clinical endpoint of survival. Values for the individual parameters associated with profiles in each of the clusters were tested for differences (p-value).

TABLE 15
Significance Testing of Technical, Demographic, Prognostic
and Clinical Parameters Observed in Patients and PBMC
profiles in Good versus Poor Prognosis Clusters

| | | | |
|---|---|---|---|
| | Poor Prognosis | Good Prognosis | |
| Parameter | (Cluster “A”) | (Cluster “C”) | p-value |

Technical

| | | | |
|---|---|---|---|
| Raw Q | 2.34 | 2.45 | 0.5200 |
| GAPDH 5′/3′ ratio | 0.95 | 0.93 | 0.6600 |
| Scale factor | 2.94 | 2.69 | 0.5800 |
| Average frequency | 16.8 | 19.6 | 0.2000 |
| (ppm) | | | |
| Present calls | 4178 | 4194 | 0.9400 |

Demographical

| | | | |
|---|---|---|---|
| Sex | 9 male/3 female | 9 male/3 female | 1.000 |
| Age (years) | 59.3 | 53.8 | 0.0870 |
| Ethnicity | 100% Caucasian | 100% Caucasian | 1.000 |

Prognostic assessment

| | | | |
|---|---|---|---|
| Motzer | 8 poor, 4 | 3 poor, 7 | N/A |
| classification | intermediate | intermediate, 2 | |
| | | favorable | |

Clinical endpoint

| | | | |
|---|---|---|---|
| Median survival | 281 | 573 | 0.0025 |
| time (days) | | | |
| Average TTP (days) | 117 | 240 | 0.1812^{b} |

[0124] Given the robust differences in median survival times between PBMC profiles in the poor and good prognosis clusters, a nearest-neighbor algorithm was employed to identify the transcripts in the subsets of PBMCs that are significantly correlated with good and poor prognosis signatures. The relative expression levels of an optimally-sized gene classifier derived from this analysis are shown in FIG. 5A. The gene classifier was composed of 158 genes. Because the good prognosis and poor prognosis clusters were identified based upon their differences in gene expression, random permutation of this nearest-neighbor analyses showed the genes in the classifier to be significantly correlated as expected (p<0.01). The relative expression levels of each gene (rows) are indicated for each patient (columns) according to the scale depicted in FIG. 1A. Each gene in the classifier and its respective expression level in each class (poor versus good prognosis cluster) are summarized in Table 16.

TABLE 16
Prognosis Genes for Assigning Class Membership to Patients
in the Good and Poor Prognosis Subclusters

| Qualifier | Gene Name | Rank # | Class | Score | Perm 1% | Perm 5% | Perm (user) |
|---|---|---|---|---|---|---|---|
| 1034_at | TIMP3 | 90 | Good | 1.57 | 1.0445594 | 0.9665145 | 0.7096911 |
| 1097_s_at | CCR7 | 155 | Good | 1.23 | 0.8934941 | 0.7093403 | 0.5209759 |
| 1158_s_at | CALM3 | 71 | Poor | 0.98 | 1.0384812 | 0.7927625 | 0.5121112 |
| 1267_at | PRKCH | 104 | Good | 1.46 | 0.9849667 | 0.8875619 | 0.6371682 |
| 1315_at | UNK_D78361 | 11 | Poor | 1.51 | 1.1908811 | 0.9882026 | 0.6823562 |
| 1323_at | UNK_X04803 | 76 | Poor | 0.96 | 1.0239922 | 0.7720025 | 0.5026828 |
| 1424_s_at | YWHAH | 8 | Poor | 1.56 | 1.2260145 | 0.9882028 | 0.712902 |
| 1479_g_at | ITK | 158 | Good | 1.22 | 0.8877654 | 0.7093402 | 0.5143056 |
| 1717_s_at | API2 | 85 | Good | 1.68 | 1.1154871 | 1.0003265 | 0.7644543 |
| 202_at | HSF2 | 103 | Good | 1.5 | 0.9849667 | 0.900169 | 0.6398714 |
| 2069_s_at | CTNNA1 | 9 | Poor | 1.55 | 1.205555 | 0.9882026 | 0.7047761 |
| 2085_s_at | CTNNA1 | 40 | Poor | 1.16 | 1.1177368 | 0.8824167 | 0.5698908 |
| 2090_i_at | UNK_H12458 | 62 | Poor | 1.01 | 1.0607328 | 0.8190967 | 0.525894 |
| 268_at | PECAM1 | 34 | Poor | 1.25 | 1.1177368 | 0.9106545 | 0.5847529 |
| 283_at | UQCRC1 | 27 | Poor | 1.32 | 1.1177368 | 0.9440462 | 0.6078221 |
| 286_at | H2AFO | 55 | Poor | 1.06 | 1.07645 | 0.8355755 | 0.534318 |
| 307_at | ALOX5 | 75 | Poor | 0.96 | 1.0283809 | 0.7769105 | 0.506168 |
| 31444_s_at | ANXA2P2 | 2 | Poor | 1.67 | 1.3424762 | 1.1425713 | 0.8610321 |
| 31504_at | HDLBP | 54 | Poor | 1.07 | 1.0793227 | 0.8362562 | 0.5385964 |
| 31682_s_at | CSPG2 | 20 | Poor | 1.35 | 1.1213673 | 0.9803211 | 0.6337798 |
| 32087_at | HSF2 | 146 | Good | 1.26 | 0.9003578 | 0.7252433 | 0.5342414 |
| 32097_at | PCNT | 107 | Good | 1.44 | 0.9849666 | 0.8821047 | 0.6232104 |
| 32153_s_at | UNK_U49869 | 46 | Poor | 1.13 | 1.1102691 | 0.8593918 | 0.5556471 |
| 32183_at | SFRS11 | 108 | Good | 1.43 | 0.9849666 | 0.8821047 | 0.6206105 |
| 32541_at | PPP3CC | 93 | Good | 1.56 | 1.0293367 | 0.9353749 | 0.6922912 |
| 32680_at | KIAA0551 | 157 | Good | 1.22 | 0.8893883 | 0.7093402 | 0.5186095 |
| 32749_s_at | FLNA | 61 | Poor | 1.02 | 1.0607328 | 0.8224345 | 0.5291181 |
| 32775_r_at | PLSCR1 | 78 | Poor | 0.95 | 1.0217315 | 0.7712451 | 0.4984867 |
| 32800_at | RXRA | 79 | Poor | 0.95 | 1.0212312 | 0.7709695 | 0.4976646 |
| 32804_at | UNK_AF091263 | 142 | Good | 1.27 | 0.9081621 | 0.7369459 | 0.5426338 |
| 32806_at | BZRP | 53 | Poor | 1.08 | 1.0906383 | 0.8376178 | 0.5398285 |
| 33134_at | ADCY3 | 101 | Good | 1.52 | 1.0293367 | 0.9001691 | 0.6478866 |
| 33267_at | UNK_AF035315 | 140 | Good | 1.28 | 0.9149016 | 0.7390382 | 0.5443108 |
| 33371_s_at | RAB31 | 31 | Poor | 1.28 | 1.1177368 | 0.9281045 | 0.5929822 |
| 33521_at | ATP4A | 111 | Good | 1.42 | 0.9608656 | 0.8507274 | 0.6137387 |
| 33659_at | CFL1 | 77 | Poor | 0.96 | 1.0239921 | 0.7719817 | 0.5007594 |
| 33733_at | ABCG2 | 67 | Poor | 0.99 | 1.054551 | 0.7991308 | 0.517656 |
| 33777_at | TBXAS1 | 50 | Poor | 1.11 | 1.0997332 | 0.843028 | 0.5445145 |
| 33788_at | LAP70 | 94 | Good | 1.55 | 1.0293367 | 0.9353749 | 0.685765 |
| 33797_at | MPHOSPH10 | 127 | Good | 1.33 | 0.9353749 | 0.7733641 | 0.571226 |
| 33819_at | LDHB | 97 | Good | 1.54 | 1.0293367 | 0.9353749 | 0.674343 |
| 33847_s_at | UNK_AI304854 | 125 | Good | 1.34 | 0.9353749 | 0.804844 | 0.5768012 |
| 33956_at | MD-2 | 3 | Poor | 1.62 | 1.2851958 | 1.1000433 | 0.8143725 |
| 34033_s_at | LILRA2 | 49 | Poor | 1.11 | 1.1055416 | 0.8472178 | 0.5492646 |
| 34256_at | SIAT9 | 133 | Good | 1.31 | 0.9240009 | 0.7478784 | 0.5555079 |
| 34268_at | GAIP | 52 | Poor | 1.1 | 1.0969372 | 0.840719 | 0.5409537 |
| 34311_at | GLRX | 66 | Poor | 0.99 | 1.0546845 | 0.8039182 | 0.52042 |
| 34400_at | QP-C | 72 | Poor | 0.98 | 1.0359778 | 0.7868937 | 0.5083646 |
| 34654_at | MTMR1 | 100 | Good | 1.53 | 1.0293367 | 0.9353749 | 0.6529696 |
| 34660_at | RNASE6 | 29 | Poor | 1.3 | 1.1177368 | 0.9303353 | 0.5994623 |
| 34665_g_at | FCGR2B | 4 | Poor | 1.6 | 1.2845235 | 1.0609695 | 0.7795188 |
| 34768_at | DKFZP564E1962 | 26 | Poor | 1.32 | 1.1177368 | 0.9440462 | 0.6101461 |
| 34787_at | NRD1 | 37 | Poor | 1.18 | 1.1177368 | 0.8910962 | 0.5777738 |
| 34829_at | DKC1 | 115 | Good | 1.41 | 0.9353749 | 0.8407055 | 0.601603 |
| 34983_at | CYP26A1 | 147 | Good | 1.26 | 0.9001691 | 0.7248857 | 0.531943 |
| 35238_at | TRAF5 | 92 | Good | 1.56 | 1.0293367 | 0.9353749 | 0.6963615 |
| 35286_r_at | RY1 | 135 | Good | 1.29 | 0.9199694 | 0.7444252 | 0.5536141 |
| 35319_at | CTCF | 89 | Good | 1.61 | 1.047387 | 0.9665145 | 0.7147587 |
| 35748_at | EEF1B2 | 141 | Good | 1.28 | 0.9107076 | 0.7378222 | 0.5433901 |
| 35753_at | PRP8 | 80 | Good | 1.79 | 1.2117286 | 1.1793184 | 0.9261844 |
| 35773_i_at | NDUFB7 | 38 | Poor | 1.17 | 1.1177368 | 0.8840246 | 0.574061 |
| 35802_at | KIAA1014 | 114 | Good | 1.41 | 0.9515032 | 0.8442041 | 0.6024917 |
| 35810_at | ARPC3 | 13 | Poor | 1.49 | 1.185541 | 0.9882026 | 0.677634 |
| 35853_at | PRKCABP | 126 | Good | 1.34 | 0.9353749 | 0.7811259 | 0.5762339 |
| 35869_at | MD-1 | 22 | Poor | 1.34 | 1.1197696 | 0.9543627 | 0.6252207 |
| 36021_at | UNK_AL049409 | 131 | Good | 1.31 | 0.9256013 | 0.7528632 | 0.560786 |
| 36094_at | TNNT3 | 154 | Good | 1.23 | 0.8941191 | 0.7129431 | 0.5212274 |
| 36130_f_at | MT1E | 69 | Poor | 0.98 | 1.0426595 | 0.7957169 | 0.5151819 |
| 36155_at | KIAA0275 | 134 | Good | 1.31 | 0.9219777 | 0.7474341 | 0.5539118 |
| 36199_at | DAP | 32 | Poor | 1.27 | 1.1177368 | 0.9266225 | 0.5910927 |
| 36231_at | UNK_AC002073 | 102 | Good | 1.51 | 0.9849667 | 0.900169 | 0.6418348 |
| 36403_s_at | UNK_AI434146 | 87 | Good | 1.65 | 1.0968254 | 0.9748203 | 0.735724 |
| 36456_at | DKFZP564I052 | 105 | Good | 1.45 | 0.9849667 | 0.8821048 | 0.6290045 |
| 36488_at | EGFL5 | 45 | Poor | 1.14 | 1.1102691 | 0.8690057 | 0.5559479 |
| 36545_s_at | UNK_AB011114 | 153 | Good | 1.24 | 0.894684 | 0.7135342 | 0.5253994 |
| 36675_r_at | PFN1 | 43 | Poor | 1.16 | 1.1110159 | 0.8790239 | 0.5610438 |
| 36753_at | LILRB4 | 64 | Poor | 1 | 1.0607327 | 0.8089606 | 0.5225678 |
| 36780_at | CLU | 41 | Poor | 1.16 | 1.1177368 | 0.8801252 | 0.5655208 |
| 36786_at | UNK_AL022721 | 148 | Good | 1.25 | 0.9001691 | 0.7246513 | 0.5306757 |
| 36889_at | FCER1G | 16 | Poor | 1.4 | 1.1736697 | 0.9882026 | 0.6554383 |
| 36949_at | CSNK1D | 128 | Good | 1.33 | 0.9343908 | 0.7698004 | 0.5710414 |
| 36963_at | PGD | 63 | Poor | 1 | 1.0607327 | 0.8144836 | 0.5233427 |
| 37005_at | NBL1 | 123 | Good | 1.35 | 0.9353749 | 0.8079842 | 0.58034 |
| 37021_at | CTSH | 12 | Poor | 1.5 | 1.1857843 | 0.9882026 | 0.6823562 |
| 37078_at | CD3Z | 109 | Good | 1.43 | 0.9660364 | 0.8821047 | 0.6199971 |
| 37148_at | LILRB3 | 5 | Poor | 1.59 | 1.2723099 | 1.0463293 | 0.766221 |
| 37220_at | FCGR1A | 6 | Poor | 1.58 | 1.2682304 | 1.0439228 | 0.7437066 |
| 37311_at | TALDO1 | 24 | Poor | 1.33 | 1.1197696 | 0.9471594 | 0.6192882 |
| 37343_at | ITPR3 | 143 | Good | 1.27 | 0.908162 | 0.7334376 | 0.5423645 |
| 37462_i_at | SF3A2 | 144 | Good | 1.27 | 0.9061325 | 0.732057 | 0.5407514 |
| 37647_at | AOAH | 48 | Poor | 1.11 | 1.1081125 | 0.8492031 | 0.5507001 |
| 37689_s_at | FCGR2A | 33 | Poor | 1.26 | 1.1177368 | 0.9106545 | 0.5880215 |
| 37727_i_at | RCN2 | 86 | Good | 1.67 | 1.1081127 | 0.994302 | 0.7482241 |
| 38019_at | CSNK1E | 95 | Good | 1.55 | 1.0293367 | 0.9353749 | 0.6819632 |
| 38030_at | KIAA0332 | 124 | Good | 1.34 | 0.9353749 | 0.8055808 | 0.5792956 |
| 38081_at | LTA4H | 10 | Poor | 1.54 | 1.1932396 | 0.9882026 | 0.6909306 |
| 38111_at | CSPG2 | 21 | Poor | 1.34 | 1.1197697 | 0.9688478 | 0.6295477 |
| 38112_g_at | CSPG2 | 14 | Poor | 1.46 | 1.180172 | 0.9882026 | 0.6708109 |
| 38113_at | KIAA0796 | 145 | Good | 1.27 | 0.9005588 | 0.7278896 | 0.5385186 |
| 38148_at | CRY1 | 112 | Good | 1.42 | 0.9515032 | 0.8507274 | 0.6115539 |
| 38363_at | TYROBP | 23 | Poor | 1.34 | 1.1197696 | 0.9526655 | 0.6241006 |
| 384_at | PSMB10 | 65 | Poor | 0.99 | 1.0564462 | 0.8055046 | 0.521621 |
| 38483_at | HSA011916 | 47 | Poor | 1.12 | 1.1081127 | 0.8492386 | 0.5539569 |
| 38527_at | NONO | 139 | Good | 1.28 | 0.9153488 | 0.7403588 | 0.5454356 |
| 38542_at | NPM1 | 152 | Good | 1.24 | 0.8994522 | 0.7153279 | 0.5264516 |
| 38621_at | UNK_AJ012008 | 70 | Poor | 0.98 | 1.040839 | 0.7946492 | 0.5128855 |
| 38702_at | UNK_AF070640 | 113 | Good | 1.42 | 0.9515032 | 0.8507274 | 0.6056142 |
| 38843_at | HMG2L1 | 110 | Good | 1.42 | 0.9609948 | 0.851209 | 0.6164021 |
| 39043_at | ARPC1B | 42 | Poor | 1.16 | 1.1148714 | 0.8795826 | 0.5652992 |
| 39047_at | KIAA0156 | 121 | Good | 1.36 | 0.9353749 | 0.8101286 | 0.586782 |
| 39320_at | CASP1 | 51 | Poor | 1.1 | 1.0991173 | 0.842422 | 0.5426413 |
| 39329_at | ACTN1 | 57 | Poor | 1.06 | 1.0681722 | 0.829216 | 0.5313845 |
| 39347_at | CLAPS2 | 39 | Poor | 1.17 | 1.1177368 | 0.8826484 | 0.5715545 |
| 39360_at | SNX3 | 19 | Poor | 1.35 | 1.1216959 | 0.9803817 | 0.6441603 |
| 39509_at | UNK_AI692348 | 129 | Good | 1.33 | 0.9292568 | 0.7677588 | 0.5698953 |
| 39727_at | DUSP11 | 136 | Good | 1.29 | 0.9195961 | 0.7429254 | 0.5511671 |
| 39749_at | PSMD4 | 18 | Poor | 1.36 | 1.1250532 | 0.9814645 | 0.6473147 |
| 39864_at | CIRBP | 106 | Good | 1.44 | 0.9849667 | 0.8821048 | 0.6261963 |
| 39971_at | LYL1 | 73 | Poor | 0.97 | 1.034686 | 0.782038 | 0.5071201 |
| 39997_at | PFC | 58 | Poor | 1.05 | 1.0657651 | 0.8253264 | 0.530821 |
| 40016_g_at | KIAA0303 | 151 | Good | 1.24 | 0.9001691 | 0.7179127 | 0.5294558 |
| 40048_at | UNK_D43951 | 130 | Good | 1.31 | 0.9281045 | 0.7539371 | 0.5626611 |
| 40092_at | BAZ2A | 132 | Good | 1.31 | 0.9250832 | 0.7514259 | 0.558431 |
| 40219_at | HIS1 | 138 | Good | 1.28 | 0.9159876 | 0.741164 | 0.5472672 |
| 40308_at | UNK_AI830496 | 82 | Good | 1.72 | 1.1483467 | 1.0505675 | 0.8307809 |
| 40432_at | UNK_AA522891 | 35 | Poor | 1.2 | 1.1177368 | 0.8967329 | 0.5814439 |
| 40442_f_at | DKFZP564M2423 | 98 | Good | 1.54 | 1.0293367 | 0.9353749 | 0.6680597 |
| 40511_at | GATA3 | 118 | Good | 1.39 | 0.9353749 | 0.839215 | 0.5919577 |
| 40607_at | DPYSL2 | 59 | Poor | 1.02 | 1.0607328 | 0.8238136 | 0.5300378 |
| 40667_at | CD6 | 96 | Good | 1.54 | 1.0293367 | 0.9353749 | 0.6789862 |
| 40775_at | ITM2A | 149 | Good | 1.25 | 0.9001691 | 0.7227228 | 0.530193 |
| 40803_at | UNK_AL050161 | 150 | Good | 1.25 | 0.9001691 | 0.7224947 | 0.5295897 |
| 40868_at | UNK_AA442799 | 120 | Good | 1.38 | 0.9353749 | 0.8153356 | 0.5874232 |
| 40896_at | POU2F1 | 156 | Good | 1.23 | 0.8902482 | 0.7093403 | 0.518687 |
| 41045_at | SECTM1 | 30 | Poor | 1.28 | 1.1177368 | 0.9303353 | 0.5970426 |
| 41136_s_at | APP | 68 | Poor | 0.99 | 1.0522225 | 0.7964097 | 0.5154617 |
| 41153_f_at | CTNNA1 | 7 | Poor | 1.57 | 1.2448796 | 1.0065852 | 0.7184531 |
| 41155_at | CTNNA1 | 17 | Poor | 1.38 | 1.1483397 | 0.986167 | 0.6532167 |
| 41156_g_at | CTNNA1 | 15 | Poor | 1.42 | 1.1749569 | 0.9882026 | 0.6594592 |
| 41224_at | KIAA0788 | 88 | Good | 1.62 | 1.065765 | 0.9665145 | 0.7224365 |
| 41256_at | EEF1D | 122 | Good | 1.35 | 0.9353749 | 0.8079842 | 0.5821422 |
| 41288_at | CALM1 | 119 | Good | 1.39 | 0.9353749 | 0.8157417 | 0.5898756 |
| 41300_s_at | ITM2B | 56 | Poor | 1.06 | 1.0734221 | 0.8317348 | 0.5335996 |
| 41337_at | AES | 117 | Good | 1.4 | 0.9353749 | 0.8396499 | 0.5959157 |
| 41338_at | AES | 83 | Good | 1.71 | 1.1325878 | 1.0314 | 0.8103616 |
| 41569_at | KIAA0974 | 99 | Good | 1.53 | 1.0293367 | 0.9353749 | 0.6633855 |
| 41577_at | KIAA0823 | 91 | Good | 1.57 | 1.0398163 | 0.9665145 | 0.7029273 |
| 41669_at | KIAA0191 | 116 | Good | 1.41 | 0.9353749 | 0.8399643 | 0.5969042 |
| 41745_at | IFITM3 | 74 | Poor | 0.97 | 1.0346859 | 0.7782155 | 0.5068782 |
| 430_at | NP | 25 | Poor | 1.33 | 1.1177368 | 0.9440463 | 0.6164243 |
| 574_s_at | CASP1 | 36 | Poor | 1.2 | 1.1177368 | 0.8938736 | 0.5782988 |
| 663_at | EIF1A | 137 | Good | 1.29 | 0.9186698 | 0.741367 | 0.5490503 |
| 769_s_at | ANXA2 | 1 | Poor | 1.77 | 1.4823041 | 1.2688332 | 0.9412579 |
| 777_at | GDI2 | 44 | Poor | 1.15 | 1.1102691 | 0.8734871 | 0.5567811 |
| 840_at | ZNF220 | 81 | Good | 1.77 | 1.1495084 | 1.0703588 | 0.8762291 |
| 880_at | FKBP1A | 28 | Poor | 1.31 | 1.1177368 | 0.9303353 | 0.6 |
| 906_at | STAT4 | 84 | Good | 1.7 | 1.118592 | 1.0010654 | 0.7911333 |
| AFFX- | BACTINM_{—} | 60 | Poor | 1.02 | 1.0607328 | 0.8230627 | 0.5292476 |
| HSAC07/ | Hs_{—} | | | | | | |
| X00351_M_at | AFFX | | | | | | |

[0125] Leave-one-out cross validation using the 158-gene classifier for predicting good versus poor prognosis gene signature yielded 100% overall accuracy for class assignment. However, three of the patients in the poor prognosis cluster actually possessed substantially longer survival times, and two of the patients whose PBMC profiles segregated with the good prognosis cluster actually possessed shorter survival times. To estimate the accuracy, sensitivity and specificity of this gene classifier with respect to true clinical outcome, a poor outcome was arbitrarily defined as <365 days survival and a good outcome was defined as >365 days. We took into account the incorrect assignment of the outlier profiles in the clusters and defined the objective of the clinical assay as the identification of patients with short (less than 1 year) survival times. Using these criteria the performance of the 158-gene classifier (by leave-one-out cross validation) demonstrated 79% overall accuracy, correctly identifying 9 of 11 patients with short survival times (less than 1 year, 82% sensitivity) and 10 of 13 patients with long term survival times (greater than 1 year, 77% specificity). See FIG. 5B. In FIG. 5B, the confidence scores were calculated for each sample in the analysis. For the purposes of illustration, prediction strengths accompanying calls of “survival>1 year” were assigned positive values, and prediction strengths accompanying calls of “survival<1 year” were assigned negative values. Asterisks identify the false positives in this clinical assay designed to identify short survival times, and arrowheads indicate false negatives.

[0126] As appreciated by one of ordinary skill in the art, prognosis genes for other solid tumors can be similarly identified according to the present invention. These genes are differentially expressed in peripheral blood cells of solid tumor patients having different clinical outcomes.

III. Prognosis and Selection of Treatment of RCC and Other Solid Tumors

[0127] The prognosis genes of the present invention can be used as surrogate markers for the prognosis of solid tumors. The prognosis genes of the present invention can also be used to select optimal treatments of solid tumors. For instance, clinical outcomes of different treatments for a solid tumor can be analyzed by using peripheral blood expression profiling. Treatments with favorable prognoses are selected for patients of interest.

[0128] Any solid tumor, treatment, or clinical outcome can be assessed by the present invention. As described above, clinical outcome can be measured by TTP (e.g., less than or greater than a specified period), TTD (e.g., less than or greater than a specified period), progressive disease, non-progressive disease, stable disease, complete response, partial response, minor response, or a combination thereof. Clinical outcome can also be prognosticated based on clinical classifications under traditional risk assessment methods (such as Motzer risk assessment for RCC, as described in Motzer, et al., supra). In addition, non-responsiveness to a therapeutic treatment is also considered a measurable outcome.

[0129] To predict clinical outcome of a patient of interest, the peripheral blood expression profile of one or more prognosis genes in the patient of interest is compared to at least one reference expression profile. Any number of prognosis genes can be used. In many embodiments, the PBMC expression profiles of the prognosis genes are correlated with patient outcome under a class-based correlation metric (such as nearest-neighbor analysis) or a statistical method (such as Spearman's rank correlation or Cox proportional hazard regression model). In one example, the prognosis genes are differentially expressed in PBMCs of one class of patients as compared to another class of patients. Both classes of patients have a solid tumor, and each class of patients has a different clinical outcome. In another example, the PBMC expression level of each prognosis gene is substantially higher or substantially lower in PBMCs of one class of patients than that in another class of patients. In still another example, the prognosis genes are substantially correlated with a class distinction between two classes of patients, where the two classes of patients have the same disease as the patient of interest, and each class of patients has a different clinical outcome. In many cases, the prognosis genes are correlated with the class distinction at above the 50%, 25%, 10%, 5%, or 1% significance level under random permutation tests.

[0130] One or more reference expression profiles can be used. The reference expression profile(s) can be determined concurrently with the expression profile of the patient of interest. The reference expression profile(s) can also be predetermined or prerecorded in an electronic or another storage medium. In one embodiment, the reference expression profile(s) is an average expression profile of the prognosis genes in peripheral blood samples of reference patients. Any averaging algorithm can be used to prepare the reference expression profile(s). In many cases, the reference patients have the same solid tumor as the patient of interest, and the clinical outcome of the reference patients is either known or determinable. In another embodiment, the reference patients can be divided into at least two classes, each class having a different respective clinical outcome. The peripheral blood expression profile of the prognosis genes in each class of the reference patients constitutes a separate reference profile.

[0131] The expression profile of the patient of interest and the reference expression profile(s) can be in any form. In one embodiment, the expression profiles comprise the expression level of each prognosis gene used in the comparison. The expression levels can have absolute, normalized, or relative values. Suitable normalization procedures include, but are not limited to, those used in nucleic acid array gene expression analyses or those described in Hill, et al., GENOME BIOL, 2: research0055.1-0055.13 (2001). In one example, the expression levels are normalized such that the mean is zero and the standard deviation is one. In another example, the expression levels are normalized based on internal or external controls, as appreciated by those skilled in the art. In still another example, the expression levels are normalized against one or more control transcripts with known abundances in blood samples. In many cases, the expression profile of the patient of interest and the reference expression profile(s) are constructed using the same or comparable methodology.

[0132] In another embodiment, the expression profiles comprise one or more ratios between the expression levels of different prognosis genes. The expression profiles can also include other measures that are capable of representing gene expression patterns.

[0133] The peripheral blood samples used in the present invention can be either whole blood samples, or samples comprising enriched PBMCS. In one example, the peripheral blood samples from the reference patients comprise enriched or purified PBMCS, and the peripheral blood sample from the patient of interest is a whole blood sample. In another example, all of the peripheral blood samples employed in the analysis comprise enriched or purified PBMCS. In many cases, the peripheral blood samples are prepared from the patient of interest and the reference patients by using the same or comparable procedures.

[0134] Other types of blood samples can also be employed in the present invention, provided that a statistically significant correlation exists between patient outcome and the gene expression profile in these blood samples.

[0135] The peripheral blood samples used in the present invention can be isolated from respective patients at any disease or treatment stage, provided that the correlation between the gene expression patterns in these peripheral blood samples and clinical outcome is statistically significant. In one embodiment, clinical outcome is measured by patients' response to a therapeutic treatment, and all of the blood samples used in the analysis are isolated prior to the therapeutic treatment. The expression profiles derived from these blood samples are baseline expression profiles for the therapeutic treatment.

[0136] Construction of the expression profiles typically involves detection of the expression level of each prognosis gene used in the comparison. Numerous methods are available for this purpose. For instance, the expression level of a gene can be determined by measuring the level of the RNA transcript(s) of the gene. Suitable methods include, but are not limited to, quantitative RT-PCT, Northern Blot, in situ hybridization, slot-blotting, nuclease protection assay, and nucleic acid array (including bead array). The expression level of a gene can also be determined by measuring the level of the polypeptide(s) encoded by the gene. Suitable methods include, but are not limited to, immunoassays (such as ELISA, RIA, FACS, or Western Blot), 2-dimensional gel electrophoresis, mass spectrometry, or protein arrays.

[0137] In one aspect, the expression level of a prognosis gene is determined by measuring the RNA transcript level of the gene in a peripheral blood sample. RNA can be isolated from the peripheral blood sample using a variety of methods. Exemplary methods include guanidine isothiocyanate/acidic phenol method, the TRIZOL® Reagent (Invitrogen), or the Micro-FastTrack™ 2.0 or FastTrack™ 2.0 mRNA Isolation Kits (Invitrogen). The isolated RNA can be either total RNA or mRNA. The isolated RNA can be amplified to cDNA or cRNA before subsequent detection or quantitation. The amplification can be either specific or non-specific. Suitable amplification methods include, but are not limited to, reverse transcriptase PCR (RT-PCR), isothermal amplification, ligase chain reaction, and Qbeta replicase.

[0138] In one embodiment, the amplification protocol employs reverse transcriptase. The isolated mRNA can be reverse transcribed into cDNA using a reverse transcriptase, and a primer consisting of oligo d(T) and a sequence encoding the phage T7 promoter. The cDNA thus produced is single-stranded. The second strand of the cDNA is synthesized using a DNA polymerase, combined with an RNase to break up the DNA/RNA hybrid. After synthesis of the double-stranded cDNA, T7 RNA polymerase is added, and cRNA is then transcribed from the second strand of the doubled-stranded cDNA. The amplified cDNA or cRNA can be detected or quantitated by hybridization to labeled probes. The cDNA or cRNA can also be labeled during the amplification process and then detected or quantitated.

[0139] In another embodiment, quantitative RT-PCR (such as TaqMan, ABI) is used for detecting or comparing the RNA transcript level of a prognosis gene of interest. Quantitative RT-PCR involves reverse transcription (RT) of RNA to cDNA followed by relative quantitative PCR (RT-PCR).

[0140] In PCR, the number of molecules of the amplified target DNA increases by a factor approaching two with every cycle of the reaction until some reagent becomes limiting. Thereafter, the rate of amplification becomes increasingly diminished until there is not an increase in the amplified target between cycles. If a graph is plotted on which the cycle number is on the X axis and the log of the concentration of the amplified target DNA is on the Y axis, a curved line of characteristic shape can be formed by connecting the plotted points. Beginning with the first cycle, the slope of the line is positive and constant. This is said to be the linear portion of the curve. After some reagent becomes limiting, the slope of the line begins to decrease and eventually becomes zero. At this point the concentration of the amplified target DNA becomes asymptotic to some fixed value. This is said to be the plateau portion of the curve.

[0141] The concentration of the target DNA in the linear portion of the PCR is proportional to the starting concentration of the target before the PCR is begun. By determining the concentration of the PCR products of the target DNA in PCR reactions that have completed the same number of cycles and are in their linear ranges, it is possible to determine the relative concentrations of the specific target sequence in the original DNA mixture. If the DNA mixtures are cDNAs synthesized from RNAs isolated from different tissues or cells, the relative abundances of the specific mRNA from which the target sequence was derived may be determined for the respective tissues or cells. This direct proportionality between the concentration of the PCR products and the relative mRNA abundances is true in the linear range portion of the PCR reaction.

[0142] The final concentration of the target DNA in the plateau portion of the curve is determined by the availability of reagents in the reaction mix and is independent of the original concentration of target DNA. Therefore, in one embodiment, the sampling and quantifying of the amplified PCR products are carried out when the PCR reactions are in the linear portion of their curves. In addition, relative concentrations of the amplifiable cDNAs can be normalized to some independent standard, which may be based on either internally existing RNA species or externally introduced RNA species. The abundance of a particular mRNA species may also be determined relative to the average abundance of all mRNA species in the sample.

[0143] In one embodiment, the PCR amplification utilizes internal PCR standards that are approximately as abundant as the target. This strategy is effective if the products of the PCR amplifications are sampled during their linear phases. If the products are sampled when the reactions are approaching the plateau phase, then the less abundant product may become relatively over-represented. Comparisons of relative abundances made for many different RNA samples, such as is the case when examining RNA samples for differential expression, may become distorted in such a way as to make differences in relative abundances of RNAs appear less than they actually are. This can be improved if the internal standard is much more abundant than the target. If the internal standard is more abundant than the target, then direct linear comparisons may be made between RNA samples.

[0144] A problem inherent in clinical samples is that they are of variable quantity or quality. This problem can be overcome if the RT-PCR is performed as a relative quantitative RT-PCR with an internal standard in which the internal standard is an amplifiable cDNA fragment that is larger than the target cDNA fragment and in which the abundance of the mRNA encoding the internal standard is roughly 5-100 fold higher than the mRNA encoding the target. This assay measures relative abundance, not absolute abundance of the respective mRNA species.

[0145] In another embodiment, the relative quantitative RT-PCR uses an external standard protocol. Under this protocol, the PCR products are sampled in the linear portion of their amplification curves. The number of PCR cycles that are optimal for sampling can be empirically determined for each target cDNA fragment. In addition, the reverse transcriptase products of each RNA population isolated from the various samples can be normalized for equal concentrations of amplifiable cDNAs. While empirical determination of the linear range of the amplification curve and normalization of cDNA preparations are tedious and time-consuming processes, the resulting RT-PCR assays may, in certain cases, be superior to those derived from a relative quantitative RT-PCR with an internal standard.

[0146] In yet another embodiment, nucleic acid arrays (including bead arrays) are used for detecting or comparing the expression profiles of a prognosis gene of interest. The nucleic acid arrays can be commercial oligonucleotide or cDNA arrays. They can also be custom arrays comprising concentrated probes for the prognosis genes of the present invention. In many examples, at least 15%, 20%, 25%, 30%, 35%, 40%, 45%, 50%, or more of the total probes on a custom array of the present invention are probes for solid tumor prognosis genes. These probes can hybridize under stringent or nucleic acid array hybridization conditions to the RNA transcripts, or the complements thereof, of the corresponding prognosis genes.

[0147] As used herein, “stringent conditions” are at least as stringent as, for example, conditions G-L shown in Table 17. “Highly stringent conditions” are at least as stringent as conditions A-F shown in Table 17. As used in Table 1, hybridization is carried out under the hybridization conditions (Hybridization Temperature and Buffer) for about four hours, followed by two 20-minute washes under the corresponding wash conditions (Wash Temp. and Buffer).

TABLE 17
Stringency Conditions

| | Poly- | | | |
|---|---|---|---|---|
| Stringency | nucleotide | Hybrid | Hybridization | Wash Temp. |
| Condition | Hybrid | Length (bp)^{I} | Temperature and Buffer^{H} | and Buffer^{H} |
| A | DNA:DNA | >50 | 65° C.; 1 × SSC -or- | 65° C.; 0.3 × SSC |
| | | | 42° C.; 1 × SSC, 50% formamide | |
| B | DNA:DNA | <50 | T_{B}*; 1 × SSC | T_{B}*; 1 × SSC |
| C | DNA:RNA | >50 | 67° C.; 1 × SSC -or- | 67° C.; 0.3 × SSC |
| | | | 45° C.; 1 × SSC, 50% formamide | |
| D | DNA:RNA | <50 | T_{D}*; 1 × SSC | T_{D}*; 1 × SSC |
| E | RNA:RNA | >50 | 70° C.; 1 × SSC -or- | 70° C.; 0.3 × SSC |
| | | | 50° C.; 1 × SSC, 50% formamide | |
| F | RNA:RNA | <50 | T_{F}*; 1 × SSC | T_{f}*; 1 × SSC |
| G | DNA:DNA | >50 | 65° C.; 4 × SSC -or- | 65° C.; 1 × SSC |
| | | | 42° C.; 4 × SSC, 50% formamide | |
| H | DNA:DNA | <50 | T_{H}*; 4 × SSC | T_{H}*; 4 × SSC |
| I | DNA:RNA | >50 | 67° C.; 4 × SSC -or- | 67° C.; 1 × SSC |
| | | | 45° C.; 4 × SSC, 50% formamide | |
| J | DNA:RNA | <50 | T_{J}*; 4 × SSC | T_{J}*; 4 × SSC |
| K | RNA:RNA | >50 | 70° C.; 4 × SSC -or- | 67° C.; 1 × SSC |
| | | | 50° C.; 4 × SSC, 50% formamide | |
| L | RNA:RNA | <50 | T_{L}*; 2 × SSC | T_{L}*; 2 × SSC |
| ^{I}The hybrid length is that anticipated for the hybridized region(s) of the hybridizing polynucleotides. When hybridizing a polynucleotide to a target polynucleotide of unknown sequence, the hybrid length is assumed to be that | | | | |
| # of the hybridizing polynucleotide. When polynucleotides of known sequence are hybridized, the hybrid length can be determined by aligning the sequences of the polynucleotides and | | | | |
| # identifying the region or regions of optimal sequence complementarity. | | | | |
| ^{H}SSPE (1 × SSPE is 0.15 M NaCl, 10 mM NaH₂PO₄, and 1.25 mM EDTA, pH 7.4) can be substituted for SSC (1 × SSC is 0.15 M NaCl and 15 mM sodium citrate) in the hybridization and wash buffers. | | | | |
| T_{B}*-T_{R}*The hybridization temperature for hybrids anticipated to be less than 50 base pairs in length should be 5-10° C. less than the melting temperature (Tₘ) of the hybrid, where Tₘ is determined | | | | |
| # according to the following equations. For hybrids less than 18 base pairs in length, Tₘ(° C.) = 2(# of A + T bases) + 4(# of G + C bases). | | | | |
| # For hybrids between 18 and 49 base pairs in length, Tₘ(° C.) = 81.5 + 16.6(log₁₀[Na⁺]) + 0.41(% G + C) − (600/N), where N is the number of bases in the hybrid, | | | | |
| # and [Na⁺] is the molar concentration of sodium ions in the hybridization buffer ([Na⁺] for 1 × SSC = 0.165 M). | | | | |

[0148] In one example, a nucleic acid array of the present invention includes at least 2, 5, 10, 15, 20, 25, 30, 35, 40, 45, 50, 60, 70, 80, 90, 100, 150, 200, 250, or more different probes. Each of these probes is capable of hybridizing under stringent or nucleic acid array hybridization conditions to a different respective prognosis gene of the present invention. Multiple probes for the same prognosis gene can be used on the same nucleic acid array. The probe density on the array can be in any range. For instance, the density can be at least (or no more than) 5, 10, 25, 50, 100, 200, 300, 400, or 500, 1,000, 2,000, 3,000, 4,000, 5,000, or more probes/cm².

[0149] The probes can be DNA, RNA, PNA, or a modified form thereof. The nucleotide residues in each probe can be either naturally occurring residues (such as deoxyadenylate, deoxycytidylate, deoxyguanylate, deoxythymidylate, adenylate, cytidylate, guanylate, and uridylate), or synthetically produced analogs that are capable of forming desired base-pair relationships. Examples of these analogs include, but are not limited to, aza and deaza pyrimidine analogs, aza and deaza purine analogs, and other heterocyclic base analogs, wherein one or more of the carbon and nitrogen atoms of the purine and pyrimidine rings are substituted by heteroatoms, such as oxygen, sulfur, selenium, and phosphorus. Similarly, the polynucleotide backbones of the probes can be either naturally occurring (such as through 5′ to 3′ linkage), or modified. For instance, the nucleotide units can be connected via non-typical linkage, such as 5′ to 2′ linkage, so long as the linkage does not interfere with hybridization. For another instance, peptide nucleic acids, in which the constitute bases are joined by peptide bonds rather than phosphodiester linkages, can be used.

[0150] The probes for the prognosis genes can be stably attached to discrete regions on the nucleic acid array. By “stably attached,” it means that a probe maintains its position relative to the attached discrete region during hybridization and signal detection. The position of each discrete region on the nucleic acid array can be either known or determinable. All of the methods known in the art can be used to make the nucleic acid arrays of the present invention.

[0151] In another embodiment, nuclease protection assays are used to quantitate RNA transcript levels in peripheral blood samples. There are many different versions of nuclease protection assays. The common characteristic of these nuclease protection assays is that they involve hybridization of an antisense nucleic acid with the RNA to be quantified. The resulting hybrid double-stranded molecule is then digested with a nuclease that digests single-stranded nucleic acids more efficiently than double-stranded molecules. The amount of antisense nucleic acid that survives digestion is a measure of the amount of the target RNA species to be quantified. Examples of suitable nuclease protection assays include the RNase protection assay provided by Ambion, Inc. (Austin, Tex.).

[0152] Hybridization probes or amplification primers for the prognosis genes of the present invention can be prepared by using any method known in the art. For prognosis genes whose genomic locations have not been determined or whose identities are solely based on EST or mRNA data, the probes/primers for these genes can be derived from the corresponding SEQ ID NOs, Entrez accession numbers, or EST or mRNA sequences.

[0153] In one embodiment, the probes/primers for each prognosis gene significantly diverge from the sequences of other prognosis genes. This can be achieved by checking potential probe/primer sequences against a human genome sequence database, such as the Entrez database at the NCBI. One algorithm suitable for this purpose is the BLAST algorithm. This algorithm involves first identifying high scoring sequence pairs (HSPs) by identifying short words of length W in the query sequence, which either match or satisfy some positive-valued threshold score T when aligned with a word of the same length in a database sequence. T is referred to as the neighborhood word score threshold. The initial neighborhood word hits act as seeds for initiating searches to find longer HSPs containing them. The word hits are then extended in both directions along each sequence to increase the cumulative alignment score. Cumulative scores are calculated using, for nucleotide sequences, the parameters M (reward score for a pair of matching residues; always >0) and N (penalty score for mismatching residues; always <0). The BLAST algorithm parameters W, T, and X determine the sensitivity and speed of the alignment. These parameters can be adjusted for different purposes, as appreciated by those skilled in the art.

[0154] In another aspect, the expression levels of the prognosis genes of the present invention are determined by measuring the levels of polypeptides encoded by the prognosis genes. Methods suitable for this purpose include, but are not limited to, immunoassays such as ELISA, RIA, FACS, dot blot, Western Blot, immunohistochemistry, and antibody-based radioimaging. In addition, high-throughput protein sequencing, 2-dimensional SDS-polyacrylamide gel electrophoresis, mass spectrometry, or protein arrays can be used.

[0155] In one embodiment, ELISAs are used for detecting the levels of the target proteins. In an exemplifying ELISA, antibodies capable of binding to the target proteins are immobilized onto selected surfaces exhibiting protein affinity, such as wells in a polystyrene or polyvinylchloride microtiter plate. Samples to be tested are then added to the wells. After binding and washing to remove non-specifically bound immunocomplexes, the bound antigen(s) can be detected. Detection can be achieved by the addition of a second antibody which is specific for the target proteins and is linked to a detectable label. Detection can also be achieved by the addition of a second antibody, followed by the addition of a third antibody that has binding affinity for the second antibody, with the third antibody being linked to a detectable label. Before being added to the microtiter plate, cells in the samples can be lysed or extracted to separate the target proteins from potentially interfering substances.

[0156] In another exemplifying ELISA, the samples suspected of containing the target proteins are immobilized onto the well surface and then contacted with the antibodies. After binding and washing to remove non-specifically bound immunocomplexes, the bound antigen is detected. Where the initial antibodies are linked to a detectable label, the immunocomplexes can be detected directly. The immunocomplexes can also be detected using a second antibody that has binding affinity for the first antibody, with the second antibody being linked to a detectable label.

[0157] Another exemplary ELISA involves the use of antibody competition in the detection. In this ELISA, the target proteins are immobilized on the well surface. The labeled antibodies are added to the well, allowed to bind to the target proteins, and detected by means of their labels. The amount of the target proteins in an unknown sample is then determined by mixing the sample with the labeled antibodies before or during incubation with coated wells. The presence of the target proteins in the unknown sample acts to reduce the amount of antibody available for binding to the well and thus reduces the ultimate signal.

[0158] Different ELISA formats can have certain features in common, such as coating, incubating or binding, washing to remove non-specifically bound species, and detecting the bound immunocomplexes. For instance, in coating a plate with either antigen or antibody, the wells of the plate can be incubated with a solution of the antigen or antibody, either overnight or for a specified period of hours. The wells of the plate are then washed to remove incompletely adsorbed material. Any remaining available surfaces of the wells are then “coated” with a nonspecific protein that is antigenically neutral with regard to the test samples. Examples of these nonspecific proteins include bovine serum albumin (BSA), casein and solutions of milk powder. The coating allows for blocking of nonspecific adsorption sites on the immobilizing surface and thus reduces the background caused by nonspecific binding of antisera onto the surface.

[0159] In ELISAs, a secondary or tertiary detection means can be used. After binding of a protein or antibody to the well, coating with a non-reactive material to reduce background, and washing to remove unbound material, the immobilizing surface is contacted with the control or clinical or biological sample to be tested under conditions effective to allow immunocomplex (antigen/antibody) formation. These conditions may include, for example, diluting the antigens and antibodies with solutions such as BSA, bovine gamma globulin (BGG) and phosphate buffered saline (PBS)/Tween and incubating the antibodies and antigens at room temperature for about 1 to 4 hours or at 4° C. overnight. Detection of the immunocomplex is facilitated by using a labeled secondary binding ligand or antibody, or a secondary binding ligand or antibody in conjunction with a labeled tertiary antibody or third binding ligand.

[0160] Following all incubation steps in an ELISA, the contacted surface can be washed so as to remove non-complexed material. For instance, the surface may be washed with a solution such as PBS/Tween, or borate buffer. Following the formation of specific immunocomplexes between the test sample and the originally bound material, and subsequent washing, the occurrence of the amount of immunocomplexes can be determined.

[0161] To provide a detecting means, the second or third antibody can have an associated label to allow detection. In one embodiment, the label is an enzyme that generates color development upon incubating with an appropriate chromogenic substrate. Thus, for example, one may contact and incubate the first or second immunocomplex with a urease, glucose oxidase, alkaline phosphatase or hydrogen peroxidase-conjugated antibody for a period of time and under conditions that favor the development of further immunocomplex formation (e.g., incubation for 2 hours at room temperature in a PBS-containing solution such as PBS-Tween).

[0162] After incubation with the labeled antibody, and subsequent washing to remove unbound material, the amount of label can be quantified, e.g., by incubation with a chromogenic substrate such as urea and bromocresol purple or 2,2′-azido-di-(3-ethyl)-benzthiazoline-6-sulfonic acid (ABTS) and H₂O₂, in the case of peroxidase as the enzyme label. Quantitation can be achieved by measuring the degree of color generation, e.g., using a spectrophotometer.

[0163] Another method suitable for detecting polypeptide levels is RIA (radioimmunoassay). An exemplary RIA is based on the competition between radiolabeled-polypeptides and unlabeled polypeptides for binding to a limited quantity of antibodies. Suitable radiolabels include, but are not limited to, I¹²⁵. In one embodiment, a fixed concentration of I¹²⁵-labeled polypeptide is incubated with a series of dilution of an antibody specific to the polypeptide. When the unlabeled polypeptide is added to the system, the amount of the I¹²⁵-polypeptide that binds to the antibody is decreased. A standard curve can therefore be constructed to represent the amount of antibody-bound I¹²⁵-polypeptide as a function of the concentration of the unlabeled polypeptide. From this standard curve, the concentration of the polypeptide in unknown samples can be determined. Protocols for conducting RIA are well known in the art.

[0164] Suitable antibodies for the present invention include, but are not limited to, polyclonal antibodies, monoclonal antibodies, chimeric antibodies, humanized antibodies, single chain antibodies, Fab fragments, or fragments produced by a Fab expression library. Neutralizing antibodies (i.e., those which inhibit dimer formation) can also be used. Methods for preparing these antibodies are well known in the art. In one embodiment, the antibodies of the present invention can bind to the corresponding prognosis gene products or other desired antigens with binding affinities of at least 10⁴ M⁻¹, 10⁵ M⁻¹, 10⁶ M⁻¹, 10⁷ M⁻¹, or more.

[0165] The antibodies of the present invention can be labeled with one or more detectable moieties to allow for detection of antibody-antigen complexes. The detectable moieties can include compositions detectable by spectroscopic, enzymatic, photochemical, biochemical, bioelectronic, immunochemical, electrical, optical or chemical means. The detectable moieties include, but are not limited to, radioisotopes, chemiluminescent compounds, labeled binding proteins, heavy metal atoms, spectroscopic markers such as fluorescent markers and dyes, magnetic labels, linked enzymes, mass spectrometry tags, spin labels, electron transfer donors and acceptors, and the like.

[0166] The antibodies of the present invention can be used as probes to construct protein arrays for the detection of expression profiles of the prognosis genes. Methods for making protein arrays or biochips are well known in the art. In many embodiments, a substantial portion of probes on a protein array of the present invention are antibodies specific for the prognosis gene products. For instance, at least 10%, 20%, 30%, 40%, 50%, or more probes on the protein array can be antibodies specific for the prognosis gene products.

[0167] In yet another aspect, the expression levels of the prognosis genes of are determined by measuring the biological functions or activities of these genes. Where a biological function or activity of a gene is known, suitable in vitro or in vivo assays can be developed to evaluate the function or activity. These assays can be subsequently used to assess the level of expression of the prognosis gene.

[0168] With the expression level of each prognosis gene determined, numerous approaches can be employed to compare expression profiles. Comparison between the expression profile of a patient of interest and the reference expression profile(s) can be conducted manually or electronically. In one example, comparison is carried out by comparing each component in one expression to the corresponding component in another expression profile. The component can be the expression level of a prognosis gene, a ratio between the expression levels of two prognosis genes, or another measure capable of representing gene expression patterns. The expression level of a gene can have an absolute or a normalized or relative value. The difference between two corresponding components can be assessed by fold changes, absolute differences, or other suitable means.

[0169] Comparison between expression profiles can also be conducted using pattern recognition or comparison programs, such as the k-nearest-neighbors algorithm as described in Armstrong, et al., supra, or the weighted voting algorithm as described below. In addition, the serial analysis of gene expression (SAGE) technology, the GEMTOOLS gene expression analysis program (Incyte Pharmaceuticals), the GeneCalling and Quantitative Expression Analysis technology (Curagen), and other suitable methods, programs or systems can be used to compare expression profiles.

[0170] Multiple prognosis genes can be used in the comparison of expression profiles. For instance, 2, 4, 6, 8, 10, 12, 14, 16, 18, 20, 30, 40, 50, or more prognosis genes can be used. In addition, the prognosis gene(s) used in the comparison can be selected to have relatively small p-values (e.g., two-sided p-values). In one example, the p-values indicate the statistical significance of the difference between gene expression levels in different classes of patients. In another example, the p-values suggest the statistical significance of the correlation between gene expression patterns and clinical outcome. In one embodiment, the prognosis genes used in the comparison have p-values of no greater than 0.05, 0.01, 0.001, 0.0005, 0.0001, or less. Prognosis genes with p-values of greater than 0.05 can also be used. These genes may be identified, for instance, by using a relatively small number of blood samples.

[0171] Similarity or difference between the expression profile of a patient of interest and the reference expression profile(s) is indicative of the class membership of the patient of interest. Similarity or difference can be determined by any suitable means.

[0172] In one example, a component in a reference profile is a mean value, and the corresponding component in the expression profile of the patient of interest falls within the standard deviation of the mean value. In such a case, the expression profile of the patient of interest may be considered similar to the reference profile with respect to that particular component. Other criteria, such as a multiple or fraction of the standard deviation or a certain degree of percentage increase or decrease, can be used to measure similarity.

[0173] In another example, at least 50% (e.g., at least 60%, 70%, 80%, 90%, or more) of the components in the expression profile of the patient of interest are considered similar to the corresponding components in a reference profile. Under these circumstances, the expression profile of the patient of interest may be considered similar to the reference profile. Different components in the expression profile may have different weights for the comparison. In some cases, lower percentage thresholds (e.g., less than 50% of the total components) are used to determine similarity.

[0174] The prognosis gene(s) and the similarity criteria can be selected such that the accuracy of outcome prediction (the ratio of correct calls over the total of correct and incorrect calls) is relatively high. For instance, the accuracy of prediction can be at least 50%, 60%, 70%, 80%, 90%, or more. Prognosis genes with prediction accuracy of less than 50% can also be used, provided that the prediction is statistically significant.

[0175] The effectiveness of outcome prediction can also be assessed by sensitivity and specificity. The prognosis genes and the comparison criteria can be selected such that both the sensitivity and specificity of outcome prediction are relatively high. For instance, the sensitivity and specificity can be at least 50%, 60%, 70%, 80%, 90%, 95%, or more. Prognosis genes having lower sensitivity or specificity can be used as long as the prediction is statistically significant.

[0176] Moreover, gene expression-based outcome prediction can be combined with other clinical evidence or prognostic methods to improve the effectiveness or accuracy of outcome prediction.

[0177] In one embodiment, the expression profile of a patient of interest is compared to at least two reference expression profiles. The first reference expression profile can be prepared from peripheral blood samples of patients in a first outcome class, and the second reference expression profile is prepared from peripheral blood samples of patients in a second outcome class. The fact that the expression profile of the patient of interest is more similar to the first reference profile than to the second reference profile suggests that the patient of interest is more likely to belong to the first outcome class, as opposed to the second outcome class.

[0178] Comparison between the expression profile of a patient of interest and two or more reference expression profiles can be performed by any suitable means. In one embodiment, the k-nearest-neighbors algorithm, as described in Armstrong, et al., supra, is used. The k-nearest-neighbors algorithm can effectively assign a patient to a clinical class. By “effectively,” it means that the assignment is statistically significant. For instance, the sensitivity and specificity of the assignment can be at least 50%, 60%, 70%, 80%, 90%, 95%, or more. In one example, the effectiveness of assignment is evaluated based on leave-one-out cross validation. The accuracy for leave-one-out cross validation can be, for instance, at least 50%, 60%, 70%, 80%, 90%, 95%, or more. Prognosis genes or class predictors with low assignment sensitivity/specificity or leave-one-out cross validation accuracy, such as less than 50%, can also be used in the present invention.

[0179] In another embodiment, a weighted voting algorithm is used. In this method, the expression level of each gene in the classifier set contributes to an overall vote on the classification of the sample. See Slonim, et al., supra. The prediction strength is a combined variable that indicates the support for one class or the other, and can vary between 0 (narrow margin of victory) and 1 (wide margin of victory) in favor of the predicted class. See Golub, et al., supra, and Slonim, et al., supra. Software programs suitable for the weight voting analysis include, but are not limited to, GeneCluster 2 software. GeneCluster 2 software is available from MIT Center for Genome Research at Whitehead Institute (e.g., www-genome.wi.mit.edu/cancer/software/genecluster2/gc2.html).

[0180] Under one form of the weighted voting algorithm, a set of prognosis genes are selected to create a class predictor (classifier). Each gene in the class predictor casts a weighted vote for one of the two classes (class 0 and class 1). The vote of gene “g” can be defined as v_{g}=a_{g}(x_{g}−b_{g}), wherein a_{g} equals to P(g,c) and reflects the correlation between the expression level of gene “g” and the class distinction between the two classes, b_{g} is calculated as b_{g}=[x0(g)+x1(g)]/2 and represents the average of the mean logs of the expression levels of gene “g” in class 0 and class 1, and x_{g} is the normalized log of the expression level of gene “g” in the sample of interest. A positive v_{g} indicates a vote for class 0, and a negative v_{g} indicates a vote for class 1. V0 denotes the sum of all positive votes, and V1 denotes the absolute value of the sum of all negative votes. A prediction strength PS is defined as PS=(V0−V1)/(V0+V1).

[0181] Cross-validation can be used to evaluate the accuracy of the class predictor created under the k-nearest-neighbors or weighted voting algorithm. Briefly, one sample which has been used to identify the prognosis genes under the neighborhood analysis is withheld. A class predictor is then created based on the remaining samples and used to predict the class of the sample withheld. This process can be repeated for each sample that has been used in the neighborhood analysis. Different class predictors can be evaluated using the cross-validation process, and the best class predictor with the most accurate predication can be identified.

[0182] Suitable prediction strength (PS) thresholds can be assessed by plotting the cumulative cross-validation error rate against the prediction strength. In one embodiment, a positive predication is made if the absolute value of PS for the sample of interest is no less than 0.3. Other PS thresholds, such as no less than 0.1, 0.2, 0.4 or 0.5, can also be used. In many embodiments, a threshold is selected such as the accuracy of prediction is optimized and the incidence of both false positive and false negative results is minimized.

[0183] In one example, the class predictor includes n prognosis genes identified under the neighborhood analysis. A half of these prognosis genes has the largest P(g,c) scores, and the other half has the largest −P(g,c) scores. The number n therefore is the only free parameter in defining the class predictor.

[0184] The prognosis genes or class predictors of the present invention can be used to assign a solid tumor patient of interest to an outcome class. In one embodiment, patients having the solid tumor can be divided into at least two classes. The first class of patients has a first specified TTD (e.g., TTD of less than 150 days from initiation of a therapeutic treatment of the solid tumor), and the second class of patients has a second specified TTD (e.g., TTD of more than 550 days from initiation of the therapeutic treatment). Genes that are substantially correlated with the class distinction between these two classes of patients can be identified and used to assign the patient of interest to one of these two outcome classes. In one example, all of the expression profiles used in the comparison are baseline profiles which are prepared from baseline peripheral blood samples isolated prior to a therapeutic treatment. In another example, the solid tumor to be prognosed is RCC, and the therapeutic treatment is a CCI-779 therapy. The prognosis gene(s) used for outcome prediction can be selected from, for instance, Table 10.

[0185] In another embodiment, the first class of patients has a specified TTP (e.g., TTP of no less than 106 days from initiation of a therapeutic treatment), and the second class of patients has another specified TTP (e.g., TTP of less than 106 days from initiation of the therapeutic treatment). The solid tumor can be RCC, and the therapeutic treatment can be a CCI-779 therapy. The prognosis gene(s) can be selected from, for instance, Table 13.

[0186] In yet another embodiment, the first class of patients includes or consists of patients having the lowest quartile of TTP among a population of patients who have the same solid tumor and are subject to the same therapeutic treatment. The second class of patients includes or consists of patients having the highest quartile of TTP among the population of patients. The solid tumor can be RCC, and the therapeutic treatment can be a CCI-779 therapy. The prognosis gene(s) can be selected from, for instance, Table 12.

[0187] In still yet another embodiment, the first class of patients includes or consists of patients having the lowest quartile of TTD among a population of patients who have the same solid tumor and are subject to the same therapeutic treatment, and the second class of patients includes or consists of patients having the highest quartile of TTD among the population of patients. The solid tumor can be RCC, and the therapeutic treatment can be a CCI-779 therapy.

[0188] In a further embodiment, the first class of patients has a prognosis determined by a risk assessment method, and the second class of patients has another prognosis determined by the same risk assessment method. In one example, both classes of patients have RCC, and the risk assessment method is based on Motzer risk classification. Under Motzer risk classification, RCC patients can have poor, intermediate, or favorable prognoses. In another example, one class of RCC patients has poor prognosis, and the other class of RCC patients has intermediate prognosis. The prognosis gene(s) can be selected from, for instance, Table 11.

[0189] In yet another embodiment, the first class of patients has progressive disease after a specified time of treatment, and the second class of patients has non-progressive disease (such as complete response, partial response, minor response, or stable disease) after the same specified time of treatment.

[0190] In still yet another embodiment, patients having the solid tumor can be clustered into at least two classes based on their gene expression profiles in PBMCs. Suitable algorithms for this purpose include, but are not limited to, unsupervised clustering analyses. Each of the two classes can be associated with a different respective clinical outcome. For instance, the majority of one class of patients can have a specified TTD (e.g., TTD of less than 365 days), while the majority of the other class of patients can have another specified TTD (e.g., TTD of no less than 365 days). Genes that are substantially correlated with the class distinction between these two classes can be identified. These genes, or the class predictors derived therefrom, can be used to predict the class membership of a patient of interest. In one example, the solid tumor is RCC, and the therapeutic treatment is a CCI-779 therapy. The prognosis gene(s) can be selected from, for instance, Table 16.

[0191] Prognosis genes or class predictors that are capable of distinguishing three or more different outcome classes can also be employed in the present invention. These prognosis genes can be identified using multi-class correlation metrics. Suitable programs for carrying out multi-class correlation analysis include, but are not limited to, GeneCluster 2 software (MIT Center for Genome Research at Whitehead Institute, Cambridge, Mass.). Under the analysis, patients having the solid tumor can be divided into at least three classes, and each class has a different respective clinical outcome. The prognosis genes identified under multi-class correlation analysis are differentially expressed in PBMCs of one class of patients relative to PBMCs of other classes of patients. In one embodiment, the identified prognosis genes are substantially correlated with a class distinction between the multiple classes. For instance, the prognosis genes can be selected from those above the 1%, 5%, 10%, 25%, or 50% significance level under a permutation test.

[0192] In accordance with another aspect of the present invention, the expression profile of the prognosis gene(s) used in the comparison is correlated with clinical outcome of reference patients under a statistical method. Suitable statistical methods for this purpose include, but are not limited to, Spearman's rank correlation, Cox proportional hazard regression model, or other rank tests or survival models. The reference patients have the same solid tumor as the patient of interest, and the clinical outcome of the reference patients is either known or determinable.

[0193] By comparing the expression profile of the prognosis gene(s) in a peripheral blood sample of the patient of interest to the reference expression profile of the same prognosis gene(s) in the reference patients, clinical outcome of the patient of interest can be predicted. For instance, if the expression profile of the patient of interest is more similar to the expression profile of one particular reference patient as compared to other reference patients, clinical outcome of that particular reference patient can be indicative of clinical outcome of the patient of interest.

[0194] Any number of prognosis genes can be used for outcome prediction based on statistical methods. In one embodiment, one prognosis gene is used. The reference patient whose expression profile is most similar to that of the patient of interest can be identified. A prediction that clinical outcome of the patient of interest is most analogous to that of the reference patient can therefore be made.

[0195] In another embodiment, two or more prognosis genes are used. The expression profile of the patient of interest and the reference expression profile can be compared by a pattern recognition or comparison algorithm. In one example, the Euclidean distance is used to measure the similarity between two different expression profiles.

[0196] Any time-associated clinical outcome indicator can be evaluated based on statistical methods. Examples of time-associated clinical outcomes include, but are not limited to, TTP and TTD.

[0197] In one embodiment, outcome prediction is based on Spearman's correlation test. The patient of interest and the reference patients have RCC and are being treated by a CCI-779 therapy. In one example, clinical outcome is measured by TTP, and the prognosis gene(s) is selected from Tables 6a and 6b. In another example, clinical outcome is measured by TTD, and the prognosis gene(s) is selected from Tables 6c and 6d. In yet another example, the relative risk for TTD or TTP can be qualitatively assessed based on the peripheral blood expression level of a prognosis gene in the patient of interest, in conjunction with the correlation coefficient of the prognosis gene.

[0198] In another embodiment, outcome prediction is based on Cox proportional hazard regression model. The patient of interest and the reference patients have RCC and are being treated by a CCI-779 therapy. In one example, clinical outcome is measured by TTP, and the prognosis gene(s) is selected from Tables 9a and 9b. In another example, clinical outcome is measured by TTD, and the prognosis gene(s) is selected from Tables 9c and 9d. In yet another example, the relative risk for TTD or TTP can be qualitatively assessed based on the peripheral blood expression level of a prognosis gene in the patient of interest, in light of the hazard ratio of the prognosis gene.

[0199] In yet another aspect, the present invention provides electronic systems useful for the prognosis or selection of treatment of RCC and other solid tumors. These systems include input or communication devices for receiving the expression profile of the patient of interest as well as the reference expression profile(s). The reference expression profile(s) can be stored in a database or another medium. In one embodiment, the reference expression profile(s) is readily retrievable or modifiable. The comparison between expression profiles can be conduced electronically, such as through a processor or a computer. The processor or computer can execute one or more programs to compare the expression profile of the patient of interest to the reference expression profile(s). The program(s) can be stored in a memory or downloaded from another source, such as an internet server. In one example, the program(s) includes a k-nearest-neighbors or weighted voting algorithm. In another example, the electronic system is coupled to a nucleic acid array and can receive or process expression data generated by the nucleic acid array.

[0200] In still another aspect, the present invention provides kits useful for the prognosis or selection of treatment of solid tumors. In one embodiment, the kits of the present invention include probes/primers for detecting expression patterns of one or more solid tumor prognosis genes. Each prognosis gene is differentially expressed in PBMCs of patients who have different clinical outcomes. In many cases, the probe/primers can hybridize under stringent or nucleic acid array hybridization conditions to the RNA transcripts, or the complements thereof, of the corresponding prognosis genes. Hybridization or amplification agents can be included in the kits.

[0201] The kits of the present invention can include any number of probes/primers. In one example, each kit includes at least 2, 3, 4, 5, 6, 7, 8, 9, 10, 15, 20, or more different probes/primers, and each of these different probes/primers can hybridize under stringent conditions or nucleic acid array hybridization conditions to a different respective solid tumor prognosis gene. The solid tumor to be prognosed can be RCC, and the prognosis genes can be selected from Tables 6a, 6b, 6c, 6d, 9a, 9b, 9c, 9d, 10, 11, 12, 13, 16, 20 and 21.

[0202] In another embodiment, the kits of the present invention include one or more antibodies capable of binding to the polypeptides encoded by respective solid tumor prognosis genes. The antibodies can be, without limitation, polyclonal, monoclonal, single-chain, or humanized. In one example, the antibodies can bind to the respective polypeptide products with affinities of at least 10⁵ M⁻¹, 10⁶ M⁻¹, 10⁷ M⁻¹, or more. In another example, the kits of the present invention include at least 2, 3, 4, 5, 10, 15, 20, or more different antibodies, and each of these different antibodies is capable of binding to a polypeptide encoded by a different respective RCC prognosis gene. The kits of the present invention can also include immunoassay reagents, such as secondary antibodies, controls, or enzyme substrates.

[0203] The probes or antibodies of the present invention can be either labeled or unlabeled. Labeled antibodies can be detectable by spectroscopic, photochemical, biochemical, bioelectronic, immunochemical, electrical, optical, chemical, or other suitable means. Exemplary labeling moieties for an antibody include radioisotopes, chemiluminescent compounds, labeled binding proteins, heavy metal atoms, spectroscopic markers, such as fluorescent markers and dyes, magnetic labels, linked enzymes, mass spectrometry tags, spin labels, electron transfer donors and acceptors, and the like.

[0204] The probes or antibodies of the present invention can be enclosed in a vial, a tube, a bottle, a box, or another holding means. In one example, the probes or antibodies are stably attached to one or more substrate supports. Nucleic acid hybridization or immunoassays can be directly carried out on the substrate support(s). Suitable substrate supports include, but are not limited to, glasses, silica, ceramics, nylons, quartz wafers, gels, metals, papers, beads, tubes, fibers, films, membranes, column matrixes, or microtiter plate wells.

IV. Selection of Treatment of RCC and Other Solid Tumors

[0205] The present invention allows for personalized treatment of RCC or other solid tumors. Numerous treatment options or regimes can be analyzed by the present invention. Prognosis genes for each treatment can be determined. The peripheral blood expression profiles of these prognosis genes in a patient of interest can be analyzed to identify treatments that have favorable prognoses for the patient of interest. As used herein, a “favorable” prognosis is a prognosis which is better than the average prognosis for all available treatments of the solid tumor.

[0206] Any type of cancer treatment can be evaluated by the present invention. For instance, RCC can be treated by drug therapies. Suitable drugs include cytokines, such as interferon or interleukin 2, and chemotherapy drugs, such as CCI-779, AN-238, vinblastine, floxuridine, 5-fluorouracil, or tamoxifen. AN238 is a cytotoxic agent which has 2-pyrrolinodoxorubicin linked to a somatostatin (SST) carrier octapeptide. AN238 can be targeted to SST receptors on the surface of RCC tumor cells. Chemotherapy drugs can be used individually or in combination with other drugs, cytokines, or therapies. In addition, monoclonal antibodies, antiangiogenesis drugs, or anti-growth factor drugs can be employed to treat RCC.

[0207] RCC treatment can also be surgical. Suitable surgical choices include, but are not limited to, radical nephrectomy, partial nephrectomy, removal of metastases, arterial embolization, laparoscopic nephrectomy, cryoablation, and nephron-sparing surgery. Moreover, radiation, gene therapy, immunotherapy, adoptive immunotherapy, or any other conventional or experimental therapy can be used.

[0208] Treatment options for prostate cancer, head/neck cancer, and other solid tumors are known in the art. For instance, prostate cancer treatments include, but are not limited to, radiation therapy, hormonal therapy, and cryotherapy. The present invention contemplates any novel or experimental treatment of solid tumors.

[0209] Prognosis genes or class predictors for each treatment of a solid tumor can be identified according to the present invention. Treatments with favorable prognoses for a patient of interest can therefore be determined. Treatment selection can be conducted manually or electronically. In one embodiment, a reference expression profile database is established for each treatment and each prognosis gene.

[0210] Identification of prognosis gene may be affected by the disease stage of a solid tumor. For instance, prognosis genes can be identified from patients at a particular disease stage. Genes thus identified may be more effective in predicting clinical outcome of a patient of interest who is also at that disease stage.

[0211] Disease stages may also affect treatment selection. For instance, for RCC patients in stages I or II, radical or partial nephrectomy is commonly selected. For RCC patients in stage III, radical nephrectomy is among the preferred treatments. For RCC patients in stage IV, cytokine immunotherapy, combined immunotherapy and chemotherapy, or other drug therapies can be employed. Therefore, the disease stage of a patient of interest can be used to assist the gene expression-based selection for a favorable treatment of the patient.

[0212] It should be understood that the above-described embodiments and the following examples are given by way of illustration, not limitation. Various changes and modifications within the scope of the present invention will become apparent to those skilled in the art from the present description.

### V. EXAMPLES

### Example 1

### Isolation of RNA and Preparation of Labeled Microarray Targets

[0213] Prior to initiation of therapy, whole blood samples (8 mL) were collected into Vacutainer sodium citrate cell purification tubes (CPTs) and PBMCs were isolated according to the manufacturer's protocol (Becton Dickinson). All blood samples were shipped in CPTs overnight prior to PBMC processing. PBMCs were purified over Ficoll gradients, washed two times with PBS and counted. Total RNA was isolated from PBMC pellets using the RNeasy mini kit (Qiagen, Valencia, Calif.). Labeled target for oligonucleotide arrays was prepared using a modification of the procedure described in Lockhart, et al., NATURE BIOTECHNOLOGY, 14: 1675-80 (1996). 2 μg total RNA was converted to cDNA by priming with an oligo-dT primer containing a T7 DNA polymerase promoter at the 5′ end. The cDNA was used as the template for in vitro transcription using a T7 DNA polymerase kit (Ambion, Woodlands, Tex.) and biotinylated CTP and UTP (Enzo). Labeled cRNA was fragmented in 40 mM Tris-acetate pH 8.0, 100 mM KOAc, 30 mM MgOAc for 35 minutes at 94° C. in a final volume of 40 μl.

### Example 2

### Hybridization to Affymetrix Microarrays and Detection of Fluorescence

[0214] Individual RCC samples were hybridized to HgU95A genechip (Affymetrix). No samples were pooled. As described above, 45 RCC patients were involved in the study. Tumors of the RCC patients were histopathologically classified as specific renal cell carcinoma subtypes using the Heidelberg classification of renal cell tumors described in Kovacs, et al., J. PATHOL., 183: 131-133 (1997).

[0215] 10 μg of labeled target was diluted in 1×MES buffer with 100 μg/ml herring sperm DNA and 50 μg/ml acetylated BSA. To normalize arrays to each other and to estimate the sensitivity of the oligonucleotide arrays, in vitro synthesized transcripts of 11 bacterial genes were included in each hybridization reaction as described in Hill, et al., SCIENCE, 290: 809-812 (2000). The abundance of these transcripts ranged from 1:300,000 (3 ppm) to 1:1000 (1000 ppm) stated in terms of the number of control transcripts per total transcripts. As determined by the signal response from these control transcripts, the sensitivity of detection of the arrays ranged between about 1:300,000 and 1:100,000 copies/million. Labeled probes were denatured at 99° C. for 5 minutes and then 45° C. for 5 minutes and hybridized to oligonucleotide arrays comprised of over 12,500 human genes (HgU95A, Affymetrix). Arrays were hybridized for 16 hours at 45° C. The hybridization buffer was comprised of 100 mM MES, 1 M [Na⁺], 20 mM EDTA, and 0.01% Tween 20. After hybridization, the cartridges were washed extensively with wash buffer (6×SSPET), for instance, three 10-minute washes at room temperature. These hybridization and washing conditions are collectively referred to as “nucleic acid array hybridization conditions.” The washed cartridges were then stained with phycoerythrin coupled to streptavidin.

[0216] 12×MES stock contains 1.22 M MES and 0.89 M [Na⁺]. For 1000 ml, the stock can be prepared by mixing 70.4 g MES free acid monohydrate, 193.3 g MES sodium salt and 800 ml of molecular biology grade water, and adjusting volume to 1000 ml. The pH should be between 6.5 and 6.7. 2× hybridization buffer can be prepared by mixing 8.3 ml of 12×MES stock, 17.7 mL of 5 M NaCl, 4.0 mL of 0.5 M EDTA, 0.1 mL of 10% Tween 20 and 19.9 mL of water. 6×SSPET contains 0.9 M NaCl, 60 mM NaH₂PO₄, 6 mM EDTA, pH 7.4, and 0.005% Triton X-100. In some cases, the wash buffer can be replaced with a more stringent wash buffer. 1000 ml stringent wash buffer can be prepared by mixing 83.3 mL of 12×MES stock, 5.2 mL of 5 M NaCl, 1.0 mL of 10% Tween 20 and 910.5 mL of water.

### Example 3

### Gene Expression Data Analysis

[0217] Data analysis and absent/present call determination were performed on raw fluorescent intensity values using GENECHIP 3.2 software (Affymetrix). GENECHIP 3.2 software uses algorithms to calculate the likelihood as to whether a gene is “absent” or “present” as well as a specific hybridization intensity value or “average difference” for each transcript represented on the array. For instance, “present” calls are calculated by estimating whether a transcript is detected in a sample based on the strength of the gene's signal compared to background. The algorithms used in these calculations are described in the Affymetrix GeneChip Analysis Suite User Guide (Affymetrix). The “average difference” for each transcript was normalized to “frequency” values according to the procedures of Hill, et al., SCIENCE, 290: 809-812 (2000). This was accomplished by referring the average difference values on each chip to a global calibration curve constructed from the average difference values for the 11 control transcripts with known abundance that were spiked into each hybridization solution. This calibration was used to convert average difference values for all transcripts to frequency estimates, stated in units of parts per million (ppm) ranging from about 1:300,000 (3 ppm) to 1:1000 (1000 ppm). This process also served to normalize between arrays.

[0218] Specific transcripts were evaluated further if they met the following criteria. First, genes that were designated “absent” by the GENECHIP 3.2 software in all samples were excluded from the analysis. Second, in comparisons of transcript levels between arrays, a gene was required to be present in at least one of the arrays. Third, for comparisons of transcript levels between groups, a Student's t-test was applied to identify a subset of transcripts that had a significant (p<0.05) differences in frequency values. In certain cases, a fourth criterion, which requires that average fold changes in frequency values across the statistically significant subset of genes be 2-fold or greater, was also used.

[0219] Unsupervised hierarchical clustering of genes was performed using the procedure described in Eisen, et al., supra. Nearest-neighbor prediction analysis and supervised cluster analysis was performed using metrics illustrated in Golub, et al., supra. For hierarchical clustering and nearest-neighbor prediction analysis, data were log transformed and normalized to have a mean value of zero and a variance of one. A Student's t-test was used to compare PBMC expression profiles in different outcome classes. In the comparisons, a p value<0.05 can be used to indicate statistical significance.

[0220] A k-nearest-neighbor's approach was used to perform a neighborhood analysis of real and randomly permuted data using a correlation metric P(g,c)=(μ1−μ2)/(σ1+σ2), where g is the expression vector of a gene, c is the class vector, μ1 and σ1 define the mean expression level and standard deviation of the gene in class 1, and μ2 and σ2 define the mean expression level and standard deviation of the gene in class 2.

### Example 4

### Gene Expression Analyses Using A More Stringent Filter

[0221] In this example, only those transcripts meeting a more stringent data reduction filter were used (at least 25% present calls, and an average frequency across all 45 RCC PBMCs≧5 ppm). This more stringent filter was used to avoid the inclusion low level transcripts in the predictive models. For nearest-neighbor analysis all expression data in training sets and test sets were log transformed prior to analysis. In training sets of data, models containing increasing numbers of features (transcript sequences) were built using a two-sided approach (equal numbers of features in each class) with a S2N similarity metric that used median values for the class estimate. All comparisons were binary distinctions, and each model (with increasing numbers of features) was evaluated by leave one out cross validation. Prediction of class membership in the test sets was performed using a k-nearest-neighbor algorithm in Genecluster version 2.0. In these predictions, the number of neighbors was set to k=3, the cosine distance measure used, and all k neighbors were given equal weights.

[0222] As demonstrated above, the Cox proportional hazards regression suggested an association between gene expression and time until disease progression, and an even stronger association between gene expression and survival. On the basis of these findings, a nearest-neighbors algorithm coupled with the stringent data reduction filter was employed to identify multivariate expression patterns in PBMCs that were correlated with and could be used to predict patient outcome. In these analyses, pretreatment expression patterns correlated with the clinical outcomes of TTP and TTD were determined.

[0223] In order to evaluate the predictive utility of the profiles correlated with clinical outcomes, 70% of the patient PBMC profiles were randomly selected as a training set, and the remaining 30% of the samples formed the test set. In each approach, the profiles were stratified as originating from patients with poor or favorable outcomes. A nearest-neighbors algorithm was used to generate gene classifiers correlated with groups in the training set. The gene classifier that gave the highest accuracy of class assignment by leave-one-out cross validation was identified. Finally, this gene classifier was evaluated on the test set of samples.

[0224] Prior to running these analyses we examined the distribution of PBMC cell types in the various groups to ensure that differences in cell populations were not the sole basis for any observed differences in expression. Tables 18 and 19 demonstrate the distributions of the various cell subtypes (neutrophils, eosinophils, lymphocytes and monocytes) between PBMCs of patients assigned to either good or poor outcome categories for TTP and survival. The mean percentages and the p-value for a t-test (unequal variance) between the good and poor outcome PBMC profiles for each cell subtype are presented. None of the cell subtypes were found to be significantly confounded with the class distinctions for either clinical outcome, ensuring that transcriptional patterns, if identified, would not simply be reflections of altered cell populations between the groups but rather distinct expression patterns arising from PBMC samples with similar cellular compositions.

TABLE 18
Distributions of PBMC Cell Subtypes Between PBMC
Profiles of Patients in Good and Poor Outcome
Stratifications of TTP in Training Set

| Cell Type | TTP > 106 days | TTP < 106 days | p-value |
|---|---|---|---|
| Neutrophil (%) | 24.7 | 30.8 | 0.6885 |
| Eosinophil (%) | 1.6 | 0.7 | 0.1286 |
| Lymphocyte (%) | 47.1 | 37.9 | 0.5789 |
| Monocyte (%) | 26.5 | 30.6 | 0.68 |

[0225] TABLE 19
Distributions of PBMC Cell Subtypes Between PBMC
Profiles of Patients in Good and Poor Outcome
Stratifications of TTD in Training Set

| Cell Type | TTD > 365 days | TTP < 365 days | p-value |
|---|---|---|---|
| Neutrophil (%) | 24.3 | 28.8 | 0.7661 |
| Eosinophil (%) | 1.8 | 0.9 | 0.1931 |
| Lymphocyte (%) | 48.5 | 40.5 | 0.5007 |
| Monocyte (%) | 25.4 | 29.8 | 0.5823 |

[0226] The first analysis is summarized for the comparison of short- and long-term survivors (less than or greater than one year survival) in FIGS. 6A, 6B, and 6C. Patients were stratified as described above into two groups based upon TTD less than or greater than 365 days. A GeneCluster analysis using the signal-to-noise metric identified transcripts correlated with these groups of patients (FIG. 6A). Predictive gene classifiers containing between 2 and 60 genes in steps of 2 (and 60-200 genes in steps of 10) were evaluated by leave-one-out cross validation to identify the smallest predictive model yielding the most accurate class assignments of short- and long-term survivors in the training set. In this comparison the best model found (with respect to leave-one-out cross validation accuracy) was a classifier of 20 genes (FIG. 6B and Table 20). This predictive model was then evaluated using a nearest-neighbors approach on the remaining test set of samples (FIG. 6C). This entire approach was repeated for the stratification of short vs long-term TTP as illustrated in FIGS. 7A, 7B, and 7C. In this comparison the best model found (with respect to leave-one-out cross validation accuracy) was a classifier of 30 genes (FIG. 7B and Table 21), and this predictive model was also evaluated using a nearest-neighbors approach on the remaining test set of samples (FIG. 7C). Further detail concerning overall prediction accuracies, sensitivities and specificities of the predictive models based on year-long survival and time to progression are summarized for the test sets of samples in Table 22.

TABLE 20
Prognosis Genes for Short-term (<365 days) versus Long-term (>365 days) TTD

| Qualifier | Gene Name | Class | Score | Perm 1% | Perm 5% | Perm (user) |
|---|---|---|---|---|---|---|
| 33956_at | MD-2 | Less_365_TTD | 0.63 | 1.1363704 | 0.9071798 | 0.66693866 |
| 41551_at | RER1 | Less_365_TTD | 0.61 | 1.0375708 | 0.79028875 | 0.6129954 |
| 37009_at | UNK_AL035079 | Less_365_TTD | 0.59 | 0.9283793 | 0.77387965 | 0.5757412 |
| 35300_at | EPRS | Less_365_TTD | 0.58 | 0.92103595 | 0.74762696 | 0.5645757 |
| 39127_f_at | PPP2R4 | Less_365_TTD | 0.56 | 0.8624204 | 0.70808446 | 0.5475367 |
| 39360_at | SNX3 | Less_365_TTD | 0.54 | 0.80717504 | 0.6861655 | 0.53616226 |
| 41332_at | POLR2E | Less_365_TTD | 0.53 | 0.77077115 | 0.67412776 | 0.52794206 |
| 38453_at | ICAM2 | Less_365_TTD | 0.51 | 0.744897 | 0.6632934 | 0.52192914 |
| 33424_at | RPN1 | Less_365_TTD | 0.5 | 0.7365122 | 0.64835453 | 0.51936203 |
| 956_at | TUBB | Less_365_TTD | 0.5 | 0.7222108 | 0.64653593 | 0.51475555 |
| 32372_at | CTSB | Greater_365_TTD | 0.82 | 1.2004976 | 0.9564477 | 0.69520277 |
| 32635_at | KIAA1113 | Greater_365_TTD | 0.81 | 1.0586497 | 0.90758944 | 0.63466245 |
| 33493_at | HFL-EDDG1 | Greater_365_TTD | 0.77 | 0.90262204 | 0.8435416 | 0.60823596 |
| 36474_at | KIAA0776 | Greater_365_TTD | 0.76 | 0.8723624 | 0.78129286 | 0.5796107 |
| 31864_at | MPHOSPH6 | Greater_365_TTD | 0.75 | 0.84502566 | 0.7641664 | 0.56468636 |
| 38317_at | TCEAL1 | Greater_365_TTD | 0.73 | 0.8426697 | 0.7597285 | 0.5504346 |
| 2064_g_at | ERCC5 | Greater_365_TTD | 0.72 | 0.8337271 | 0.7298645 | 0.5382294 |
| 39557_at | UNK_AI625844 | Greater_365_TTD | 0.72 | 0.83215594 | 0.699147 | 0.53125846 |
| 36190_at | CDR2 | Greater_365_TTD | 0.71 | 0.8173296 | 0.6975797 | 0.5216159 |
| 40308_at | UNK_AI830496 | Greater_365_TTD | 0.71 | 0.80752265 | 0.6942027 | 0.51970375 |

[0227] TABLE 21
Prognosis Genes for Short-term (<106 days) versus Long-term (>106 days) TTP

| Qualifier | Gene Name | Class | Score | Perm 1% | Perm 5% | Perm (user) |
|---|---|---|---|---|---|---|
| 181_g_at | UNK_S82470 | Less_TTP_106 | 3.41 | 5.582922 | 4.8208075 | 3.5752022 |
| 34498_at | VNN2 | Less_TTP_106 | 3 | 5.337237 | 4.2469945 | 3.2616036 |
| 38585_at | HBG2 | Less_TTP_106 | 2.95 | 4.1692014 | 3.714144 | 3.099498 |
| 39833_at | CHRNE | Less_TTP_106 | 2.85 | 4.067239 | 3.6665761 | 2.9885216 |
| 35012_at | MNDA | Less_TTP_106 | 2.84 | 4.032049 | 3.5925848 | 2.9256356 |
| 34946_at | DORA | Less_TTP_106 | 2.75 | 3.9986155 | 3.5583446 | 2.8342075 |
| 1558_g_at | PAK1 | Less_TTP_106 | 2.7 | 3.8789496 | 3.4725833 | 2.7667618 |
| 35820_at | GM2A | Less_TTP_106 | 2.7 | 3.8435366 | 3.4385278 | 2.6919303 |
| 41136_s_at | APP | Less_TTP_106 | 2.61 | 3.813862 | 3.3433113 | 2.6589744 |
| 32776_at | RALB | Less_TTP_106 | 2.57 | 3.713758 | 3.3420131 | 2.603462 |
| 34874_at | NTE | Less_TTP_106 | 2.45 | 3.6834376 | 3.3347135 | 2.5644205 |
| 34319_at | S100P | Less_TTP_106 | 2.35 | 3.598251 | 3.2589953 | 2.535933 |
| 41102_at | T54 | Less_TTP_106 | 2.31 | 3.5312018 | 3.2556353 | 2.4961586 |
| 32046_at | PRKCD | Less_TTP_106 | 2.28 | 3.5278873 | 3.241575 | 2.4784653 |
| 36960_at | EDR2 | Less_TTP_106 | 2.25 | 3.4799564 | 3.1926253 | 2.4267142 |
| 34871_at | UNK_W30677 | Greater_TTP_106 | 3.89 | 6.951508 | 5.112061 | 4.082164 |
| 38518_at | SCML2 | Greater_TTP_106 | 3.67 | 5.105945 | 4.6043224 | 3.631336 |
| 41189_at | TNFRSF12 | Greater_TTP_106 | 3.59 | 5.105614 | 4.2503996 | 3.395199 |
| 40048_at | UNK_D43951 | Greater_TTP_106 | 3.49 | 4.7581496 | 4.189143 | 3.3146112 |
| 40396_at | P2RX5 | Greater_TTP_106 | 3.49 | 4.513983 | 4.0066333 | 3.2069612 |
| 35177_at | KIAA0725 | Greater_TTP_106 | 3.38 | 4.4174356 | 3.9872625 | 3.1314178 |
| 40584_at | NUP88 | Greater_TTP_106 | 3.24 | 4.3745546 | 3.9209368 | 3.0728083 |
| 38340_at | KIAA0655 | Greater_TTP_106 | 3.23 | 4.121891 | 3.8479779 | 3.009764 |
| 37416_at | ARHH | Greater_TTP_106 | 3.22 | 4.105443 | 3.834686 | 2.9688578 |
| 38148_at | CRY1 | Greater_TTP_106 | 3.19 | 4.051371 | 3.776217 | 2.9163232 |
| 32372_at | CTSB | Greater_TTP_106 | 3.18 | 4.0035615 | 3.7531464 | 2.8886828 |
| 36968_s_at | OIP2 | Greater_TTP_106 | 3.12 | 3.9565299 | 3.6980143 | 2.8398302 |
| 34256_at | SIAT9 | Greater_TTP_106 | 3.11 | 3.8674347 | 3.6664524 | 2.7820752 |
| 41767_r_at | KIAA0855 | Greater_TTP_106 | 3.1 | 3.8383002 | 3.629394 | 2.748495 |
| 36403_s_at | UNK_AI434146 | Greater_TTP_106 | 2.96 | 3.778308 | 3.569239 | 2.690984 |

[0228] TABLE 22
Performance Characteristics of Gene Classifiers from
Supervised Approaches for Samples in the Test Set

| | Accuracy | Pos Predictive Value | Neg Predictive Value |
|---|---|---|---|
| TTP | 11/13 (85%) | 8/10 (80%) | 3/3 (100%) |
| TTD | 10/14 (72%) | 8/8 (100%) | 2/6 (33%) |

[0229] We identified expression patterns and individual transcript levels in pretreatment PBMC expression profiles that appear correlated with, and therefore predictive of, the clinical outcomes of time to progression and survival in patients with RCC.

[0230] In initial analyses, an unsupervised hierarchical clustering algorithm segregated patients solely on the basis of the similarity in their global expression profiles in PBMCs. We identified significant differences in survival between these molecularly defined subgroups of patients and, as a precautionary step, tested whether technical or demographic factors were confounded with the observed subgroups of patient PBMC profiles in good and poor outcome clusters. Key technical parameters associated with the profiles (measures of RNA quality, gene chip hybridization, etc) were not significantly different between the groups and therefore did not confound the analysis. In addition we ruled out multiple other demographic parameters (sex, age, ethnicity) as sources of the observed stratification in patient PBMC profiles. Finally, we also determined that CCI-779 dose level did not impact the observed stratifications, indicating that profiles predictive of various outcomes were not CCI-779 dose dependent.

[0231] The Kaplan-Meier based differences in survival curves for the subsets of patients in the good versus poor gene expression prognosis clusters were more distinct than the differences in survival for those same patients as predicted by their associated risk classifications (FIGS. 4A and 4B). This finding supports the continued exploration of surrogate tissue profiling for identification of gene expression patterns predictive of outcome, since prior to the expression profiling results in PBMCs reported here, the Motzer risk classification was the prognostic index best correlated with outcome in this clinical study.

[0232] Multiple supervised approaches also support the hypothesis that transcriptional levels of select genes in PBMC profiles of RCC patients are significantly correlated with disease progression and survival. Both non-parametric (Spearmans correlation, data not shown) and parametric (Cox proportional hazard modeling) univariate analyses identified individual transcripts that were significantly correlated with both disease progression and survival. Multivariate approaches using k-nearest-neighbor gene selection were also performed to identify multivariate predictors correlated with clinical outcomes of progression and survival. Supervised analyses identified gene signatures in PBMCs that were capable of identifying patients with varying accuracy with respect to TTP and survival. The overall accuracy of these predictive models on test sets of patients was 85% and 72%, respectively, and overall accuracies in both training set cross validation and in test set predictions were similar.

[0233] The results further imply that the circulating monocytes, T cells and B cells (or activated neutrophils passing through CPT) may serve as a sensitive monitor of the organism's physiological state. As these cells pass through various tissues, their reaction to the microenvironment is captured in a complex transcriptional response measured through profiling. Surprisingly, such patterns appear to not only be diagnostic of disease state (e.g., RCC) but may also reflect differential responses to variations in the clinically same disease state (e.g., advanced RCC with different degrees of aggressiveness). This suggests that the PBMCs, due to their transit through the body, may serve as an accessible surrogate monitor of tissues and systems that are not easily obtained by routine biopsies.

[0234] The functional categories of transcripts in PBMCs associated with low or high risk display several interesting trends. First, transcripts elevated in PBMCs of patients with shorter TTP or survival include those involved in cytoskeletal organization/cell motility, associated small GTPases, general pathways of proteasome-dependent catabolism and general pathways of metabolism. In contrast, transcripts elevated in PBMCs of patients with longer TTP or survival included those involved in mRNA transport, mRNA processing/splicing and ribosomal protein subunits.

[0235] Similar surrogate tissue analyses can be used to identify transcriptional profiles that are specific to a particular therapy in question (e.g., CCI-779, interferon-alpha (IFN-α), or CCI-779+IFN-α), as well as those that are simply prognostic of disease outcome regardless of therapy.

[0236] The foregoing description of the present invention provides illustration and description, but is not intended to be exhaustive or to limit the invention to the precise one disclosed. Modifications and variations are possible consistent with the above teachings or may be acquired from practice of the invention. Thus, it is noted that the scope of the invention is defined by the claims and their equivalents.

What is claimed is:

1. A method comprising comparing an expression profile of at least one gene in a peripheral blood sample of a patient to at least one reference expression profile of said at least one gene, wherein the patient has a solid tumor, and each of said at least one gene is differentially expressed in peripheral blood mononuclear cells of a first class of patients as compared to peripheral blood mononuclear cells of a second class of patients, wherein both the first and second classes of patients have the solid tumor, and wherein the first class of patients has a first clinical outcome, and the second class of patients has a second clinical outcome.

2. The method according to claim 1, wherein the first and second clinical outcomes are outcomes of a therapeutic treatment of the solid tumor in the first and second classes of patients.

3. The method according to claim 2, wherein the expression profile and said at least one reference expression profile are baseline expression profiles for the therapeutic treatment.

4. The method according to claim 2, wherein the peripheral blood sample is a whole blood sample.

5. The method according to claim 2, wherein the peripheral blood sample comprises enriched peripheral blood mononuclear cells.

6. The method according to claim 2, wherein the solid tumor is RCC, and the therapeutic treatment comprises a CCI-779 therapy.

7. The method according to claim 6, wherein the first clinical outcome is TTD of less than a first specified period of time starting from initiation of the therapeutic treatment, and the second clinical outcome is TTD of longer than a second specified period of time starting from initiation of the therapeutic treatment.

8. The method according to claim 6, wherein the first clinical outcome is TTP of less than a specified period of time starting from initiation of the therapeutic treatment, and the second clinical outcome is TTP of longer than another specified period of time starting from initiation of the therapeutic treatment.

9. The method according to claim 6, wherein the first clinical outcome is a Motzer risk classification, and the second clinical outcome is another Motzer risk classification.

10. The method according to claim 2, wherein said at least one gene comprises two or more genes, and said at least one reference expression profile includes a first reference expression profile and a second reference expression profile, wherein the first reference expression profile is an average expression profile of said at least one gene in peripheral blood samples of patients selected from the first class, and the second reference expression profile is an average expression profile of said at least one gene in peripheral blood samples of patients selected from the second class, and wherein the expression profile is compared to said at least one reference expression profile by using a k-nearest-neighbors or weighted voting algorithm.

11. The method according to claim 1, wherein said at least one gene substantially correlates with a class distinction between the first class and the second class.

12. The method according to claim 1, comprising selecting a therapy for treating the solid tumor in the patient, wherein the patient has a favorable prognosis for the therapy.

13. A method comprising comparing an expression profile of at least one gene in a peripheral blood sample of a patient to at least one reference expression profile of said at least one gene, wherein the patient has a solid tumor, and each of said at least one gene is differentially expressed in peripheral blood mononuclear cells of a first class of patients as compared to peripheral blood mononuclear cells of a second class of patients, wherein the first and second classes of patients have the solid tumor, and each of the first and second classes is a subcluster formed by an unsupervised clustering analysis of gene expression profiles in peripheral blood mononuclear cells of a population of patients who have the solid tumor, and wherein the majority of the first class of patients has a first clinical outcome, and the majority of the second class of patients has a second clinical outcome.

14. The method according to claim 13, wherein the first and second clinical outcomes are outcomes of a therapeutic treatment of the solid tumor in the first and second classes of patients, and the expression profile and said at least one reference expression profile are baseline expression profiles for the therapeutic treatment.

15. The method according to claim 14, wherein the solid tumor is RCC, and the therapeutic treatment comprises a CCI-779 therapy.

16. The method according to claim 13, comprising selecting a therapy for treating the solid tumor in the patient, wherein the patient has a favorable prognosis for the therapy.

17. A method comprising comparing an expression profile of at least one gene in a peripheral blood sample of a patient to at least one reference expression profile of said at least one gene, wherein the patient has a solid tumor, and expression levels of each of said at least one gene in peripheral blood mononuclear cells of patients who have the solid tumor correlate with clinical outcomes of said patients.

18. The method according to claim 17, wherein the solid tumor is RCC, and said clinical outcomes are measured by patient response to a CCI-779 therapy, and wherein said at least one gene comprises one or more genes selected from Tables 6a, 6b, 6c, 6d, 9a, 9b, 9c, 9d, 10, 11, 12, 13, 16, 20, and 21.

19. A system comprising:
a memory or a storage medium including data that represent an expression profile of at least one gene in a peripheral blood sample of a patient who has a solid tumor;
at least another storage medium including data that represent at least one reference expression profile of said at least one gene;
a program capable of comparing the expression profile to said at least one reference expression profile; and
a processor capable of executing the program, wherein expression levels of said at least one gene in peripheral blood mononuclear cells of patients who have the solid tumor correlate with clinical outcomes of said patients.

20. A nucleic acid or protein array comprising concentrated probes for solid tumor prognosis genes, wherein each of the solid tumor prognosis genes is differentially expressed in peripheral blood mononuclear cells of a first class of patients as compared to peripheral blood mononuclear cells of a second class of patients, wherein both the first and second classes of patients have a solid tumor, and wherein the first class of patients has a first clinical outcome, and the second class of patients has a second clinical outcome.

The application's sequence listing, which the Patent Office published only in electronic form, follows.

SEQUENCE LISTING (5315 sequences)

SEQ ID NO: 1 - DNA, 593 bp, Homo sapiens
  misc_feature (36)..(58): n includes a, c, g, or t, or contains no nucleotide
  misc_feature (126)..(145): n includes a, c, g, or t, or contains no nucleotide
  misc_feature (230)..(244): n includes a, c, g, or t, or contains no nucleotide
  misc_feature (321)..(337): n includes a, c, g, or t, or contains no nucleotide
  misc_feature (429)..(491): n includes a, c, g, or t, or contains no nucleotide
  misc_feature (537)..(561): n includes a, c, g, or t, or contains no nucleotide
ccctgtatctatgtgttaaataagattgaccaaatnnnnnnnnnnnnnnnnnnnnnnntctataaggtgcctcactgtgtacccatctctgcccatcaccgctggaattttgatgacctattggannnnnnnnnnnnnnnnnnnnaactagtgagaatttacaccaaacccaaaggccagttaccagattacacatccccagtggtgcttccttactccaggaccacagnnnnnnnnnnnnnnntgaagattcacaaaaatcttatcaaagaatttaaatatgctctggtctggggtctctctgtgaaacacaatcctcannnnnnnnnnnnnnnnnatacgttggaggatgaggatgtcattcaaattgtgaagaagtgaaacctttcccttttcccatctgccggacgaaccacaacagcgttcccnnnnnnnnnnnnnnnnnnnnnnnnnnnnnnnnnnnnnnnnnnnnnnnnnnnnnnnnnnnnnnngagggagatggaggcacccaaactggaacttcatttgtcttacctnnnnnnnnnnnnnnnnnnnnnnnnncataaaagatctggtaggctggtcagctacat

SEQ ID NO: 2 - DNA, 217 bp, Homo sapiens
  misc_feature (46)..(93): n includes a, c, g, or t, or contains no nucleotide
gtatccagggcaggtggtcatcaaaatagctacaaaccatatctannnnnnnnnnnnnnnnnnnnnnnnnnnnnnnnnnnnnnnnnnnnnnnntccaatttgaagattcatttgaatggctcctgccacctgctaatagcagttcaaactaaattttttgtatcaagtccctgaatggaagtatgacgttgggtccctctgaagtttaattctgagt

SEQ ID NO: 3 - DNA, 589 bp, Homo sapiens
  misc_feature (134)..(172): n includes a, c, g, or t, or contains no nucleotide
  misc_feature (244)..(245): n includes a, c, g, or t, or contains no nucleotide
  misc_feature (273)..(274): n includes a, c, g, or t, or contains no nucleotide
  misc_feature (291)..(291): n includes a, c, g, or t, or contains no nucleotide
  misc_feature (353)..(353): n includes a, c, g, or t, or contains no nucleotide
  misc_feature (454)..(454): n includes a, c, g, or t, or contains no nucleotide
  misc_feature (457)..(457): n includes a, c, g, or t, or contains no nucleotide
agctggctgagaacatcgacgcacagctcaagcgcatggcccaggatctcaaggacatcatcgagcacctgaacacgtccggggcccccgccgacaccagtgacccactgcagcagatctgcaagatcctcaannnnnnnnnnnnnnnnnnnnnnnnnnnnnnnnnnnnnnnggccctgctgcagaggaaggtggaggaggtgaccaaggtgtgcgagggccggcgcaaggagcaggagcgcannttccggatcacctttgactgagcgacannagccctggggcccgcangtccctagggagttcatgaggggaatgcgccctgttgtctgtagtttggggttgtggcaagntacttgtttgtttgtttctttctttcacatgactgcccttgacatgatcgctgtgtgctttgcgtttttccatttaggagggtattctgggccttctgccnagncagcagcctcatgggtgtggcttctgtggctttcatttgagtatctttggccccttttcacctactgcgaaccacccacctcatcctggcttcagcctggtgatgggagaagtgcttgatggtcttggtccc

SEQ ID NO: 4 - DNA, 457 bp, Homo sapiens
  misc_feature (44)..(44): n includes a, c, g, or t, or contains no nucleotide
  misc_feature (72)..(72): n includes a, c, g, or t, or contains no nucleotide
  misc_feature (121)..(121): n includes a, c, g, or t, or contains no nucleotide
  misc_feature (179)..(179): n includes a, c, g, or t, or contains no nucleotide
tcttgcttctgaaatatctacctgggatggagtgatagtaacanccttcagaaaaggcttatgagaagccanccagagaagaaggaaggagaggaagaagaggagaatacagaagaaccancctcaaggagaggaagaagaaagcatggaaactcaggagtgacattcccttcactccnttttcctacccaagggggaagactggagcctaagctgcctgctactgggctttacatggtgacagacatttccgtgggatagggaagatagcaggaagaaaagtaaactccatagaagtgtcattccactgggttttgatattggcttagctgccagtctcccatttgtgacctatgccatccatctataatggaggataccaacatttcttcctaatattctataatctccaactcctgaaaacccctctctcaactaatactttgctgttgaaatg

SEQ ID NO: 5 - DNA, 527 bp, Homo sapiens
  misc_feature (329)..(329): n includes a, c, g, or t, or contains no nucleotide
  misc_feature (332)..(332): n includes a, c, g, or t, or contains no nucleotide
  misc_feature (334)..(334): n includes a, c, g, or t, or contains no nucleotide
  misc_feature (337)..(341): n includes a, c, g, or t, or contains no nucleotide
  misc_feature (343)..(343): n includes a, c, g, or t, or contains no nucleotide
  misc_feature (345)..(355): n includes a, c, g, or t, or contains no nucleotide
  misc_feature (358)..(358): n includes a, c, g, or t, or contains no nucleotide
  misc_feature (360)..(360): n includes a, c, g, or t, or contains no nucleotide
  misc_feature (363)..(363): n includes a, c, g, or t, or contains no nucleotide
  misc_feature (384)..(386): n includes a, c, g, or t, or contains no nucleotide
cgctcgttcaatgagtgttgaaagagatatcagatttgaactgttagcacgactgtgtccaaatagcactggtgctgagattagaagcgtctgcacagaggctggtatgtttgccatcagagcacggcgaaaaattgctaccgagaaggatttcttggaagctgtaaataaggtcattaagtcttatgccaaattcagtgctactcctcgttacatgacatacaactgaaccctgaaggctttcaagtgaaaactttaaattggaatcctaaccttatatagacttgttaataaccaattcataaacaaataaatggcttcaaaattgnaananaannnnnanannnnnnnnnnnaananaanaaaaggtgatttctaatgttnnnaggcagaaaaagcttgttagaatatattttgactatttttttgacccacacccgtttaaggatttcacatcatacaaagcgcttgcttagatggcttctatcctaggcatatgctgggccgggtgctcctacatataattc

SEQ ID NO: 6 - DNA, 278 bp, Homo sapiens
aaccagcaggttgctaaaagaaggcattttatctaaagttattttaataggtggtatagcagtaattttaaatttaagagttgcttttacagttaacaatggaatatgccttctctgctatgtctgaaaatagaagctatttattatgagcttctacaggtatttttaaatagagcaagcatgttgaatttaaaatatgaataaccccacccaacaattttcagtttattttttgctttggtcgaacttggtgtgtgttcatcagttatttgtgaggg

SEQ ID NO: 7 - DNA, 506 bp, Homo sapiens
  misc_feature (189)..(189): n includes a, c, g, or t, or contains no nucleotide
  misc_feature (447)..(447): n includes a, c, g, or t, or contains no nucleotide
ctaaaaggtccaatggctgaaactgtgtttccctgaaccataatgtaacaattagttaagagttccaatgccttcaatgtagatcctttgggaccaataagccgaagtcttcgttttacaaatctctctttattccttactaaagaacctattttaatgatgtcacatgcaacatcatcctgaagaatncgtactgcctgttcaaatgaaacactccttgctaacagttttatcagatctctggccctaatgatgatatatggatcaaaagtcttctttgtagtacaaacagtcatgctgccttcgatcaggtccagggttgcattaacatgatgttcatttaaggctttctgcaccaatggccaacactctttcaagtaagcttccctgtattttgggaacaaagttgcgaaactgctctcctccaaaagtcctctgggattgtcntctttggaaaaagctggttccttccaaccatcaggaaccgtaaggagttctgattcatc

SEQ ID NO: 8 - DNA, 572 bp, Homo sapiens
  misc_feature (90)..(105): n includes a, c, g, or t, or contains no nucleotide
  misc_feature (467)..(490): n includes a, c, g, or t, or contains no nucleotide
  misc_feature (503)..(517): n includes a, c, g, or t, or contains no nucleotide
aggagttactctctaagaagcatgctgcctatgcttggcctttctataaaccagtggatgcttctgcacttggcctgcatgactaccatnnnnnnnnnnnnnnnnccatggacctcagcactgtcaagcggaagatggagaaccgtgattaccgggatgcacaggagtttgctgctgatgtacggcttatgtctccaactgctataagtacatgccccagatcacgatgttgtggcaatggcacgaagctacagatgtatttagttccgttatgccaagatgccagatgaaccactagaaccagggcctttaccagtctctactgccatgccccctggcttggccaaatcgtcttcagagtcctccagtgaggaaagtagcagtgagagctcctctgaggaagaggaggaggaagatgaggaggacgaggaggaagaagagagtgaaagctcagactcagaggaagnnnnnnnnnnnnnnnnnnnnnnnntacaggaacagcnnnnnnnnnnnnnnnaacaactggctgctctgtcccagggtccgatatccaagcccaagaggaaaagaga

SEQ ID NO: 9 - DNA, 442 bp, Homo sapiens
  misc_feature (96)..(96): n includes a, c, g, or t, or contains no nucleotide
ttagccagccactggcccagctgaaatgatggggaaaggagtccttagtcctttcagcctcagaggtcacagtgggtggcaggtgactttccggangccttgagggaaatgcacactgtcccatagcctcattgggctcccagacgtgctggaaaggttgagcccagagtggccgaggctggaccctgtggcaccaagtggggtcggctgaccgtgtggcagggatcgttgcactggactcttggcgtgtgggaagggatgctttctctttgtcgcccactcttcattcctgtttctcctcagttcccctgtgcagatgggctgtgaaattaaattggagtcttgataagaacattttaatttgacttaatattttaaagattgaatccagatcacttgttgctgtcttaatggaatggttttctacaggagctgtaacata

SEQ ID NO: 10 - DNA, 591 bp, Homo sapiens
  misc_feature (50)..(84): n includes a, c, g, or t, or contains no nucleotide
  misc_feature (218)..(238): n includes a, c, g, or t, or contains no nucleotide
  misc_feature (316)..(316): n includes a, c, g, or t, or contains no nucleotide
  misc_feature (319)..(319): n includes a, c, g, or t, or contains no nucleotide
  misc_feature (514)..(530): n includes a, c, g, or t, or contains no nucleotide
attatgacagaggttactctagcctgcttaaaagagattttggggcaaannnnnnnnnnnnnnnnnnnnnnnnnnnnnnnnnnnccaatgggagctttggaagtaattttgtgtctgctggtatacagaccagttttaggactggtaatccaacagggacttaccagaatggttatgatagcactcagcaatacggaagtaatgttccaaatatgcannnnnnnnnnnnnnnnnnnnnatatgcatatcctgctactgcagctgcacctatgattggttatccaatgccaacaggatattcccaataagactttanaantatatgtaaatgtctgtttttcataattgctctttatattgtgtgttatctgacaagatagttatttaagaaacatgggaattgcagaaatgactgcagtgcagcagtaattatggtgcactttttcgctatttaagttggatatttctctacattcctgaaacaatttttaggttttttttgtactagaaaatnnnnnnnnnnnnnnnnnaaaagtaaatgtacagtgatttgaaatacaataaatgaaggcaatgcatggccttccaata

SEQ ID NO: 11 - DNA, 433 bp, Homo sapiens
  misc_feature (97)..(289): n includes a, c, g, or t, or contains no nucleotide
  misc_feature (291)..(291): n includes a, c, g, or t, or contains no nucleotide
  misc_feature (294)..(307): n includes a, c, g, or t, or contains no nucleotide
  misc_feature (310)..(337): n includes a, c, g, or t, or contains no nucleotide
  misc_feature (345)..(345): n includes a, c, g, or t, or contains no nucleotide
  misc_feature (348)..(350): n includes a, c, g, or t, or contains no nucleotide
cagtctgtaagctttgataacctgcttaatactccaaagtgtgagttcctctgatctcttgattccttagttctaatctcacgttttgtttttaagnnnnnnnnnnnnnnnnnnnnnnnnnnnnnnnnnnnnnnnnnnnnnnnnnnnnnnnnnnnnnnnnnnnnnnnnnnnnnnnnnnnnnnnnnnnnnnnnnnnnnnnnnnnnnnnnnnnnnnnnnnnnnnnnnnnnnnnnnnnnnnnnnnnnnnnnnnnnnnnnnnnnnnnnnnnnnnnnnnnnnnnnnnnnnnnnnanaannnnnnnnnnnnnnaannnnnnnnnnnnnnnnnnnnnnnnnnnnccctaaanccnnncctctttaactgcttctaaaatatctctgttggcctttcttagcctttttctgtttccattcagtgctccaagcgctttttgt

SEQ ID NO: 12 - DNA, 537 bp, Homo sapiens
  misc_feature (368)..(368): n includes a, c, g, or t, or contains no nucleotide
  misc_feature (478)..(478): n includes a, c, g, or t, or contains no nucleotide
  misc_feature (480)..(483): n includes a, c, g, or t, or contains no nucleotide
  misc_feature (485)..(491): n includes a, c, g, or t, or contains no nucleotide
  misc_feature (494)..(494): n includes a, c, g, or t, or contains no nucleotide
gtttttgcaaatgcttgcccctacttttcaacaattttctatgttagttgtgaagaactaaggtggggagcagtactacaagttgagtaatggtatgagtatataccagaattctgattggcagcaagttttattaatcagaataacacttggttatggaagtgactaatgctgaaaaaattgattatttttattagataatttctcacctatagacttaaactgtcaatttgctctagtgtcttattagttaaactttgtaaaatatatatatacttgtttttccattgtatgcaaattgaaagaaaaagatgtaccatttctctgttgtatgttggattatgtaggaaatgtttgtgtacaattcnaaaaaaaaaaaagatgaaaaaagttcctgtggatgttttgtgtagtatcttggcatttgtattgatagttaaaattcacttccaaataaataaaacacccatgatgctanannnnannnnnnnccnatttgaacaagggttgattgacacctgtaaaatttgttgaaac

SEQ ID NO: 13 - DNA, 486 bp, Homo sapiens
  misc_feature (36)..(36): n includes a, c, g, or t, or contains no nucleotide
  misc_feature (112)..(112): n includes a, c, g, or t, or contains no nucleotide
  misc_feature (117)..(120): n includes a, c, g, or t, or contains no nucleotide
  misc_feature (380)..(380): n includes a, c, g, or t, or contains no nucleotide
  misc_feature (435)..(457): n includes a, c, g, or t, or contains no nucleotide
ccatcgagagtgagattaggcgagaacgagagaggncagacaaacccatcagccatggaggtagaagaggatgatccagtgcctgagatccgtcgagatcactttgaagaangccannnnctttgcgcgccgttctgtcagtgacaatgacattcggaagtatgagatgtttgcccagacccttcagcagagtcggggctttggcagcttcagattcccttcagggaaccagggtggagctggccccagtcagggcagtggaggcggcacaggtggcagtgtatacacagaagacaatgatgatgacctgtatggctaagtggtggtggccagcgtgcagtgagctggcctgcctggaccttgttccctgggggtggggncgcttgcccaggagagggaccaggggtgcgcccacagcctgctccattctccagnnnnnnnnnnnnnnnnnnnnnnngactctggacagggggtttctgttgcaaa

SEQ ID NO: 14 - DNA, 468 bp, Homo sapiens
  misc_feature (233)..(233): n includes a, c, g, or t, or contains no nucleotide
  misc_feature (257)..(259): n includes a, c, g, or t, or contains no nucleotide
aatatgcacgtgtgtatccaatctgcctgtgacatgcattttactctttgcagagaatgagctgcagtccagtttaatgtcagtttaataagtggtctctttttagcagagcaaaaaaatatagcgtaaatacttattttttttaaaaacttacttaaatttgtgtgtaaaatatttatttgaaggactttaatatgtaaaaataattgtcttctatgccaccctacagattntattttaatgtgaattattttttnnntttcatttttaccagtatagtaaaaaagtagaaaagcaagtatgatatttttgtaagataatttatttggggattcatgttccctgttagacaatcatgaccttttctacttgtctttttatatataagtagtagatttccacttgtttagggattaagaagatgttctagaatgtagataccttgtccagccataggaatcaaaataa

SEQ ID NO: 15 - DNA, 522 bp, Homo sapiens
  misc_feature (212)..(212): n includes a, c, g, or t, or contains no nucleotide
  misc_feature (233)..(233): n includes a, c, g, or t, or contains no nucleotide
  misc_feature (429)..(460): n includes a, c, g, or t, or contains no nucleotide
  misc_feature (466)..(481): n includes a, c, g, or t, or contains no nucleotide
gttaaacttcgcaaaatgcctagatattatcctactgaagatgtgcctcgaaagctgttgagccacggcaaaaaacccttcagtcagcacgtgagaaaactgcgagccagcattacccccgggaccattctgatcatcctcactggacgccacaggggcaagagggtggttttcctgaagcagctggctagtggcttattacttgtgactgnacctctggtcctcaatcgagnttcctctacgaagaacacaccagaaatttgtcattgccacttcaaccaaaatcgatatcagcaatgtaaaaatcccaaaacatcttactgatgcttacttcaagaagaagaagctgcggaagcccagacaccaggaaggtgagatcttcgacacagaaaaagagaaatatgagattacggagcagcgcaagattgnnnnnnnnnnnnnnnnnnnnnnnnnnnnnnnnaaaatnnnnnnnnnnnnnnnnctccagggctacctgcgatctgtgtttgctctgacgaatgg

SEQ ID NO: 16 - DNA, 465 bp, Homo sapiens
  misc_feature (217)..(217): n includes a, c, g, or t, or contains no nucleotide
gactcacggagctcagagagagaagaaagtcaaagcagaaacaaagacaaatacagaaaccaagagagtaagagctcacacagaaaagaaaattctgagagtgagaaaagaatgtactctaaaagtcgtgatcataatagctcaaataacagcagggaaaaaaaggctgatagagatcaaagtcccttctcaaaaataaaacaaagcagtcaggacnatgaattaaagtcctccatgttgaaaaataaggaggatgagaagatcagatcctcagtggaaaaagaaaaccaaaaatcaaaaggtcaagaaaatgaccatgtacatgaaaaaaataaaaaatttgatcatgaatcaagccctggaacagatgaagacaaaagcggatgagtgagttatataaacttacttccattctgtttcggattttaagtttgagagacttgctaatgaatctcctttatgttg

SEQ ID NO: 17 - DNA, 387 bp, Homo sapiens
  misc_feature (101)..(135): n includes a, c, g, or t, or contains no nucleotide
cagagatccaaagagcccttcgagcaccacgcaagaagatccatcgcagagtcctaaagaagaacccactgaaaaacttgagaatcatgttgaagctaaannnnnnnnnnnnnnnnnnnnnnnnnnnnnnnnnnnttcgccaggccaggaatcacaagctccgggtggataaggcagctgctgcagcagcggcactacaagccaaatcagatgagaaggcggcggttgcaggcaagaagcctgtggtaggtaagaaaggaaagaaggctgctgttggtgttaagaagcagaagaagcctctggtgggaaaaaaggcagcagctaccaagaaaccagcccctgaaaagaagcctgcagagaagaaacctactacagaggagaagaagc

SEQ ID NO: 18 - DNA, 311 bp, Homo sapiens
  misc_feature (132)..(132): n includes a, c, g, or t, or contains no nucleotide
  misc_feature (134)..(134): n includes a, c, g, or t, or contains no nucleotide
cctttgggtatttgcactattttgggagcaagttttctatgtgggagccactttttttgtacaggggtaagttgggggttttcagggagcctgttaggtgcctccttcttttctttcctcaatctatgcaancngctctggccgccatcatctcctgggatgccagagggctgcctctccagcggcttgggccggggaggggacactccagttctctagcatggcctgaggtatggggtatgtgcatgtggaggccagggtaaggtgaatggggaggctgggaggactggtgttgccctttggagcttggt

SEQ ID NO: 19 - DNA, 515 bp, Homo sapiens
  misc_feature (112)..(112): n includes a, c, g, or t, or contains no nucleotide
  misc_feature (143)..(170): n includes a, c, g, or t, or contains no nucleotide
  misc_feature (453)..(454): n includes a, c, g, or t, or contains no nucleotide
  misc_feature (456)..(462): n includes a, c, g, or t, or contains no nucleotide
tgtgccaggacttggaggtccctctcctcggcagagtgcccctggatccgctcataggtaagaattgtgacaaaggccagtcttttttcattgacgccccagattccccagnccacgttagcctacagaagtataattcagannnnnnnnnnnnnnnnnnnnnnnnnnnngtcaaaagaagagaacctcatcagttcctgaaacgagagaatgttcaggaccaagcagttaccgagcgaggcactcactgggcagcacatccagccagacccgaccagctccgggatggggtgggtcacagcaaaaggaccagatgctggtgtggtccgaagccactttctcagagacactttaatcattgagtatttgtacacttttctttagaacatatataaagggcattctctacaaatgtgccgttttaagaataaaaccccctcaaatctcaaaaannannnnnnnttcacgtaaaaaacaaatgggttgtgggatcgtgggattctgctgtgtcggaa

SEQ ID NO: 20 - DNA, 521 bp, Homo sapiens
  misc_feature (33)..(57): n includes a, c, g, or t, or contains no nucleotide
  misc_feature (119)..(119): n includes a, c, g, or t, or contains no nucleotide
  misc_feature (217)..(243): n includes a, c, g, or t, or contains no nucleotide
  misc_feature (302)..(332): n includes a, c, g, or t, or contains no nucleotide
  misc_feature (439)..(456): n includes a, c, g, or t, or contains no nucleotide
  misc_feature (478)..(478): n includes a, c, g, or t, or contains no nucleotide
ggtgcatgtattctcttttcactaacttatacnnnnnnnnnnnnnnnnnnnnnnnnncagtcagctggtcatttaccaggtgtggacttaagttgctgggcttgcagtaagaattgccnagccactcattgtgcgggtctgcgtggagctttaatcagaaaaagcctccactttctgtattatgttaacattggctcatgcatataactatctgctnnnnnnnnnnnnnnnnnnnnnnnnnnnttagagtgggttaaccaggtcattacatcttaatttaataacaagcattactgtagagnnnnnnnnnnnnnnnnnnnnnnnnnnnnnnntgtgttttttttaacctgttgtgtgcgtgtgggggttaggattagtaaggtgaactgttcaggaattctctgcactagctgtgcagaagagcagataactagcgctnnnnnnnnnnnnnnnnnnggaaccactagcagtagtgggncgccgccaatctaacatgagcacaggtgcttcatgacaaacat

SEQ ID NO: 21 - DNA, 540 bp, Homo sapiens
  misc_feature (97)..(111): n includes a, c, g, or t, or contains no nucleotide
  misc_feature (136)..(136): n includes a, c, g, or t, or contains no nucleotide
  misc_feature (187)..(187): n includes a, c, g, or t, or contains no nucleotide
  misc_feature (208)..(222): n includes a, c, g, or t, or contains no nucleotide
  misc_feature (334)..(379): n includes a, c, g, or t, or contains no nucleotide
  misc_feature (383)..(432): n includes a, c, g, or t, or contains no nucleotide
ctcgggcacgctacgagagtacaaggtagtgggtcgctgcctgcccacccccaaatgccacacgccgcccctctaccgcatgcgaatctttgcgccnnnnnnnnnnnnnnncaagtcccgcttctggtactttgtntctcagttaaagaagatgaagaagtcttcaggggagattgtctactgtggncaggtgtttgagaagtccccnnnnnnnnnnnnnnncttcgggatctggctgcgctatgactcccggagcggcacccacaacatgtaccgggaataccgggacctgaccaccgcaggcgctgtcacccagtgctaccgagacatgggnnnnnnnnnnnnnnnnnnnnnnnnnnnnnnnnnnnnnnnnnnnnnngagnnnnnnnnnnnnnnnnnnnnnnnnnnnnnnnnnnnnnnnnnnnnnnnnnnctccaagatcaagttcccgctgccccaccgggtcctgcgccgtcagcacaagccacgcttcaccaccaagaggcccaacaccttcttctaggtgcagggccctcgtcc

SEQ ID NO: 22 - DNA, 295 bp, Homo sapiens
  misc_feature (96)..(96): n includes a, c, g, or t, or contains no nucleotide
  misc_feature (105)..(105): n includes a, c, g, or t, or contains no nucleotide
  misc_feature (109)..(111): n includes a, c, g, or t, or contains no nucleotide
  misc_feature (120)..(120): n includes a, c, g, or t, or contains no nucleotide
  misc_feature (122)..(125): n includes a, c, g, or t, or contains no nucleotide
  misc_feature (127)..(146): n includes a, c, g, or t, or contains no nucleotide
aacagttagatcagcccatctcagcttgctgtttcaatcacaatggaaacatatttgcatacgcttccagctacgactggtcaaagggacatgaantttataatncccnnnaaaaaaaantnnnntnnnnnnnnnnnnnnnnnnnnaagagctaaagcccaggaataagaagtagtggctggagactctggctcagccagagttgtttctctccactctgcctcatctctgtacgaatttgggtcccagccttgttgggttgtcagccatggacatggatttcaacccctggaga

SEQ ID NO: 23 - DNA, 548 bp, Homo sapiens
  misc_feature (29)..(29): n includes a, c, g, or t, or contains no nucleotide
  misc_feature (90)..(138): n includes a, c, g, or t, or contains no nucleotide
  misc_feature (143)..(168): n includes a, c, g, or t, or contains no nucleotide
  misc_feature (176)..(176): n includes a, c, g, or t, or contains no nucleotide
  misc_feature (199)..(199): n includes a, c, g, or t, or contains no nucleotide
  misc_feature (204)..(204): n includes a, c, g, or t, or contains no nucleotide
  misc_feature (215)..(216): n includes a, c, g, or t, or contains no nucleotide
  misc_feature (259)..(259): n includes a, c, g, or t, or contains no nucleotide
  misc_feature (270)..(270): n includes a, c, g, or t, or contains no nucleotide
  misc_feature (277)..(380): n includes a, c, g, or t, or contains no nucleotide
  misc_feature (386)..(386): n includes a, c, g, or t, or contains no nucleotide
gtggacctgacattgcccaaggttgaagncaatgaataaaagactgggctccttggtggatgagtttaaggagcttgtttacccaccagnnnnnnnnnnnnnnnnnnnnnnnnnnnnnnnnnnnnnnnnnnnnnnnnntgaannnnnnnnnnnnnnnnnnnnnnnnnnccaaggtnggagtattcagaagaggagctgnaagancccacatcagnncaagggtacgctgggcaagttcactgtgcccatgctgaaaganggcctgccggngcttacnnnnnnnnnnnnnnnnnnnnnnnnnnnnnnnnnnnnnnnnnnnnnnnnnnnnnnnnnnnnnnnnnnnnnnnnnnnnnnnnnnnnnnnnnnnnnnnnnnnnnnnnagtgtngccaggctgcctggccttgtcctcagccagttaaaatgtgtttctcctgagctaggaagagtctacccgacataagtcgagggactttatgtttttgaggctttctgttgccatggtgatggtgtagccctcccactttgctgttccttactttactgcctg

SEQ ID NO: 24 - DNA, 526 bp, Homo sapiens
  misc_feature (359)..(395): n includes a, c, g, or t, or contains no nucleotide
cagtgcactggtgaagaggacatgttagagcaacataagtaaactacttgaaaatagttgtatatattacctaacttctagtgtagtactggttctaacaagtaacaagcaagttttaaaattttaatgttttggctttcattacttcatcttaattatagctttgtatgttactcttatttaatataatctctattgtattgatttcttctgtatttaccttttggattttgtaaaacagaagtttaagaccacaagttagaagaaaggtcacatatttcaaacacaactagatggggctctgaaagatttgtatctctgtgcttgaacttgaatggccttaaacctgtttcagcttnnnnnnnnnnnnnnnnnnnnnnnnnnnnnnnnnnnnnctggtgtaacttatgtgactctagtgcttaacagctgccgttgaagctaatattcagttctgtagagttagaataccttttgttgttgaagatgtgaatgaagtatgcatgtgcattaactgttgaattca

SEQ ID NO: 25 - DNA, 463 bp, Homo sapiens
  misc_feature (199)..(235): n includes a, c, g, or t, or contains no nucleotide
  misc_feature (397)..(397): n includes a, c, g, or t, or contains no nucleotide
  misc_feature (399)..(402): n includes a, c, g, or t, or contains no nucleotide
acccacagcatgatctagatcgagtaaagaaacctgaatgggttatcctgataggtgtttgcactcatcttggctgtgtacccattgcaaatgcaggagattttggtggttattactgcccttgccatgggtcacactatgatgcatctggcaggatcagattgggtcctgctcctctcaaccttgaagtccccacgtnnnnnnnnnnnnnnnnnnnnnnnnnnnnnnnnnnnnnagagacttggactcaagtcataggcttctttcagtctttatgtcacctcaggagacttatttgagaggaagccttctgtacttgaagttgatttgaaatatgtaagaattgatgatgtatttgcaaacattaatgtgaaataaattgaatttaatgttgaanannnncaggcattcacttaataaagacactgttaagcactgttatgctcagtcatacacgcgaaag

SEQ ID NO: 26 - DNA, 459 bp, Homo sapiens
  misc_feature (26)..(40): n includes a, c, g, or t, or contains no nucleotide
  misc_feature (49)..(101): n includes a, c, g, or t, or contains no nucleotide
  misc_feature (105)..(107): n includes a, c, g, or t, or contains no nucleotide
  misc_feature (202)..(252): n includes a, c, g, or t, or contains no nucleotide
agtgtccttttggaaagggagctgcnnnnnnnnnnnnnnnagctgccannnnnnnnnnnnnnnnnnnnnnnnnnnnnnnnnnnnnnnnnnnnnnnnnnnnncccnnnaaagatcctctcacccatggtagttgctgctcgtggttctgtctgtccgtgcaccgatgcacacaccgcaccccaccactgtactctgaaattgnnnnnnnnnnnnnnnnnnnnnnnnnnnnnnnnnnnnnnnnnnnnnnnnnnngcctgccgttcatggtggtctttcaggttatcttggcaacatgtacattgcttttattttttttcttttttgctttcattgtacagtcagtactataaaatttctcttttgagttttatacctttgtagcattttagatgacattgtgtttgtactttgttgtgtagagtggaagaattgtgttgaataaacccaagatcggaatgc

SEQ ID NO: 27 - DNA, 578 bp, Homo sapiens
  misc_feature (35)..(35): n includes a, c, g, or t, or contains no nucleotide
  misc_feature (56)..(87): n includes a, c, g, or t, or contains no nucleotide
  misc_feature (113)..(114): n includes a, c, g, or t, or contains no nucleotide
  misc_feature (116)..(132): n includes a, c, g, or t, or contains no nucleotide
  misc_feature (253)..(253): n includes a, c, g, or t, or contains no nucleotide
  misc_feature (274)..(274): n includes a, c, g, or t, or contains no nucleotide
tagcagaatggcacccagaccactgcccaccagtngacggacatgcacgtggcagnnnnnnnnnnnnnnnnnnnnnnnnnnnnnnnngaaccttgtataattaactttcagtnntnnnnnnnnnnnnnnnnnttttctttgccctgtttgtagctgattgttgtgttttataaatcttctgttaaggcagaagggtgattatgagtggttcacagcagcccttataagctgggccagaaaatttcactaggtncagtaatttaaaccttggatncttcaaaaaataaaataatgtgaagcaaaaccaactaaaaagtgattcttgcacatgaactgtcacatgtttaaaaatgtgttttttagagagcctcagtcttactgatttcaaacacttttttcttctgtgtattgcttttaagagagccatcagttagctatcagactctaggttgatgcattttgtacttagctgtactgtgtgatatttttcattattttaggacgccaacatgagacctgtaataaaatatgtaatggggttgaaagctggggaggaggatctactgctgtacagctaa

SEQ ID NO: 28 - DNA, 607 bp, Homo sapiens
cctctggtgatgctgtttctcgttagtggcagtagtgcctccgtctcctagtgataatgctccaagtctatgaactgttaaatcagcattcattttaagaaaagcaactttagtttcaaagatacttttaagcttctaaattgatcatttaaactatttctttaaataagagagccaaattagaggctcatactttagcttgtgaagaagataatgaattttttaaagggaactttctatgcaatgttcaggataaatcgatactgctggccaatcagtgtcatctcctgggtaaattttgatgtcgcattataaagacatgcataattgatggtttctagattatctagtccaaacaatagagtttattttttcttcatctgaaccaacatgctacagtagctaagaagtattaaaactatatacatccatataaagatgaaatatgaactatctcattagaagtcatagttgaccacagacatgttattcttctgaaagagccacattttggttttatttcttgtcacatgatttcttttcttgatggatgaaaaatatgaaatgaaatcttttatatctgttgcctagttttgtacatggatct

SEQ ID NO: 29 - DNA, 533 bp, Homo sapiens
  misc_feature (291)..(291): n includes a, c, g, or t, or contains no nucleotide
  misc_feature (322)..(366): n includes a, c, g, or t, or contains no nucleotide
atcatactgacctggcagcgggatggggaggaccagacccaggacgtggagctcgtggagaccaggcctgcaggggatggaaccttccagaagtgggcagctgtggtggtgccttctggagaggagcagagatacacgtgccatgtgcagcatgaggggctgccggagcccctcatgctgagatggaagcagtcttccctgcccaccatccccatcatgggtatcgttgctggcctggttgtccttgcagctgtagtcactggagctgcggtcgctgctgtgctgtggagnaagaagagctcagattgaaaaggagggagcnnnnnnnnnnnnnnnnnnnnnnnnnnnnnnnnnnnnnnnnnnnnngtggcaagtccctttgtgacttcaagaaccctgacttctctttctgcagagaccagcccacccctgtgcccaccatgaccctcttcctcatgctgaactgcattccttccccaatcacctttcctgttccagaaaaggggctgggatgtctccgtctctgtctcaaa

SEQ ID NO: 30 - DNA, 156 bp, Homo sapiens
aagcaagcatggtgagaaggctcctatgacttctagaagtacatctacttggagaatacccagcaggaagagacgtttcagcagtagtgacttttcagacctgagtaatggagaagagcttcaggaaacctgcagctcatccctaagaagagggtc

SEQ ID NO: 31 - DNA, 457 bp, Homo sapiens
  misc_feature (98)..(98): n includes a, c, g, or t, or contains no nucleotide
  misc_feature (232)..(232): n includes a, c, g, or t, or contains no nucleotide
  misc_feature (310)..(359): n includes a, c, g, or t, or contains no nucleotide
tcctgcttgctactgttttgtggtgttgaaaagtggtttaaacctgagactaacttaaacacttccttgaccttcttgttgcctgttcatttttgtgnccaaggaagtagctgccccagtgtatgtcttgccttctccgcgtcattgttggaagaggagagatgcatcgagcagtcccagctgcttttcatttattacttcttctttccaggacctgacagaagtcagggangagtccctgggttatgtccaaacttagcacctgcaattgttgggatgtggatggatgtgtgcataagagagagagagnnnnnnnnnnnnnnnnnnnnnnnnnnnnnnnnnnnnnnnnnnnnnnnnnnagtgcgaaggagttgcggttgctccatgttctgacttagggcaatttgattctgcacttggggtctgtctgtacagttactcatgtcattgtaatgat

SEQ ID NO: 32 - DNA, 456 bp, Homo sapiens
  misc_feature (393)..(411): n includes a, c, g, or t, or contains no nucleotide
ggaagacagtctttctcaaacaatactacataccttttattatattacaaacctaagtgttttatatcctagagtcaaggaacaaatttccttaggattatagtattacatgccataaaatactatgctttattggtcccatgttttgtgcaattttaaagagatggctttctattaagtataaactatgtatatataagaaccatattttccacaactaaaatgtgcattattttttccaaagttttatcattgctatttatttttacctttgtttttgaacattcaatccgttcattttgtatgtatgcttaatacgtgtcggtcatatacagtattgaatttttactgtatagtaattctggaaagagcaaataaatgaagattgttttnnnnnnnnnnnnnnnnnnnttgaaagtgtatttttggtatgaagctggttttctgtcacaattg

SEQ ID NO: 33 - DNA, 403 bp, Homo sapiens
acttggtaacctggatgacgatgaagtttctttaggaagtatggatgatgaagaatttgctgaagttgatgaagatggaggaacattcatggatgtgttagatgatgaaagtgagagcgttccagaacttgaagtccactccaaagtcagtactaagaaaagcaagagaaaaggtacagatgattttgactttgctggctcatttcaagggccaagaaaaaagaaaagaaacttaaatgattccagcctatttgtatctgctgaagagtttggccatctattggatgaaaatatgggatccaagtttgataacattgcatgaatgccatggctaacaaagataatgcaagtctcaaacagcttagatgggaggctgaacgtgatgactggctacacaacagag

SEQ ID NO: 34 - DNA, 240 bp, Homo sapiens
actatatacatatgattttatttttaagaccatattatatttgggtatctactaatattttgtataaagcaattttttgttccattacgtgactttttgttttattgtatatgtaatttaacacacaataaagggtaaagttgcttccccaaaccacacttttaatcaaaacctagaatcatctgcagtccttgttaaaaatgcaggtttctagaaccctctgaagttctgattaaataa

SEQ ID NO: 35 - DNA, 383 bp, Homo sapiens
agagcgtgcctcaggttacttgaacttgaacggagactgtagactcccggactttcccctaggactgggggccctgtaggctgctgttggaggactgggtagagacattggagggaagggaagggcttttctccacacaagggcagagagtccgtctagatttcttgctgtcctgccagctctgcccatgcctgaggtggtcctacctctcacgggcaccctagctgctgacagccctttgtggccgccgtccccatcccctgccctcagcacacacatctgcacacacgcagctttgttctcacctctacctgtcattccagcatccctgcctcttgtcacaaactgccccagcaagaatttgaggttctgacaacagtacc

SEQ ID NO: 36 - DNA, 598 bp, Homo sapiens
  misc_feature (26)..(26): n includes a, c, g, or t, or contains no nucleotide
  misc_feature (29)..(29): n includes a, c, g, or t, or contains no nucleotide
  misc_feature (31)..(31): n includes a, c, g, or t, or contains no nucleotide
  misc_feature (34)..(34): n includes a, c, g, or t, or contains no nucleotide
  misc_feature (58)..(58): n includes a, c, g, or t, or contains no nucleotide
  misc_feature (74)..(74): n includes a, c, g, or t, or contains no nucleotide
  misc_feature (77)..(78): n includes a, c, g, or t, or contains no nucleotide
  misc_feature (90)..(90): n includes a, c, g, or t, or contains no nucleotide
  misc_feature (98)..(98): n includes a, c, g, or t, or contains no nucleotide
  misc_feature (104)..(104): n includes a, c, g, or t, or contains no nucleotide
  misc_feature (118)..(118): n includes a, c, g, or t, or contains no nucleotide
  misc_feature (193)..(193): n includes a, c, g, or t, or contains no nucleotide
  misc_feature (206)..(206): n includes a, c, g, or t, or contains no nucleotide
  misc_feature (212)..(212): n includes a, c, g, or t, or contains no nucleotide
  misc_feature (229)..(229): n includes a, c, g, or t, or contains no nucleotide
  misc_feature (233)..(233): n includes a, c, g, or t, or contains no nucleotide
  misc_feature (235)..(271): n includes a, c, g, or t, or contains no nucleotide
  misc_feature (309)..(310): n includes a, c, g, or t, or contains no nucleotide
  misc_feature (390)..(390): n includes a, c, g, or t, or contains no nucleotide
  misc_feature (394)..(394): n includes a, c, g, or t, or contains no nucleotide
  misc_feature (431)..(432): n includes a, c, g, or t, or contains no nucleotide
ctggtctcaatgacagtagagggacnctncnccnaaagatactggtattgctcgagtnccacttgctggagctnccnngggggcccaggnatcggcangggctnctggcagaggaatncccagctggggttcccatgccccaggctcctgcaggacttgctgggccagtccgtggggttggcgggccatcccnaacaggtgatganccccancaaggaagaggtactgnttgnannnnnnnnnnnnnnnnnnnnnnnnnnnnnnnnnnnnngggctccaacccagtacccacctggccgtgggggtccnncccccacctatgggccgaggagcaccccctccaggcatgatgggcccacctcctggtatgagacctcctatgggtccccnaatngggatcccccctggaagagggactccaatgggcatgnnccctccgggaatgcggcctcctccccctgggatgcgagggccccctcccccgggaatgcgcccaccaaggccctagactcatcttggccctcctcagctccctgcctgtttcccgtaaggctgtacatagtccttttatctccttgtggcctatgaaactggttta

SEQ ID NO: 37 - DNA, 404 bp, Homo sapiens
  misc_feature (54)..(55): n includes a, c, g, or t, or contains no nucleotide
  misc_feature (57)..(62): n includes a, c, g, or t, or contains no nucleotide
  misc_feature (64)..(65): n includes a, c, g, or t, or contains no nucleotide
  misc_feature (69)..(75): n includes a, c, g, or t, or contains no nucleotide
  misc_feature (89)..(89): n includes a, c, g, or t, or contains no nucleotide
  misc_feature (100)..(100): n includes a, c, g, or t, or contains no nucleotide
cagagtcctgaaattgtcagagaatttctcacagcattgaaaagccacaagttnncnnnnnntnngaannnnnnnctgctgaaccaccnggcctgtgacntgctgtggagatccagctgatggtggaagagagtgaagagcggctcacggaggagcagattgaagctcttctccacaccgtcaccagcattctgcctgcagagccagaggctgagcagaagaagaatacaaacagcaatgtggcaatggacgaagaggacccagcatagaagagcacagctggccccggcgtttcatgaagtcagaaggcctggcagccatttcctggacgttgagaggattgtttatttgatttttatcctcatcccagcaggcctggctttgtggttagttgggtacatcac

SEQ ID NO: 38 - DNA, 459 bp, Homo sapiens
cagcataccataggtgtatatataggtatataattttaaggttaaaatattcagtctacaagtttggttcttatttaagcttttgggctaatactgcatatggcacaatgtttaatattggcaagttcatctcagagaaaggggattcagatataattttaaagtagagataatttactgaagcgtctctgacaatctaacttattagacagcaagcaatatataatactgaaaaagtattcagaaatggaaaatttacatcatataggttatttaacttgtgttcagcctttttgtaacttttttgaaagtgcaaacaattctttggattattaaataaggtatacagtatgcatggtttctcaaatttagttttaaaatctaaaagtctataaagaatcagatgcataggcaatatgttaagttcacttggaggctaaaaatctccagtgaaaacaa

SEQ ID NO: 39 - DNA, 437 bp, Homo sapiens
  misc_feature (31)..(31): n includes a, c, g, or t, or contains no nucleotide
  misc_feature (172)..(186): n includes a, c, g, or t, or contains no nucleotide
  misc_feature (284)..(407): n includes a, c, g, or t, or contains no nucleotide
ccagaacacagacaagggcaacaaccccaangggctacctgccttcacactatgagagggtgcagatgctgctgtcggaccgtttccttggcttcttcatggtccctgcccagtcctcgtggaactacaacttcatgggtgttcggcatgaccccaacatgaaatatgagcnnnnnnnnnnnnnnnccaaagagttctaccacgaggtgcacaggccctctcacttcctcaactttgctctcctgcaggagggggaggtttactctgcggatcgggaggacctnnnnnnnnnnnnnnnnnnnnnnnnnnnnnnnnnnnnnnnnnnnnnnnnnnnnnnnnnnnnnnnnnnnnnnnnnnnnnnnnnnnnnnnnnnnnnnnnnnnnnnnnnnnnnnnnnnnnnnnnnnnngacctcctgatggcttgtcatcctgaataa

SEQ ID NO: 40 - DNA, 352 bp, Homo sapiens
  misc_feature (30)..(30): n includes a, c, g, or t, or contains no nucleotide
  misc_feature (273)..(287): n includes a, c, g, or t, or contains no nucleotide
tgatgccagaagtccggggagccttgtttnggtgcaaatgccaacaggaagtttttggactaagccttcaggaggtggagctcgtcgtcagctctcctgctgtgatgtggaagcttctgatatttgaagaaacacgaatgtctctgtagcttcctcttcactgccccagtattgctctgtatttatcagcgatgcccctctgtcactcatgccttgcctaattgttcacaatggtggaaagcttcatgtaatatgatcaggacccacctccannnnnnnnnnnnnnntgacagtgtccagccggttctgcagcactaggggagggggcagatggtggttgcatgggcttcct

SEQ ID NO: 41 - DNA, 537 bp, Homo sapiens
  misc_feature (27)..(27): n includes a, c, g, or t, or contains no nucleotide
  misc_feature (167)..(167): n includes a, c, g, or t, or contains no nucleotide
  misc_feature (211)..(262): n includes a, c, g, or t, or contains no nucleotide
  misc_feature (277)..(277): n includes a, c, g, or t, or contains no nucleotide
  misc_feature (308)..(403): n includes a, c, g, or t, or contains no nucleotide
cacttcccgtctcagaatctaaacgtnggtcaccttcgagtagagaggcccgcccgcccaccgtgggcagtgccacccgcagatgacacgcgctctccaccacccaacccaaaccatgagaatttgcaacaggggaggaaaaaagaaccaaaacttccaaggccctnctttttttcttaaaagtactttaaaaaggaaatttgtttgtatnnnnnnnnnnnnnnnnnnnnnnnnnnnnnnnnnnnnnnnnnnnnnnnnnnnnaatgatctcggatgnccaaaccagccttcggagcgttctctgtccnnnnnnnnnnnnnnnnnnnnnnnnnnnnnnnnnnnnnnnnnnnnnnnnnnnnnnnnnnnnnnnnnnnnnnnnnnnnnnnnnnnnnnnnnnnnnnnntcttattccgagcattccagtaacttttttgtgtatgtacttagctgtactataagtagttggtttgtatgagatggttaaaaaggccaaagataaaaggtttctttttttttccttttttgtctatgaagttg

SEQ ID NO: 42 - DNA, 350 bp, Homo sapiens
  misc_feature (209)..(232): n includes a, c, g, or t, or contains no nucleotide
  misc_feature (277)..(303): n includes a, c, g, or t, or contains no nucleotide
acagaccaaggagaactggagaaagaaagagaaaatcagttcgtggttgcattgtggatgcaaatctgagcgttctcaacttggttattgtaaaaaaaggagagaaggatattcctggactgactgatactacagtgcctcgccgcctgggccccaaaagagctagcagaatccgcaaacttttcaatctctctaaagaagatgatgtnnnnnnnnnnnnnnnnnnnnnnnncttaaataaagaaggtaagaaacctaggaccaaagcacccaagannnnnnnnnnnnnnnnnnnnnnnnnnntgcagcacaaacggcggcgtattgctctgaagaagcagcgtaccaag

SEQ ID NO: 43 - DNA, 130 bp, Homo sapiens
ttcaaatttgacaccccagtggacaaactaccacagctataaattgaggcagctaacgtcaaattcttgaatacaaaactttgcctgttgtacatagcctatacaaaatgctgggttgagcctttcatga

SEQ ID NO: 44 - DNA, 220 bp, Homo sapiens
ttctgcatactgtgttatgttacagtccagttttgtgtgctttactacacagtttggttacaggacttctgtgcattgtaaacataaacagcatggaaaaggttaaatacctgtgttcagattgtaagatctagtccggacttgctgtgtatattgtaacgttaaatgaaaaaagaacccccctttgtattatagtcatgcggtcttatgtatgataaac

SEQ ID NO: 45 - DNA, 519 bp, Homo sapiens
  misc_feature (92)..(98): n includes a, c, g, or t, or contains no nucleotide
  misc_feature (100)..(101): n includes a, c, g, or t, or contains no nucleotide
  misc_feature (103)..(112): n includes a, c, g, or t, or contains no nucleotide
  misc_feature (114)..(114): n includes a, c, g, or t, or contains no nucleotide
  misc_feature (187)..(276): n includes a, c, g, or t, or contains no nucleotide
  misc_feature (285)..(285): n includes a, c, g, or t, or contains no nucleotide
  misc_feature (366)..(366): n includes a, c, g, or t, or contains no nucleotide
  misc_feature (369)..(369): n includes a, c, g, or t, or contains no nucleotide
  misc_feature (388)..(390): n includes a, c, g, or t, or contains no nucleotide
  misc_feature (393)..(393): n includes a, c, g, or t, or contains no nucleotide
  misc_feature (397)..(398): n includes a, c, g, or t, or contains no nucleotide
gtccttgaacaagatgtgggccttgcaagatgggagagtaaaccttgaagggctttattaaagaaataaaaaagaacttttgtatcttttannnnnnnannannnnnnnnnncnagctgtgttattcctggtttaattcagcagagaaggtaaggtgtgaacctacctgccttggagagggcccagnnnnnnnnnnnnnnnnnnnnnnnnnnnnnnnnnnnnnnnnnnnnnnnnnnnnnnnnnnnnnnnnnnnnnnnnnnnnnnnnnnnnnnnnnntggattacnttttttttttttttttttttactctttgaaagctttgttttgtggtagtccttttgggaagaatccagtattatctacaantantggcaaagtttaaatgtannntanatannggaaagtttttagaatgttgaaaagtaattgaaaaaggtgataggtaaatttttaggcaaagataatttatttcaataaatctttcaaaagccttaccttgaaatgctgttagtaaatttc

SEQ ID NO: 46 - DNA, 542 bp, Homo sapiens
  misc_feature (26)..(51): n includes a, c, g, or t, or contains no nucleotide
  misc_feature (57)..(59): n includes a, c, g, or t, or contains no nucleotide
  misc_feature (62)..(92): n includes a, c, g, or t, or contains no nucleotide
  misc_feature (424)..(424): n includes a, c, g, or t, or contains no nucleotide
  misc_feature (426)..(426): n includes a, c, g, or t, or contains no nucleotide
  misc_feature (428)..(431): n includes a, c, g, or t, or contains no nucleotide
  misc_feature (433)..(437): n includes a, c, g, or t, or contains no nucleotide
  misc_feature (439)..(439): n includes a, c, g, or t, or contains no nucleotide
  misc_feature (441)..(441): n includes a, c, g, or t, or contains no nucleotide
  misc_feature (443)..(443): n includes a, c, g, or t, or contains no nucleotide
  misc_feature (446)..(446): n includes a, c, g, or t, or contains no nucleotide
  misc_feature (449)..(449): n includes a, c, g, or t, or contains no nucleotide
  misc_feature (452)..(452): n includes a, c, g, or t, or contains no nucleotide
  misc_feature (454)..(454): n includes a, c, g, or t, or contains no nucleotide
  misc_feature (456)..(456): n includes a, c, g, or t, or contains no nucleotide
  misc_feature (459)..(462): n includes a, c, g, or t, or contains no nucleotide
ttagtgccctctttagccagaatctnnnnnnnnnnnnnnnnnnnnnnnnnnatttannntannnnnnnnnnnnnnnnnnnnnnnnnnnnnnnagaatatagcatctttcatatggtaggaaccaacaaggaaactttcctttaactccctttttacactttatggtaagtagcagggggggaaatgcatttatagatcatttctaggcaaaattgtgaagctaatgaccaacctgtttctacctatatgcagtctctttattttactagaaatgggaatcatggcctcttgaagagaaaaaagtcaccattctgcatttagctgtattcatatattgcatttctgtattttttgtttgtattgtaaaaaattcacataataaacgatgttgtgatgtaaaaaaaaaaaaaaaaaaaaaaaaaananannnnannnnnananangantanagntnangtnnnngaagaaacttttcagcttaagtttgcctcctctacaatgacatcttttatatgcttgtctcatttagaatgcatatgtgc

SEQ ID NO: 47 - DNA, 481 bp, Homo sapiens
  misc_feature (26)..(112): n includes a, c, g, or t, or contains no nucleotide
  misc_feature (152)..(171): n includes a, c, g, or t, or contains no nucleotide
gtatcaccactaaaatctccaggggnnnnnnnnnnnnnnnnnnnnnnnnnnnnnnnnnnnnnnnnnnnnnnnnnnnnnnnnnnnnnnnnnnnnnnnnnnnnnnnnnnnnnnncatctcccccttctcctttgggctggtcatccagcaggtnnnnnnnnnnnnnnnnnnnnacaaccctgaagtgcttgatatcacagaggaaactctgcattctcgcttcctggagggtgtccgcaatgttgccagtgtctgtctgcagattggctacccaactgttgcatcagtaccccattctatcatcaacgggtacaaacgagtcctggccttgtctgtggagacggattacaccttcccacttgctgaaaaggtcaaggccttcttggctgatccatctgcctttgtggctgctgcccctgtggctgctgccaccacagctgctcctgctgctgctgcagccccagctaaggttgaagccaagga

SEQ ID NO: 48 - DNA, 475 bp, Homo sapiens
  misc_feature (54)..(54): n includes a, c, g, or t, or contains no nucleotide
  misc_feature (57)..(59): n includes a, c, g, or t, or contains no nucleotide
  misc_feature (62)..(66): n includes a, c, g, or t, or contains no nucleotide
  misc_feature (69)..(72): n includes a, c, g, or t, or contains no nucleotide
  misc_feature (74)..(74): n includes a, c, g, or t, or contains no nucleotide
  misc_feature (77)..(82): n includes a, c, g, or t, or contains no nucleotide
  misc_feature (84)..(86): n includes a, c, g, or t, or contains no nucleotide
  misc_feature (88)..(88): n includes a, c, g, or t, or contains no nucleotide
  misc_feature (91)..(150): n includes a, c, g, or t, or contains no nucleotide
  misc_feature (263)..(278): n includes a, c, g, or t, or contains no nucleotide
  misc_feature (422)..(438): n includes a, c, g, or t, or contains no nucleotide
cagcccaggatagaagaaggtggtatccttataattactccagactctcctatnccnnnccnnnnnggnnnngnacnnnnnnannnanacnnnnnnnnnnnnnnnnnnnnnnnnnnnnnnnnnnnnnnnnnnnnnnnnnnnnnnnnnnnntttaattagttcaggtctaatcaggtttctttattgttcccttatgtattcaagcttaaggaaaaattgcattgctgtttacctctttgctgataaatttgcagtaattacannnnnnnnnnnnnnnnaatctgttattccagtcttaaatttttctaaaagaagacaatattttagaactgaagcattgagaacttcccttgcaaattatttttaaaattctatcttgtttttctatgtatttctttctgactagacttgtgatatgcgtnnnnnnnnnnnnnnnnntttttagtgtttttgttatgttctgttattgacccaa

SEQ ID NO: 49 - DNA, 460 bp, Homo sapiens
  misc_feature (26)..(40): n includes a, c, g, or t, or contains no nucleotide
  misc_feature (51)..(51): n includes a, c, g, or t, or contains no nucleotide
gcaactgtggcattgcttccttaacnnnnnnnnnnnnnnngaatgttatanaattgtcactcagatatattttttaaatgtaatgttatataagatgatcatgtgatgtgtacaaactatggtgaaaagtgccagtggtagtaactgtgtaaagtttctaattcacaacattaattcctttaaaatacacagccttctgcctctgtatttggagttgtcagtacaactcatcaaagaaaactgcctaatataaaaatcatatatatggtaataatttccctcttttgtagtctgcacaagatccataaaagattgtatttttattactatttaaacaagtgattaaatttagtctgcacagtgagcaagggttcacatgcattcttttatactgctggattttgttgtgcatcatttaaaacattttgtatgtttcttcttatctgtgtatacagtatgt

SEQ ID NO: 50 - DNA, 368 bp, Homo sapiens
  misc_feature (63)..(78): n includes a, c, g, or t, or contains no nucleotide
  misc_feature (323)..(325): n includes a, c, g, or t, or contains no nucleotide
  misc_feature (327)..(329): n includes a, c, g, or t, or contains no nucleotide
  misc_feature (331)..(337): n includes a, c, g, or t, or contains no nucleotide
  misc_feature (339)..(339): n includes a, c, g, or t, or contains no nucleotide
  misc_feature (342)..(343): n includes a, c, g, or t, or contains no nucleotide
acatgtacaatttgccactgggaggaggttcctttttgttgggtgagtctgcaagtgaatttnnnnnnnnnnnnnnnncattgtgtgtagttttatttcggtcccagccccgtttccttttattttggagctaatgccagctgcgtgtctagttttgagtgcagtaaaatagaatcagcaaatcactcttatttttcatccttttccggtattttttgggttgtttctgtgggagcagtgtacaccaactcttcctgtatattgcctttttgctggaaaatgttgtatgttgaataaaattttctataaaaattataaaaaannnannnannnnnnngnggnngaagatttctactctccctggaaac

SEQ ID NO: 51 - DNA, 381 bp, Homo sapiens
  misc_feature (326)..(355): n includes a, c, g, or t, or contains no nucleotide
ggtcaagtctactcttccgttcattcaattattttaagcatttgaattatttattgtatatcctaaatatatttctcctttggcagtgactagatttccactaatgtgtcttaatctatccctccagctggcagttactgtttttttaatcccctgaagttgtcctgtaggagacagaaattctttgctgtctgtatcccttggagtaagaaggtagtggcatgggtggagtgtgtgttctttctccaaatctattatgatgtttattaaacacttctgtagcaaagatggtggtagttcttttgttactgaagttgcccttcacnnnnnnnnnnnnnnnnnnnnnnnnnnnnnnacgtttctgtaaatcttgagataaac

SEQ ID NO: 52 - DNA, 379 bp, Homo sapiens
  misc_feature (35)..(35): n includes a, c, g, or t, or contains no nucleotide
  misc_feature (38)..(38): n includes a, c, g, or t, or contains no nucleotide
  misc_feature (44)..(44): n includes a, c, g, or t, or contains no nucleotide
  misc_feature (46)..(46): n includes a, c, g, or t, or contains no nucleotide
  misc_feature (49)..(49): n includes a, c, g, or t, or contains no nucleotide
  misc_feature (52)..(52): n includes a, c, g, or t, or contains no nucleotide
  misc_feature (54)..(54): n includes a, c, g, or t, or contains no nucleotide
  misc_feature (70)..(71): n includes a, c, g, or t, or contains no nucleotide
  misc_feature (271)..(271): n includes a, c, g, or t, or contains no nucleotide
aacagaccagatagcatcagaaatcatgtgactgntangattancngantangncttaactttttagggnnaaagttaacactgaaagttctagcttaagtgttgaaacttttgtgggaaaaaaaaatcacttttgaaactcagacttcagtgtatacccaataatttaaaattatgtgaaatgttttaaatttgtgaactcgtaattactgttttaatgattcagtttcttcagagtggtaattgtataaaattgctattgcagctttanattcaatatgatgtgcctgtaaaccaaggagttttccccgtttgtaaaaagacattgtagataattgaatgtttgattttagaaaggtcattagtttcttgttacaca

SEQ ID NO: 53 - DNA, 502 bp, Homo sapiens
aagtcacaaatcttcaaaaggtggtagtagtagagatacaaaaggatcaaaggataagaattcccggtccgacagaaagaggtctatatcagagagtagtcgatcaggcaaaagatcttcaagaagtgaaagagaccgaaaatcagacaggaaagacaaaaggcgttaatggaagaagccaggctttcttagccattctttgcagcagaagatttcttgatgaaaaaggattacctttccttgtaaagaggatgctgccttaagaattgcatgttgtaaaaaatctttttggaagatacagactgtttgtttaccagacattcttgtactttttgcataattttgtaagagttatttatcaaaattatgtgaggttccaaaatatgtaaaaatgataataataaaaaaagattaacatcccttgtcatcttttttaaatatcctatactcttcagtaagaatctgtatattttaataggcaaatctttaagtctgttccctt

SEQ ID NO: 54 - DNA, 508 bp, Homo sapiens
  misc_feature (268)..(268): n includes a, c, g, or t, or contains no nucleotide
cactcagctcaactgctgtgtttaaaatacacattttaaatccctctttacagacactaacataaaagtacatctttctgggttgtaaacatgtggtagtaccagagtattgtatagtcaatgttaaataaaagccaaaactggaatgtgcagaaagtaggctttggttaatttgtggattcatttttatttttgtctttgtttaactttttaaaaaataagatttctggagtagattggtatattctgttaaagacttacagtgatnccattttgcttacactgttgcatcacaagggactcacccagggaccatgacctgctggtgtgtgtgtatatttacaaaaacaaaacaaacaaaccacccattgggatataaggtagcaatcacaaactaaagactgcggcttgttgaggtgcaataccctgactcccaaagttagttacagtgggttttattgtttttgtgactgaaggatttattcagactgctgtactcttcatttga

SEQ ID NO: 55 - DNA, 586 bp, Homo sapiens
  misc_feature (58)..(76): n includes a, c, g, or t, or contains no nucleotide
  misc_feature (297)..(362): n includes a, c, g, or t, or contains no nucleotide
  misc_feature (481)..(481): n includes a, c, g, or t, or contains no nucleotide
  misc_feature (528)..(533): n includes a, c, g, or t, or contains no nucleotide
  misc_feature (539)..(545): n includes a, c, g, or t, or contains no nucleotide
  misc_feature (547)..(549): n includes a, c, g, or t, or contains no nucleotide
  misc_feature (551)..(554): n includes a, c, g, or t, or contains no nucleotide
accgttctaagactgctttgtatgtgactcccctggatcgagtcactgagtttggagnnnnnnnnnnnnnnnnnnnaggaaaactcttctgcacttcttgcaatgtggttctgaatcatgttcgcaagtctgccattagtgaccacctcaagtcaaagactcataccaagaggaaggcagaatttgaagagcagaatgtgagaaagaagcagaggcccctaactgcatctcttcagtgcaacagtactgcgcaaacagagaaagtcagtgttatccaggactttgtgaaaatgtgcnnnnnnnnnnnnnnnnnnnnnnnnnnnnnnnnnnnnnnnnnnnnnnnnnnnnnnnnnnnnnnnnnngtgaagaatggaggctccatacctaagtcagaccagctacggagggcatatcttcctgatggatatgagaatgagaatcaactcctcaactcacaagattgttgactaggaggttaccnccattgtgatcaagataaatgtggagtattaaagttatgtgttgatnnnnnngttcannnnnnnannnannnnatttaaaatcatgtgacgcagaatagttttgc

SEQ ID NO: 56 - DNA, 84 bp, Homo sapiens
cacacatgcaaggtgaaagggtgtggattttaagacattagactacaagagctgtttttggttgtcacctttatgctcctccat

SEQ ID NO: 57 - DNA, 392 bp, Homo sapiens
  misc_feature (61)..(61): n includes a, c, g, or t, or contains no nucleotide
  misc_feature (68)..(68): n includes a, c, g, or t, or contains no nucleotide
  misc_feature (102)..(116): n includes a, c, g, or t, or contains no nucleotide
  misc_feature (146)..(146): n includes a, c, g, or t, or contains no nucleotide
  misc_feature (157)..(159): n includes a, c, g, or t, or contains no nucleotide
  misc_feature (320)..(339): n includes a, c, g, or t, or contains no nucleotide
cagccgggagactgggctctgacctaggcttcttgtcacactgaacacatccagccacagncaccagntggttgggaccagcagcccccagcatcctcttgnnnnnnnnnnnnnnnaaagaaacctgctgtataccccccaaagtntccctttcccnnntacctctggggtctcttgctgcttgcctctgctgctctggactgggagagcttctgtcctgtgctgcatgggtatttagactgtgggggagatgccccttcttatagcactggaggaggaaaacaaattcttgtccccctcagaatgagagtggctctttnnnnnnnnnnnnnnnnnnnnggtcagggcaaaggcatggcccaggtgtttaagtacagggtgacgtgtgccta

SEQ ID NO: 58 - DNA, 304 bp, Homo sapiens
tggccttaatatactacttaattacttaagatgtttattaatagaatgataaatgtacagagtaacctataagcatgacatacttttgctttcagtagtttcatgtaaagaaaaaaacttgaaaatagtaatacctgagtacccatgggaataatagacactggggaggtagggtggggagcgggacgaagagctgaaaaacttacctactggggactgtgctcactacctgggtgacaggatcatacgtaccccaaacctcaacatcacacagtatactcagctaacaaacctgcccatgtgt

SEQ ID NO: 59 - DNA, 431 bp, Homo sapiens
cccagccaaagacagccttagctttgaggacttcctggatctcctcagtgtgttcagtgacacagccacgccagacatcaagtcccattatgccttccgcatctttgactttgatgatgacggaaccttgaacagagaagacctgagccggctggtgaactgcctcacgggagagggcgaggacacacggcttagtgcgtctgagatgaagcagctcatcgacaacatcctggaggagtctgacattgacagggatggaaccatcaacctctctgagttccagcacgtcatctcccgttctccagactttgccagctcctttaagattgtcctgtgacagcagccccagcgtgtgtcctggcaccctgtccaagaacctttctactgctgagctgtggccaaggtcaagcctgtgttgccagtgcgggcca

SEQ ID NO: 60 - DNA, 453 bp, Homo sapiens
  misc_feature (71)..(71): n includes a, c, g, or t, or contains no nucleotide
  misc_feature (235)..(235): n includes a, c, g, or t, or contains no nucleotide
  misc_feature (237)..(275): n includes a, c, g, or t, or contains no nucleotide
  misc_feature (374)..(374): n includes a, c, g, or t, or contains no nucleotide
cttaagtcttcattgatattctgtgtgaaataagcatgtcttgtacttgctttctgattcataattttatnaaagaacttagtagaaagaaaagtaagtataaaaatagatattggattctgtcagaaggcctagatttgaaataatgttttgtacttcggtaagatggaaaacttagtgattcactgatttcttagacactctaatatgatatgctttctggaaggataaaacnannnnnnnnnnnnnnnnnnnnnnnnnnnnnnnnnnnnnnntcaattccagacatcttcatgttcctaataggctaaatgaagttaaaaacttatttcagatttttctcatctgtaccttatatctcataaatttattgnatattttatgtcagtagcttagctgtttattgtctttaaaataacatgtaaacttcaatgttctatctggaagcagaat

SEQ ID NO: 61 - DNA, 504 bp, Homo sapiens
  misc_feature (129)..(163): n includes a, c, g, or t, or contains no nucleotide
  misc_feature (191)..(212): n includes a, c, g, or t, or contains no nucleotide
  misc_feature (351)..(417): n includes a, c, g, or t, or contains no nucleotide
ctagctgttgatgtcagtgcttctatgaaccaaagagttttgggtagtatactcaacgctagtacagttgctgcagcaatgtgcatggttgtcacacgaacagaaaaagattcttatgtagttgctttnnnnnnnnnnnnnnnnnnnnnnnnnnnnnnnnnnnatatgaccttacaacaggttttaatggnnnnnnnnnnnnnnnnnnnnnntggaactgattgctctcttccaatgatctgggctcagaagacaaacacacctgctgatgtcttcattgtattcactgataatgagacctttgctggaggtgtccatcctgctattgctctgagggagtatcgaaagaannnnnnnnnnnnnnnnnnnnnnnnnnnnnnnnnnnnnnnnnnnnnnnnnnnnnnnnnnnnnnnnnnngatgatagagccttgcaaaataccctactaaataaatcattttagacatggagtgcaggtggacactgtgtgaactgtttttggtca

SEQ ID NO: 62 - DNA, 471 bp, Homo sapiens
  misc_feature (30)..(31): n includes a, c, g, or t, or contains no nucleotide
  misc_feature (33)..(61): n includes a, c, g, or t, or contains no nucleotide
  misc_feature (64)..(66): n includes a, c, g, or t, or contains no nucleotide
  misc_feature (68)..(68): n includes a, c, g, or t, or contains no nucleotide
  misc_feature (74)..(74): n includes a, c, g, or t, or contains no nucleotide
  misc_feature (90)..(90): n includes a, c, g, or t, or contains no nucleotide
  misc_feature (305)..(319): n includes a, c, g, or t, or contains no nucleotide
  misc_feature (360)..(361): n includes a, c, g, or t, or contains no nucleotide
  misc_feature (363)..(363): n includes a, c, g, or t, or contains no nucleotide
tgctgaaagcattcagcaaatggcaccctnnannnnnnnnnnnnnnnnnnnnnnnnnnnnnaannngntcactngggcacagcacatgcngggaggggcttttctctgagcctccttcatctgcccaaagacaaatcctcaaaaggaaattcaatcatcatgaatcacaaccccaagtatctcatcagccagggaagagtaagtgggatcacagggaaggatgttggcagcgacaccatcccatacaggctcttacctcttctcctgagggctgctccagacaacatttattacccagaagaccnnnnnnnnnnnnnnnagccaagctttattcaggacacacttcttgccttcactttnncncttccgtggccacctccatgcagaagccctaagcccacattctttcgatagctcacggtggtgcatgagtgtccatcatctgactcttctcggagtctcatattttgt

SEQ ID NO: 63 - DNA, 465 bp, Homo sapiens
  misc_feature (33)..(33): n includes a, c, g, or t, or contains no nucleotide
  misc_feature (61)..(61): n includes a, c, g, or t, or contains no nucleotide
  misc_feature (74)..(74): n includes a, c, g, or t, or contains no nucleotide
tacctggaccacgtgtgggatgaaggctgtgcngtcgttcacctgccagagtccccaaagncctggccctacanggggccccgagggctgcacgtgggcagatgctgattggaccagacggccgcctgatcaggagccttgggcaggcctccgaagctgacccatctggggtagcgtccattgcctgttcctcatgcgtgcgagccgtggatgggaaggcggtctgcggtcagtgtgagcgagccctgtgcgggcagtgtgtgcgcacctgctggggctgcggctccgtggcctgtaccctgtgtggcctcgtggactgcagtgacatgtacgagaaagtgctgtgcaccagctgtgccatgttcgagacctgaggctggctcaagccggctgccttcaccgggagccacgccgtgcatggcagccttccctggacgagcgctcggtgttcacactgaactgtgg

SEQ ID NO: 64 - DNA, 550 bp, Homo sapiens
gtttcattgctgtacattggctgggataagcactatggctttcagctctatcagagtgaccctagtggaaattacgggggatggaaggccacatgcattggaaataatagcgctgcagctgtgtcaatgttgaaacaagactataaagaaggagaaatgaccttgaagtcagcacttgctttagctatcaaagtactaaataagaccatggatgttagtaaactctctgctgaaaaagtggaaattgcaacactaacaagagagaatggaaagacagtaatcagagttctcaaacaaaaagaagtggagcagttgatcaaaaaacatgaggaagaagaagccaaagctgagcgtgagaagaaagaaaaagaacagaaagaaaaggataaatagaatcagagattttattactcatttggggcaccatttcagtgtaaaagcagtcctactcttccacactaggaaggctttactttttttaactggtgcagtgggaaaataggacattacatactgaattgggtccttgtcatttctgtccaattgaata

SEQ ID NO: 65 - DNA, 452 bp, Homo sapiens
  misc_feature (215)..(215): n includes a, c, g, or t, or contains no nucleotide
  misc_feature (268)..(268): n includes a, c, g, or t, or contains no nucleotide
  misc_feature (288)..(288): n includes a, c, g, or t, or contains no nucleotide
  misc_feature (295)..(295): n includes a, c, g, or t, or contains no nucleotide
  misc_feature (326)..(326): n includes a, c, g, or t, or contains no nucleotide
  misc_feature (346)..(361): n includes a, c, g, or t, or contains no nucleotide
ctggataggcttctgtcagatttagaagaattgaattcttccatacaaaaactccatttggcagatgcacaagatgttccaaatacttctgctagctaaaatgaaatgtagtttgctttcttgtgatttgaagagaagcagcagtctttacttttccagccaaatccagtagcagaatcatcttccacaacaaggaattaaagtaattaaagtgncaagttcaatgatcgttttcacttactgcttttagtaaatgtgactcgctgtnaattcgccataactggaggncctaggnccttgttgaaggcttcatcaggaaatgtgangcagagattgtgctgctgtnnnnnnnnnnnnnnnnttatgggattatacttgaaatgcattgtgctgatgttcttgacagggcggagggatttctctttcctgagctcaccaaacttattccagtg

SEQ ID NO: 66 - DNA, 548 bp, Homo sapiens
  misc_feature (296)..(314): n includes a, c, g, or t, or contains no nucleotide
  misc_feature (426)..(478): n includes a, c, g, or t, or contains no nucleotide
aaattcatactggagagaaaccctacaaatgtgaggaatgtggcaaagcttttaaccaactctcaaaccttactagacataaggtaattcatactggagagaaaccctacaaatgtggagaatgtggcaaagcctttaaccagtcctcagcccttaatacacataagataatccatactggagagaatccccacaaatgtagagaatctggcaaagttttccacctatcctcaaaacttagtacatgtaagaaaattcatactggagagaaactctacaaatgtgaagaatgtggnnnnnnnnnnnnnnnnnnntcaacccttattggacataagagaattcatactggagagaaaccctacaaatgtgaagaatgtggcaaagcttttaaccaatcttcaacacttactacacataagataattnnnnnnnnnnnnnnnnnnnnnnnnnnnnnnnnnnnnnnnnnnnnnnnnnnnnnatcctcaaaactcattgaacacaagaaaattcatactggagagaaaccttacaagtgtgaagaatgtggc

SEQ ID NO: 67 - DNA, 492 bp, Homo sapiens
  misc_feature (115)..(115): n includes a, c, g, or t, or contains no nucleotide
  misc_feature (130)..(130): n includes a, c, g, or t, or contains no nucleotide
  misc_feature (137)..(163): n includes a, c, g, or t, or contains no nucleotide
  misc_feature (175)..(175): n includes a, c, g, or t, or contains no nucleotide
  misc_feature (187)..(187): n includes a, c, g, or t, or contains no nucleotide
  misc_feature (197)..(197): n includes a, c, g, or t, or contains no nucleotide
  misc_feature (205)..(205): n includes a, c, g, or t, or contains no nucleotide
  misc_feature (240)..(240): n includes a, c, g, or t, or contains no nucleotide
  misc_feature (247)..(247): n includes a, c, g, or t, or contains no nucleotide
  misc_feature (250)..(251): n includes a, c, g, or t, or contains no nucleotide
  misc_feature (256)..(256): n includes a, c, g, or t, or contains no nucleotide
  misc_feature (263)..(263): n includes a, c, g, or t, or contains no nucleotide
  misc_feature (297)..(297): n includes a, c, g, or t, or contains no nucleotide
  misc_feature (317)..(317): n includes a, c, g, or t, or contains no nucleotide
  misc_feature (362)..(362): n includes a, c, g, or t, or contains no nucleotide
caaactgggtcttcggcaggttacaggagttactagagtcactatccggaaatctaagaatatcctctttgtcatcacaaaaccagatgtctacaagagccctgcttcagatacnttacatagtttttgngggaagnnnnnnnnnnnnnnnnnnnnnnnnnnnagcaagcacaanctagcagctgcntgagaaattncaaagttncaaggtgaagctgtctcaaacattcaagaaaacancacaganctnnccaanctgtacnaagaggagagtgaagaggaagaggtcgatgaaancaggtgtagaagttaaggancatagaattggtcatgtcacaagcaaatgtgtcgagagcaaaggncagtccgagccctgaagaacaacagtaatgatattgtaaatgcgattatggaattaacaatgtaaccatatggaagcaactttttttggtgtctcaaaggagtaactgcagcttggtttgaaatttgtac

SEQ ID NO: 68 - DNA, 540 bp, Homo sapiens
  misc_feature (105)..(105): n includes a, c, g, or t, or contains no nucleotide
  misc_feature (257)..(257): n includes a, c, g, or t, or contains no nucleotide
  misc_feature (262)..(262): n includes a, c, g, or t, or contains no nucleotide
  misc_feature (398)..(416): n includes a, c, g, or t, or contains no nucleotide
ttgacatctattccacccgagagccccagctagccttccaccagcgcatctccttctgcctagatatccacaacatgtctgtcaaggccatgaggtttcctcccnaaatcgtacaacaaggacttggagtctgcagaggaacggcgtgagcgagaacagcaggacttggagtttgccaaggagatggcagaagatgatgatgacagcttcccttgagctggggggctggggaggggtagggggaatggggacaggcnctttncccccttgggggtcccctgcccagggcactgtccccattttcccacacacagctcatatgctgcattcgtgcagggggtgggggtgctgggagccagccaccctgacctcccccagggctcctccccagccggtgnnnnnnnnnnnnnnnnnnnggagggtgggcaggcaacctccccgggcagggtcctggccagcagtgtgggagcaggaggggaaggatagttctgtgtactcctttagggagtgggggactagaactgggatgtcttggcttgt

SEQ ID NO: 69 - DNA, 528 bp, Homo sapiens
  misc_feature (55)..(55): n includes a, c, g, or t, or contains no nucleotide
  misc_feature (196)..(196): n includes a, c, g, or t, or contains no nucleotide
  misc_feature (200)..(200): n includes a, c, g, or t, or contains no nucleotide
  misc_feature (204)..(205): n includes a, c, g, or t, or contains no nucleotide
  misc_feature (208)..(208): n includes a, c, g, or t, or contains no nucleotide
  misc_feature (215)..(215): n includes a, c, g, or t, or contains no nucleotide
  misc_feature (458)..(473): n includes a, c, g, or t, or contains no nucleotide
atggcctcgttactagacttttctttttaaggaagtgctgtttttttttgagggnttttcaaaacattttgaaaagcatttacttttttgaccacgagccatgagttttcaaaaaaatcgggggttgtgtgggtttttggtttttgttttagtttttggttgcgttgcctttttttttttagtggggttggccccnatgnaagnnggntgccccnactcacttctctgagatcgaacggactgtgaatccgctctttgtcggaagctgagcaagctgtggcttttttccaactccgtgtgacgtttctgagtgtagtgtggtaggaccccggcgggtgtggcagcaactgccctggagccccagcccctgcgtccatctgtgctgtgcgccccacagtagacgtgcagacgtccctgagaggttcttgaagatgtttatttatattgtccttttttannnnnnnnnnnnnnnntactccatcgatgttgtatttgcagtggctgaggaattcttgtacgcagttttct

SEQ ID NO: 70 - DNA, 559 bp, Homo sapiens
  misc_feature (454)..(474): n includes a, c, g, or t, or contains no nucleotide
tgcattttagtaagcctttgcagtaaaatgacggttgtaactactaaaccaaatttagttttcacagcatggttttgttgttttccccttgtttttcagaggtaaattttgcattatatccttcagtattttaacactattttggcagtttacacattactttttgtttttccttcctttttgtgaaatgtattaagttgtggttcttattgaaacagtattatataatgtttgcttaattatatcatgtgatgctcagttctattttgatttattcattagtattcacttttacctttaaagtttacttgtagcaaatatgtttacattgataaagccagatatgttttgacaatgaaatttacatatcaagtactgcaaataaaaggtggtgctatgatatatgcttaggaggacagttttaatgattgtacttgcatgaacacaatcatannnnnnnnnnnnnnnnnnnnnagaaaaaattgtttatgtgttatattcaattagcttaaataagttgctttgttatattttatttgaattgaactacgctaggcct

SEQ ID NO: 71 - DNA, 506 bp, Homo sapiens
  misc_feature (148)..(148): n includes a, c, g, or t, or contains no nucleotide
  misc_feature (389)..(389): n includes a, c, g, or t, or contains no nucleotide
  misc_feature (410)..(424): n includes a, c, g, or t, or contains no nucleotide
cgtggctcttgtctgtgttagctgtcacggtgtgcacactaatctctgttaaagttgtctatggctgttctacttgtaagatagttttctatttccttcagtaatgtgtccacagtaccctgtatttcgagttccattatactgaagntactcatgttttaatagtgcctctccaaaggcctcaccttggacagaggtcaatccttgatgctccagcacaggtgacgtcactaattgtcactttccagtttgtttttctctattaaggaagacattttctaattgcatctccatgggctgtgagactgtgtgaagccgtttgtgtggtctccatgtaggtgctgtgttcccggcaccgccttgctctgaacactggtaattccaggtgntgcgcttggcagaggggtctnnnnnnnnnnnnnnngtgtgcatgtgtgaacgtgtgtgtcctttgcatggttgggcgtgggtgccttgctagggcatcagcaggacattgtgtgtat

SEQ ID NO: 72 - DNA, 546 bp, Homo sapiens
  misc_feature (44)..(46): n includes a, c, g, or t, or contains no nucleotide
  misc_feature (111)..(111): n includes a, c, g, or t, or contains no nucleotide
  misc_feature (178)..(178): n includes a, c, g, or t, or contains no nucleotide
  misc_feature (205)..(205): n includes a, c, g, or t, or contains no nucleotide
  misc_feature (213)..(213): n includes a, c, g, or t, or contains no nucleotide
  misc_feature (217)..(217): n includes a, c, g, or t, or contains no nucleotide
  misc_feature (227)..(227): n includes a, c, g, or t, or contains no nucleotide
  misc_feature (239)..(240): n includes a, c, g, or t, or contains no nucleotide
  misc_feature (287)..(287): n includes a, c, g, or t, or contains no nucleotide
  misc_feature (298)..(299): n includes a, c, g, or t, or contains no nucleotide
  misc_feature (309)..(309): n includes a, c, g, or t, or contains no nucleotide
  misc_feature (344)..(372): n includes a, c, g, or t, or contains no nucleotide
  misc_feature (430)..(457): n includes a, c, g, or t, or contains no nucleotide
tcgctcccagcttatatggatcggcgtgaccaccccttgccggnnngtggcccatgtcaagcacctgtctgccagccagaaggcactgaaggagaaggagaaggcctcctnggagcagcctctccatggatgagaaagtcgagttgtatcgcattaagttcaaggagagctttgctgnagatgaacaggggctcgaacgagtggnaagacggnttgntgggcggtgnccatgttcttcnnatcggtttcaccgcgctcgttatcatgtggcagaagcactatgtgtnacggccccctnncccgcaaagnctttgacaaagagtgggtggccaagcagaccaagnnnnnnnnnnnnnnnnnnnnnnnnnnnnncatccagggcttagcctccaagtgggactacgaaaagaacgagtggaagaagtgagannnnnnnnnnnnnnnnnnnnnnnnnnnnctggctctgtcaccgccatgcaactccatgcctatttactggaaacctgttatgccaaacagttgtaccactgctaataaatgaccagt

SEQ ID NO: 73 - DNA, 496 bp, Homo sapiens
  misc_feature (129)..(148): n includes a, c, g, or t, or contains no nucleotide
  misc_feature (156)..(182): n includes a, c, g, or t, or contains no nucleotide
  misc_feature (206)..(233): n includes a, c, g, or t, or contains no nucleotide
  misc_feature (263)..(263): n includes a, c, g, or t, or contains no nucleotide
  misc_feature (269)..(281): n includes a, c, g, or t, or contains no nucleotide
  misc_feature (298)..(299): n includes a, c, g, or t, or contains no nucleotide
tcaaagtatccctggcacgacacacttggctgacttatgttctgtgcgcattctggcaggaattctgtctcttcagagactcatcctcaaaacaagacttgacactgtgtccttgccccagtcctaggnnnnnnnnnnnnnnnnnnnnttcatttnnnnnnnnnnnnnnnnnnnnnnnnnnngtacttatgtttataagagagcannnnnnnnnnnnnnnnnnnnnnnnnnnncagagttagtaaacctctgtactacaaaanaaaaannnnnnnnnnnnnaaaaaaaaaaaaaaaanntttcggccgcaaatctttttttttttttttttttctctgcaatgctcagccattttacttgagacataaaaaaagttttaagagtagttgttttgctttttcgatttaaacattcatgagaacggatgggacggtagtgctgtggtgtggacttgtgtctgagtggccatgccggtcgggtccttcagaccacatac

SEQ ID NO: 74 - DNA, 457 bp, Homo sapiens
  misc_feature (26)..(26): n includes a, c, g, or t, or contains no nucleotide
  misc_feature (196)..(211): n includes a, c, g, or t, or contains no nucleotide
  misc_feature (258)..(258): n includes a, c, g, or t, or contains no nucleotide
  misc_feature (281)..(288): n includes a, c, g, or t, or contains no nucleotide
  misc_feature (292)..(295): n includes a, c, g, or t, or contains no nucleotide
tggacctagcctggaatttagatgtntagctattttttaatcttgttggtaaatgctcagaggtctgtgctacctctgtgaggtatatactaaaatgaatgtaaaataaggatcgtattccctgctttaaggaactggtagtcttgtttgggtgatgagacaaagttcttgagacatttaaactgtatttaccagnnnnnnnnnnnnnnnntatggagattaattcattatggaaataaaacattgcctaagcccttnaaaaaaaaaaaaaaaaaaaaaannnnnnnnaaannnnatcttgaaattcttatgcttcaggaaaggttttctcaccagtaggggtgaggctggctttcctattcatgttcttccatttctatgccttttggatacgcaagtcacgtctccctaggtcttctgcagcccccaggagagagacttgaatctccatgcagcc

SEQ ID NO: 75 - DNA, 466 bp, Homo sapiens
  misc_feature (153)..(153): n includes a, c, g, or t, or contains no nucleotide
  misc_feature (210)..(210): n includes a, c, g, or t, or contains no nucleotide
  misc_feature (241)..(285): n includes a, c, g, or t, or contains no nucleotide
  misc_feature (294)..(296): n includes a, c, g, or t, or contains no nucleotide
  misc_feature (298)..(299): n includes a, c, g, or t, or contains no nucleotide
  misc_feature (301)..(302): n includes a, c, g, or t, or contains no nucleotide
  misc_feature (305)..(307): n includes a, c, g, or t, or contains no nucleotide
  misc_feature (343)..(343): n includes a, c, g, or t, or contains no nucleotide
accttccagaagtgggcagctgtggtggtgccttctggagaggagcagagatacacgtgccatgtgcagcatgaggggctgccggagcccctcatgctgagatggaagcagtcttccctgcccaccatccccatcatgggtatcgttgctggnctggttgtccttgcagctgtagtcactggagctgcggtcgctgctgtgctgtggagnaagaagagctcagattgaaaaggagggagcnnnnnnnnnnnnnnnnnnnnnnnnnnnnnnnnnnnnnnnnnnnnngtggcaagnnntnntnntgnnntccctttgtgacttcaagaaccctgacttctctttntgcagagaccagcccacccctgtgcccaccatgaccctcttcctcatgctgaactgcattccttccccaatcacctttcctgttccagaaaaggggctgggatgtctccgtctctgtctcaaa

SEQ ID NO: 76 - DNA, 120 bp, Homo sapiens
atcagctccaagagttctggtgattcctttcgcaacattttcagcttctctttcactgaaactttagccaaatccttcacgacccgtgtctcagcctcatctacctgaggcactggtttt

SEQ ID NO: 77 - DNA, 522 bp, Homo sapiens
  misc_feature (35)..(35): n includes a, c, g, or t, or contains no nucleotide
  misc_feature (37)..(40): n includes a, c, g, or t, or contains no nucleotide
  misc_feature (44)..(49): n includes a, c, g, or t, or contains no nucleotide
  misc_feature (53)..(54): n includes a, c, g, or t, or contains no nucleotide
  misc_feature (59)..(123): n includes a, c, g, or t, or contains no nucleotide
  misc_feature (125)..(132): n includes a, c, g, or t, or contains no nucleotide
  misc_feature (139)..(139): n includes a, c, g, or t, or contains no nucleotide
  misc_feature (141)..(141): n includes a, c, g, or t, or contains no nucleotide
  misc_feature (143)..(147): n includes a, c, g, or t, or contains no nucleotide
  misc_feature (151)..(151): n includes a, c, g, or t, or contains no nucleotide
  misc_feature (153)..(196): n includes a, c, g, or t, or contains no nucleotide
  misc_feature (199)..(207): n includes a, c, g, or t, or contains no nucleotide
  misc_feature (216)..(216): n includes a, c, g, or t, or contains no nucleotide
  misc_feature (256)..(290): n includes a, c, g, or t, or contains no nucleotide
  misc_feature (336)..(336): n includes a, c, g, or t, or contains no nucleotide
gaaggctctcagaccttacacaccattttgtaagntnnnntttnnnnnncccnnttttnnnnnnnnnnnnnnnnnnnnnnnnnnnnnnnnnnnnnnnnnnnnnnnnnnnnnnnnnnnnnnnnnannnnnnnnttttttntntnnnnntttncnnnnnnnnnnnnnnnnnnnnnnnnnnnnnnnnnnnnnnnnnnnnggnnnnnnnnnaagggccangccggcaggccaaccctcctccaatggaaattcccgtgtnnnnnnnnnnnnnnnnnnnnnnnnnnnnnnnnnnnatggggtccacttccccctcttcagcatcccccgtaccccactttntgctgaaagaactgccagcaggtaggaccccagaggcccccaaatgaaagcttgaatttcccctactggctctgcgttttgctgagatctgtaggaaaggatgcttcacaaactgaggtagataatgctatgctgtcgttggtatacatcatgaatttttatgtaaattgctctgcaaagcaaatt

SEQ ID NO: 78 - DNA, 165 bp, Homo sapiens
  misc_feature (80)..(80): n includes a, c, g, or t, or contains no nucleotide
tgagtcaacttctgaagataaaacctgaagaagttactgggagctgctattttatattatgactgctttttaagaaattnttgtttatggatctgataaaatctagatctctaatatttttaagcccaagccccttggacactgcagctcttttcagtttttgct

SEQ ID NO: 79 - DNA, 111 bp, Homo sapiens
  misc_feature (64)..(64): n includes a, c, g, or t, or contains no nucleotide
gttatagtctactcagcttcactgttacatcctagatgagtattgtattcaaaaaatactgggncttaagtcttcataacaatcctgatttccacttagagtaagcataaa

SEQ ID NO: 80 - DNA, 251 bp, Homo sapiens
aatcatagtcaaagggcttcccttggttcgccactcatttatttgtaacttgacttctttttttttctgcttaaaaatttcaattctcgtggtaataccagagtagaaggagagggtgactttaccgaactgacagccattggggaggcagatgcgggtgtggaggtgtgggctgaaggtagtgactgtttgattttaaaaagtgtgactgtcagttgtatctgttgcttttctcaatgattcagggatac

SEQ ID NO: 81 - DNA, 341 bp, Homo sapiens
  misc_feature (147)..(147): n includes a, c, g, or t, or contains no nucleotide
  misc_feature (166)..(167): n includes a, c, g, or t, or contains no nucleotide
  misc_feature (188)..(188): n includes a, c, g, or t, or contains no nucleotide
  misc_feature (194)..(195): n includes a, c, g, or t, or contains no nucleotide
  misc_feature (234)..(235): n includes a, c, g, or t, or contains no nucleotide
  misc_feature (275)..(295): n includes a, c, g, or t, or contains no nucleotide
  misc_feature (312)..(312): n includes a, c, g, or t, or contains no nucleotide
tcccaggtgagaattcaggcaaacgtccacaaaggtcacaggcagcgtacatacggttctgttataccccatatattaccccttcatgtcctaaagaagacattttctcttagagattttcattttagtgtatctttaaaaaaaaantcttgtgttaacttgcctnnatctttttcttggggtgaggnacaccnnggaatgacccttttgtgtctatgatgttgctgttcacannttttcttgataggcctagtacaatcttgggaacagggttnnnnnnnnnnnnnnnnnnnnnagtagctcttagactcngcctatcttaggtagtcatgctgtgcatt

SEQ ID NO: 82 - DNA, 318 bp, Homo sapiens
  misc_feature (79)..(79): n includes a, c, g, or t, or contains no nucleotide
  misc_feature (206)..(206): n includes a, c, g, or t, or contains no nucleotide
acggtgacctgtgttctgagtgcctgcttggaaaagacctccctgtcatctgccatactacgggacaaatcagtatctnactcaaattcccacttccagaaggagaggactcatcaggggtttaggagtttgcaaagccttcaaaatgtatcgtgcttgaattttgactcttctgaaatagaataactgacaaatgctcaaaaaancaaacttgtttaacttttactgaaaaggctctcagtgaaaacttgttttgaactctactagtaaggtagaatattagtttttcttcccctccacaccagaaaaggcagtttt

SEQ ID NO: 83 - DNA, 369 bp, Homo sapiens
  misc_feature (205)..(265): n includes a, c, g, or t, or contains no nucleotide
tgagttattacctcatagagactataatattctatttggtattatattatttgatgtttgctgttcttcaaacatttaaatcaagctttggactaattatgctaatttgtgagttctgatcacttttgagctctgaagctttgaatcattcagtggtggagatggccttctggtaactgaatattaccttctgtaggaaaaggtnnnnnnnnnnnnnnnnnnnnnnnnnnnnnnnnnnnnnnnnnnnnnnnnnnnnnnnnnnnnncctctatatttctttcgttcataagaggtaaaggtcaaatttttcaacaaaagtcttttaataacaaaagcatgcagttctctgtgaaatctcaaatattgttg

SEQ ID NO: 84 - DNA, 329 bp, Homo sapiens
  misc_feature (147)..(148): n includes a, c, g, or t, or contains no nucleotide
  misc_feature (153)..(153): n includes a, c, g, or t, or contains no nucleotide
  misc_feature (155)..(163): n includes a, c, g, or t, or contains no nucleotide
  misc_feature (165)..(170): n includes a, c, g, or t, or contains no nucleotide
  misc_feature (242)..(258): n includes a, c, g, or t, or contains no nucleotide
  misc_feature (261)..(285): n includes a, c, g, or t, or contains no nucleotide
gggctggtttgcttttctaccacctttgtaattttatgtatcccatctcctttgtgtgaattcatatattatagcaaaatacaagagacatgggactgtttgcaataccatatggaaatcttttaataaatatatgtaaataaaatnnaaaanannnnnnnnnannnnnnccccaaaagcaacagcaagacatattttgttagatattttatttttaatgttttctataatttaaaaatgtnnnnnnnnnnnnnnnnngtnnnnnnnnnnnnnnnnnnnnnnnnnaaaaattttatcttaaaatactgaatgttctgaccttttataga

SEQ ID NO: 85 - DNA, 417 bp, Homo sapiens
  misc_feature (243)..(257): n includes a, c, g, or t, or contains no nucleotide
tcttgggcttaaattgactgaagactttagggggaaagaatagtaaatgcatgtaaacaaatggggacactctgttcaggagaataatccgactggcatttgtggcagtttttgaaatgtaaatgtattcatgtgtgttcttgtaaatacgtgtcgctcagatgtcctttgaagtgggagggaatcaatccggggataatttcaaatggaatagagtattttgatattgttcattcagagggnnnnnnnnnnnnnnntatattgtatatatgtgatgaaaatgcattggctttttgtgcagatacaacctgctctctgtactgctgttggacagtcagtgttttaatgtttctacagttttgctattgcacgatttcatattttgcctctatgatgaacggcaaccattatttgtaa

SEQ ID NO: 86 - DNA, 218 bp, Homo sapiens
acaaggctgctgctattagagcccatcctggagccccacctctgaaccacctcctaccagctgtccctcaggctgggggaaaacaggtgtttgatttgtcaccgttggagcttggatatgtgcgtggcatgtgtgtgtgtgtgtgagagtgtgaatgcacaggtgggtatttaatctgtattattccccgttcttggaattttcttccccatggggct

SEQ ID NO: 87 - DNA, 338 bp, Homo sapiens
  misc_feature (94)..(94): n includes a, c, g, or t, or contains no nucleotide
  misc_feature (195)..(195): n includes a, c, g, or t, or contains no nucleotide
cattacacagctttgcttctttggttacaaagtaggttgaacaatttcacagctttttattcccacccgaaaaaaaagtcatacgaaatgttgnaaagcagaggaatcgtggcaatttctcttagaaagtagaaacaaatgaacaaagttttcttcatcaaaatagcccaattatttatcatatcacaataactngtgactacctgtacagttgcactatgttcttcatacttacactatacaaaatttacattcaagctgggtctttactactgaaaataaataccataagtaaattgccattagtgttagaaatatgccaggattcttttgttcaa

SEQ ID NO: 88 - DNA, 586 bp, Homo sapiens
agggtccagcctcaagatcctctccaaaggaaagcgaggtggacattcatctgtttccactgagtctgagtcttcaagttttcactccagctaacacagatgtaagagacttttttttatacgataaataacttttttttaagttacacatttttcagatataaaagactgaccaatattgtacagtttttattgcttgttggatttttgctcttgtgtttctttagtttttcgtgaaggtttaattgacttatttatataaattttttttgtttcatattgatgtgtgtctaggcaggacctgtggccaagttcttagttgctgtatgtctcgtggtaggactgtagaaaagggaactgaacattccagagcgtgtagtgaatcacgtaaagctagaaatgatccccagctgtttatgcatagataatctctccattcccgtggaacgtttttcctgttcttaagacgtgattttgctgtagaagatggcacttataaccaaagcccaaagtggtatagaaatgctggtttttcagttttcaggagtgggttgatttcagcacctacagtgtacagtcttgtatt

SEQ ID NO: 89 - DNA, 509 bp, Homo sapiens
  misc_feature (180)..(180): n includes a, c, g, or t, or contains no nucleotide
  misc_feature (396)..(410): n includes a, c, g, or t, or contains no nucleotide
  misc_feature (460)..(484): n includes a, c, g, or t, or contains no nucleotide
acacgagcatgaaggcaagaagaggaggaaggaataggcacaggtctctccaaagtgaatgaactcttacccataaccctaatgatgcaagtcatatgggggaacactttgtaaatggtcaggataaaaaccaaatctgggtgccagatcccagcactactttttattactggagaaatngggggggatagaaaattctactttgaattatttagttttttttaaagagtgggttgtgtttgtgcttctcccacctttcagcatttatagaacatgctgccccacatacaaagtcaagaccacttacttttatgtgacactagtagtttggggttaatgttttgtgtaagaacagctgcatatgagtaaagttaccccaaccacagtgaggaggannnnnnnnnnnnnnnggaactgtcctgccaaataaattttgcccctattgtgctctgttttaatnnnnnnnnnnnnnnnnnnnnnnnnncttggtgcaactatttgtttcaaat

SEQ ID NO: 90 - DNA, 537 bp, Homo sapiens
  misc_feature (111)..(112): n includes a, c, g, or t, or contains no nucleotide
  misc_feature (114)..(114): n includes a, c, g, or t, or contains no nucleotide
  misc_feature (117)..(117): n includes a, c, g, or t, or contains no nucleotide
  misc_feature (191)..(289): n includes a, c, g, or t, or contains no nucleotide
  misc_feature (368)..(397): n includes a, c, g, or t, or contains no nucleotide
ggttctgttacatcctcttcgatagcctgtttaaaatgtttagaaggtctggagctcaaaaatgcgttcttccacattgataatttagtaaactgagaacattgacatcannanagngcagcataagaggttgcttacatgtggtagcagctctggtttgattcaagttgctaccatgtacattgacagcnnnnnnnnnnnnnnnnnnnnnnnnnnnnnnnnnnnnnnnnnnnnnnnnnnnnnnnnnnnnnnnnnnnnnnnnnnnnnnnnnnnnnnnnnnnnnnnnnnnactatagggttggtttatactgcaatatagaggatcagaagccatttgatttggtaggtgtgtcagaagggagaatgannnnnnnnnnnnnnnnnnnnnnnnnnnnnngatagccatgctaaaatgcaattatatcctcatgtttatcccaaactaatcttggacttttccactcattagctttgttttgcccttgtttcccttgaaggtttaagttcaaccatattctgtcaactgttcagtttcag

SEQ ID NO: 91 - DNA, 587 bp, Homo sapiens
  misc_feature (378)..(397): n includes a, c, g, or t, or contains no nucleotide
  misc_feature (442)..(444): n includes a, c, g, or t, or contains no nucleotide
  misc_feature (536)..(536): n includes a, c, g, or t, or contains no nucleotide
  misc_feature (555)..(555): n includes a, c, g, or t, or contains no nucleotide
cccacaagaagcacgcctacaaggatgacagcccccgccggcgcagcacgagcccggaccacacccggtcccggaggtcccacagcaaagacaggcaccggagggagcggagccgggagcggaggggcagcgccagcaggaagcacagccgccaccgccgccgaagcgagcggtcgcgctcccggtccccgagcaggcaccgcagtacctggaacaggtaatgacgggcacggcctccccacggcctgtccgggaaagaccaggacctgctcgagcctcctggccgctccttggccgctctccgtccacccctgcaaagccaagacccttctgcagccacgaatgtccacggagcccgccggcaggaaggaagacacnnnnnnnnnnnnnnnnnnnnttctccactcaccgcagcgtacttggcacttcagtttcaaacacnnngtcctttaaaacttgatccgatagctttaatgcggccggtcctctctcagtcaggaaaattgcacagaccgacagtcgtgaggatggcaganctgctgcattcccccacanggggatttctgtgtctgcttggcgacctccct

SEQ ID NO: 92 - DNA, 491 bp, Homo sapiens
  misc_feature (130)..(180): n includes a, c, g, or t, or contains no nucleotide
  misc_feature (182)..(185): n includes a, c, g, or t, or contains no nucleotide
gatgttcacgcctctgacagtgaaatacgcgtactacgacactgaacgcatcggagttgacctgatcatgaagacctgctttagccccaacagagtgattggactctcaagtgacttgcagcaagtaggnnnnnnnnnnnnnnnnnnnnnnnnnnnnnnnnnnnnnnnnnnnnnnnnnnnannnngaggatgtactgtctggaaaggtgtcagctgacaatactgtgggccgcttcctgatgagcctggttaaccaagtaccgaaaatagttcccgatgactttgagaccatgctcaacagcaacatcaatgaccttttgatggtgacctacctggccaacctcacacagtcacagattgcactcaatgaaaaacttgtaaacctgtgaatggaccccaagcagtacacttgctggtctaggtattaaccccaggactcagaagtgaaggagaaatgggttttttgtggtcttgagtcacactgagatagt

SEQ ID NO: 93 - DNA, 353 bp, Homo sapiens
  misc_feature (44)..(44): n includes a, c, g, or t, or contains no nucleotide
tctatagttgccagccctggtcagttttgattcttaaccccatnggactcctttccctttcttctctgaaaaaaactaatttaaatttgcttttcttttttttaactgagttgaattgagattgatgtgttttcactggatttttatctctctcaacttcctgcacttaacaatatgaaatagaaacttttgtctttactgagatgaggatatgtttgagatgcacagttggataatgtgggaaaatgacatctaagctttacctggtcaccatgtgatgtgatcagatgcttgaaatttaacacttttcacttggttcttatactgaatgccgactctgctctgtgttagag

SEQ ID NO: 94 - DNA, 453 bp, Homo sapiens
  misc_feature (130)..(130): n includes a, c, g, or t, or contains no nucleotide
  misc_feature (141)..(141): n includes a, c, g, or t, or contains no nucleotide
  misc_feature (147)..(185): n includes a, c, g, or t, or contains no nucleotide
  misc_feature (300)..(337): n includes a, c, g, or t, or contains no nucleotide
actaaagaatctccccagacattttcttttttttttcacacatagatttaagtatcttgattgttagtagtctaaaaatgggaagaatgaaaaagcataactagatttttctatcttctgtggtcgcccngcccccccccnaaaaannnnnnnnnnnnnnnnnnnnnnnnnnnnnnnnnnnnnnnacatgcaaaaaaaagatctcagagaaaacaaaagtaaaagaaaagcagaaaatcacctgttatctactcccagaaataatcaatttcaacattttggtatatgtttttccaggcnnnnnnnnnnnnnnnnnnnnnnnnnnnnnnnnnnnnnnatgcagttctttctttaacccttttttctcctatgtactgtgaacatttaaaaagtacttttaaatattctttggaaacttagcttttagtaactacttggttgtatcataattta

SEQ ID NO: 95 - DNA, 428 bp, Homo sapiens
  misc_feature (50)..(50): n includes a, c, g, or t, or contains no nucleotide
  misc_feature (52)..(59): n includes a, c, g, or t, or contains no nucleotide
  misc_feature (61)..(62): n includes a, c, g, or t, or contains no nucleotide
  misc_feature (64)..(64): n includes a, c, g, or t, or contains no nucleotide
  misc_feature (66)..(66): n includes a, c, g, or t, or contains no nucleotide
  misc_feature (68)..(69): n includes a, c, g, or t, or contains no nucleotide
  misc_feature (71)..(74): n includes a, c, g, or t, or contains no nucleotide
  misc_feature (76)..(104): n includes a, c, g, or t, or contains no nucleotide
  misc_feature (173)..(173): n includes a, c, g, or t, or contains no nucleotide
  misc_feature (176)..(176): n includes a, c, g, or t, or contains no nucleotide
  misc_feature (356)..(372): n includes a, c, g, or t, or contains no nucleotide
tctgtggctgttgtgagtcttcagcaccctcccatgtaccttatatcccncnnnnnnnnannanancnncnnnnannnnnnnnnnnnnnnnnnnnnnnnnnnnntttctatgtggattctgtaatgttcctccatacagttaaaacatcctaacttgtttttcaagctcactncangcctacgccaaacgtttctgttttttttaaccatgaggtttaatttatttttgtgataggagggatatttacatattttagtggaccacattttaagttggatggtgtgctctaaaatactgaaaaacaatagcccatatacctatgtatttgtttttgatgggttgtttactctgaaannnnnnnnnnnnnnnnnttaaaaggaagttttaaagtacctattttgtgtcatcctgtattgaaaagaatgtc

SEQ ID NO: 96 - DNA, 523 bp, Homo sapiens
  misc_feature (44)..(72): n includes a, c, g, or t, or contains no nucleotide
  misc_feature (305)..(305): n includes a, c, g, or t, or contains no nucleotide
  misc_feature (393)..(407): n includes a, c, g, or t, or contains no nucleotide
  misc_feature (409)..(409): n includes a, c, g, or t, or contains no nucleotide
aaggtgtggctcattgactttaatccatttggtgaagtcacagnnnnnnnnnnnnnnnnnnnnnnnnnnnnnatatctgagaacaacttaaacggcgattttagtgaagttgacgctcaagagcaggattccccagctttccgttgcacaaacagtgaagtgacagtccagcccagcccctatttgagttaccggctacccaaggactttgtagacctctctactggggaggacgctcacaagctaatagacttccttaagctgaagagaaatcagcaggaggacgactgatgagcgtgctgganctggagaagaggaggccccgccccaccgctccgggagctgctcatcagccgcaacttcctgccgaccctgatgcgggtgggccgagcnnnnnnnnnnnnnnncnctttttatattcatgtacattcacctggggaaaaaaacggagggactttgctacttgtaaaaataacataataaatagatcttaaacataggaaaaccatactgttctgataat

SEQ ID NO: 97 - DNA, 514 bp, Homo sapiens
  misc_feature (97)..(134): n includes a, c, g, or t, or contains no nucleotide
atgcaggaggcttggaagtataaccgggaatgcaaactcctaagagatactctgcagagcttcagctggaatggtcgtggattcacagataaagtannnnnnnnnnnnnnnnnnnnnnnnnnnnnnnnnnnnnntagaagagcaaaccacgtcccacgaatcccaataatgacagcttcagactttgtttttttaacaatttgaaaaattattctttaatgtataaagtaattttatgtaaattaataaatcataatttcatttccacattgattaaagctgctgtatagatttagggtgcaggacttaataatagtatagttattgtttgtttttaagaaaagctcagttctagagacatactattactttaggactgtgtagttgtatatttgtaagatgacagatgatgctgtcaagcaatattgttttatttgtaataaaatatacaaaaatcacttgccagcagtagaaaaaggaccgactataccgacctttctgattagtaaacagt

SEQ ID NO: 98 - DNA, 531 bp, Homo sapiens
  misc_feature (200)..(200): n includes a, c, g, or t, or contains no nucleotide
gggttgccttgtggtcatgtgtttcatcagaattgcattgtgatgtggttggctgggggccgacattgttgccctgtttgccggtggccttcttataaaaaaaagcagccatatgcacaacaccagcccttgtcaaatgatgtcccatcttaaccatgtgcaatttgtcctttataagctttgagtatcttacagcttgncctttttaatgttagtcacaatgtttttgtggtttgaagtttagtttaatgttagtgcagtgacgggaaatacacattatgctaatgttgatgacagaatttatttggttgccttgtgtgttaattgaatgcatacctaattgtaaaatttttttatttacaacattggaaattcagaagttaatgtttttttgtaagcacaaaagaagtattatagaaatttatcctagcaagactttacaagataggatcaaattctaatggaattgagccggtttcttatcctaaatgtttcctccctttttacaatctctgtccagcacctcttggt

SEQ ID NO: 99 - DNA, 476 bp, Homo sapiens
  misc_feature (26)..(44): n includes a, c, g, or t, or contains no nucleotide
  misc_feature (63)..(63): n includes a, c, g, or t, or contains no nucleotide
  misc_feature (71)..(71): n includes a, c, g, or t, or contains no nucleotide
  misc_feature (124)..(124): n includes a, c, g, or t, or contains no nucleotide
  misc_feature (314)..(442): n includes a, c, g, or t, or contains no nucleotide
gcaaatctagtttagcctgcatggcnnnnnnnnnnnnnnnnnnncccaccctcaccatttgcnaagtggcnaggagctgagaatgccagtacgagagtgtagccaaagtgagaggctgagagcnaaaggagacatttttttcagttttgagtcgagtatccagacagaggcaaatcattttgtttaactttttattaaagtgtaactatagaaacacatcaatgatttttcacaagtggagcacgtgcatacaatcggcaccccagaagccccccgtcagattcccttccagttaactacctctccaagggaannnnnnnnnnnnnnnnnnnnnnnnnnnnnnnnnnnnnnnnnnnnnnnnnnnnnnnnnnnnnnnnnnnnnnnnnnnnnnnnnnnnnnnnnnnnnnnnnnnnnnnnnnnnnnnnnnnnnnnnnnnnnnnnngtatttgtacatggattttcattctcatggttgt

SEQ ID NO: 100 - DNA, 352 bp, Homo sapiens
  misc_feature (162)..(162): n includes a, c, g, or t, or contains no nucleotide
  misc_feature (232)..(232): n includes a, c, g, or t, or contains no nucleotide
  misc_feature (234)..(234): n includes a, c, g, or t, or contains no nucleotide
  misc_feature (296)..(297): n includes a, c, g, or t, or contains no nucleotide
  misc_feature (300)..(300): n includes a, c, g, or t, or contains no nucleotide
  misc_feature (304)..(306): n includes a, c, g, or t, or contains no nucleotide
aaagcaccgaggttgcattctagataaccttgtttattagcatggcatattttaatcattatttgagactgtcctgtgcctgattattttagctaaattcagggagattgcgtggggcaggaaagcatgcattgaaaaatttctaaccacggttatttaagnataatctgaaaacatctagcccaaaggtaagttgctattttcatcacagttgcctatgcccagggaatangntgtattctttataattgaattggtttttcccacgtctaactggaaacaaaacagaaggggcnncanaaannngaataagcagaacatactgttctcaacatactgtaatcaaaaggag

SEQ ID NO: 101 - DNA, 550 bp, Homo sapiens
  misc_feature (247)..(262): n includes a, c, g, or t, or contains no nucleotide
gttcagctttagttttagcaaacaccacaaatatgttttaagtaacatcgctcaagtttaagtaacatcgctcaagttgataatctcttgataagctctgttgttgacattttgcagtgatacaacagctccactcatagatttaaacttttatttttacttatcttggtcataagttggcattctctcacattccacatgatatagagggctacgttttggaattttccttttcttaattgcccannnnnnnnnnnnnnnntataaaaatggcttttaatggcttaaaccatttctaaacctctatcttagcagatcaatgcaggatctaattcttttgataagttctagctctaaaagtgatagtgggactgtatgttttctgatactggtggcttatgttattaaaccttttttaaaaaaggttcactctaaaagctgaactacatccttagttttcagtctacttgactctatcaggagctttttaaggaaagtaagtataacatgcaaaggaagctttttttgtattcattttggactcctgtca

SEQ ID NO: 102 - DNA, 575 bp, Homo sapiens
  misc_feature (366)..(367): n includes a, c, g, or t, or contains no nucleotide
  misc_feature (369)..(371): n includes a, c, g, or t, or contains no nucleotide
  misc_feature (373)..(376): n includes a, c, g, or t, or contains no nucleotide
  misc_feature (380)..(382): n includes a, c, g, or t, or contains no nucleotide
  misc_feature (385)..(393): n includes a, c, g, or t, or contains no nucleotide
  misc_feature (417)..(459): n includes a, c, g, or t, or contains no nucleotide
  misc_feature (550)..(550): n includes a, c, g, or t, or contains no nucleotide
gcagaacctttggttttggacagtttcatttttttggatttgggatagattacataggagtatggagtatgctgtaaataaaaatacaagctagtgctttgtcttagtagttttaagaaattaaagcaaacaaatttaagttttcttgtattgaaaataacctatgattgtatgttttgcattcctagaagtaggttaactgtgtttttaaattgttataacttcacacctttttgaaatctgccctacaaaatttgtttggcttaaacgtcaaaagccgtgacaatttgttctttgatgtgattgtatttccaatttcttgttcatgtaagatttcaataaaactaaaaaatctattcaaaacannannnannnnaaannnaannnnnnnnnaaaacattattttattcgtaatcnnnnnnnnnnnnnnnnnnnnnnnnnnnnnnnnnnnnnnnnnnntgatcaaattcatgcaaaatttcttgtttattccaacatgtgttgtggatattagactgaggattagtctaaattcaagtatttattccanttagcactttcattgattggtgttc

SEQ ID NO: 103 - DNA, 543 bp, Homo sapiens
  misc_feature (279)..(293): n includes a, c, g, or t, or contains no nucleotide
ggcctaaatttcaatcttaaggatggaatgcatgtctgctccttgttctgaaaaatgtaggcatctactacattttaaaacacagtgaaacatatacataagcctataaaaaaagatttgtgcaatttgaaagcctgttaattttttatgtagacatacctacacacgaaagggttaaattcacagccttactagttccttgcttccagtatttcaattggtctcctcccctcattattattattactactagtactattatttttgcacatagttaannnnnnnnnnnnnnnattcttaaaaagtgctgtttctgtggtatcgtattctctaaataatcatatttaattttttaaaacaaggttgcagtttctaattgtttcgttcctgtgtttttgctggtgtgtaataaaagcaagttttttcttttcatggttatttaatacattagctgcctgtaaataattcttgttataatgctctggaatgtgttgtagaagttgtattagattagttttaaacccttgtttgaaagccacattg

SEQ ID NO: 104 - DNA, 253 bp, Homo sapiens
tgaaggcaaacagtacctcagcaacatggggactcgaggctcctacctgctgcccggcatggcgtccttcgtcacttccaacaaaccggacctccaggtcaccatcaaagaggagagcaatccggtgccttacaacagctcctggcccccttttcaagacctccccctttcttcctccatgaccccagcatccagcagcagtcggccagaccgggagacccgggccagcgtcatcaagaaaacatcggatatc

SEQ ID NO: 105 - DNA, 536 bp, Homo sapiens
  misc_feature (71)..(71): n includes a, c, g, or t, or contains no nucleotide
  misc_feature (320)..(346): n includes a, c, g, or t, or contains no nucleotide
  misc_feature (391)..(416): n includes a, c, g, or t, or contains no nucleotide
  misc_feature (439)..(475): n includes a, c, g, or t, or contains no nucleotide
caccatcctggacgaggaaccgatcgtgaatagggggctggcagctgccctgctcctgtgtcagaacaaangggctgctggagaccacagtgcagaaggtggcccgggtgaaggcccccaacaagtcgctgccctcagccgtgtactgcatcgaggataagatggccatcgatgacaagtacagccggagggaggaataccgaggcttcacacaggacttcaaggagaaggacggctacaaacccgacgttaagatcgaatacgtggatgagacgggccggaaactcacacccaaggaggctttccggcagctgtcgcannnnnnnnnnnnnnnnnnnnnnnnnnngatgaagacagagcggcggatgaagaagctggacgaggaggcgcnnnnnnnnnnnnnnnnnnnnnnnnnnacgcccctgggcaccgtggcccnnnnnnnnnnnnnnnnnnnnnnnnnnnnnnnnnnnnncatcgtgctcagcggcagcggcaagagcatgaacgcgaacaccatcaccaagtgacagcgc

SEQ ID NO: 106 - DNA, 288 bp, Homo sapiens
  misc_feature (135)..(153): n includes a, c, g, or t, or contains no nucleotide
gtttaaccagattctgttctatttgaattgtgacttgcaccttttgttcaaagtatttcctttaggcattgtaattgtgaacagctcttacttgtgccagtgacagatgcagtggtctcctttccccagttgaannnnnnnnnnnnnnnnnnntattatttgtgttatctttatttctcttcattgttagaaaccaaagtcttctctgctggctggggctgagagagggtctgggttatctccttctgatcttcaaaacaagagagagaccttgaatacactgactct

SEQ ID NO: 107 - DNA, 468 bp, Homo sapiens
  misc_feature (38)..(38): n includes a, c, g, or t, or contains no nucleotide
  misc_feature (175)..(175): n includes a, c, g, or t, or contains no nucleotide
  misc_feature (184)..(184): n includes a, c, g, or t, or contains no nucleotide
  misc_feature (190)..(190): n includes a, c, g, or t, or contains no nucleotide
  misc_feature (194)..(209): n includes a, c, g, or t, or contains no nucleotide
  misc_feature (211)..(217): n includes a, c, g, or t, or contains no nucleotide
  misc_feature (232)..(232): n includes a, c, g, or t, or contains no nucleotide
attaaaggcagtgaggctgacaggcaacgggcaggaancagtgactggcttggcagtgaatatagctgccttgctctctgtcatgcttcagccttacatgcccacggttagtgccacaatccaggcccagctgcagctcccacctccagcctgcagtatcctgctgacaaacttncctgtgtanccttanccannnnnnnnnnnnnnnngnnnnnnngtcagtcccttgttnccaaaaattggaaaatgaccagattgaaagtttaaggcagcgctttggagggggccaggcaaaaacgtccccgaagccagcagttgtagagactgttacaacagccaagccacagcagatacaagcgctgatggatgaagtgacaaaacaaggaaacattgtccgagaactgaaagcacaaaaggcagacaagaacgaggttgctgcggaggtggcgaaactcttggatctaaaga

SEQ ID NO: 108 - DNA, 468 bp, Homo sapiens
  misc_feature (74)..(75): n includes a, c, g, or t, or contains no nucleotide
  misc_feature (108)..(108): n includes a, c, g, or t, or contains no nucleotide
cagtatctcctgacgggacctgccactcgcatctgggcaatgttgacatttgaggtggcaggcaggatgcctgnnttctaatatatttgggtgagtaactgagccagnccaagggaaggttgaatgattaaatcagaaatgggattcttggtaaactgaagacttttatttgggaatgaaaaaccttaaaaaaatctcttcatcgttgaactgtgcattttccctgcattttttcccaacaaaattttgttgggggttatgttactgaagaatgaacagatgagtaagtggaggtgttatgtaaaggcatattgtactcgaaatctgaagacctgcagcagatttaaattacaactcttgttataactttttaaaagattgtgaaaatatcaaaatataaatgaatcaagttttaatatactgtatgatgggtggatgaggctgtccattgtaccatttgtttgaatt

SEQ ID NO: 109 - DNA, 125 bp, Homo sapiens
ctcggatcatggtttcctcatgaggacaaatacctgattttgaataaagcagcattcagttgaaataaccctttctgtggtaattccaagtgaatatttttcttctaggtgatgagtttctactt

SEQ ID NO: 110 - DNA, 455 bp, Homo sapiens
  misc_feature (27)..(29): n includes a, c, g, or t, or contains no nucleotide
  misc_feature (46)..(46): n includes a, c, g, or t, or contains no nucleotide
  misc_feature (73)..(73): n includes a, c, g, or t, or contains no nucleotide
  misc_feature (108)..(108): n includes a, c, g, or t, or contains no nucleotide
  misc_feature (156)..(156): n includes a, c, g, or t, or contains no nucleotide
  misc_feature (300)..(303): n includes a, c, g, or t, or contains no nucleotide
tgccaagaggctaccagaacatggggnnnaggtggctggtgttggntgtcccagcctaagagccacctgctgncagttaccatggcatgctgagttgatgcaccaggnggcagcagccatccgttattatttccaatggagacctagcccaggccnaaggtaaagttagttaatagcattgggatatagtcactgtaatggtgctattaacaaacagtcaacaccattgtattttttaacttcgtgttctgtatctcctcagccatgtatcttaaatatattttgtcatcataatctttnnnnatggtgggggcagactttgcacttactgcagtgcaacacttgcactttaattttcctccaactgtctaaaattagagcaaatacattggcaatacagctgcttttgctctgagctacaatcatggcttttcatgttacttaccaagtggtgt

SEQ ID NO: 111 - DNA, 520 bp, Homo sapiens
  misc_feature (48)..(49): n includes a, c, g, or t, or contains no nucleotide
  misc_feature (62)..(62): n includes a, c, g, or t, or contains no nucleotide
  misc_feature (64)..(64): n includes a, c, g, or t, or contains no nucleotide
  misc_feature (106)..(107): n includes a, c, g, or t, or contains no nucleotide
  misc_feature (110)..(111): n includes a, c, g, or t, or contains no nucleotide
  misc_feature (114)..(166): n includes a, c, g, or t, or contains no nucleotide
  misc_feature (354)..(414): n includes a, c, g, or t, or contains no nucleotide
acaatcgccgggagctgacggacaagcttctcatcttccttgcgctanncctgtttcttgcnanggtcctctatattgtgaaaaagcggctctttccatttttgtnngannccnnnnnnnnnnnnnnnnnnnnnnnnnnnnnnnnnnnnnnnnnnnnnnnnnnnnncctgagctctaggctgctaagctgagccacacacccctccgtttgcaccagttgcctgcaggttggatggaacacagtgccccacttttctgcaagtagctggcttgtaaagggtgaacagagccatgggaggaaggtctggcattgggatgccgccctggggacatacgaaccgcctccttccaccnnnnnnnnnnnnnnnnnnnnnnnnnnnnnnnnnnnnnnnnnnnnnnnnnnnnnnnnnnnnnatgcccctcctgtctcccgctcccatcgtgcccttaaatgccagatctggtggagggaagagagaagaggtaggaagaaaggtgatgaaaactcctggtcattcct

SEQ ID NO: 112 - DNA, 545 bp, Homo sapiens
  misc_feature (46)..(46): n includes a, c, g, or t, or contains no nucleotide
  misc_feature (52)..(52): n includes a, c, g, or t, or contains no nucleotide
  misc_feature (59)..(59): n includes a, c, g, or t, or contains no nucleotide
  misc_feature (65)..(65): n includes a, c, g, or t, or contains no nucleotide
  misc_feature (94)..(94): n includes a, c, g, or t, or contains no nucleotide
  misc_feature (106)..(106): n includes a, c, g, or t, or contains no nucleotide
  misc_feature (123)..(123): n includes a, c, g, or t, or contains no nucleotide
  misc_feature (133)..(133): n includes a, c, g, or t, or contains no nucleotide
  misc_feature (158)..(158): n includes a, c, g, or t, or contains no nucleotide
  misc_feature (231)..(231): n includes a, c, g, or t, or contains no nucleotide
  misc_feature (498)..(498): n includes a, c, g, or t, or contains no nucleotide
  misc_feature (500)..(503): n includes a, c, g, or t, or contains no nucleotide
  misc_feature (505)..(506): n includes a, c, g, or t, or contains no nucleotide
  misc_feature (508)..(510): n includes a, c, g, or t, or contains no nucleotide
  misc_feature (512)..(514): n includes a, c, g, or t, or contains no nucleotide
  misc_feature (516)..(519): n includes a, c, g, or t, or contains no nucleotide
cttctgcacttttagctggttgaaaagtaccactcccactctgaancatctnggccgtnccctgncaaagagtgtactgtgcttgaagcagagncactcacacatnaaatggctgtgtgtggnaattgcttgnccaaagaagtttctagcctttcccntttcccctaactgcatcagggaagaattcttatctctagcttggtttccacatgaggtttttctgagaagggncttgggacaagaagtctgtcatgttagttaagcaggcaagaaatcctactaatccagttttgtttgaaagttgtttgtccgtatgattttttaaaagtcaagtttaatttcaaaaaaccttttttttctgagattacttttggggtaatatttaaaatgagagacattttgtaaccctgtaaaatacatagggaatataacattccagtgtatacaaagaaggcaaattctttaatcaaataaagcgcattataaaatgaaaaaaanannnnannannnannnannnnggtgtctgcttgttgattcaggatgc

SEQ ID NO: 113 - DNA, 411 bp, Homo sapiens
  misc_feature (90)..(105): n includes a, c, g, or t, or contains no nucleotide
  misc_feature (235)..(249): n includes a, c, g, or t, or contains no nucleotide
gctgtactacgacaatgagaagtgctggtttggcaaaaggcctggggtgtacaccgactacatctaccagggccccatgatcctggtccnnnnnnnnnnnnnnnncttccttttcaacatcgtccgcatcctcatgaccaagctccgggcatccaccacgtctgagaccattcagtacaggaaggctgtgaaagccactctggtgctgctgcccctcctgggcatcacctacatnnnnnnnnnnnnnnntcccggggaggatgaggtctcccgggtcgtcttcatctacttcaactccttcctggaatccttccagggcttctttgtgtctgtgttctactgtttcctcaatagtgaggtccgttctgccatccggaagaggtggcaccggtggcaggacaagcactcgat

SEQ ID NO: 114 - DNA, 469 bp, Homo sapiens
  misc_feature (336)..(362): n includes a, c, g, or t, or contains no nucleotide
tcagctgacaaatacgtgaagatctgggacatcttaggagataggccaagtctagttcattctagggacatgaaaatgggagttctcttctgttcttcatgttgccctgatttgccatttatttatgcctttggaggtcaaaaagaagggcttcgggtctgggatataagcacagtctcttcagtaaatgaagcatttggaagacgagagaggcttgttcttgggagtgcaagaaattcatctattagtggcccttttggcagcaggagctcagatacacccatggagtcttaatgaagatcatctaatttcctgcttaccttaactgggaatttnnnnnnnnnnnnnnnnnnnnnnnnnnngcgtggcagcaaccatgcagagtgactgaaacacaattcatttctgactgacattcctttctgcaactgcggtggcaccacaaatatccggtctttgtgcttgctct

SEQ ID NO: 115 - DNA, 531 bp, Homo sapiens
  misc_feature (62)..(155): n includes a, c, g, or t, or contains no nucleotide
  misc_feature (159)..(160): n includes a, c, g, or t, or contains no nucleotide
  misc_feature (162)..(162): n includes a, c, g, or t, or contains no nucleotide
  misc_feature (165)..(166): n includes a, c, g, or t, or contains no nucleotide
  misc_feature (196)..(196): n includes a, c, g, or t, or contains no nucleotide
ctccactggctgtttgtttgctggatcatcgcttggtaaacgaggtgtaaatgcagacaaannnnnnnnnnnnnnnnnnnnnnnnnnnnnnnnnnnnnnnnnnnnnnnnnnnnnnnnnnnnnnnnnnnnnnnnnnnnnnnnnnnnnnnnnnnnnncatnngnccnntggagtttccagaataaaaacaggaccagnttacactccatacgcaaaccgcgatacattttgctgaacaaatagcaaaggctaaatttattgtgaagaaatcagaagatgaagaagacgccgctaaagatacttatattattgaatgccaaggaattgggatgacaaatccaaatctatagagtatttgcctcttaaatgatacctcattgatatattgcactatttcataaatactataaaataatgactaggaagtaacttattaaaggctatgacttaaatttgaagatgaagtacagtgttctaggtttgctgagaaggcttcattaaattaatctcactttgaatatctcctgagagat

SEQ ID NO: 116 - DNA, 239 bp, Homo sapiens
  misc_feature (128)..(142): n includes a, c, g, or t, or contains no nucleotide
acctgcagactaaagggagctagagccctttatttcttccaaccttgcaaggaccacactccccatacccttcagtgcagtgtaccagggaagagaccttgtgcctctaagcagtggaccatggtcannnnnnnnnnnnnnncctaggttgtccttgggccggcttccttaggggacagactgttgggtggtgatggggattgttaggatggagcccaggccacatggatgatgatgat

SEQ ID NO: 117 - DNA, 438 bp, Homo sapiens
  misc_feature (341)..(346): n includes a, c, g, or t, or contains no nucleotide
  misc_feature (410)..(410): n includes a, c, g, or t, or contains no nucleotide
agcactcaagtgtgggtttctgtgttattgaggatttgtttggaattcaaattacagttatgtactggatgctacagacttataacagcatagtgaatggtaagactagtgcaaaacagttatttctgaaaattaaagaccattattgctaccaaatcaatgtgactatttcatatgcattttgcctttgttaattttaaacaaacaaagtatcattagtgatcagctagctaccttctactttccatttttcaagtggattgttctcttaatttgtatataacctgttgtctaaattttatgtacagtcttttataataaaccattctcctatatgaaannnnnnatactgttaaaatataactcatgtggacttcaatgcagacttcacatttttctgacctttactnctacggtaaatcaagacaaaccatttga

SEQ ID NO: 118 - DNA, 492 bp, Homo sapiens
  misc_feature (26)..(40): n includes a, c, g, or t, or contains no nucleotide
tgctgagaccaggagcatctgatttnnnnnnnnnnnnnnnattataccgaaaagaagttctagagaaattaatagaaaaatgtgtttctaaaggctacgtcttccagatggagatgattgttcgggcaagacagttgaattatactattggcgaggttccaatatcatttgtggatcgtgtttatggtgaatccaagttgggaggaaatgaaatagtatctttcttgaaaggattattgactctttttgctactacataaaagaaagatactcatttatagttacgttcatttcaggttaaacatgaaagaagcctggttactgatttgtataaaatgtactcttaaagtataaaatataaggtaaggtaaatttcatgcatctttttatgaagaccacctattttatatttcaaattaaataattttaaagttgctggcctaatgagcaatgttctcaattttcgttttcattttgctgtattgagaccta

SEQ ID NO: 119 - DNA, 320 bp, Homo sapiens
  misc_feature (94)..(94): n includes a, c, g, or t, or contains no nucleotide
  misc_feature (96)..(96): n includes a, c, g, or t, or contains no nucleotide
  misc_feature (265)..(265): n includes a, c, g, or t, or contains no nucleotide
catccagttgcaacttcctttgctgtgtttgatgacactttgcttatagttgaccctactggagaggaggaacatctggcaacaggaaccttancnatagtaatggatgaggaaggcaaactctgttgtcttcacaaaccaggtggaagtgggctaactggagctaaacttcaggactgtatgagccgagcagttacaagacacaaagaagttaaaaaactgatggatgaagtaattaagagtatgaaacccaaataaacagccnccacattttcaaaacagatttgtaaaaattgtatttgttaacactgtgcacaaac

SEQ ID NO: 120 - DNA, 482 bp, Homo sapiens
  misc_feature (160)..(160): n includes a, c, g, or t, or contains no nucleotide
  misc_feature (166)..(166): n includes a, c, g, or t, or contains no nucleotide
  misc_feature (186)..(186): n includes a, c, g, or t, or contains no nucleotide
  misc_feature (377)..(380): n includes a, c, g, or t, or contains no nucleotide
aattcatactggagagaaaccctacacatgtgaagaatgtggcaaagcctttaaccagtcctcaaaccttactaaacataagagaattcatactggagaaaaaccttacaaatgtgaagaatgtgacaaagcttttaaatggtcctcagtccttactaancataangataattcataccggagaanaattacaaatatgaaaattatggcaaagctttaatcaatttacaagtcttactaaacataagaaaatttatactggagagaaactactaacctgaaagatgtgacaataattttgacaacacctcagacttataaaagtaatcatactggtgagaaattctaaaaatgtgaagactatggcaaagtctttnnnnggttgtcacactttaggtaagataattcatattggaacaaactacaagtgcaaacaatgtggcaaaacttaatttatgctcacaccttactgcacagaaaag

SEQ ID NO: 121 - DNA, 475 bp, Homo sapiens
  misc_feature (70)..(71): n includes a, c, g, or t, or contains no nucleotide
  misc_feature (96)..(96): n includes a, c, g, or t, or contains no nucleotide
  misc_feature (120)..(120): n includes a, c, g, or t, or contains no nucleotide
  misc_feature (133)..(133): n includes a, c, g, or t, or contains no nucleotide
  misc_feature (136)..(137): n includes a, c, g, or t, or contains no nucleotide
  misc_feature (148)..(148): n includes a, c, g, or t, or contains no nucleotide
  misc_feature (258)..(258): n includes a, c, g, or t, or contains no nucleotide
  misc_feature (260)..(260): n includes a, c, g, or t, or contains no nucleotide
  misc_feature (341)..(344): n includes a, c, g, or t, or contains no nucleotide
ttcccaggctgtctctgctgctgtccccactcctcttcgccccctgcggcaggagcccccaacttactgnnctcggagtcatgacaaggctgggcnagcagctcggcctcgggcgtcggntccacttctgccngcnncgggaagtcgncgccagcggacgagtcgtccccattctggcccttctcgccctctctcaggcagctagattctggacaggcctgggtctgcaagggaggtggttgggattccaggctcccntnccccctccggccccggacggccacccaactgggggaacgctctcgattgccacctactgtcctcctcgggcacccgctccnnnncgcctggggggcgctcagggttcagctcttcctggacagcagcagcacctgtacagttgctagtttgaggctggtgttgatattctgacaagaatggctcggccatggctagtagagtcctcgaagtttaa

SEQ ID NO: 122 - DNA, 92 bp, Homo sapiens
  misc_feature (26)..(26): n includes a, c, g, or t, or contains no nucleotide
tgaatgtgctttgttccaaaagaggngagttttctcttggcatcagcctctgctcctttttttcttgtttgtatgtttttcactcttcatag

SEQ ID NO: 123 - DNA, 222 bp, Homo sapiens
aggacatcaagaagatcttggacagcgtgggtatcgaggcggacgacgaccggctcaacaaggttatcagtgagctgaatggaaaaaacattgaagacgtcattgcccagggtattggcaagcttgccagtgtacctgctggtggggctgtagccgtctctgctgccccaggctctgcagcccctgctgctggttctgcccctgctgcagcagaggagaaga

SEQ ID NO: 124 - DNA, 568 bp, Homo sapiens
  misc_feature (254)..(346): n includes a, c, g, or t, or contains no nucleotide
  misc_feature (427)..(427): n includes a, c, g, or t, or contains no nucleotide
caatggtcctgactttgggcgctgggtattggaaatggatgcaaagtacaatgtgtttttctccagtgctgtccatgcttctcatcttgtgaaatggccaggatcctctcctttgaaacctgctctgtaggagctacccttttcctttgtggttttatggagacctctccttcctaccctcctgcactgtttaagtactgtttaccatttttcattcacttctcttaaacttgtgaatgcttctcacttttttnnnnnnnnnnnnnnnnnnnnnnnnnnnnnnnnnnnnnnnnnnnnnnnnnnnnnnnnnnnnnnnnnnnnnnnnnnnnnnnnnnnnnnnnnnnnnttgtttattgagtttgtaggtaaaatgtatttttctacattattgcttattgcttagtaaaatttatttcataaaaccaanctttgtcatattagaatgtgtagtgttcacatgttgctcagttttgctaactgataaatcatttaatcctcttcttcatatgtatgagtactatcttatatctgtggtcaagagtgaggtaagcaagctccaacagaccct

SEQ ID NO: 125 - DNA, 40 bp, Homo sapiens
agaattggtcatgtcacaagcaaatgtgtcgagagcaaag

SEQ ID NO: 126 - DNA, 463 bp, Homo sapiens
ttcaagttggccaataatagcattctctctgacatttaaaaataatttctattcaaaatacatgcataattgattttacacctcattactggtggataatttatgtgatgtggattgctggtgtccagcatgacccataaacaggtcagaagaatgatggaatgttttagaataaactcctgcttatagtatactacacagttcaaaagatgtttaaaatgcttttgtatttactgccatgtaattgaaatatatagattattgtaacctttcaacctgaaaatcaagcagtatgagagtttagttatttgtatgtgtcactagtgtctaatgaagcttttaaaatctacaatttcttctttaaaaatatttattaatgtgaatggaatataacaattcagcttaattccccaaccttattctgtgtgtagacattgtattccacaattttgaatggctgtgt

SEQ ID NO: 127 - DNA, 240 bp, Homo sapiens
gaaactttgaaccttatgtaccgagcaaatgccaggtctagcaaacataatgctagtcctagattacttattgatttaaaaacaaaaaaacacaaaaaatagtaaaatataaaaacaaattaatgttttatagaccctgggaaaaagaattttcagcaaagtacaaaaatttaaagcattcctttctttaattttgtaattctttactgtggaatagctcagaatgtcagttctgtttta

SEQ ID NO: 128 - DNA, 558 bp, Homo sapiens
  misc_feature (109)..(109): n includes a, c, g, or t, or contains no nucleotide
  misc_feature (228)..(228): n includes a, c, g, or t, or contains no nucleotide
  misc_feature (243)..(243): n includes a, c, g, or t, or contains no nucleotide
tcattaggctgcatttactcttgctaaataaaagtgggagtggggcgtgcgcgttatccatgtattgcctttcagctctagatccccctcccctgcctgctctgcagtngtgggtggggcccgtgcgccgtttctccttggtagcgtgcacggtgttgaactgggacactggggagaaaggggctttcatgtcgtttccttcctgctcctgctgcacagctgccaggnagtgctctgcctggnagtctgcagacctcagagaggtcccagcactggctgtggcctttcaggtgtaggcaggtgggctctgcttcccgattccctgtgagcgcccaccctctcgaaagaattttctgcttgccctgtgactgtgcagactctggctcgagcaacccggggaacttcaccctcaggggcctcccacaccttctccagcgaggaggtctcagtcccagcctcgggagggcacctccttttctgtgctttcttccctgaggcattcttcctcatccctagggtgttgtgtagaactctttttaaactctatgctccgagtag

SEQ ID NO: 129 - DNA, 530 bp, Homo sapiens
  misc_feature (436)..(436): n includes a, c, g, or t, or contains no nucleotide
  misc_feature (438)..(438): n includes a, c, g, or t, or contains no nucleotide
ttgctttgtttctctgataaaactggttttagacaaaaaatagggatgatcactcttagaccatgctaatgttactagagaagaagccttcttttctttcttctatgtgaaacttgaaatgaggaaaagcaattctagtgtaaatcatgcaagcgctctaattcctataaatacgaaactcgagaagattcaatcactgtatagaatggtaaaataccaactcatttcttatatcatattgttaaataaactgtgtgcaacagacaaaaagggtggtccttcttgaattcatgtacatggtattaacacttagtgttcggggttttttgttatgaaaatgctgttttcaacattgtatttggactatgcatgtgttttttccccattgtatataaagtaccgcttaaaattgatataaattactgaggtttttaanangtattctgttctttaagatccctgtaagaatgtttaaggtttttatttatttatatatattttttgagtctgttctttgtaagacatggttc

SEQ ID NO: 130 - DNA, 532 bp, Homo sapiens
  misc_feature (76)..(77): n includes a, c, g, or t, or contains no nucleotide
  misc_feature (79)..(87): n includes a, c, g, or t, or contains no nucleotide
  misc_feature (166)..(216): n includes a, c, g, or t, or contains no nucleotide
  misc_feature (302)..(323): n includes a, c, g, or t, or contains no nucleotide
taccaggaactattggacatttattttacatgggaaaaattatttggaataataaagcaggaacttttcctgaagnngnnnnnnnnnatactgtatggcttctttttcatgtttcatctaggtttttagaagtgaagtatagtaaatttggttcgttaaattgtgnnnnnnnnnnnnnnnnnnnnnnnnnnnnnnnnnnnnnnnnnnnnnnnnnnnagcttacattgctatttgtaaagtttgccttcacagcatttcagatgctgttggacttcatgtccccaacctagcttggtgagggnnnnnnnnnnnnnnnnnnnnnngtacattggaagtctgaatgtgtaacaatatttaatgtatttagagttcctcatgttgcagggtttaagaaatctgacccaccaaggtcatgtgacttttctgtactgttaaacttcattgtaataaaatgagagaaaaatttatgcctttttattcataacccagctgtggaccactgcctgaaaggtttgtacagatgcatgccaca

SEQ ID NO: 131 - DNA, 511 bp, Homo sapiens
  misc_feature (32)..(32): n includes a, c, g, or t, or contains no nucleotide
  misc_feature (78)..(101): n includes a, c, g, or t, or contains no nucleotide
tcctcatattgaggtggttcggaaaaaagagnagagaagaaaactgcttgggcacacgtgtaaggaatgtgaaatttnnnnnnnnnnnnnnnnnnnnnnnnaaagagaaaagaaattggcttcctgctcaagacaccgattccgctacattccacccaacacaccagagaatttttgggaagttggttttccttccactcagacttgtatggaaagaggttatattaaggaagatcttgatccttgtcctcgtccaaaaagacgtcagccttacaacgcaatattttctccaaaaggcaaggagcagaagacatagacgttgaaacagaaacagaaggatgaaggacagttttttccttcttagttatttatagttaaagttggtactaaacattgatttttttgatcttctgtaaatggatttataaatcagttttctattgaaaatgtttgtgatattttgcttttgcacctttaaaacaataaggcgctttcattttgcactctaact

SEQ ID NO: 132 - DNA, 342 bp, Homo sapiens
  misc_feature (97)..(98): n includes a, c, g, or t, or contains no nucleotide
  misc_feature (107)..(107): n includes a, c, g, or t, or contains no nucleotide
  misc_feature (117)..(117): n includes a, c, g, or t, or contains no nucleotide
  misc_feature (120)..(120): n includes a, c, g, or t, or contains no nucleotide
  misc_feature (124)..(124): n includes a, c, g, or t, or contains no nucleotide
  misc_feature (126)..(126): n includes a, c, g, or t, or contains no nucleotide
  misc_feature (133)..(133): n includes a, c, g, or t, or contains no nucleotide
  misc_feature (135)..(135): n includes a, c, g, or t, or contains no nucleotide
  misc_feature (138)..(138): n includes a, c, g, or t, or contains no nucleotide
  misc_feature (140)..(140): n includes a, c, g, or t, or contains no nucleotide
  misc_feature (223)..(223): n includes a, c, g, or t, or contains no nucleotide
  misc_feature (238)..(239): n includes a, c, g, or t, or contains no nucleotide
  misc_feature (245)..(245): n includes a, c, g, or t, or contains no nucleotide
  misc_feature (311)..(311): n includes a, c, g, or t, or contains no nucleotide
  misc_feature (314)..(314): n includes a, c, g, or t, or contains no nucleotide
tacaatgacatgagtaactgtacagacagaccccaagtgcagaatcaaattgccctaagtcagaacatggagcaaccgcaactccttcgcacttgtnnatgtgtgtncgctcgcagncgnacananacacacnanatntnctctctctctcttatgcacacatccatccacatcccaacaattgcaggtgctaagtttggacataacccagggactcttcccntgacttctgtcaggnncctggnaaagaagaagtaataaatgaaaagcagctgggactgctcgatgcatctctcctcttccaacaatgncgnggagaaggcaagacatacactggggcag

SEQ ID NO: 133 - DNA, 470 bp, Homo sapiens
  misc_feature (180)..(180): n includes a, c, g, or t, or contains no nucleotide
acagcagagcagactgtatgacgagcaccagcaccaggcacagggatttcctagccgagcagtggccatccccatgcctctgacctccaccgacctctgcccaccatgggttggaactaaactgttaccttccctcgctccacagaagaagacagccagcttcaggggtccctgtgctgnccaagccagtgagcctgcggggaggctggtccaaggagaaagtggaccagctcccatgacctcaccccactcccccaacacaggacgcttcatatagatgtgtacagtatatgtatttttttaagtgacctcctctccttccacagaccccacatgcccaaaggcctcgggacttcccaccaccttgctccacagatccagctaggcctgacctgtgcctcatcccgtgccgctcggtctctggctgatcccgaggctttgtcttcctctcgtcagttcttttggttgtg

SEQ ID NO: 134 - DNA, 245 bp, Homo sapiens
  misc_feature (36)..(39): n includes a, c, g, or t, or contains no nucleotide
  misc_feature (41)..(42): n includes a, c, g, or t, or contains no nucleotide
  misc_feature (66)..(66): n includes a, c, g, or t, or contains no nucleotide
  misc_feature (159)..(159): n includes a, c, g, or t, or contains no nucleotide
  misc_feature (171)..(171): n includes a, c, g, or t, or contains no nucleotide
ggtgtcctgctgttcctgttggccccagctgcactnnnngnnccttcctgtggcccctttccccangcaggggcggccgcagctctcacccactttctcctgcagacggcgaggggaccgacctgtttgccgtggctgtccatgagtttggccacgccntgggcctgggcnactcctcagcccccaactccattatgaggcccttctaccagggtccggtgggcgaccctgacaagtaccgcctg

SEQ ID NO: 135 - DNA, 510 bp, Homo sapiens
  misc_feature (66)..(68): n includes a, c, g, or t, or contains no nucleotide
  misc_feature (70)..(70): n includes a, c, g, or t, or contains no nucleotide
  misc_feature (72)..(75): n includes a, c, g, or t, or contains no nucleotide
  misc_feature (78)..(97): n includes a, c, g, or t, or contains no nucleotide
  misc_feature (99)..(106): n includes a, c, g, or t, or contains no nucleotide
  misc_feature (108)..(112): n includes a, c, g, or t, or contains no nucleotide
  misc_feature (114)..(124): n includes a, c, g, or t, or contains no nucleotide
  misc_feature (126)..(128): n includes a, c, g, or t, or contains no nucleotide
  misc_feature (215)..(242): n includes a, c, g, or t, or contains no nucleotide
  misc_feature (276)..(312): n includes a, c, g, or t, or contains no nucleotide
ggagctctcttaataccgtcaaaccctcatcatctgtgggttgctttttttttttttttttttttnnngngnnnnagnnnnnnnnnnnnnnnnnnnntnnnnnnnntnnnnntnnnnnnnnnnnannncagcattttttgatttttcccaaattcattccatatgttttgctttacaattgctatgatttttactcagagttttatatgaaatannnnnnnnnnnnnnnnnnnnnnnnnnnnttcaaaaggaaattgcatcttgtgacttagtagnnnnnnnnnnnnnnnnnnnnnnnnnnnnnnnnnnnnngtggttggcctttgatttctgaattttaaagtttcagacttatcttttccttggtgtttaaatttactatcattgctaaacatctcgtcaacttttttgatatagtgcattgctcctgttgaatgttttttgactactttttataacttaagaatttttataccatctacatctatcctacttatgcagaaaaatagg

SEQ ID NO: 136 - DNA, 415 bp, Homo sapiens
  misc_feature (196)..(210): n includes a, c, g, or t, or contains no nucleotide
  misc_feature (219)..(219): n includes a, c, g, or t, or contains no nucleotide
catggatgctttctcaatcctaggctggttactgtgtaagcgttttggagtacggggccttgagcgggtgggagctgtgtgttgaagtacagagggaggttggggtgggtcagagccgagttaagagattttctttgttgctggaccccttcttgaaggtagacgtcccccacccggagagacgtcgcgctgtggnnnnnnnnnnnnnnngcttgcttngtaaatatctgtggtcccgatgtagtgcccagaacgtttgtgcgaggcagctctgcgcccgggttccagcccgagcctcgccgggtcgcgtcttcggagtgcttgtgacagtccttgcccagtatctagtccccgtcgccccgtgcaggagacgtaggtaggacgtcgtgtcagctgtgcactgacggccagtctc

SEQ ID NO: 137 - DNA, 390 bp, Homo sapiens
  misc_feature (129)..(130): n includes a, c, g, or t, or contains no nucleotide
  misc_feature (143)..(143): n includes a, c, g, or t, or contains no nucleotide
  misc_feature (147)..(147): n includes a, c, g, or t, or contains no nucleotide
  misc_feature (186)..(203): n includes a, c, g, or t, or contains no nucleotide
aaattgtagcgtatgcaccattcattatgctaagacattttaaagtaattatgagaaacgctctactaatgatttgtttttatttgtatttttctgcttattagacaaatatatactcattttaaaaannaaaaaaaaaaaanaaantgagagtgctctctatcccttctcttctgggatcctgannnnnnnnnnnnnnnnnnatattctaccatattgccttttatttgcataaacccatttttcttttacaaaaacaggaacattctgttcacactactatgccacctgctttcactgatcagcatgtgttagacatgttgacatgtccaatacacacacatcttccttgccctggaaacaccatccaccttcctttctgcgtgtagc

SEQ ID NO: 138 - DNA, 514 bp, Homo sapiens
  misc_feature (75)..(75): n includes a, c, g, or t, or contains no nucleotide
  misc_feature (127)..(127): n includes a, c, g, or t, or contains no nucleotide
  misc_feature (320)..(352): n includes a, c, g, or t, or contains no nucleotide
  misc_feature (414)..(443): n includes a, c, g, or t, or contains no nucleotide
actcagcaaggcagaatggccacccctgccaaagtttgcttctcttttcaacagtgcctcaccctccctctaggnattaaagtgcttctgcccttccacgaactcctcctccatttcctttttgggnatttgtcaccatccttctattctctggtcttctatttttggtgttgttcaagtgaaggaagagatgttccctctaatttctctctagcccattataacctgctatcttggggcaacttttgatgtatgacatgtcacccttcccaacttggtctcctccaacatgctgtcttcatgtggagccctcaccacannnnnnnnnnnnnnnnnnnnnnnnnnnnnnnnngtcatctctgtacactacttatattcactgtgggttgggggagctaattttaagcatgttcnnnnnnnnnnnnnnnnnnnnnnnnnnnnnnctgttaaaatttatcaaaaagcaacttcactaggggttttcttaagggataaaggccttttacagaagcta

SEQ ID NO: 139 - DNA, 554 bp, Homo sapiens
  misc_feature (72)..(90): n includes a, c, g, or t, or contains no nucleotide
  misc_feature (176)..(458): n includes a, c, g, or t, or contains no nucleotide
gagtttgcaggcctgtgcttcaaagaactcttctagtctgctttctatagataatgaagaagaaatgaaatnnnnnnnnnnnnnnnnnnnttcctcatggattggtgtgtttcgtaacagcagtcatcatccatgggtgacaataaatggtttggctttcaaacatgagataaaannnnnnnnnnnnnnnnnnnnnnnnnnnnnnnnnnnnnnnnnnnnnnnnnnnnnnnnnnnnnnnnnnnnnnnnnnnnnnnnnnnnnnnnnnnnnnnnnnnnnnnnnnnnnnnnnnnnnnnnnnnnnnnnnnnnnnnnnnnnnnnnnnnnnnnnnnnnnnnnnnnnnnnnnnnnnnnnnnnnnnnnnnnnnnnnnnnnnnnnnnnnnnnnnnnnnnnnnnnnnnnnnnnnnnnnnnnnnnnnnnnnnnnnnnnnnnnnnnnnnnnnnnnnnnnnnnnnnnnnnnnaaattacttttccctctctatatagtttgatttaagcattagtcatttacaacaaatattaatattaaaatgcagaccgttatgattggaaaataa

SEQ ID NO: 140 - DNA, 442 bp, Homo sapiens
  misc_feature (279)..(279): n includes a, c, g, or t, or contains no nucleotide
  misc_feature (353)..(370): n includes a, c, g, or t, or contains no nucleotide
  misc_feature (398)..(413): n includes a, c, g, or t, or contains no nucleotide
cccgagaccatgtgaagaaaaccatcttgtgaggggctgcctggactggtctggcaggttgggcctggatggggaggctctagcatctctcataggtgcaacctgagagtgggggagctaagccatgaggtaggggcaggcaagagagaggattcagacgctctgggagccagttcctagtcctcaactccagccacctgccccagctcgacggcactgggccagttccccctctgctctgcagctcggtttccttttctagaatggaaatagtgaggnccaatgcccagggttggagggaggagggcgttcatagaagaacacacatgcgggcaccttcatcgtgtgtggcnnnnnnnnnnnnnnnnnnaaaagtcaactcatttgctggtaaaaannnnnnnnnnnnnnnncggccttcgtgaccctcacacgttcatgg

SEQ ID NO: 141 - DNA, 417 bp, Homo sapiens
  misc_feature (47)..(47): n includes a, c, g, or t, or contains no nucleotide
  misc_feature (52)..(52): n includes a, c, g, or t, or contains no nucleotide
  misc_feature (54)..(54): n includes a, c, g, or t, or contains no nucleotide
  misc_feature (56)..(56): n includes a, c, g, or t, or contains no nucleotide
  misc_feature (58)..(58): n includes a, c, g, or t, or contains no nucleotide
  misc_feature (60)..(63): n includes a, c, g, or t, or contains no nucleotide
  misc_feature (68)..(71): n includes a, c, g, or t, or contains no nucleotide
  misc_feature (73)..(73): n includes a, c, g, or t, or contains no nucleotide
  misc_feature (77)..(100): n includes a, c, g, or t, or contains no nucleotide
  misc_feature (102)..(104): n includes a, c, g, or t, or contains no nucleotide
atgtaagaaaccttaggatgagctcccttttctaaggtgtttttgtnttttntntntntnnnnttttnnnntntttnnnnnnnnnnnnnnnnnnnnnnnngnnnccatgttttggatgtgtgatgtttatatgggagaacaaaaagctgatgtatagccctgtatacagtgtagatactatttttgtaaaaacacaaggctaaattaatgaacaagaatactgaatatttcatcattaaaaatttcttgtatttcttgtgcattaatctgacgataatttccctgtatattatgttcatttagctgtttgtaatttttgttaattagatcaggttgtctgcatttgttggtgtaagtgaacatcatcacagttatcctgagttgagtttaagccaaatacatgcatagaaaagggtc

SEQ ID NO: 142 - DNA, 476 bp, Homo sapiens
  misc_feature (76)..(76): n includes a, c, g, or t, or contains no nucleotide
  misc_feature (79)..(81): n includes a, c, g, or t, or contains no nucleotide
  misc_feature (85)..(87): n includes a, c, g, or t, or contains no nucleotide
  misc_feature (89)..(94): n includes a, c, g, or t, or contains no nucleotide
  misc_feature (97)..(102): n includes a, c, g, or t, or contains no nucleotide
  misc_feature (104)..(104): n includes a, c, g, or t, or contains no nucleotide
  misc_feature (106)..(108): n includes a, c, g, or t, or contains no nucleotide
  misc_feature (110)..(113): n includes a, c, g, or t, or contains no nucleotide
  misc_feature (115)..(118): n includes a, c, g, or t, or contains no nucleotide
  misc_feature (120)..(121): n includes a, c, g, or t, or contains no nucleotide
  misc_feature (123)..(129): n includes a, c, g, or t, or contains no nucleotide
  misc_feature (131)..(132): n includes a, c, g, or t, or contains no nucleotide
  misc_feature (134)..(134): n includes a, c, g, or t, or contains no nucleotide
  misc_feature (136)..(137): n includes a, c, g, or t, or contains no nucleotide
  misc_feature (140)..(141): n includes a, c, g, or t, or contains no nucleotide
  misc_feature (144)..(147): n includes a, c, g, or t, or contains no nucleotide
  misc_feature (162)..(191): n includes a, c, g, or t, or contains no nucleotide
  misc_feature (333)..(348): n includes a, c, g, or t, or contains no nucleotide
agcaggcctggcaggctctacacagagaacagagggagctggttgctgtgctgagggagcctgagtgaggagaccnccnnncccnnnannnnnnggnnnnnnangnnnannnncnnnngnncnnnnnnncnngncnnggnnggnnnncctctgagaacggcnnnnnnnnnnnnnnnnnnnnnnnnnnnnnnggaatttgctggaggactaggccagagcaagcctcactgccactgtgcctttggggcacccttggggttggacatacaccccctttagattcctctgtttcttctacctggataattcttggccatgttctctcttctctannnnnnnnnnnnnnnngcccctccgcccccctcctgctggttccccagcccttttccctggccctggcttggagaatctgttttcaatctccactgattgcccccttgctggccagcccaggggcctttaccatgttctctcca

SEQ ID NO: 143 - DNA, 215 bp, Homo sapiens
tcataaagtgaaacccgtattagcaagtacgtggcaatgttcattccaatcagatgcagctttctcctccgtctggtctcctgtttgcaattgcttccctcatctcagtagggaaaaaattgagtgggagtactgagatgtgtgggtttttgccattggacaaagaatgaggttagaagactgcagcttggagtctctctaggttttcaactatt

SEQ ID NO: 144 - DNA, 105 bp, Homo sapiens
  misc_feature (52)..(52): n includes a, c, g, or t, or contains no nucleotide
  misc_feature (78)..(78): n includes a, c, g, or t, or contains no nucleotide
gcccggagctgctgctgctgcctccttcctccttcatgccctgcggggcggntgcaccagccagggtgtcagcacagngggctactcctagggataagcccccgg

SEQ ID NO: 145 - DNA, 369 bp, Homo sapiens
  misc_feature (93)..(107): n includes a, c, g, or t, or contains no nucleotide
ttcactctcgtgctaggggacctattcagatcctcaatagacagcccatggagggtagatctcgtgatggtggcctgcgttttggagaaatgnnnnnnnnnnnnnnnattgcccatggagcagcccagtttttaagggaaagattgtttgaggcatcagatccatatcaggttcatgtttgcaatctttgtggaataatggcgattgccaacaccaggacccatacatatgaatgcaggggctgccgcaataaaacccagatttctttggtgcgaatgccttacgcatgcaaactattgtttcaggaacttatgtctatgagtattgcaccgcgaatgatgagtgtttagctattttacaggagtcaac

SEQ ID NO: 146 - DNA, 525 bp, Homo sapiens
  misc_feature (125)..(141): n includes a, c, g, or t, or contains no nucleotide
  misc_feature (247)..(247): n includes a, c, g, or t, or contains no nucleotide
  misc_feature (265)..(287): n includes a, c, g, or t, or contains no nucleotide
cacgtatctcccatgcgccaagtggagcccccagccaagaagccagccacaccagcagaggatgacgaggatgatgacattgacctgtttggcagtgacaatgaggaggaggacaaggaggcggnnnnnnnnnnnnnnnnngcggctacggcagtacgcggagaagaaggccaagaagcctgcactggtggccaagtcctccatcctgctggatgtcaagccttgggatgatgagacggacatggcncagctggaggcctgtgtnnnnnnnnnnnnnnnnnnnnnnntggtctggggggcttccaagctggtgcccgtgggctacggtatccggaagctacagattcagtgtgtggtggaggacgacaaggtggggacagacttgctggaggaggagatcaccaagtttgaggagcacgtgcagagtgtcgatatcgcagctttcaacaagatctgaagcctgagtgtgtgtacgtgcgcgcgtgcgtgaggccctgccacgattaaagactgagaccggcaaaa

SEQ ID NO: 147 - DNA, 432 bp, Homo sapiens
  misc_feature (40)..(40): n includes a, c, g, or t, or contains no nucleotide
  misc_feature (77)..(77): n includes a, c, g, or t, or contains no nucleotide
  misc_feature (103)..(103): n includes a, c, g, or t, or contains no nucleotide
  misc_feature (382)..(387): n includes a, c, g, or t, or contains no nucleotide
  misc_feature (389)..(389): n includes a, c, g, or t, or contains no nucleotide
  misc_feature (391)..(397): n includes a, c, g, or t, or contains no nucleotide
tgtactagtctgtgaacaatgtcaaataaaagagaacgancaggtagtttggtggagctgagctagtgtacaatacnctagttgtaaaaaaaaaaaaaaaaangtgagccatcttttgttcatttaaaatggtgttttgaatttcgtatgcagaaaacgttttgttacattgcagattttaatgtatttaataaatgcaacatgcagattaagtgcagtgtatactgagtatttaaattaaaatgtacatttcataaatacagtttcaaaagaaagcatcattttgtgtatactaacacattaagtgtatgtcagaaattgatgtataaatatatattttaacattttctgaaattaaactgcagttttgttgaaaaaaaannnnnnanannnnnnnaaaatttgactagatttgtattttcacagttcaaa

SEQ ID NO: 148 - DNA, 275 bp, Homo sapiens
  misc_feature (43)..(43): n includes a, c, g, or t, or contains no nucleotide
  misc_feature (151)..(151): n includes a, c, g, or t, or contains no nucleotide
  misc_feature (153)..(153): n includes a, c, g, or t, or contains no nucleotide
gcacacactactactgatggcctttcgggggtccctgccccanccggagaggccggtgcacagggccccgccaggggctgggggcatcccggcttccacaatgcagctgctctgggcctcgggagaggagagaccccagtcccctgggctncncttcccgggcctcgtctgtctgggtcctttggtcaatgttgcacagtttttattgctcccatccctttttgtagtgggctgggttttaagttataaatgttaactgcctctgggtgaaaaag

SEQ ID NO: 149 - DNA, 107 bp, Homo sapiens
  misc_feature (73)..(73): n includes a, c, g, or t, or contains no nucleotide
ctaatgccaactctgtttcccgggtaggtgtttcactgcctgaatgaaatcctagatctctgtcacagttttngttcgctggtcagtcagaacctaggcccactgga

SEQ ID NO: 150 - DNA, 477 bp, Homo sapiens
  misc_feature (28)..(28): n includes a, c, g, or t, or contains no nucleotide
  misc_feature (106)..(133): n includes a, c, g, or t, or contains no nucleotide
  misc_feature (198)..(213): n includes a, c, g, or t, or contains no nucleotide
  misc_feature (371)..(375): n includes a, c, g, or t, or contains no nucleotide
  misc_feature (377)..(378): n includes a, c, g, or t, or contains no nucleotide
  misc_feature (380)..(380): n includes a, c, g, or t, or contains no nucleotide
  misc_feature (405)..(405): n includes a, c, g, or t, or contains no nucleotide
  misc_feature (411)..(411): n includes a, c, g, or t, or contains no nucleotide
acagttttgtcctgtatgctgatgtgtnccagaatttcatttaatgatagacggaaaatgtgtggttactgaaaactgtatatgatacagaatttcataagagccnnnnnnnnnnnnnnnnnnnnnnnnnnnnaaccactgctcatcagtttctgtagagacaaaaactctgtacatattttggaatctgaagaatcnnnnnnnnnnnnnnnnttacttaagtctgtgaaaaacatatttctttggaggaaaatgtatgcatttataagtgttccatggaatcagtttttattgtatcgatataattgtctctaagtgttgactgtcttcattgcaatatgaaattcattaaaatgtccatgttccataannnnnannanaaaagctttgtgttattgggagtcntattanttttatagtttttcatgttttgctttggtgaaacattgtgaatgactatataaacatcacgatgag

SEQ ID NO: 151 - DNA, 433 bp, Homo sapiens
  misc_feature (56)..(56): n includes a, c, g, or t, or contains no nucleotide
  misc_feature (58)..(58): n includes a, c, g, or t, or contains no nucleotide
  misc_feature (81)..(81): n includes a, c, g, or t, or contains no nucleotide
  misc_feature (87)..(87): n includes a, c, g, or t, or contains no nucleotide
  misc_feature (123)..(123): n includes a, c, g, or t, or contains no nucleotide
gcttgaatctcacctgtgattttttttttttaatgttgtttcatgacttgattttncncataagccaatgtatttgtaggntttacnggattttatttttagggagtgggtaatttcttcccntttttgattaagttggttcagctatggtgctattcagtaggtatcttcagtgtcaggtcccgtagctgaatgccattgttattataattattatttgtaatcacattgtaagcttgaatttgggcttgtacctgcatcttttgtattctgtacatctggttacttagactttgggagtccaatttggtttcagtcatgtatgtctactttgtagtttaagtagacttcatcaactatggtctattttgggtttgtagttttaatttagaattgtgttaaattgatgttttgcatttgacttcatttgaca

SEQ ID NO: 152 - DNA, 525 bp, Homo sapiens
gaatacttgtttctttagcactttgaagatagaaaaaccactttttaagtactaagtcatcatttgccttgaaagtttcctctgcattgggtttgaagtagtttagttatgtctttttctctgtatgtaagtagtataatttgttactttcaaatacccgtactttgaatgtaggtttttttgttgttgttatctataaaaattgagggaaatggttatgcaaaaaaatattttgctttggaccatatttcttaagcataaaaaaaatgctcagttttgcttgcattccttgagaatgtatttatctgaagatcaaaacaaacaatccagatgtataagtactaggcagaagccaattttaaaatttccttgaataatccatgaaaggaataattcaaatacagataaacagagttggcagtatattatagtgataattttgtattttcacaaaaaaaaagttaaactcttcttttctttttattataatgaccagcttttggtatttcattgttaccaagttct

SEQ ID NO: 153 - DNA, 577 bp, Homo sapiens
tgcaatgcagtgcttttagatggcttgatataccaaataacaatatagacaacattattatatgtgcttccccaagtttaaaggccctgcagaaatagtaaacatggtttaatttcccttcatttccccctcctttgctggatggggttttgggagctataggttgctaaggaggggagtcagattgtggtcaggtgcctcagtaaatcacagacccaggggccctgtggtccagggtgagagtcacaccacattacacatgtgcttccatacagtggtttctgaagcttttgcagggagagaagatggcttagtgtttagactgttagtagaagccatctggaagcttttctctttgcctttttttgtgatcctgccattaaggctatgtgcagtctgccctcctgctccagtggccttgattttaggccaggaatcttctgctccatgtggcttaagccttccagctgagtgaagctaggcaaatggagtgggggcaggcatctattcctgcccccatcatgccccacacccatcagtcaacactcatttgacaaatagagtccagctgcctctg

SEQ ID NO: 154 - DNA, 391 bp, Homo sapiens
acagcagctcttacagaaagtcctggcagccactgacctggatgccgaggaggaggtggtggctggggaatttggctccagatccagccaggcatctcggcgctttggcaccatgagttctatgtctggggccgacgacactgtgtacatggagtaccactcatcgcggagcaaggcgcccagcaaacatgtacacccgctcttcaagcgctttaggaaatgatgcttaggcagggtacttcgttcaagaccggcgcttggcacccttgttggaaagggattttcagcataacattttccttccacctctttgaccttccctccagcgttggccaaattgtgctgaggaagatgcatcaagggcttggctgtgccttcataggtcatctag

SEQ ID NO: 155 - DNA, 301 bp, Homo sapiens
ctacttctcagtctccagctgtaaaagcttcaattcctgcaacctcagcagttcagaatgttctgattaatccatcattaatcgggtccaaaaacattcttattaccactaatatgatgtcatcacaaaatactgccaatgaatcatcaaatgcattgaaaagaaaacgtgaagatgatgatgatgacgatgatgatgatgatgactatgataatctgtaatctagccttgctgaatgtaacatgtatacttggtcttgaattcattgtactgatattaaacatgcatgctggatgttttc

SEQ ID NO: 156 - DNA, 374 bp, Homo sapiens
  misc_feature (64)..(64): n includes a, c, g, or t, or contains no nucleotide
  misc_feature (263)..(263): n includes a, c, g, or t, or contains no nucleotide
  misc_feature (269)..(269): n includes a, c, g, or t, or contains no nucleotide
  misc_feature (320)..(320): n includes a, c, g, or t, or contains no nucleotide
  misc_feature (327)..(349): n includes a, c, g, or t, or contains no nucleotide
ctaactattcgtgtggctagaattggttggttggtcacttgacaagaaaaaccatacttacctnggccaaggctctgttcctgccttcgcaaattctcaaaagagtaaagtttatgaaaagaaagtggcaggcaaacacaactcttgactgccctcccaccctcctacctgttcagtactcatctgattcagaagcatcacttcttggataactagcactggaaaaatgaaatcatctgtgtaagtgaagggactcatttttnctttgntttcagcccatgtaaataaataatacagtattaacattttcgtgctgcttncccattnnnnnnnnnnnnnnnnnnnnnnntggctgcctctttgccttcctaggg

SEQ ID NO: 157 - DNA, 379 bp, Homo sapiens
  misc_feature (182)..(197): n includes a, c, g, or t, or contains no nucleotide
  misc_feature (266)..(266): n includes a, c, g, or t, or contains no nucleotide
  misc_feature (268)..(268): n includes a, c, g, or t, or contains no nucleotide
  misc_feature (273)..(273): n includes a, c, g, or t, or contains no nucleotide
tctggatcgttttatgcggttcttacagcacatcacctctttgcccccgacggctgtgacgcagccggagggaggcactagtcaccgacagcggccttgaagacagagcaaagcgcccacccaggtcccccgactgcctgtctccatgaggtactggtcccttccttttgttaacgtgatgnnnnnnnnnnnnnnnnacgtatctcttggtatgcatcttttatagacgctcttttctaagtggcgtgtgcatagcgtcctgcccntnccccntcgggggcctgtggtggctccccctctgcttctcggggtccagtgcattttgtttctgtatatgattctctgtggttttttttgaatccaaatctgtcctctgtag

SEQ ID NO: 158 - DNA, 470 bp, Homo sapiens
  misc_feature (26)..(26): n includes a, c, g, or t, or contains no nucleotide
  misc_feature (32)..(32): n includes a, c, g, or t, or contains no nucleotide
  misc_feature (35)..(35): n includes a, c, g, or t, or contains no nucleotide
  misc_feature (38)..(38): n includes a, c, g, or t, or contains no nucleotide
  misc_feature (41)..(41): n includes a, c, g, or t, or contains no nucleotide
  misc_feature (108)..(108): n includes a, c, g, or t, or contains no nucleotide
  misc_feature (232)..(246): n includes a, c, g, or t, or contains no nucleotide
cattgagcagctctgtcattcgtgancttaanggngcngtnactcagatgctccagaggaaatccgtgatgctcggcatccccatgttacccgccagagtcaggaggnccaacacaggattaactatgaggagagcatgatggtgcgtttgagcgtcagtaagcgagagaaaggacggcgaaaacgagcaaatgtcatgagctcacaacttcattcccttacacacttcagnnnnnnnnnnnnnnngacagggggaactgttcatcttgatgaggatcagaatcctattaagaagcggaagaagatacctcagaaaggtcggaagaaaaaaggttttcggaggcggcggtgattatgggtgtacatatttgtatattttttgtcatcctgagatacttctaatttcattgtatataggtggttttccctggaattcattaattgtttgctttggacatgtggaaagagcc

SEQ ID NO: 159 - DNA, 267 bp, Homo sapiens
  misc_feature (181)..(181): n includes a, c, g, or t, or contains no nucleotide
  misc_feature (229)..(229): n includes a, c, g, or t, or contains no nucleotide
attttcagtgtctgccactggatgatgttcttcacttcaggtgtttcctcagtcacatttgattgatccaagtcagttaattcgtctttgacagttcccagttgtgagatccgctactccacgtttgtcctcgtgcttcaggcagatctatcacttccactatgcctatcaaattcacgtntggcacgagaatcaaatccatctcctcggcccattccacgtccacggncccctcgacctcttccaagaccacacgacctcgaatag

SEQ ID NO: 160 - DNA, 471 bp, Homo sapiens
  misc_feature (33)..(33): n includes a, c, g, or t, or contains no nucleotide
  misc_feature (48)..(48): n includes a, c, g, or t, or contains no nucleotide
  misc_feature (60)..(86): n includes a, c, g, or t, or contains no nucleotide
  misc_feature (108)..(108): n includes a, c, g, or t, or contains no nucleotide
  misc_feature (111)..(111): n includes a, c, g, or t, or contains no nucleotide
  misc_feature (115)..(117): n includes a, c, g, or t, or contains no nucleotide
  misc_feature (122)..(122): n includes a, c, g, or t, or contains no nucleotide
  misc_feature (131)..(132): n includes a, c, g, or t, or contains no nucleotide
  misc_feature (137)..(137): n includes a, c, g, or t, or contains no nucleotide
  misc_feature (139)..(139): n includes a, c, g, or t, or contains no nucleotide
  misc_feature (141)..(142): n includes a, c, g, or t, or contains no nucleotide
  misc_feature (145)..(145): n includes a, c, g, or t, or contains no nucleotide
  misc_feature (148)..(149): n includes a, c, g, or t, or contains no nucleotide
  misc_feature (151)..(166): n includes a, c, g, or t, or contains no nucleotide
aaagtcaaccaatatgaaatgcctgactccagnaaaaggccctttctnggttactgtggnnnnnnnnnnnnnnnnnnnnnnnnnnngttccatatttggtgaagatgncancttnnnaaatntcagcattnngaagncnanntcnccnngnnnnnnnnnnnnnnnnttaccggccatataagaattcgtgcaaagagccagggaatggccttaagtcttggagataaaatcaacttgtcacagaagaaaactagtatataaaaataaacaaaaagtccttgaagctttacagttaatttaggtatgggcttactggactccaacatcttttgtactctttcatgcttatatagaatctgagttcatgctgaatacttttcagccaataatttatagcctttcccttaaatcaagattgagtttaaaattatagtttgtcttttgtcttaacagttctgaatgctgtcctca

SEQ ID NO: 161 - DNA, 430 bp, Homo sapiens
  misc_feature (162)..(162): n includes a, c, g, or t, or contains no nucleotide
ctgaagtctggctatggaaaatatcttggtataaattcagatggacttgttgttgggcgttcagatgcaattggaccaagagaacaatgggaaccagtctttcaaaatgggaaaatggctttgttggcctcaaatagctgctttattagatgcaatgaagcnggggacatagaagcaaaaagtaaaacagcaggagaagaagaaatgatcaagattagatcctgtgctgaaagagaaaccaagaaaaaagatgacattccagaagaagacaaaggaaatgtaaaacaatgtgaaatcaattatgtaaagaaatttcagagcttccaagaccacaaacttaaaataagtaaagaagacagtaaaattcttaaaaaggctcggaaagatggatttttgcatgagacgcttctggacaggagagccaaattga

SEQ ID NO: 162 - DNA, 523 bp, Homo sapiens
  misc_feature (26)..(26): n includes a, c, g, or t, or contains no nucleotide
  misc_feature (30)..(30): n includes a, c, g, or t, or contains no nucleotide
  misc_feature (38)..(55): n includes a, c, g, or t, or contains no nucleotide
  misc_feature (236)..(239): n includes a, c, g, or t, or contains no nucleotide
atggcggacacctggcccccgaggtncccncggccgcnnnnnnnnnnnnnnnnnngcctgttttaagttctggatgcatttctctggggtatttggggcttatttttaaaattttaatatgggttcttttttgtgtgatttaagacactttttggactcaacgttacatttttgaatgtagtaagtaaattaaccaaaaaagttacaacttcctaattttagtgacagctctgccnnnntgttagactcttactttttaaaatcttttctattttccctcgctggggcagtgccctcctacccccagggttgaggggaccaaggtggcacggtggtactgggggtgcggcagggacacccgaccacaccagagcgtgggagacggtgggccttgtcccctgcctgtgcctgcctgggagttttgtattcatcttttgtatagttgtggacatttaagacagtctttgggtacctattttcattgtaaaactatctgaaccattaaagtcgagcttttctaaag

SEQ ID NO: 163 - DNA, 151 bp, Homo sapiens
atagaacatatcagttgcaaagttcctaatgtgtatttttaaagcacatatctgaataaattgcctagatagaaaaaaaattatcacgagtaaaatttagtgttcaaaacattgagacactcttcacctattgtatgaccaaataaaggtt

SEQ ID NO: 164 - DNA, 344 bp, Homo sapiens
  misc_feature (282)..(305): n includes a, c, g, or t, or contains no nucleotide
aggatatctacctgaggctgttggtcaagttatacaggtttctggccagaagaaccaactccacattcaaccaggttgtgttgaagaggttgtttatgagtcgcaccaaccggccgcctctgtccctttcccggatgatccggaagatgaagcttcctggccgggaaaacaagacggccgtggttgtggggaccataactgatgatgtgcgggttcaggaggtacccaaactgaaggtatgtgcactgcgcgtgaccagccgggcccgcagccgcatcctcnnnnnnnnnnnnnnnnnnnnnnnnttcgaccagctggccctggactcccctaagggctgtggc

SEQ ID NO: 165 - DNA, 484 bp, Homo sapiens
  misc_feature (117)..(149): n includes a, c, g, or t, or contains no nucleotide
  misc_feature (350)..(373): n includes a, c, g, or t, or contains no nucleotide
tggtgatctggagctagcagcaaagtttgtcaatcagctgaagggggaatccagacgagtggcacaggactggctgaaggaagcccgaatgaccctagaaacgaaacagatagtggnnnnnnnnnnnnnnnnnnnnnnnnnnnnnnnnngaataggaaccactcaggtgcagccagagtgaggtttaggaagattttcataaagtcatatttcatgtcaaaggaaatcagcagtgatagatgaagggttcgcagcgagagtcccggacttgtctagaaatgagcaggtttacaagtactgttctaaatgttaacacctgttgcatttatattctttccatttgctatcannnnnnnnnnnnnnnnnnnnnnnntctttgcaacttgtgtaacattttctgttttttcaggttttactgatgaggcttgtgaggccaatcaaaataatgtttgtgatctctactactgttgattttgccctcgga

SEQ ID NO: 166 - DNA, 470 bp, Homo sapiens
  misc_feature (58)..(58): n includes a, c, g, or t, or contains no nucleotide
aagcttcgcaggttcctttggtggagctggaggccatgctcctggggtggccaggaanggcctgccagatatttgtgagaaatctgccattcgatttcacatggaagatgctaaaggacaaattcaacgagtgcggccacgtgctgtacgccgacatcaagatggagaatgggaagtccaaggggtgtggtgtggttaagttcgagtcgccagaggtggccgagagagcctgccggatgatgaatggcatgaagctgagtggccgagagattgacgttcgaattgatagaaacgcttaagcagttgccttttttaaacatcgatacgagacctctgaatttgtattttttcttgttaaccattttaatttgttggctggatgtataaagatgtttaaaaaattcagttgctttttggggtaatttgaattacttttttaatgactggggttccatttgactgtttgcatt

SEQ ID NO: 167 - DNA, 347 bp, Homo sapiens
  misc_feature (58)..(58): n includes a, c, g, or t, or contains no nucleotide
  misc_feature (126)..(126): n includes a, c, g, or t, or contains no nucleotide
  misc_feature (140)..(140): n includes a, c, g, or t, or contains no nucleotide
  misc_feature (148)..(148): n includes a, c, g, or t, or contains no nucleotide
attccaaccctgtctgatacccaggcccgtttctcacctgagcgcaccaccacctggncgtgtagaatctccaggaagcctggctgcagcttcccatttggttacgaggttggagaaaaagtcaangtcccctcctgggnctgtcttncatcatactccgcagtcagactgggctggtagtaagctgccggtggaacacaatcatttgccctgggtgtccttggtcctgcctggctctctgtagtggaggctccccttggcatcaccttctctggcccttaggatctccccatttggagacagagccatttggatattttccccttgaacttctccatgacctgaag

SEQ ID NO: 168 - DNA, 453 bp, Homo sapiens
  misc_feature (71)..(99): n includes a, c, g, or t, or contains no nucleotide
  misc_feature (104)..(104): n includes a, c, g, or t, or contains no nucleotide
  misc_feature (147)..(147): n includes a, c, g, or t, or contains no nucleotide
  misc_feature (170)..(189): n includes a, c, g, or t, or contains no nucleotide
  misc_feature (245)..(245): n includes a, c, g, or t, or contains no nucleotide
  misc_feature (356)..(370): n includes a, c, g, or t, or contains no nucleotide
ctgagtttcttagcattcgttaaaattaaggggtttgtttggaataatatatattttttatgcttttgtcnnnnnnnnnnnnnnnnnnnnnnnnnnnnnctttngattgttttttaaaagtttatttttacagaatatatttagtancctttcttaaggagtaactgaannnnnnnnnnnnnnnnnnnnttaaataaaagaacaggctcagtggtcttcctgtagaatggtttacatgcctgcangtgcagtagttgtgtctggaatcctagaattggcactttctgcctccttgctctaaatgtcacaaaaaattatacttccttaaagtaaatgtaatgatttcttcttttccnnnnnnnnnnnnnnnatagatatgttgtgtttgcttcatttttaatgatgacttcaagattgatgatgtgatccaataactgtggaggtagctttaac

SEQ ID NO: 169 - DNA, 361 bp, Homo sapiens
gaaccagcaggagttcgtcagagctctggcagccttcctcaaaaagtccgggaagctgaaagtccccgaatgggtggataccgtcaagctggccaagcacaaagagcttgctccctacgatgagaactggttctacacgcgagctgcttccacagcgcggcacctgtacctccggggtggcgctggggttggctccatgaccaagatctatgggggacgtcagagaaacggcgtcatgcccagccacttcagccgaggctccaagagtgtggcccgccgggtcctccaagccctggaggggctgaaaatggtggaaaaggaccaagatggcggccgcaaactgacacctcagggacaaaga

SEQ ID NO: 170 - DNA, 482 bp, Homo sapiens
gtcaggtctaccttaacatctcttgatttgagccactcccactgtcatcagctttcacctggattatcgtgacagcctcctactgcttctctatcatgtggccagagctatcttcctaaaatgcattgcatagttgatcaagtcactctctggcctaaaaccttccttggctccctgctgccctcaggataaagtctggacccctcagcatggcttgtgagactcatggtgtccttgtccctgctcacctctctggtctcatcacttgccttcttgcattctgggtcccagcctcctgtatccagagatgcagtggctctccattgccactctgattcctcctttcttttggtcacagagaaagggtactttctctgtcaaatctcaacttagacttgacttcctccaaggagctttggctatactctctcctcccgacccccaccctggcatactacacagatcactctgggctcacttgc

SEQ ID NO: 171 - DNA, 349 bp, Homo sapiens
cgaccggacgggaagttaagatatgccaacaacagcaattacaagaatgatgtcatgatcagaaaagaggcttatgtacataaaagcgtgatggaggaactgaagagaataattgacgacagtgaaattaccaaagaggatgatgcattgtggcctcctcctgaccgagtgggccggcaggagcttgaaatcgtcattggagatgaacacatttcttttacaacatcaaaaattggttcccttattgatgtcaatcaatccaaggatccagaaggcttacgagtattttattatcttgtccaggacctgaagtgtttggtcttcagtcttattggattacacttcaaga

SEQ ID NO: 172 - DNA, 320 bp, Homo sapiens
actgtcattagtttacaaagttagcactttgaagtaaaactaaatgaggaaggaagtaatgttacctatccttgataccatgaccatttattagatgttttgctatataaattaccgagagaatagtttgtcatccacttagtgtgttagctggtggggtacaatataacctctcatctcaggctattttaaaaaaacaatatttgcttctataacaaaaggaaacaaatctaagaatcattcctgtactacagaagggttaaggcaaaggtagccttttgggctttttaatgaatatgacccctatagaaaagtcaaga

SEQ ID NO: 173 - DNA, 149 bp, Homo sapiens
ttcgctaaatctgactcccttcgtctagtctctgtttggcagcccccgcgccccagagcaggtgtttggggcgggtagggggtgttttggtttggtttttggatcttctaaaggagtcagtatctattgggaaacaacccctaggcaag

SEQ ID NO: 174 - DNA, 498 bp, Homo sapiens
  misc_feature (127)..(127): n includes a, c, g, or t, or contains no nucleotide
  misc_feature (143)..(143): n includes a, c, g, or t, or contains no nucleotide
  misc_feature (150)..(150): n includes a, c, g, or t, or contains no nucleotide
  misc_feature (177)..(177): n includes a, c, g, or t, or contains no nucleotide
  misc_feature (228)..(228): n includes a, c, g, or t, or contains no nucleotide
actaatacacagcttgagcgtttccatgtgctaatgttgcacacttactaaaaaactttggaaatggaaaataatgtattagtgcaacagttgatgtgcttctttgggcaaagatatagttttgttnccacaatttgtacttnaaaagcngaaagaacattgaaaacatagacttanctggctgtagcaatgctggcctgttaactgataactagaacttaggttcancgtttatgtaaagtgtgtaaaacctagtagagcttgcatagtcggcactcagtaaatgtttggttccttttgccccttggtaagtttattttaccatcctcccacctgccattctgactttattaaatcaacatgtggaccagagtgttaatgagatgttattgcagaagagattgagaaaattggtatatcatgcagataacatacaaaatctttttgtaacgtaaaaaatgcagttttattattgcttgtgcctcaactgtttaagtg

SEQ ID NO: 175 - DNA, 458 bp, Homo sapiens
  misc_feature (60)..(74): n includes a, c, g, or t, or contains no nucleotide
  misc_feature (199)..(200): n includes a, c, g, or t, or contains no nucleotide
  misc_feature (280)..(298): n includes a, c, g, or t, or contains no nucleotide
atgtggtaaatacctgccatgatgctggaatcagcaagaaagccattaaactgagaccannnnnnnnnnnnnnnggatagaaccttggacagcagggctgcctgacaccaccaaccctctctgaagtggaagtggactgacatgctcttctgacatcagactcaaggcgggacaagttgcaaagtgtgcagctgtaacnnctcacgccaaaatggctgatggggaggctgctgctttcaggggcccgtgcttgtaaaataaccttccaggaagaggcacnnnnnnnnnnnnnnnnnnnggaggaatatgccttctccttggttgttccacagagttttaggaaaatctgttagggatgggtagatgtcaaactgccttacgcagtcatactgatctttagccatcagattgatcttcttcacaccaagctctgtttacattccgagaggtgtcatgaa

SEQ ID NO: 176 - DNA, 505 bp, Homo sapiens
  misc_feature (201)..(222): n includes a, c, g, or t, or contains no nucleotide
  misc_feature (265)..(282): n includes a, c, g, or t, or contains no nucleotide
  misc_feature (335)..(340): n includes a, c, g, or t, or contains no nucleotide
  misc_feature (342)..(346): n includes a, c, g, or t, or contains no nucleotide
  misc_feature (348)..(348): n includes a, c, g, or t, or contains no nucleotide
  misc_feature (351)..(351): n includes a, c, g, or t, or contains no nucleotide
  misc_feature (454)..(462): n includes a, c, g, or t, or contains no nucleotide
  misc_feature (464)..(464): n includes a, c, g, or t, or contains no nucleotide
  misc_feature (466)..(472): n includes a, c, g, or t, or contains no nucleotide
ttccatccagccaagtttatgtggcctattgtctcaggactctcatcactcagaagcctgcctctgatttaccctacagcttcaggcccagctgccccccagtctttgggtggtgctgttcttttctggtggatttaatgctgactcactggtacaaacagctgttgaagctcagagctggaggtgagcttctgaggcctnnnnnnnnnnnnnnnnnnnnnnttggtgcctgcagcctcttgtctggttgaggacttggggcagnnnnnnnnnnnnnnnnnncttgaatttccctttacaaggggaagaaataaaggaaaggagttgctgccgannnnnnannnnntnganattgatgggagttggaactgttctcagtcttgatttgctttattcagttttctagcagcttttaatagtcccctcttccccactaaatggatcttgtttgcannnnnnnnnanannnnnnnctgtttaaggatcataggattcctttcccccaa

SEQ ID NO: 177 - DNA, 406 bp, Homo sapiens
  misc_feature (221)..(242): n includes a, c, g, or t, or contains no nucleotide
cttaacaactccaggagccctgtcagctgccctcctccacctaaaccccttcgactcttctgctttgacaaagaaaatgacattggggaggggaggtgctccgcctcccagcttttctcaaaatagtcctatagatactggtaatctggaaatgaagaagtaattctgtctctgcacctacttttgcagaatgttcaaggaagtattctgtgttagtattnnnnnnnnnnnnnnnnnnnnnnaggttttgtactcagcacatcatacaaaccacattacttctgtcacttcagggcatcgggactggctggcgcccttgttatgtgctattttaatcagtgtaacattggtcaagttgttacccatgtatgctgtgtttatcatgtgtatatcgtccagaaagtat

SEQ ID NO: 178 - DNA, 489 bp, Homo sapiens
  misc_feature (92)..(92): n includes a, c, g, or t, or contains no nucleotide
  misc_feature (201)..(201): n includes a, c, g, or t, or contains no nucleotide
  misc_feature (336)..(362): n includes a, c, g, or t, or contains no nucleotide
  misc_feature (428)..(442): n includes a, c, g, or t, or contains no nucleotide
ctctagtcatagcactttttcagagcatcttaggcaccattgcaacccaaccagggaagctgcatccctgtggtggtccttaggcaccagtntttgttaaacaaaaccctttggcactattgtggttttctattctctgtctgaactctattcaaaagtatctttgctctcttgggccttttcttttactgttttgttttntttttttctaatcctgctttcatactagccagtgtggggaaaaggtacaatatgtcaaagagatgagagagtgttatttcttgggcaattttctattagtgtttcttattttggccagttcttttatttatgtcnnnnnnnnnnnnnnnnnnnnnnnnnnngctacccttctggccttttagcgtctttgaaggagaccagacatgagtgaatacctaggagagtgnnnnnnnnnnnnnnnaaaattggcagagaccaagccctgctgcagattcgtcaggccaggtg

SEQ ID NO: 179 - DNA, 576 bp, Homo sapiens
  misc_feature (52)..(52): n includes a, c, g, or t, or contains no nucleotide
  misc_feature (60)..(66): n includes a, c, g, or t, or contains no nucleotide
  misc_feature (78)..(95): n includes a, c, g, or t, or contains no nucleotide
  misc_feature (132)..(147): n includes a, c, g, or t, or contains no nucleotide
  misc_feature (298)..(342): n includes a, c, g, or t, or contains no nucleotide
  misc_feature (381)..(381): n includes a, c, g, or t, or contains no nucleotide
  misc_feature (405)..(405): n includes a, c, g, or t, or contains no nucleotide
  misc_feature (415)..(415): n includes a, c, g, or t, or contains no nucleotide
  misc_feature (419)..(419): n includes a, c, g, or t, or contains no nucleotide
  misc_feature (424)..(424): n includes a, c, g, or t, or contains no nucleotide
  misc_feature (443)..(443): n includes a, c, g, or t, or contains no nucleotide
  misc_feature (458)..(458): n includes a, c, g, or t, or contains no nucleotide
  misc_feature (461)..(461): n includes a, c, g, or t, or contains no nucleotide
  misc_feature (468)..(468): n includes a, c, g, or t, or contains no nucleotide
  misc_feature (477)..(477): n includes a, c, g, or t, or contains no nucleotide
  misc_feature (480)..(480): n includes a, c, g, or t, or contains no nucleotide
  misc_feature (486)..(486): n includes a, c, g, or t, or contains no nucleotide
  misc_feature (491)..(491): n includes a, c, g, or t, or contains no nucleotide
  misc_feature (496)..(498): n includes a, c, g, or t, or contains no nucleotide
aaatgacaaacatgatactgctgcttgtcaaataaaaaaaaaataaagaaanagaatgcnnnnnnnatgtggatggannnnnnnnnnnnnnnnnnaatatattgactcaaagcagctaatgcatctttagtnnnnnnnnnnnnnnnntggtttaattcacttgtactcctatttaaatcctacatgaaaaatgtctagattattgttcttgactgcataggactgcattcagcataaagaatgctttatttttatggattagatatattggatctaaacattttgaatcttgaagatnnnnnnnnnnnnnnnnnnnnnnnnnnnnnnnnnnnnnnnnnnnnncgcagagtgtgagcaggatgcttggtgacctcaagtctnggcacagagagagcttttcattcnaaagttgtcnttcntcggntgcataatccattaattcnagcatagactagtanccnagctctngtggccttnccngagtcntaggnaatcnnngataccaacatattccttctatatgcctcccctacctgttacgcttacaaccctcctccaacagtttagatactagag

SEQ ID NO: 180 - DNA, 195 bp, Homo sapiens
acatttagtgtttcaagagattcacttaattgcctttttgcccacgtatattatgtagtctatttgcaactgttcttaaaaaaatgacattaaaagaatagtttatgtagagaaacattagtggatgttaattgtctccccacctatatttatgggtgttagcgcaactgctttgctagttgcaaagctgtatta

SEQ ID NO: 181 - DNA, 481 bp, Homo sapiens
gtatgcggctgcaccgcggggcccccgtcaacatctcctcgtccgacctcacaggccgacaagatacctctcgcatgtccacctcacagattcctggtcgggtggcttccagtggtcttcagtctgtcgtgcaccgatgagaactctccttattgctgtgaagggcagacaatgcatggctgatctactctgttaccaatggctttacctagtgacacgtcccccggtctaggatcgaaatgttaacaccgggagctctccaggccactcacccagcgacgctcgtgggggaaacatactaaacggacagactccaagagctgccaccgctggggctgcactgcggccccccacgtgaactcggttgtaacggggctgggaagaaaagcagagagagaattgcagagaatcagactccttttccagggcctcagctccctccagtggtggccgccctgtactccctgacgattccactgta

SEQ ID NO: 182 - DNA, 441 bp, Homo sapiens
  misc_feature (26)..(40): n includes a, c, g, or t, or contains no nucleotide
  misc_feature (313)..(332): n includes a, c, g, or t, or contains no nucleotide
ttctcttcaaaggtccttaggtgtannnnnnnnnnnnnnnaggcaaggtgcaggcaggatttgaaggcaaaagtcaattcagctcttgagaaaaggtgtctttccagcctgaatttttcagattgactagaccaagcagaatctctcaacctgatcttagtatttcctagaaagcacttgacattgtgtgaggtctcacctgaaggaacttggtggtgacatttgggagggtggagggaggcagtgtccttcctgacagcacttgcctccatggatcttctgtacacagaactcttatctaggatgtggttcnnnnnnnnnnnnnnnnnnnnatgtgcgtgtctgttagaataggctctctacccagctagaacaccttccagacacttgctggacagctatcttccacatacttcccagtttacatttggtcttaatgat

SEQ ID NO: 183 - DNA, 84 bp, Homo sapiens
cgtgggctcgattcctcagggccacgttaccacagacctgtttgtttcttatgctgttgttcgtggagtctcatgggattgtct

SEQ ID NO: 184 - DNA, 451 bp, Homo sapiens
tttgcatttaatggacacagtcttagaaacattacagaataaaaaagcccagacatcttcagtcctttggtgattaaatgcacattagcaaatctatgtcttgtcctgattcactgtcataaagcatgagcagaggctagaagtatcatctggattgttgtgaaacgtttaaaagcagtggcccctccctgcttttattcatttcccccatcctggtttaagtataaagcactgtgaatgaaggtagttgtcaggttagctgcaggggtgtgggtgtttttattttattttattttattttatttttgaggggggaggtagtttaattttatgggctcctttcccccttttttggtgatctaattgcattggttaaaagcagctaaccaggtctttagaatatgctctagccaagtctaactttatttagacgctgtagatggacaagctt

SEQ ID NO: 185 - DNA, 284 bp, Homo sapiens
gcgataacgatgacatcgaggtggagagcgacgaagagcaaccgaggtttcaatctgcggctgacaaacgggctcatcataatgcactggaacgaaaacgtagggaccacatcaaagacagctttcacagtttgcgggactcagtcccatcactccaaggagagaaggcatcccgggcccaaatcctagacaaagccacagaatatatccagtatatgcgaaggaaaaaccacacacaccagcaagatattgacgacctcaagcggcagaatgctcttctggag

SEQ ID NO: 186 - DNA, 444 bp, Homo sapiens
agttgcaattgtgtatctaagacctccaagcttgtttttaaaacaaaacaaaaaacctttctctattatctcagaaatataaatactgttatttttaatattaagaaattcaatataacttttaacacacactgtggaacattaaaccgtataaaaatgtagttataactatttttaattccaaggtgttgtttgcttttttcttttaaatattttcttaatattttgtcagattaactagatgaataaataaatctagtattaaccgcattatgaattaaataattttgatttaatgaaagggataatatgatttccagtgtttactgtagtgtatcttgtacagataacatgtatttttaaaggaaaaaaaacggaattgaagctattttttcttgcatttctaattgacctgagggacattccgtttgaaatgtactgaag

SEQ ID NO: 187 - DNA, 505 bp, Homo sapiens
  misc_feature (157)..(157): n includes a, c, g, or t, or contains no nucleotide
taatttcagaaccaattgcgagtcatgtagtgtggtagaattaaaggaggacacgagcctgcttctgttacctccaagtggtaacaggactgatgccgaaatgtcaccaggtcctttcagtcttcacagtggagaactcttggccaaaggtttttgnggggaggaggaggaaaccagctttctggttaaggttaacaccagatggtgcccctcattggtgtccttttaaaaaatatttactgtagtccaataagatagcagctgtacaaaatgactaaaatagattgtaggatcatatggcgtatatcttggttcatcttcaaaatcagagactgagctttgaaactagtggtttttaatcaaagttggctttataggaggagtataatgtatgcactactgttttaaaagaattagtgtgagtgtgtttttgtatgaatgagcccattcatggtaagtcttaagcttgttggaaataatgtacccatgtagactagcaaaatag

SEQ ID NO: 188 - DNA, 565 bp, Homo sapiens
gttaagctctgctattaggccagcaagcggggatgtccctgggagggacatgcttagcagtccccttccctccaagaaggatttggtccgtcataacccaaggtaccatcctaggctgacacctaactcttctttcatttcttctacaactcatacactcgtatgatacttcgacactgttcttagctcaatgagcatgtttagactttaacataagctatttttctaactacaaaggtttaaatgaacaagagaagcattctcattggaaatttagcattgtagtgctttgagagagaaaggactcctgaaaaaaaacctgagatttattaaagaaaaaaatgtattttatgttatatataaatatattattacttgtaaatataaagacgttttataagcatcattatttatgtattgtgcaatgtgtataaacaagaaaaataaagaaaagatgcactttgctttaatataaatgcaaataacaaatgccaaattaaaaaagataaacacaagattggtgttttttcctatgggtgttatcacctagctgaatgtttttcta

SEQ ID NO: 189 - DNA, 301 bp, Homo sapiens
  misc_feature (151)..(195): n includes a, c, g, or t, or contains no nucleotide
  misc_feature (231)..(231): n includes a, c, g, or t, or contains no nucleotide
acatgtcagcccttgtttcatgtttcctaaaagcagaatatttgcaacatttgttttgtataggaattatttgtgccacctgctgtggactgttttctttgcctagtgactagtgacctgtgttgtctaaacatgagtttcagccctttgnnnnnnnnnnnnnnnnnnnnnnnnnnnnnnnnnnnnnnnnnnnnnttagctttattaaactgacgttctcttcaaaacttnttgctgaatggtactcagatgtgcattcacatacagatgtgttttgaagtgggtgtaccttgctttacct

SEQ ID NO: 190 - DNA, 564 bp, Homo sapiens
  misc_feature (358)..(371): n includes a, c, g, or t, or contains no nucleotide
tcactaaactgtaaacggtaaagagatttttacttttggtctccgtgagtcgcatctctactaaggtttacacaggaattccacctgaagacttgtgttaaagttctacagcgcgcactgttaactgaacgtctttttcttcagcctatacgcggatccttgttttgagctctcagaatcactcagacaacattttgtaactgctgctgttgctttctacatacaccttataaagtgacatttcaaaagaaataaggtgccacagttttaaaccagaaggtggcactctgtggctccttgtagtattatagctatactgggaaagcatagatacagcaataaagtacagtaattttannnnnnnnnnnnnnttacatctaaattacaacccttaattgccacgtgtgcacttactactctccagtatgtcttattactctccagtatgtcacgcatctttaacttttcacgtcctatgtttgctttctcccatttttaagagatggtaagttaactggaattgatttactgaatgaaattaaatgcagatatccctgtttttga

SEQ ID NO: 191 - DNA, 571 bp, Homo sapiens
tttacatgaaggcgcattatgttgtcgtgtgtttcagtttcacattaaactgaaccttttactaattgtgagctaaagagatatatatatatatgtgtgtgtatatatatatatctacatgtctttctgtagcctctgcatactactggctgtcatcacaccagcgtacagtagctaaatttttggtgcaattattagcaaatgataatgttcccttttgaacttttacattttggcatgacatttcagagtattgtgggaccatgagacaaaattaagtacgatcacattctttatttctcattttaaagaaatgatgttggtttaccttttcctagttgaagatagtaattaggtttctaagctgtatactgtgtttattggtggcagtgacacccaaagatagaggcaatggatagaaatttttaaactggaaagaaaacctgaattacactacattttcgaagtctcttgtaattatttgggatatcaacaaaatttgattcgtctgtctaatcccttgctagtattttaaatatgtctttaacacattgtatcctttaattcttca

SEQ ID NO: 192 - DNA, 392 bp, Homo sapiens
  misc_feature (116)..(116): n includes a, c, g, or t, or contains no nucleotide
  misc_feature (343)..(346): n includes a, c, g, or t, or contains no nucleotide
  misc_feature (348)..(352): n includes a, c, g, or t, or contains no nucleotide
  misc_feature (354)..(354): n includes a, c, g, or t, or contains no nucleotide
  misc_feature (358)..(365): n includes a, c, g, or t, or contains no nucleotide
  misc_feature (367)..(367): n includes a, c, g, or t, or contains no nucleotide
gcctaccaatacttggtgtaaagaagaatccctcatccccactgtatacaactttgggtgttattaccaaaggtactgtcattgaagtaaatgtgagcgaattgggccttgtgacncaaggaggcaaagttatttggggaaaatatgcccaggttaccaacaatcctgaaaatgatggatgtataaatgcagtcttactggtttgacagcaatttcatatataattattgaggactacacaccaattgaagaaactgccattactgtgatgtttctgaatactaccaaacagccatacatgtctgcaatgaagagatttattaaattgtaaacattaaagtgnnnnannnnnanaaannnnnnnnantttgaaatacgctttgaccccatgt

SEQ ID NO: 193 - DNA, 534 bp, Homo sapiens
  misc_feature (129)..(130): n includes a, c, g, or t, or contains no nucleotide
  misc_feature (132)..(146): n includes a, c, g, or t, or contains no nucleotide
  misc_feature (472)..(472): n includes a, c, g, or t, or contains no nucleotide
  misc_feature (484)..(484): n includes a, c, g, or t, or contains no nucleotide
  misc_feature (491)..(492): n includes a, c, g, or t, or contains no nucleotide
  misc_feature (494)..(495): n includes a, c, g, or t, or contains no nucleotide
  misc_feature (498)..(499): n includes a, c, g, or t, or contains no nucleotide
  misc_feature (507)..(507): n includes a, c, g, or t, or contains no nucleotide
agttaccagatgtatgctactcatggtgggtcctggcttccctaaagataattggaagacttcattggattgatagagagaaactgcgtaatttcattttagcatgtcaagatgaagaaacgggggganntnnnnnnnnnnnnnnngagatatggtggatccttttcataccttatttggaattgctggattgtcacttttgggagaagaacagattaaacctgttaatcctgtcttttgcatgcctgaagaagtgcttcagagagtgaatgttcagcctgagctagtgagctagattcattgaattgaaagttgcatagtatagttttgccattttaacatttctgtatttgaagtgcttatcgaatctaaaagtgactactgttaatattttgtatattgtgttaaattaattttaataaattatataattatacatattgtaaaataaagaccggtattttattttctnctttttaaaaanaaaaaannannaannacctggtngggatccgctccagcaggatggcactc

SEQ ID NO: 194 - DNA, 308 bp, Homo sapiens
  misc_feature (244)..(259): n includes a, c, g, or t, or contains no nucleotide
  misc_feature (261)..(261): n includes a, c, g, or t, or contains no nucleotide
  misc_feature (263)..(282): n includes a, c, g, or t, or contains no nucleotide
cagacggcttagtctggggctcatctaaactagttccagtgggatacggaattaagaaacttcaaatacagtgtgtagttgaagatgataaagttggaacagatatgctggaggagcagatcactgcttttgaggactatgtgcagtccatggatgtggctgctttcaacaagatctaaaatccatcctggatcatggcatttaaataaaagattgaaagattaaaaaaaaaaaaaaaaaaaannnnnnnnnnnnnnnnanannnnnnnnnnnnnnnnnnnngaggggccgtaccatcgcctatagta

SEQ ID NO: 195 - DNA, 502 bp, Homo sapiens
atttttggtgaacctgacttgtggcagatggtaaggaatattataaaacatttggatgagaacaatcagggcgaactgcatttttctgttacactggtaatcatttgaaaattgatttacctcagtgtttaacagttttttgttttgttttgttttttaaataataactaattgtcgagcactgatagagatgcagattttggtggggggaggtggtgggggagataatcacttcaccaactgcagtgcatttgtgtgtttttaaccctcagagaactctgcattttagggtacttgaggctgacttaactaaaagttttaaagtaaccttttttccattgtaaatatttctgtaaatactaccaattggaaattagaacagtagagtacttttctgaatccaatcctatttttattttatacagtatttctcagctgtgatctttggagcaaaagccaacggcaggaaaaaatagtttgtaccagtttcatgaagtatgtc

SEQ ID NO: 196 - DNA, 348 bp, Homo sapiens
  misc_feature (197)..(200): n includes a, c, g, or t, or contains no nucleotide
  misc_feature (223)..(255): n includes a, c, g, or t, or contains no nucleotide
ctaaaccatggcacttgatgtgatgtggcaggagggcagtggtggagctggacctgcctgctgcagtcacgtgtaaacaggattattattagtgttttatgcatgtaatggactatgcacacttttaattttgtcagattcacacatgccactatgagctttcagactccagctgtgaagagactctgtttgcttgnnnntgtttgtttgcagtctctctctnnnnnnnnnnnnnnnnnnnnnnnnnnnnnnnnnttgtggaggccgttggttccgcccactcattccttctcgtgcactgctttctccttcacagctaagatgccatgtgcaggtggattccatgcc

SEQ ID NO: 197 - DNA, 411 bp, Homo sapiens
  misc_feature (102)..(119): n includes a, c, g, or t, or contains no nucleotide
  misc_feature (249)..(249): n includes a, c, g, or t, or contains no nucleotide
gtcctttctggttggtgttgactgtgtttcagcatcactctaccctcccatgtccttagcattgctgtgcgtgtttccaggcacttaggacacccttccccnnnnnnnnnnnnnnnnnnacagttcaaatgactctccttttttgttcgttagtaacaatcttcatttgacaccttaatacatttctgactgttcttaaaacagtggggatgcctatattttccttgagtttttgtgactgactttggnctatatatacctttctggggttttgtttgttttttatttttattttgattaccgagggtatttggggtggggttgttttttgagatgtgtaattcttttatggagtttttaaaaagaattttcatattgtttttctaacatggcttcattaaacgtttaagt

SEQ ID NO: 198 - DNA, 447 bp, Homo sapiens
tgaccacaagccacaaggaaagaagacgaagtttgaatagcttctgtccctctgctttcccttttccatttgaaagaaaggactctggggtttttactgttacctgatcaatgacagagccttctgaggacattccaagacagtatacagtcctgtggtctccttggaaatccgtctagttaacatttcaagggcaataccgtgttggttttgactggatattcatataaactttttaaagagttgagtgatagagctaacccttatctgtaagttttgaatttatattgtttcatcccatgtacaaaaccattttttcctacaaatagtttgggttttgttgttgtttcttttttttgttttgtttttgttttttttttttttgcgttcgtggggttgtaaaagaaaagaaagcagaatgttttatcatggtttttgcttcagcgg

SEQ ID NO: 199 - DNA, 445 bp, Homo sapiens
  misc_feature (164)..(164): n includes a, c, g, or t, or contains no nucleotide
  misc_feature (168)..(168): n includes a, c, g, or t, or contains no nucleotide
  misc_feature (174)..(174): n includes a, c, g, or t, or contains no nucleotide
  misc_feature (188)..(188): n includes a, c, g, or t, or contains no nucleotide
  misc_feature (191)..(211): n includes a, c, g, or t, or contains no nucleotide
  misc_feature (214)..(214): n includes a, c, g, or t, or contains no nucleotide
  misc_feature (391)..(391): n includes a, c, g, or t, or contains no nucleotide
  misc_feature (393)..(394): n includes a, c, g, or t, or contains no nucleotide
cccttggtgctgtgtggtcccagtggaaggaggggaagattttggaaacctggtagccaccagtaaggtgattctctgccctgttggggcctaaatttgggggcttttgggcaacctctccgtgtactgcgtctgtccacactcgattgggccccaggtgtgtnatgnaggcgnctctggtaaggtgnctnnnnnnnnnnnnnnnnnnnnntcnagtaacgaggcttttgatgtgttgagctggaggtgagtggaccgggggctgtgttttaagctgcttccttggcatttggcatcactgccttctgttcccgggggagcatggatcttttgtcctcactgctttctaatggggagggctgagggctccctgtccccacagcaggtatgntnngctctgccccagccccacacttgctctgaaaaccaagtgtcagagcccctt

SEQ ID NO: 200 - DNA, 397 bp, Homo sapiens
  misc_feature (33)..(113): n includes a, c, g, or t, or contains no nucleotide
tttttggtgccctgaagggagctgtggatggannnnnnnnnnnnnnnnnnnnnnnnnnnnnnnnnnnnnnnnnnnnnnnnnnnnnnnnnnnnnnnnnnnnnnnnnnnnnnnnnaagcacatcatgggccagaatgttgcagattacatgcgctacttaatggaagaagatgaagatgcttacaagaaacagttctctcaatacataaagaacagcgtaactccagacatgatggaggagatgtataagaaagctcatgctgctatacgagagaatccagtctatgaaaagaagcccaagaaagaagttaaaaagaagaggtggaaccgtcccaaaatgtcccttgctcagaagaaggatcgggtagctcaaaagaaggcaagcttcctcagagctca

SEQ ID NO: 201 - DNA, 425 bp, Homo sapiens
  misc_feature (30)..(51): n includes a, c, g, or t, or contains no nucleotide
  misc_feature (120)..(120): n includes a, c, g, or t, or contains no nucleotide
gctccattttacttgtttgatgaaattgannnnnnnnnnnnnnnnnnnnnncagaaaggctgtgtcagatatgattatggaacttgctgtacatgctcagtttattacaactacttttanggcctgaactgcttgagtcagctgacaaattctatggtgtaaagttcagaaataaggttagtcatattgatgtgatcacagcagagatggccaaagactttgtagaagatgataccacacatggttaattggaaaatactacctactggtttgggagatgtatatagtaatatgattctcatacccaggaactgtaaatttaaacctaaatatttggccaatagttttcagacttaaagcatcatagtccttttatatttgtctttgtattttataagatactctgtaatgtcatgtttgtactg

SEQ ID NO: 202 - DNA, 560 bp, Homo sapiens
  misc_feature (50)..(50): n includes a, c, g, or t, or contains no nucleotide
  misc_feature (54)..(54): n includes a, c, g, or t, or contains no nucleotide
  misc_feature (81)..(81): n includes a, c, g, or t, or contains no nucleotide
  misc_feature (89)..(89): n includes a, c, g, or t, or contains no nucleotide
  misc_feature (113)..(113): n includes a, c, g, or t, or contains no nucleotide
  misc_feature (126)..(126): n includes a, c, g, or t, or contains no nucleotide
  misc_feature (226)..(230): n includes a, c, g, or t, or contains no nucleotide
  misc_feature (485)..(487): n includes a, c, g, or t, or contains no nucleotide
  misc_feature (498)..(498): n includes a, c, g, or t, or contains no nucleotide
ctttctgaaggagttattctgctaaaaatggtcttagttgtctgaaaagnccangctcttgaacctcttcacaacagtatncaacactnggcttctcccggttcattttatgncgtgcgagaagtncagtggtaactgctgcagggcttaatacattagtggtaactggtttaaaaaacaaagactgtaagcctgtgtgtgccactgtttgcttcaacagtatatnnnnnctaataagcctcacctatttaatccaatgagttttaaatctaaatctcattcccttcttctttccctaccttttttttctttttttcttaaaaaaatattttgtgttattaacagaaattcatatttggtgtggcttaacggtatttcagaaggtcatcagattgtgagactgcttccttgaaacatttttgtgctattgttttaaaaaaataattaaaaaacagttggcgttaataaaaatgtcaatgtgaaannnaaaaaaaaaancactttattctctttctttgataagaaactaaaaactttcctatcattcagtaggcttatgc

SEQ ID NO: 203 - DNA, 506 bp, Homo sapiens
tccacgtcaagttctggccttctgatgcaaatgcaaaggaacttagtctgttatgaacccaggttgatgacagaccagtccttgtggaataagattccctttaaaaactctttagccagtcgtgacatcaaccctagacctgtctgccttggcatttgctgtcaacatctgctgggctatgtaggcaggttaatcctccacttctcatgtggttgaaccagtgtgttttttggtaaaatggtgattgtagataagattagttccctgatcccctgccccctgtcccctgcctcttttcccaattcccttccttatgctggacttttaaagcttaaaaaaaatccgattgaatataaatgcctaatttcattctttgtgaaatggttgcttcctcctgattccctaattgtgctgtgttcgtgtcttgcactggaattcaacattcccttctccttttgtactgtgttgtgcttgctgtctctcccggacacccttaaagactgtct

SEQ ID NO: 204 - DNA, 426 bp, Homo sapiens
  misc_feature (37)..(53): n includes a, c, g, or t, or contains no nucleotide
  misc_feature (55)..(57): n includes a, c, g, or t, or contains no nucleotide
  misc_feature (104)..(142): n includes a, c, g, or t, or contains no nucleotide
ggtgaaacgggtcctgcccatcgacgtgcaccagccnnnnnnnnnnnnnnnnngnnncccagctcccctgcctgctgacgccctggtctctgccttctgcttgnnnnnnnnnnnnnnnnnnnnnnnnnnnnnnnnnnnnnnnctggaccacatcaccacgctgctgaggcctggggggcacctcctcctcatcggggccctggaggagtcgtggtacctggctggggaggccaggctgacggtggtgccagtgtctgaggaggaggtgagggaggccctggtgcgtagtggctacaaggtccgggacctccgcacctatatcatgcctgcccaccttcagacaggcgtagatgatgtcaagggcgtcttcttcgcctgggctcagaaggttgggctgtgagggctgtacctggtgccctgtggccc

SEQ ID NO: 205 - DNA, 299 bp, Homo sapiens
atcctaaagctgtgcctatatctgtgatttgaatgagggagccctttggggcaaattcaggtgcccccattgcctcaggctggccctggtcccaggtggcagcggttgaggaggggtacagggctctcaagcctgaggttttcttctctgggcttaattttctcttggggtacgtgcctgacagtgtttaaggtgtccgttgaactggagttgcagacttttaaatagatgaccccttcagatcatctgtgcctacctcctgcccatcaggcgtctacactgtcactcagacacctgtg

SEQ ID NO: 206 - DNA, 507 bp, Homo sapiens
  misc_feature (302)..(326): n includes a, c, g, or t, or contains no nucleotide
gacacagcactgttcatctggccaaacaactgtggttaaaaacacatgtaaaatggctttttaacagctgatactgtataagacaaagccaagatgcaaaattaggctttgattggcactttttgaaaaatatgcaacaaatatgggatgtaatccggatggccgcttctgtacttaatgtgaaatatttagatacctttttgaacacttaacagtttctttgagacaatgactttgtaaggattggtactatctatcattccttatgacatgtacattgtctgtcactaatccttggattnnnnnnnnnnnnnnnnnnnnnnnnnacaggtactgatgaaaatctctagtggataatcataacactctcggtcacatgtttttccttcagcttgaaagctttttttaaaaggaaaagataccaaatgcctgctgctaccacccttttcaattgctatgttttgaaaggcaccagtatgtgttttagattgatttccctgtttcagg

SEQ ID NO: 207 - DNA, 413 bp, Homo sapiens
  misc_feature (203)..(229): n includes a, c, g, or t, or contains no nucleotide
agtcgagactggtcctcacctgctccggctcctggcgaccactacccctgcgtcccggccccctcgcctcccctccctgtcgccctttccctggacagatcaggccggggcggtgggaggcccgcctcaggtcagggcccagcgtgtgacgtaggggccggggcaggccagggtttgtttgtggaggcgctgtctgtccctcnnnnnnnnnnnnnnnnnnnnnnnnnnnccctgccagcccagcaccactgggaatcatggtgaagctgatgcagcgttgccgagggggtgggttgggcgggggtggggccgggcccccctacgggatgcccacggccgttcatcatcttgtccctcgtccccctaccacactccccctcctagaccgccgccctttaacacagtctggattt

SEQ ID NO: 208 - DNA, 448 bp, Homo sapiens
cagtgacatgttcagttcaacacgacaataaaactgtgcactccactgactttgaagtgaagacagattctacagatcacgtaaaaccaaaggaaactgaaaacacaaagcaaccttcaaagagctgccataaacccaaagccatagttcataccgagaaggtgaacatgatgtccctcacagtgcttgggctacgaatgctgtttgcaaagactgttgccgtcaattttctcttgactgccaagttatttttcttgtaaggctgactggcatgaggaagctacactcctgaagaaaccaaaggcttacaaaaatgcatctccttggcttctgacttctttgtgattcaagttgacctgtcatagccttgttaaaatggctgctagccaaaccactttttcttcaaagacaacaaacccagctcatcctccagcttgatgggaagaca

SEQ ID NO: 209 - DNA, 430 bp, Homo sapiens
  misc_feature (243)..(260): n includes a, c, g, or t, or contains no nucleotide
acacggagagtatcatcgagctgcaaaacaagacacctgtctggaatgatgacacacagtcctatgtactcaacttccatgggcgcgtcacacaggcctccgtgaagaacttccagatcatccatggcaatgacccggactacatcgtgatgcagtttggccgggtagcagaggatgtgttcaccatggattacaactacccgctgtgtgcactgcaggcctttgccattgccctgtccagcnnnnnnnnnnnnnnnnnntgcgagtagaggcctcttcgtgccctttggggttgcccagcctggagcggagcttgcctgcctgcctgtggagacagccctgcctatcctctgtatataggccttccgccagatgaagctttggccctcagtgggctccctggcccagccagccaggaactggctccttt

SEQ ID NO: 210 - DNA, 453 bp, Homo sapiens
  misc_feature (111)..(111): n includes a, c, g, or t, or contains no nucleotide
  misc_feature (116)..(117): n includes a, c, g, or t, or contains no nucleotide
  misc_feature (119)..(120): n includes a, c, g, or t, or contains no nucleotide
  misc_feature (122)..(122): n includes a, c, g, or t, or contains no nucleotide
  misc_feature (124)..(124): n includes a, c, g, or t, or contains no nucleotide
  misc_feature (128)..(142): n includes a, c, g, or t, or contains no nucleotide
  misc_feature (158)..(158): n includes a, c, g, or t, or contains no nucleotide
caagatcttatctagcaagcctgtagtattcagtttctgttgtaggaagagagcgaggcatccctgaattccacgcatctgctggaaacgagccgtgtcagatcgcacatnccctnngnncncncatnnnnnnnnnnnnnnncccccatgcccctctngagtcacacaggacagaggaggcagagcttctgcccactgttatcttcactttctttgtccagtcttttgtttttaataagcagtgaccctccctactcttctttttaatgatttttgtagttgatttgtctgaactgtggctactgtgcattccttgaataatcacttgtaaaaattgtcagtgcttgaagctgtttcctttactcacattgaagggacttcgttggttttttggagtcttggttgtgactccaagagcagagtgaggaagacccccaagcatagactcgggta

SEQ ID NO: 211 - DNA, 441 bp, Homo sapiens
  misc_feature (91)..(109): n includes a, c, g, or t, or contains no nucleotide
  misc_feature (138)..(159): n includes a, c, g, or t, or contains no nucleotide
  misc_feature (351)..(374): n includes a, c, g, or t, or contains no nucleotide
agcgttgccctggtgattctttcccccccgtttgtaatgttaactgatcaggaagtgcagtttgggtgggatgccgaatcgtcgtgctgannnnnnnnnnnnnnnnnnnaaggtacaagtcctttaagatcaaaactnnnnnnnnnnnnnnnnnnnnnnaaggtgtcggtatgtggggagtggtacaaaatggtctgatgctccttcaaaaacattcactttttacaacgtcaaggaattaagcataaaaaagattggttaaaagctttggtttctagtaaaggttagtgtgtgtggtttttttaagaagctgttttgctaaattatttttacttggaatgtttcaaacannnnnnnnnnnnnnnnnnnnnnnnataatcgtttgcttctccaagtgaagctcagaaatacctaaaaatagctgtaacgttcgcgttagga

SEQ ID NO: 212 - DNA, 220 bp, Homo sapiens
atctaccttctacataatggttattgaatactccacaatatattaagtctagatgttatggtacatgcatacactttcaggctgttttatacccactgtcaccaatacacataaatgggggaggaaaagctatgaaactgtatagggctgtatatatacttgtctcagcttaatgcaggaaattggtttaatttccagcagttttgtctaaactggttca

SEQ ID NO: 213 - DNA, 400 bp, Homo sapiens
  misc_feature (113)..(113): n includes a, c, g, or t, or contains no nucleotide
  misc_feature (115)..(116): n includes a, c, g, or t, or contains no nucleotide
  misc_feature (119)..(146): n includes a, c, g, or t, or contains no nucleotide
ggatggcctttaacattgctgaggctttcaaagatgtgtcagaacccattgtatttctgcaacagatgcaggagtttagagagaaaatcaaagtaatcaaggaaactcctttncnnccnnnnnnnnnnnnnnnnnnnnnnnnnnnnaagaactttgataccagtcagtgggaagacataaaactagtcgatgtggataaactttctttgcctcaagacactggcacattcattagcaagattccctggagcttttataagttatttttgctaatccttctgcttggccttgtcattgtctttggtcctaccatgttcctagaatggtcattatttgatgacctggcaacttggaaaggctgtctttcaaacttcagttcctatctgactaaaacagccga

SEQ ID NO: 214 - DNA, 85 bp, Homo sapiens
aacataggactgctaatctcagttcgctctgtgatgtcaagtgcagaatgtacaattaactggtgatttcctcatacttttgata

SEQ ID NO: 215 - DNA, 533 bp, Homo sapiens
  misc_feature (193)..(247): n includes a, c, g, or t, or contains no nucleotide
  misc_feature (281)..(302): n includes a, c, g, or t, or contains no nucleotide
tcagaagctggactctcagcgaggggctgtcattgccacggagctgaagaacaacagctacaagttggcccggtggacctgctgtgctttgctggctggatctgagtacctcaagcttggttatgtgtctcggtaccacgtgaaagactcctcacgccacgtcatcctaggcacccagcagttcaagcctaannnnnnnnnnnnnnnnnnnnnnnnnnnnnnnnnnnnnnnnnnnnnnnnnnnnnnnattttacgctgcgtcattgacatctgcatgaagnnnnnnnnnnnnnnnnnnnnnncatcctcaaggaccccaacaagcaggtcatccgtgtctacagcctccctgatggcaccttcagctctgatgaagatgaggaggaagaggaggaggaagaagaggaagaagaagaggaagaaacttaaaccagtgatgtggagctggagtttgtccttccaccgagactacgagggcctttgatgcttagtggaatgtgtgtctaacttgctctctgacatttagcagatga

SEQ ID NO: 216 - DNA, 438 bp, Homo sapiens
  misc_feature (275)..(278): n includes a, c, g, or t, or contains no nucleotide
  misc_feature (280)..(280): n includes a, c, g, or t, or contains no nucleotide
  misc_feature (282)..(286): n includes a, c, g, or t, or contains no nucleotide
  misc_feature (288)..(291): n includes a, c, g, or t, or contains no nucleotide
  misc_feature (293)..(293): n includes a, c, g, or t, or contains no nucleotide
  misc_feature (297)..(297): n includes a, c, g, or t, or contains no nucleotide
  misc_feature (299)..(303): n includes a, c, g, or t, or contains no nucleotide
  misc_feature (306)..(308): n includes a, c, g, or t, or contains no nucleotide
  misc_feature (310)..(310): n includes a, c, g, or t, or contains no nucleotide
  misc_feature (312)..(312): n includes a, c, g, or t, or contains no nucleotide
taactttggtgaccttttgtgtactttacatgaaacaccttatatattaagtactggggattcgttctatgttccttcaggtaactattataacatcaaaaatctccggaatgaggaaagtgttcttctttttactcagataaaaagatgaaagatcaaccaaccttaaatatatgtatgtatatatgtatatgtgaaaaacagtttgtatagttggaatatttgtctttgtaattacttgtgatgttttaaaataaaaattttattcagttttnnnnanannnnnannnnanaaanannnnnaannnanangttttttctgatttttcagtgactgtacataatagcttgtagcgatgtccatatttatgatattatttttataatttgacaagaatatgaaaatgaaatatagaacatttctgtgtcaaaagagac

SEQ ID NO: 217 - DNA, 565 bp, Homo sapiens
  misc_feature (237)..(253): n includes a, c, g, or t, or contains no nucleotide
  misc_feature (288)..(458): n includes a, c, g, or t, or contains no nucleotide
  misc_feature (460)..(463): n includes a, c, g, or t, or contains no nucleotide
taatttacagattgccttccttgggaacaagtatttttttgtatgatctgtctaaaaacctctcacctgaattttgtggtagaaagtctgtatttgttgttgtgagcgtgttaaattgataacaaaccaaactacttgatagctaaagcagattgtttcgggtggggagaaaaagccctaaatcagaatgtttatatttgcctaaagatgtccttaataatacaatatgctttagannnnnnnnnnnnnnnnnttgtataccaggaaaacaattagactcaaatcagnnnnnnnnnnnnnnnnnnnnnnnnnnnnnnnnnnnnnnnnnnnnnnnnnnnnnnnnnnnnnnnnnnnnnnnnnnnnnnnnnnnnnnnnnnnnnnnnnnnnnnnnnnnnnnnnnnnnnnnnnnnnnnnnnnnnnnnnnnnnnnnnnnnnnnnnnnnnnnnnnnnnnnnnnnntnnnnttaatgtcttgcgttttcatcctttgtgaattaaaaattctcacttgttttgtaataacaaagctagtaatattttcctgtcttgacagcttggttttatag

SEQ ID NO: 218 - DNA, 127 bp, Homo sapiens
  misc_feature (76)..(102): n includes a, c, g, or t, or contains no nucleotide
cacggattgatctacctgtccatgtatgtctgctgagctttctccttggttatgttttttctcttttacctttctnnnnnnnnnnnnnnnnnnnnnnnnnnnctatgcgccaaaatacaacaggggg

SEQ ID NO: 219 - DNA, 565 bp, Homo sapiens
ctgtgcccatcatctctgcctttgagtgtgggactccaggccagctccttttctgtgaagccctttgcctgtagagccagccttggttggacctattgccaggaatgtttcagctgcagttgaagagcctgacaagtgaagttgtaaacacagtgtggttatggggagagggcatataaattccccatatttgtgttcagttccagcttttgtagatggcactttagtgattgcttttattacattagttaagatgtcttgagagaccatctcctatcttttatttcattcatatcctccgccctttttgtcctagagtgagagtttggaaggtgtccaaatttaatgtagacattatcttttggctctgaagaagcaaacatgactagagacgcaccttgctgcagtgtccagaagcggcctgtgcgttcccttcagtactgcagcgccacccagtggaaggacactcttggctcgtttgggctcaaggcaccgcagcctgtcagccaacattgccttgcatttgtaccttattgatctttgcccatggaagtctcaaagatct

SEQ ID NO: 220 - DNA, 117 bp, Homo sapiens
ctcctccatctgaaacaaaggaaagcaaacagtacttggtttcatttcatgtgccctactatattaatgcaaccataacttactcttgtccttctaagccagattctcaaaaggaac

SEQ ID NO: 221 - DNA, 263 bp, Homo sapiens
  misc_feature (26)..(26): n includes a, c, g, or t, or contains no nucleotide
  misc_feature (28)..(42): n includes a, c, g, or t, or contains no nucleotide
  misc_feature (173)..(173): n includes a, c, g, or t, or contains no nucleotide
agaagatccagaccaaggcaggtgangnnnnnnnnnnnnnnnctaaaaagctgtcgcctggaggtagggatgaagaacaatgtcaaatgggagctgaaccctgaaatagttgcccgccacttctttaagaatcttggtgttgtggttgccccacatacattaaagttaccagnagagcctatcacacggtggggcgagtattggtgtgaggtgacggtaaatgggcttgatactgtgagagtgcctatgtctgtcgtgaactt

SEQ ID NO: 222 - DNA, 469 bp, Homo sapiens
  misc_feature (123)..(123): n includes a, c, g, or t, or contains no nucleotide
  misc_feature (125)..(128): n includes a, c, g, or t, or contains no nucleotide
  misc_feature (132)..(132): n includes a, c, g, or t, or contains no nucleotide
  misc_feature (171)..(171): n includes a, c, g, or t, or contains no nucleotide
  misc_feature (297)..(314): n includes a, c, g, or t, or contains no nucleotide
  misc_feature (377)..(391): n includes a, c, g, or t, or contains no nucleotide
tcctggcactggttttgatacttggaattttgaggttcagggaattcagagaatttggtagcacagtgtattgggagaaagggaaatttcgggtgacagattgatcaccctggctgacatgtntnnnngaantgggtgggtgggtttgattgagaaacactttgggctccngcagtgatggtgggaaagaaaaattctttccaaagctgcacttctcttaataattctctcccctcaaaagaaagattatgataaagaataatttggagtaataagtaacaagatagaattagaaannnnnnnnnnnnnnnnnngaccattcagaggtgtggctttttccacgtctttttctcctgcaatgaactgctcccacgtcnnnnnnnnnnnnnnnagtctaatgaacactttgtgaaacaaatcgtaagtatgtacgcacgcatatcaaactatgctctgaggataaagcaag

SEQ ID NO: 223 - DNA, 491 bp, Homo sapiens
  misc_feature (77)..(92): n includes a, c, g, or t, or contains no nucleotide
  misc_feature (458)..(458): n includes a, c, g, or t, or contains no nucleotide
ctgatactgggtctgcgatgcagcggcgtgaggcctgggctggttggagaaggtcacaacccttctctgttggtctnnnnnnnnnnnnnnnnactcgagaaccaaccagggaagctgtcctggaggtccctggtcggagagggacatagaatctgtgacctctgacaactgtgaagccaccctgggctacagaaaccacagtcttcccagcaattattacaattcttgaattccttggggattttttactgccctttcaaagcacttaagtgttagatctaacgtgttccagtgtctgtctgaggtgacttaaaaaatcagaacaaaacttctattatccagagtcatgggagagtacaccctttccaggaataatgttttgggaaacactgaaatgaaatcttcccagtattataaattgtgtatttaaaaaaaagaaacttttctgaatgcctacntggcggtgtataccaggcagtgtgccagtttaa

SEQ ID NO: 224 - DNA, 481 bp, Homo sapiens
  misc_feature (174)..(176): n includes a, c, g, or t, or contains no nucleotide
  misc_feature (178)..(181): n includes a, c, g, or t, or contains no nucleotide
  misc_feature (185)..(186): n includes a, c, g, or t, or contains no nucleotide
  misc_feature (189)..(189): n includes a, c, g, or t, or contains no nucleotide
  misc_feature (417)..(455): n includes a, c, g, or t, or contains no nucleotide
tttaagtcccatcttcccctgggcataggccatagggatagaagttaaagttcttgagcttattcagaagctggatctgcaatctgaatgctactcataacataacaaaatagtatgttaaacagctcttaaatcttactggcttaccacattaaatgatttctctctcctaannnannnnaaannggnagccatccatgggatgagtcagaggttcagactcttccagtctgtagctctaccttctcttagggtacttagatggatcccctgttctacaaactgccagtcagcaagggaagaaaaagggcagcaatgaccctcaatgggccatttgagggatctggcctggaaatgggcttcctctcttcttctcacacctcactggctggaaacagtcacatgaccccagtcacnnnnnnnnnnnnnnnnnnnnnnnnnnnnnnnnnnnnnnnaagggcaaagctgtttaagggccact

SEQ ID NO: 225 - DNA, 507 bp, Homo sapiens
  misc_feature (195)..(250): n includes a, c, g, or t, or contains no nucleotide
  misc_feature (274)..(302): n includes a, c, g, or t, or contains no nucleotide
  misc_feature (347)..(386): n includes a, c, g, or t, or contains no nucleotide
tcatgttacggcattgccttttctttctgtggatccagtatcttcctcggctttttagggagcaggaaaaatgcgtctgagagcaactctttttaaaaacctgccctgttgtatataactgtgtctgtttcaccgtgtgacctcccaagggggtgggaacttgatataaacgtttaaaggggccacgatttgccnnnnnnnnnnnnnnnnnnnnnnnnnnnnnnnnnnnnnnnnnnnnnnnnnnnnnnnnatcctgtagatgtgaagcactttnnnnnnnnnnnnnnnnnnnnnnnnnnnnncagaagctcgttccttcacactcagtggcgtctgtgcttgtccannnnnnnnnnnnnnnnnnnnnnnnnnnnnnnnnnnnnnnnttgtgtggactccttaatgccaatcatttcttcacttctctgggacacccagggcgcctgttgacaagtgtggagaaactcctaatttaaatgtcacagacaatgtcctagtgttgactac

SEQ ID NO: 226 - DNA, 462 bp, Homo sapiens
  misc_feature (104)..(104): n includes a, c, g, or t, or contains no nucleotide
  misc_feature (165)..(165): n includes a, c, g, or t, or contains no nucleotide
  misc_feature (269)..(269): n includes a, c, g, or t, or contains no nucleotide
  misc_feature (300)..(314): n includes a, c, g, or t, or contains no nucleotide
tttatctccaacattggtgggaatgcaccttcctacatctaccgcctgatgagtgaactctaccatcctgatgatcatgttttatgaccgaccacacgtgtccntaagcagattgcttaggcagatacagaatgaagaggagacttgagtgttgctgctgaagcnacatccttgcaatgtgggagtgcacaggagtccacctaaaaaaaaaatccttgatactgttgcctgcctttttagtcaccccgtaacaagggcacacatccagnactgtgtcttgcctttcagatcttaacagannnnnnnnnnnnnnnttgttgattttggagcctcttagtgacctggttgcgtctgtgtcaggaacttaaactttctggttcagtagtgtgttaaacataacactgaataccttactgggatacagatttttgctcagaaatggctatgacactttttctaggc

SEQ ID NO: 227 - DNA, 495 bp, Homo sapiens
  misc_feature (26)..(26): n includes a, c, g, or t, or contains no nucleotide
  misc_feature (38)..(38): n includes a, c, g, or t, or contains no nucleotide
  misc_feature (47)..(47): n includes a, c, g, or t, or contains no nucleotide
  misc_feature (266)..(280): n includes a, c, g, or t, or contains no nucleotide
  misc_feature (335)..(350): n includes a, c, g, or t, or contains no nucleotide
ccttgtcagaagcttggacttttctncatcagcatcanagatggagntcttgggccagggagatggtgggggtaagattttatccactggtagtttagggtcttgttttataattccttgtttcttcagcatctgataagcgtctcgaatcttgatgtcttccggaaaccagactgtccaactgaagagtatttcaatgactcttcctttaacttttcctgtggcccaggaccccaggtactttggggacaacactttgatcagtnnnnnnnnnnnnnnnaatttggccacctcgctgtggaacttctccccacagtggttcatgcacatctccnnnnnnnnnnnnnnnnaaagagcttccttctcttgcggagactggatcttgtgggccagtagccagggcgcatgtgtggggccattggggtcagtgttcacctgctcacagaaattctggatagctgaccaatcctgttccgacatgcttgggtctgtggc

SEQ ID NO: 228 - DNA, 427 bp, Homo sapiens
agaagtgagttcccctcaggtttgattccaccttcaaatgagcctgctactgaacatccagaaccacagcaagaaacctgacaatatttttgctctcttcaaaagtaattttgactgatctcattttcagtttaagtaactgctgttacttaagtgattacacttttgctcaaattgaagcttaatggaattataattctcaggatagtattttgtaaataaagatgatttaaatatgaatcttatgagtaaattatttcaattttattttagacggtataactatttcaatttgattaatccactattatataaacaatagtgggagttttatatatgtaatctttcaggtggggaggctttaaattctgaagtctgtgtctttatgccaagaactgtatttactgtggttgtggacaaatgtgaa

SEQ ID NO: 229 - DNA, 607 bp, Homo sapiens
  misc_feature (26)..(26): n includes a, c, g, or t, or contains no nucleotide
  misc_feature (28)..(28): n includes a, c, g, or t, or contains no nucleotide
  misc_feature (33)..(33): n includes a, c, g, or t, or contains no nucleotide
  misc_feature (164)..(227): n includes a, c, g, or t, or contains no nucleotide
  misc_feature (417)..(432): n includes a, c, g, or t, or contains no nucleotide
  misc_feature (466)..(481): n includes a, c, g, or t, or contains no nucleotide
  misc_feature (533)..(582): n includes a, c, g, or t, or contains no nucleotide
tccagcagcaccttgctggcgtagtnanacgcnttctcgatctgctccacatacgcccgctcttttaacgtgtagatgatctctttagccaccgggcaggtgacgtcatggccacactctctgaccacatttagatattttcctgtgctgaggatcttgtccgnnnnnnnnnnnnnnnnnnnnnnnnnnnnnnnnnnnnnnnnnnnnnnnnnnnnnnnnnnnnnnnngtcgttgtaatcctcctggatcctctccttccgcagctcgtgctcctcgaccataaactcactgtatgggtcgtggatgatgcccctgtagatccacttctccagaacctcgaagtagggagcactggccgccttggttaggtacaggcatagctcctgcgcctggctgtcccctgtgtagctgaagctnnnnnnnnnnnnnnnnctcagcgtggaccccccaagacattcgcctttgnnnnnnnnnnnnnnnngggaggccaggatgtccatggtgcgcatggctggctggatgtagaaccagannnnnnnnnnnnnnnnnnnnnnnnnnnnnnnnnnnnnnnnnnnnnnnnnnaccagaatcaggtgctccttcacca

SEQ ID NO: 230 - DNA, 327 bp, Homo sapiens
  misc_feature (26)..(26): n includes a, c, g, or t, or contains no nucleotide
agatgtatcggcaagcagtgtaaacngaggacttggggaaaaaggaccacatagtccatcgaagaagagtccttggaacaagcaactggctattgaaaaggcgcagttgtgtagcagttgagtaatgctggttagctgttaaggtggcgtgttgcagtgcagagtgcttggctgtttcctgttttctcccgattgctcctgtgtaaagatgccttgtcgtgcagaaacaaatggctgtccagtttattaaaatgcctgacaactgcacttccagtcacccgggccttgcatataaataacggagcatacagtgagcacatctagctg

SEQ ID NO: 231 - DNA, 158 bp, Homo sapiens
tatcaaagtaatccatgtttgtgtcaaatgatcatagaaaataaatagaagagacagtgaagcaagtaaaaagaaaagcattgttttaatttgtttgcattaatttttttcatttgtcaaaatgcttcttttgttgccacagtaaagaacagttttta

SEQ ID NO: 232 - DNA, 547 bp, Homo sapiens
  misc_feature (241)..(258): n includes a, c, g, or t, or contains no nucleotide
  misc_feature (304)..(308): n includes a, c, g, or t, or contains no nucleotide
  misc_feature (320)..(321): n includes a, c, g, or t, or contains no nucleotide
  misc_feature (323)..(323): n includes a, c, g, or t, or contains no nucleotide
  misc_feature (334)..(386): n includes a, c, g, or t, or contains no nucleotide
  misc_feature (393)..(393): n includes a, c, g, or t, or contains no nucleotide
  misc_feature (419)..(419): n includes a, c, g, or t, or contains no nucleotide
ttatgcagagtcaacatggatcatttcacagtgagatgctttatggattgaaggatatggtaaaatgtttatagtttactttgaaagtaaaatatactatgtcttggttttgaggatattggatacaaaactctcttcctttagggctactgagtcttgattcctgatcatcagaaatttcaccagaaacaacttgcttccaatatacccaattctatatgaagaattcatggagagtgtnnnnnnnnnnnnnnnnnntagtgtttcttgtatgcttgaaaataaagtatgtactgttttgaannnnnaaaaaaaaaaannanaaaaaaaaaannnnnnnnnnnnnnnnnnnnnnnnnnnnnnnnnnnnnnnnnnnnnnnnnnnnnggtcatnttcctgatattggaagtgacatgtgnccctataggaggcatgatgttagttaattacacatttgcctacatctgtgggaaatggagaacaaagccatgtgggtactgtaaacacacgtttatcttttggcccaatgccatacatatggtaggca

SEQ ID NO: 233 - DNA, 481 bp, Homo sapiens
gtaattaactgtcaagcctgtggatgatttttttgaacttggtagttcataaaggtttacagtgaataaaaggatatcatcttgagtatagcaatatcaaaaggaattcagtagttactgctgtttaggaatataaggttaagatatcatatgggtcaggtcattttttttttctgtgctggttgccacatcttagcaagcaccaaaaaactaaagcagtttttaaaccgatatttacgtaaagaaaatcataaaatccaatgcttctgcatactgtgttatgttacagtccagttttgtgtgctttactacacagtttggttacaggacttctgtgcattgtaaacataaacagcatggaaaaggttaaatacctgtgttcagattgtaagatctagtccggacttgctgtgtatattgtaacgttaaatgaaaaaagaacccccctttgtattatagtcatgcggtcttatgtatgata

SEQ ID NO: 234 - DNA, 399 bp, Homo sapiens
  misc_feature (49)..(49): n includes a, c, g, or t, or contains no nucleotide
  misc_feature (59)..(59): n includes a, c, g, or t, or contains no nucleotide
  misc_feature (61)..(61): n includes a, c, g, or t, or contains no nucleotide
  misc_feature (65)..(65): n includes a, c, g, or t, or contains no nucleotide
  misc_feature (67)..(67): n includes a, c, g, or t, or contains no nucleotide
ggaccaagtccaaggccaggtctcagtcggtgtcacccagcaagcaggncagcgccccngncccncngcccccgcggcccactcggcgcactcagccagcgtctcccctgtggagagtcggggctccagccaggagcgctccaggggagtctctcaggaaaaagaagcccagatctcttcagcaatcgtttcttccgtgcagagcaaaatcactcaggatctcatggccaaagtcagagcgatgcttgcagcttccaaaaacctgcaaaccagcgcttcctgagacggggccagcggaggcagagccgggaggctgcgtgggcttctgggcaggctcacgcagacgccggccacaccatccacctggccgcctccatggacccttggtggcttttgtaa

SEQ ID NO: 235 - DNA, 525 bp, Homo sapiens
  misc_feature (421)..(434): n includes a, c, g, or t, or contains no nucleotide
  misc_feature (486)..(500): n includes a, c, g, or t, or contains no nucleotide
gtgcaactggacctgtgaaaagagcaagagaagaaacagacaaagaagaacctgcatccaaacaacagaaaacagaaaatggtgctggagaccagtagtttagtaaaccaattttttattcattttaaataggttttaaacgacttttgtttgcggggcttttaaaaggaaaaccgaattaggtccacttcaatgtccacctgtgagaaaggaaaaatttttttgttgtttaacttgtctttttgttatgcaaatgagatttctttgaatgtattgttctgtttgtgttatttcagatgattcaaatatcaaaaggaagattcttccattaaattgcctttgtaatatgagaatgtattagtacaaactaactaataaaatatatactatatgaaaagagcaaaaaaaaaaaaaaaaaaannnnnnnnnnnnnnacccaaagcatttaggaaagaactagaatattagctattgacgatgggcctnnnnnnnnnnnnnnntatggtgtctcctaggctgggcttt

SEQ ID NO: 236 - DNA, 471 bp, Homo sapiens
  misc_feature (26)..(26): n includes a, c, g, or t, or contains no nucleotide
  misc_feature (51)..(51): n includes a, c, g, or t, or contains no nucleotide
  misc_feature (69)..(69): n includes a, c, g, or t, or contains no nucleotide
  misc_feature (92)..(92): n includes a, c, g, or t, or contains no nucleotide
  misc_feature (111)..(111): n includes a, c, g, or t, or contains no nucleotide
  misc_feature (120)..(134): n includes a, c, g, or t, or contains no nucleotide
  misc_feature (145)..(145): n includes a, c, g, or t, or contains no nucleotide
  misc_feature (285)..(285): n includes a, c, g, or t, or contains no nucleotide
  misc_feature (381)..(381): n includes a, c, g, or t, or contains no nucleotide
  misc_feature (383)..(384): n includes a, c, g, or t, or contains no nucleotide
  misc_feature (386)..(386): n includes a, c, g, or t, or contains no nucleotide
ccacgactgaagttgtagattgagcngaataaccatgggaagtgaccaagncaaagacactcgattggnagtcagttgaatatttgtacccntcagtggagcccttctggntcttttctnnnnnnnnnnnnnnntttcctctagncaaatacttctttctccttgcttgcctccaccatgatatttgaataagagatggccagaggataacacttgtctcttaaaaactaagctaaaaagaacctagaaccttcaattgagcagttgtgaaaattgctaatggtnccaaggccaagcaaagagtttcagaaaatgactgagaaggagcgataacccccagaatgcaaaatcaggggcatcattatccggtgcttgaacaangnngntccgctctacaactggtttttttaggacttgtgaggaacacagcaacggaaatccatccacaaaggatgcagtgccccaacttgt

SEQ ID NO: 237 - DNA, 460 bp, Homo sapiens
  misc_feature (63)..(63): n includes a, c, g, or t, or contains no nucleotide
  misc_feature (77)..(78): n includes a, c, g, or t, or contains no nucleotide
  misc_feature (80)..(80): n includes a, c, g, or t, or contains no nucleotide
  misc_feature (82)..(86): n includes a, c, g, or t, or contains no nucleotide
  misc_feature (88)..(92): n includes a, c, g, or t, or contains no nucleotide
  misc_feature (99)..(100): n includes a, c, g, or t, or contains no nucleotide
  misc_feature (107)..(107): n includes a, c, g, or t, or contains no nucleotide
  misc_feature (134)..(151): n includes a, c, g, or t, or contains no nucleotide
  misc_feature (161)..(202): n includes a, c, g, or t, or contains no nucleotide
  misc_feature (353)..(371): n includes a, c, g, or t, or contains no nucleotide
  misc_feature (418)..(435): n includes a, c, g, or t, or contains no nucleotide
actaaaagagcgtcaggaagcagagaaaatgttcaagggcaaacggggtgcacagcttgcaanggatattgccaggnnangnnnnncnnnnnttttaanncaggtgntggtttgccaactgacaaaaagaaagnnnnnnnnnnnnnnnnnngatgtagaannnnnnnnnnnnnnnnnnnnnnnnnnnnnnnnnnnnnnnnnngtggagaggctgaaggggttgctgcagtctggtcagatccctggcagagaacgcagatcagggcccactgatgatggtgaagaagagatggaagaagacacagtcacaaacgggtcctgagcagtgaggcagatgtataataataggcccnnnnnnnnnnnnnnnnnnntttcgaacatggtataatagccttgtttgtgttagcaaagtggaatnnnnnnnnnnnnnnnnnntgcttaagactgctgctgataattt

SEQ ID NO: 238 - DNA, 299 bp, Homo sapiens
  misc_feature (242)..(242): n includes a, c, g, or t, or contains no nucleotide
  misc_feature (274)..(274): n includes a, c, g, or t, or contains no nucleotide
agaaggtggctgaggccaaccagaagtatttctccagcatggctgagttcctcaaggtcaagggcgagaagagtggccttatgtccacctgaatgactgcgtgtgtccaaggtggcttcccactgaagggacacagaggtccagtccttctgaagggctaggatcgggttctggcagggagaacctgccctgccactggccccattgctgggactgcccagggaggaggccttggaagagtncggcctggcctcccccaggaccgagatcaccncccagtatgggctagagcaggtctt

SEQ ID NO: 239 - DNA, 216 bp, Homo sapiens
  misc_feature (174)..(191): n includes a, c, g, or t, or contains no nucleotide
tcttttcatcattcggaagcaacagcggcagtcccctgcccaagttatcccactagctgattactatatcattgctggagtgatctatcaggcaccagacttgggatcagttataaactctagagtgcttactgcagtgcatggtattcagtcagcttttgatgaagctatgtnnnnnnnnnnnnnnnnnncttccaaagggtattggtggcactt

SEQ ID NO: 240 - DNA, 427 bp, Homo sapiens
  misc_feature (287)..(312): n includes a, c, g, or t, or contains no nucleotide
ttctgagcttgaagtgcagctcccttactaccctttcccttcctttttcttccctaataggaggtacaatctgcttttgtttgtcgttaagtggtcactcccatttcctttatcttggccgacaacacagagaggagggggagctgggcagtagcttggggtgggggtgggcacctgtggttgtttttaatgggaaatacctctcagagatgttcatgcaggctccctagggccccatcccagtgccaggctggtttccatggagatagggcactgaggctcccgtnnnnnnnnnnnnnnnnnnnnnnnnnnggtccttcagccagcatccagctccccacccccaggctggcagtagcactgctgagatgctgtatttccacccaattctgggtatatcagtgtgtcttgcagaatcttggatcat

SEQ ID NO: 241 - DNA, 571 bp, Homo sapiens
tggatgcagtgctcgctgttgctgaataggcgatcacaacgtgcattgtgcttctttctttgggaatatttgaatcttgtctcaatgctcataacggatcagaaatacagattttgatagcaaagcgacgttagtcgtgagctcttgtgaggaaagtcattggctttatcctctttagagttagactgttggggtgggtataaaagatggggtctgtaaaatctttctttcttagaaatttatttcctagttctgtagaaatggttgtattagatgttctctatcatttaataatatacttgtggactaaaagatataagtgctgtataaaatcagccaattatgttaaactagcatatctgcctttattgtgtttgtcattagcctgagtagaaaggcctttaaaatttttttagaaagcatttgaatgcattttgtttggtattgtatttattcaataaagtatttaattagtgctaagtgtgaactggaccctgttgctaagccccagcaagcaatcctaggtagggtttaatccccagtaaaattgccatattgcacatgtcttaat

SEQ ID NO: 242 - DNA, 311 bp, Homo sapiens
  misc_feature (97)..(97): n includes a, c, g, or t, or contains no nucleotide
  misc_feature (109)..(129): n includes a, c, g, or t, or contains no nucleotide
cgtactgagctgtgagagccgcagtgaatggctggaggtgcagggccaggaggaggcgaggcagggcctgcagcggtctctgagaggccgagctctngccaacgggccnnnnnnnnnnnnnnnnnnnnnccaacagccccatcagagtccacacaggccaggagggaaggaccaggccacccctcgggtcttgtgcttcagcagtcctggggacccaggcgtgccgagaggaggacttgtccttcctgcttcttgcctccacaccctcctctccaggaccctggatgaatccgttctgtgcttccttttcc

SEQ ID NO: 243 - DNA, 76 bp, Homo sapiens
catcccatctgctggaagtcaacaagagcatctagcaactttgtgttcatgtcaaatgtcagatcagagcatccta

SEQ ID NO: 244 - DNA, 532 bp, Homo sapiens
  misc_feature (32)..(52): n includes a, c, g, or t, or contains no nucleotide
gacccacaagcagatatttgaattacttcttnnnnnnnnnnnnnnnnnnnnnggatgggctgcatttactgtgtgaaggataaaaatcattagcctggattctgatttctataaattgccattaaaagctttttttcccctaagaactgaaatgtgctcaccagccaaaacattttaacttgtaaattttgagggcagttaaccaaacctgtgactaatcatatctcctcctaccccccatttccaaggacatttgttactcagatacttgttatactaatacttgaacttgtaccttatggtatttgctatcttttaactagtcatgatattcttatactttagttacacttttggaatttgatacaaggttgagtggggtgtgtgggtgtatgtatgagtgaaacagttctcaaaagaatgtaagaaaaaccatttttataaaattgtgactttttaaaaacatagtctttgtcatttatagaattaacaagctgctcagggtatattttatagctgtagcactgatatc

SEQ ID NO: 245 - DNA, 48 bp, Homo sapiens
aagttaatatcatgtacctgtggcaggccaggtttcactaatgcaggc

SEQ ID NO: 246 - DNA, 393 bp, Homo sapiens
  misc_feature (127)..(137): n includes a, c, g, or t, or contains no nucleotide
  misc_feature (287)..(306): n includes a, c, g, or t, or contains no nucleotide
  misc_feature (326)..(365): n includes a, c, g, or t, or contains no nucleotide
agctgcagatgcatgggattctggatttttttgttgctttttagtttaatgggactttaaaagtaattgaggagaaagaaccgtgatgttccctgtttctccagtaaaggactggcttttgcttggnnnnnnnnnnngcagaggtggtgctgctgggtgtgcagctgccacagactccaaaggcgtagaagtttgtgccaacacacggagtcattctggctctctgctgaggcccctgttttctggcaggtgccctccttggaaactggttttggctctgatcagcnnnnnnnnnnnnnnnnnnnnctgcatctgtgttgacttgnnnnnnnnnnnnnnnnnnnnnnnnnnnnnnnnnnnnnnnngttactacatgatttgttcccagaggtt

SEQ ID NO: 247 - DNA, 186 bp, Homo sapiens
tgagtgtattgtctttgcacacacatataggtatattctgaatacaagcttattcacattttgcttcctaatctttttgttgtacagggattcaggtttcttattcttacaacatgattgtttatatgtgaagcacatcttgctgttgccttatttttgatgcttttattcatgacaagaattgtc

SEQ ID NO: 248 - DNA, 335 bp, Homo sapiens
  misc_feature (120)..(134): n includes a, c, g, or t, or contains no nucleotide
  misc_feature (167)..(167): n includes a, c, g, or t, or contains no nucleotide
  misc_feature (184)..(200): n includes a, c, g, or t, or contains no nucleotide
  misc_feature (269)..(283): n includes a, c, g, or t, or contains no nucleotide
taggacagtactgtatcatacctctgtgaatgtaaaatatcttgtacctgctttatgatacgtagtagtgaccgtgctttatcagagctgtttttaatgatgttattctagaatgttttnnnnnnnnnnnnnnnttcagaagctaattttaaaaaacggtgccaggntaccacaacagtaacannnnnnnnnnnnnnnnntggggttttgttttttacctttttccccccttttttttaaatggagtgtgctggatgtctctataattnnnnnnnnnnnnnnncagaacctggaaaagctgttgctgctattgatgcataacatactgctattgg

SEQ ID NO: 249 - DNA, 321 bp, Homo sapiens
  misc_feature (168)..(168): n includes a, c, g, or t, or contains no nucleotide
  misc_feature (173)..(173): n includes a, c, g, or t, or contains no nucleotide
  misc_feature (202)..(223): n includes a, c, g, or t, or contains no nucleotide
gacagatccctaactcgaagcacaaaaaaatcatcttcttctagaccaaagtctagaaaggcctatgttactgacggaagaagtattggttccagacttcctataagactgtctgcattggtgctttagtatctcaggcctccaaggattccatgatgattttaatgnctttntcaaaactctgatatttgtcacacctagnnnnnnnnnnnnnnnnnnnnnnacttgccttgactaaattttgggacctcttggggcattttgaagtatttaactgtcttgaccagttggaagaagatacgtgggccataagcatcttct

SEQ ID NO: 250 - DNA, 550 bp, Homo sapiens
  misc_feature (55)..(85): n includes a, c, g, or t, or contains no nucleotide
  misc_feature (184)..(217): n includes a, c, g, or t, or contains no nucleotide
  misc_feature (290)..(355): n includes a, c, g, or t, or contains no nucleotide
  misc_feature (358)..(389): n includes a, c, g, or t, or contains no nucleotide
gaagtcagctgttgcagataaacatgaattgctcagccttgccagcagcaatcannnnnnnnnnnnnnnnnnnnnnnnnnnnnnnagagtggatgaaatgagccaagatatagttaaatacaacacatacatgaggaatactagtaaacaacagcagcagaaacatcagtatcagcagcgtcgnnnnnnnnnnnnnnnnnnnnnnnnnnnnnnnnnnggagaacccccgctccctgaggaggacctgtccaaactcttcaaaccaccacagccgcctgccaggatggacnnnnnnnnnnnnnnnnnnnnnnnnnnnnnnnnnnnnnnnnnnnnnnnnnnnnnnnnnnnnnnnnnnttnnnnnnnnnnnnnnnnnnnnnnnnnnnnnnnnaatacaacaactaagaaaaggaagtttccagaaaagaagttaacatgaactcttgaagtcacaccagggcaactcttggaagaaatatatttgcatattgaaaagcacagaggatttctttagtgtcattgccgattttggctataacagtgtctttctag

SEQ ID NO: 251 - DNA, 369 bp, Homo sapiens
gtgaaggttgctgaggctctgacccagtgagattacagaggaagttatcctctgcctcccattctgaccacccttctcattccaacagtgagtctgtcagcgcaggtttagtttactcaatctccccttgcactaaagtatgtaaagtatgtaaacaggagacaggaaggtggtgcttacatccttaaaggcaccatctaatagcgggttactttcacatacagccctcccccagcagttgaatgacaacagaagcttcagaagtttggcaatagtttgcatagaggtaccagcaatatgtaaatagtgcagaatctcataggttgccaataatacactaattcctttctatcctacaacaagagttta

SEQ ID NO: 252 - DNA, 500 bp, Homo sapiens
  misc_feature (82)..(112): n includes a, c, g, or t, or contains no nucleotide
  misc_feature (344)..(442): n includes a, c, g, or t, or contains no nucleotide
gatttgtgaactcagccaagcacagtggtggcagggcctagctgctacaaagaagacatattttagacaaatactcatgtgnnnnnnnnnnnnnnnnnnnnnnnnnnnnnnnactaactgtacaacaggttattttagtttctgttctgtggaaagtgtaaagcattccaacaaagggttttaatacagatttttttttttggcacccatgctgttgattgctaaatgtaatagtctgattgtgatactgaataaatgtcttttttttttaatgtgctgtataaagttagtctgctctgaagccatcttggtaaattttccccaagagtgtgaagttagaattnnnnnnnnnnnnnnnnnnnnnnnnnnnnnnnnnnnnnnnnnnnnnnnnnnnnnnnnnnnnnnnnnnnnnnnnnnnnnnnnnnnnnnnnnnnnnnnnnnnttactgttgcgatctgaagttcaccattaaaagggattacccaagcaaaatcatggaa

SEQ ID NO: 253 - DNA, 503 bp, Homo sapiens
  misc_feature (221)..(355): n includes a, c, g, or t, or contains no nucleotide
tgatcgacgtcatcggggtgaccaagggcaaaggctacaaaggggtcaccagtcgttggcacaccaagaagctgccccgcaagacccaccgaggcctgcgcaaggtggcctgtattggggcatggcatcctgctcgtgtagccttctctgtggcacgcgctgggcagaaaggctaccatcaccgcactgagatcaacaagaagatttataagattggccannnnnnnnnnnnnnnnnnnnnnnnnnnnnnnnnnnnnnnnnnnnnnnnnnnnnnnnnnnnnnnnnnnnnnnnnnnnnnnnnnnnnnnnnnnnnnnnnnnnnnnnnnnnnnnnnnnnnnnnnnnnnnnnnnnnnnnaggctgtgtggtgggaaccaagaagcgggtgctcaccctccgcaagtccttgctggtgcagacgaagcggcgggctctggagaagattgaccttaagttcattgacaccacctccaagtttggccatggccgcttccagaccatggag

SEQ ID NO: 254 - DNA, 367 bp, Homo sapiens
agatcatccgcaaggaaataccagccaaaatcatttttgaggatgaccggtgccttgctttccatgacatttcccctcaagcaccaacacattttctggtgatacccaagaaacatatatcccagatttctgtggcagaagatgatgatgaaagtcttcttggacacttaatgattgttggcaagaaatgtgctgctgatctgggcctgaataagggttatcgaatggtggtgaatgaaggttcagatggtggacagtctgtctatcacgttcatctccatgttcttggaggtcggcaaatgcattggcctcctggttaagcacgttttggggataattttctcttctttagcatgataagttaggc

SEQ ID NO: 255 - DNA, 389 bp, Homo sapiens
  misc_feature (114)..(140): n includes a, c, g, or t, or contains no nucleotide
cggcatgaacatgactttggttgggattgcggatagttagggttacctctgaatcgtgtagcttttatgagagcagctgtgcaagtgaatccacattaatgccttgtcgtggtnnnnnnnnnnnnnnnnnnnnnnnnnnncttctattgtcttattctggcaggttttgacgttttaaattttttaaagaaattttattccttggaccaaaaggtttggttaaccacccccctcttacttgctttcacattttgagtgtccagaggaaacagaaaggaatgagtgtgtgacgttgctgcacgcctgactctgtgcgagcttctttctgtgtatatattttgttttatttttttccgtgtatatttttaatcccgacagaacatcatgtg

SEQ ID NO: 256 - DNA, 501 bp, Homo sapiens
  misc_feature (57)..(57): n includes a, c, g, or t, or contains no nucleotide
  misc_feature (62)..(62): n includes a, c, g, or t, or contains no nucleotide
  misc_feature (67)..(68): n includes a, c, g, or t, or contains no nucleotide
  misc_feature (84)..(84): n includes a, c, g, or t, or contains no nucleotide
  misc_feature (105)..(206): n includes a, c, g, or t, or contains no nucleotide
  misc_feature (321)..(321): n includes a, c, g, or t, or contains no nucleotide
  misc_feature (396)..(412): n includes a, c, g, or t, or contains no nucleotide
tcctgctgtagcagtaacattttaggatcggtgaatgtatgcggttttgaacccgancaagncaaanntcgagtgaaggatggnaaggtatgtgtgtcggctgannnnnnnnnnnnnnnnnnnnnnnnnnnnnnnnnnnnnnnnnnnnnnnnnnnnnnnnnnnnnnnnnnnnnnnnnnnnnnnnnnnnnnnnnnnnnnnnnnnnnnatactcctatgggctcggcagctgtgtcaagatcgagtctccttgctacccttgcacttctccttgcagcccgtgcagcccgtgcaacccctgcaacccctgcagcccctgcaanccgtgcagcccatatgatccttgcaacccgtgttatccctgtggaagccgattttcctgtaggaagatgattttnnnnnnnnnnnnnnnnnacccattacttaatagaagtcagttactccagccaggcagctctcccaatgtttctcctctccttcccatggcccctgttgttgaagta

SEQ ID NO: 257 - DNA, 481 bp, Homo sapiens
atatgtgggagtccatgtcctgcagtgtggcctgatgtaatcaaactaccatatttcaacaccatgaaaccaaagaagcaatatcgtcgaaagttaagagaagaatttgtttttattcctgcagctgcgctagacttatttgattacatgcttgccttggatcctagtaagcgctgcactgctgaacaggctcttcagtgcgagttcctccgagatgtggaaccctcaaaatgcctccaccagatctccctttatggcaagattgtcatgagttatggagtaaaaagcgaagaagacagaagcagatgggcatgactgatgtttccaccattaaagcccccaggaaggacttgtctctgggcttggatgacagcagaaccaacacaccccagggtgtgctgccatcttcacagctgaaatctcagggcagctcaaatgtggcacctggtgaaaaacagacagatccatcaacaccacaaca

SEQ ID NO: 258 - DNA, 542 bp, Homo sapiens
  misc_feature (135)..(135): n includes a, c, g, or t, or contains no nucleotide
ataggaagccagactacactgcttacgttgccatgatccctcagtgcataaaggaggaagacaccccttcagataatgatagtggcatctgtatgagcccagagtcctatctggggtctcctcagcacagccccntctaccaggggctctccaaataggagcctcccatctccaggtgttctctgtgggtctgcccgtcccaaaccttacgatcctcctggagagaagatggtagcagcaaaagtaaagggtgagaaactggataagaagctgaaaaaaatggagcaaaacaagacagcagccactaggtaccgccagaagaagagggcggagcaggaggctcttactggtgagtgcaaagagctggaaaagaagaacgaggctctaaaagagagggcggattccctggccaaggagatccagtacctgaaagatttgatagaagaggtccgcaaggcaagggggaagaaaagggtcccctagttgaggatagtcaggagcgtcaatgtgcttgtacatagagtgctgtagctgtgtgttcc

SEQ ID NO: 259 - DNA, 525 bp, Homo sapiens
  misc_feature (210)..(210): n includes a, c, g, or t, or contains no nucleotide
  misc_feature (406)..(410): n includes a, c, g, or t, or contains no nucleotide
  misc_feature (427)..(427): n includes a, c, g, or t, or contains no nucleotide
  misc_feature (429)..(437): n includes a, c, g, or t, or contains no nucleotide
  misc_feature (440)..(443): n includes a, c, g, or t, or contains no nucleotide
gacaggttctgttttcactttttcgtatgcactactgtatttcctttctaaataaaattgatttgattgtatgcagtactaaggagactatcagaatttcttgctattggtttgcattttcctagtataattcatagcaagttgacctcagagttcctgtatcagggagattgtctgattctctaataaaagacacattgctgaccttgnccttgccctttgtacacaagttcccagggtgagcagcttttggatttaatatgaacatgtacagcgtgcatagggactcttgccttaaggagtgtaaacttgatctgcatttgctgatttgtttttaaaaaaacaagaaatgcatgtttcaaataaaattctctattgtaaataaaattttttctttggatcttgnnnnnaaaaaaaaaaaaaaaanannnnnnnnnaannnntgagtcttttctcacctttgtcaaataccagatttggcttcgtgctcttctctgtctgggctcatttctttgtccatagact

SEQ ID NO: 260 - DNA, 141 bp, Homo sapiens
  misc_feature (54)..(54): n includes a, c, g, or t, or contains no nucleotide
gaacgtgtaccttgggaactggctcacccacctgctaatagcaccatcgtcacnattaagcagacatttcagttggtagaatccatgtagaagtcatggacttttctgggaaatgacttttctgggaaatgacagtttctt

SEQ ID NO: 261 - DNA, 451 bp, Homo sapiens
  misc_feature (44)..(58): n includes a, c, g, or t, or contains no nucleotide
  misc_feature (220)..(241): n includes a, c, g, or t, or contains no nucleotide
  misc_feature (286)..(307): n includes a, c, g, or t, or contains no nucleotide
agaagccactaaagcagttacagaaatgaacggtagaattgtgnnnnnnnnnnnnnnntatgtagctttagctcagcgcaaagaagagcgccaggctcacctcactaaccagtatatgcagagaatggcaagtgtacgagctgttcccaaccctgtaatcaacccctaccagccagcacctccttcaggttacttcatcgcagctatcccacagactcannnnnnnnnnnnnnnnnnnnnncctagccaaattgctcaactaagaccaagtcctcgctggactgcnnnnnnnnnnnnnnnnnnnnnngctgttcatgtacaaggtcaggaacctttgactgcttccatgttggcatctgcccctcctcaagagcaaaagcaaatgttgggtgaacggctgtttcctcttattcaagccatgcaccctactcttgctggtaaaatcactggc

SEQ ID NO: 262 - DNA, 510 bp, Homo sapiens
  misc_feature (48)..(103): n includes a, c, g, or t, or contains no nucleotide
  misc_feature (277)..(297): n includes a, c, g, or t, or contains no nucleotide
  misc_feature (350)..(365): n includes a, c, g, or t, or contains no nucleotide
gctttgcctgcacattgttctcccttcctcccaactcctcagggcctnnnnnnnnnnnnnnnnnnnnnnnnnnnnnnnnnnnnnnnnnnnnnnnnnnnnnnnntacagctttggaaggatctttttttctttaactagatggtcaccttcttccctaccacacatgggtgggaaggtggacaggctaacctctccagctgtgagcctcttagactactgcatgtagcaaatgttcagcagctcaggcccccatgtccagttctgtccccactgtccnnnnnnnnnnnnnnnnnnnnntactgctttgatggctggggccagtctcttgtcactttggaaactgaggacgnnnnnnnnnnnnnnnngcctccaagtagtggcatatcagtcttggagctcctagctggtgatacggagagggctttggaggacttgggacagcagggccaatttttttgcccaagtgcctaggctgctaactcactgactagaacttaatctggtacttta

SEQ ID NO: 263 - DNA, 563 bp, Homo sapiens
  misc_feature (189)..(189): n includes a, c, g, or t, or contains no nucleotide
  misc_feature (191)..(195): n includes a, c, g, or t, or contains no nucleotide
  misc_feature (382)..(384): n includes a, c, g, or t, or contains no nucleotide
  misc_feature (458)..(473): n includes a, c, g, or t, or contains no nucleotide
ctttggtcgaacttggtgtgtgttcatcacccatcagttatttgtgagggtgtttattctatatgaatattgtttcatgtttgtatgggaaaattgtagctaaacatttcattgtccccagtctgcaaaagaagcacaattctattgctttgtcttgcttatagtcattaaatcattacttttacatanannnnngttacttctgctttctttaaaaatatagtaaaggatgttttatgaagtcacaagatacatatatttttattttgacctaaatttgtacagtcccattgtaagtgttgtttctaattatagatgtaaaatgaaatttcatttgtaattggaaaaaatccaataaaaaggatattcatttagaaaatannnaagatctttaataaaaatttgatatgaaaagcacaatgtgcagaagttatggaaaacctatagaggattacaannnnnnnnnnnnnnnnagaatacattgctgacttatagtgatgtggctaagaagtacatgctttgttgtaaaattgcttgaaagcccattgaaagatgtatctgtt

SEQ ID NO: 264 - DNA, 612 bp, Homo sapiens
attcctgtctaaaatgaaggtacagcccaagcaccttgggtgtgttggactgagctgcttttatttggctgtaaaatcaatagaagaggaaaggaatgtcccattggcaactgacttgatccgaataagtcaatataggtttacggtttcagacttgatgagaatggaaaagattgtattggagaaggtgtgttggaaagtcaaagctactactgcctttcaatttctgcaactgtattattcactccttcaagagaacttgccacttgaaaggagaaatagcattaattttgaaagactagaagctcaactgaaggcatgtcattgcaggatcatattttctaaagcaaagccttctgtgttggcattgtctatcattgcattagagatccaagcacagaagtgtgtagagttaacagaaggaatagaatgtcttcagaaacattccaagataaatggcagagatctgaccttctggcaagagcttgtatccaaatgtttaactgaatattcatcaaataagtgttccaaaccaaatgttcagaagttgaaatggattgtttctgggcgtactgcacggcaattgaagcatagctactacagaataactca

SEQ ID NO: 265 - DNA, 196 bp, Homo sapiens
  misc_feature (30)..(30): n includes a, c, g, or t, or contains no nucleotide
  misc_feature (89)..(89): n includes a, c, g, or t, or contains no nucleotide
  misc_feature (101)..(101): n includes a, c, g, or t, or contains no nucleotide
  misc_feature (104)..(104): n includes a, c, g, or t, or contains no nucleotide
  misc_feature (132)..(132): n includes a, c, g, or t, or contains no nucleotide
  misc_feature (156)..(156): n includes a, c, g, or t, or contains no nucleotide
  misc_feature (169)..(169): n includes a, c, g, or t, or contains no nucleotide
accccaagtccctgaagtctggagacgcgnccatcgtggagatggtgccgggaaagcccatgtgtgtggagagcttctcccagtacccncctctcggccgnttngccgtgcgcgacatgaggcagacggtgnccgtaggcgtcatcaagaacgtgnagaagaagagcgncggcgccggcaaggtcaccaagtcggc

SEQ ID NO: 266 - DNA, 209 bp, Homo sapiens
  misc_feature (41)..(55): n includes a, c, g, or t, or contains no nucleotide
ctattgcaccagagagcagcaagaagcgggcccgtaggatnnnnnnnnnnnnnnntaagatgatggccctcatgcagggtggaagcactgggtctctatctctgcataacacgttccaacacagcagtagtggcctacagtctgtgtcatctttgggtcacagcagtgccacttctgcatctttgccttttatgccatttgtgatgggt

SEQ ID NO: 267 - DNA, 603 bp, Homo sapiens
  misc_feature (326)..(340): n includes a, c, g, or t, or contains no nucleotide
  misc_feature (534)..(538): n includes a, c, g, or t, or contains no nucleotide
  misc_feature (545)..(546): n includes a, c, g, or t, or contains no nucleotide
  misc_feature (548)..(548): n includes a, c, g, or t, or contains no nucleotide
  misc_feature (552)..(554): n includes a, c, g, or t, or contains no nucleotide
  misc_feature (557)..(558): n includes a, c, g, or t, or contains no nucleotide
  misc_feature (560)..(562): n includes a, c, g, or t, or contains no nucleotide
  misc_feature (564)..(565): n includes a, c, g, or t, or contains no nucleotide
  misc_feature (567)..(571): n includes a, c, g, or t, or contains no nucleotide
aatgtatttctttactactatagtagtttagttataactttgcatctataattgagctttctcatctgtcaaatgctatggttttcttaaaatgttacaattctagatctatccaccttgtttttttattgtctacaaaccattaaatgtaaatattgtttttagagtcagtcattggctttgtcatttaccctttgagagttccacaagtggtagtagagtggtttaacgtctttcctctagtactaccagtattcataaatgtataccccttactgtaatttgttcctcttagaagtcagatcatctgatttatagaggattannnnnnnnnnnnnnnttgaaaaggcttattttatacatacgtattatatagagaaacaaatgtttttattaaatgtttcattgacccaagtaatttaaaagtaatatgttacctatgtctttcaggaaaaataattatagcagctgatctgtaaatgactttaaaagctattttagtaatttaaataaatttactttcttggtttatannnnnaaaaaannanaaannnaannannnannannnnnaaaaaaagaaatccaagtattttccttgaaca

SEQ ID NO: 268 - DNA, 510 bp, Homo sapiens
  misc_feature (297)..(311): n includes a, c, g, or t, or contains no nucleotide
ggcccacagataagttgcagactgcctttaaaatagattttatcagtggagaaatggtgatagttttttcttcagttttctcttgggaagagttttatgttgtttaaaagatattttgataacttaacctgctttatgggcttacataatattcctttcatccattctttttaaagaacggcttacctttcctatttatttttagggtgattttttaaaaagacttgtgcaatacattttgaggtgaaacttagtggattttttctgataaattagagcatttaattgactattttnnnnnnnnnnnnnnnttgaatatttgctaaagaccagttctttaagctaagacatgtaaaaaatcccaaatggcagtacctcattgtttacttagcttttgtacttatatttttcagaggaaaaaacactactgtaaattgtgaatagccaatacataactgtattgtatgcaaatctgtgattgttggcagtgtcatctctgagaaacagata

SEQ ID NO: 269 - DNA, 505 bp, Homo sapiens
  misc_feature (281)..(285): n includes a, c, g, or t, or contains no nucleotide
  misc_feature (338)..(371): n includes a, c, g, or t, or contains no nucleotide
  misc_feature (470)..(470): n includes a, c, g, or t, or contains no nucleotide
cattaaacttgacaggactatagaaggataatattttttagttcatgaattctacttttcaaatatataaaagctgcaggtggggataaaatctcatacatggattttttcgtgtccgctgtcttgtgtacttttgtacttaaccttgtacagttattttcatctcttgaaacatgaaagaaatgttatgtagatgttctttagaagatctggccatttggtacataatccagcacagataagctgggtggtaatgataataaaaatggttttctcaaaannnnngttaatttaagttacctgggatgtttctttgaatttgttttatagtttctgtnnnnnnnnnnnnnnnnnnnnnnnnnnnnnnnnnnagaaatcccctccccaccaccctttttaaggccagttaactatactacagtcaataccgtggtgagcaaaaatgtaaaaggtggaaggagaaaacttantaaaatagtatgttttcctattataagggacagac

SEQ ID NO: 270 - DNA, 143 bp, Homo sapiens
  misc_feature (39)..(53): n includes a, c, g, or t, or contains no nucleotide
ttcaagatgtcgaagcgaggacgtggtgggtcctctggnnnnnnnnnnnnnnnttccttgggtcttccggtaggagctgtaatcaattgtgctgacaacacaggagccaaaaacctgtatatcatctccgtgaaggggatcaa

SEQ ID NO: 271 - DNA, 382 bp, Homo sapiens
ccttggaatctgaacaaaggaatataaaattgccatttgaaaactgaccagctaatatggacctcagagatagatcagccagtggcccaaagccatttcaagtacagaaattatagagactacagctaaataaatttgaacattaaatataattttaccactttttgtgtttataagcatatttgtaaactcagaactgagcagaagtgactttactttctcaagtttgatactgagttgactgttcccttatccctcaccgttccccttccctttcgtaaggcaatagtgcacaacttaggttatttttgcttccgaatttgaatgaaaacttaatgccatggatttttttcttttgcaagacacctgtttatcatcttgt

SEQ ID NO: 272 - DNA, 456 bp, Homo sapiens
  misc_feature (143)..(143): n includes a, c, g, or t, or contains no nucleotide
ggaaaatctagtttcacagctatttgaatttttttctggatttactatataactcttattttttaaaagatcattctgttctttcaaggagaaataagcctaaaagaagaaaaacaaaaaaaattctgtataaaactgtaatncctttgtattcatgtttacagtgctattactataattcaaaattatgtatgtgacttagagttatataatcataatttatgtttatttcaaatatctaagtttattgcttggatttctagtgagagctgttgaatttggtgatgtcaaatgtttctagggtttttttagtttgtttttattgaaaaatttaattatttatgctataggtgatattctctttgaataaacctataatagaaaatagcagacaacataaacatctttgtaaatatcaaacctaatacatttcttgtccagtgataaaacaactgg

SEQ ID NO: 273 - DNA, 481 bp, Homo sapiens
  misc_feature (63)..(63): n includes a, c, g, or t, or contains no nucleotide
  misc_feature (83)..(100): n includes a, c, g, or t, or contains no nucleotide
  misc_feature (349)..(350): n includes a, c, g, or t, or contains no nucleotide
  misc_feature (352)..(360): n includes a, c, g, or t, or contains no nucleotide
  misc_feature (362)..(362): n includes a, c, g, or t, or contains no nucleotide
  misc_feature (367)..(369): n includes a, c, g, or t, or contains no nucleotide
gatgatggcctttgaatatgcagacaacctttgaattgtgcctactaaattatagcagggganctttggcacccaaggagttnnnnnnnnnnnnnnnnnnaatagtaattcccagccatactctggactttattttgctaaccataactgagcaaatgtaaattactgctatattaatgttttaaagcactgggatagtctaattctaacttgtaattaattatgtttgccaattatctgtttgaaataaatttgtgtctgaacagctattgaaactgttaaattgtacagatattattcatgacagctttgtactgtggaatgtgcttaataaaaaacaaaaaagttnnannnnnnnnnantaaannnctaagtaatgtcaataaatcgagtatgggtattatgcagtgcacctaatctggcttcatgcaattgttacttcagctactgattcaaagccaatactcttaataaagtgttg

SEQ ID NO: 274 - DNA, 52 bp, Homo sapiens
cctgcagcctggttaggtggatacctgccctgacatgtgaggcaagctaagg

SEQ ID NO: 275 - DNA, 334 bp, Homo sapiens
  misc_feature (26)..(26): n includes a, c, g, or t, or contains no nucleotide
  misc_feature (29)..(29): n includes a, c, g, or t, or contains no nucleotide
  misc_feature (31)..(33): n includes a, c, g, or t, or contains no nucleotide
  misc_feature (37)..(37): n includes a, c, g, or t, or contains no nucleotide
  misc_feature (39)..(39): n includes a, c, g, or t, or contains no nucleotide
  misc_feature (43)..(43): n includes a, c, g, or t, or contains no nucleotide
  misc_feature (46)..(46): n includes a, c, g, or t, or contains no nucleotide
  misc_feature (48)..(48): n includes a, c, g, or t, or contains no nucleotide
  misc_feature (52)..(52): n includes a, c, g, or t, or contains no nucleotide
  misc_feature (54)..(54): n includes a, c, g, or t, or contains no nucleotide
  misc_feature (56)..(57): n includes a, c, g, or t, or contains no nucleotide
  misc_feature (59)..(59): n includes a, c, g, or t, or contains no nucleotide
  misc_feature (62)..(62): n includes a, c, g, or t, or contains no nucleotide
  misc_feature (64)..(66): n includes a, c, g, or t, or contains no nucleotide
  misc_feature (68)..(69): n includes a, c, g, or t, or contains no nucleotide
  misc_feature (74)..(74): n includes a, c, g, or t, or contains no nucleotide
  misc_feature (76)..(76): n includes a, c, g, or t, or contains no nucleotide
  misc_feature (79)..(79): n includes a, c, g, or t, or contains no nucleotide
  misc_feature (90)..(90): n includes a, c, g, or t, or contains no nucleotide
  misc_feature (94)..(95): n includes a, c, g, or t, or contains no nucleotide
  misc_feature (97)..(97): n includes a, c, g, or t, or contains no nucleotide
  misc_feature (133)..(150): n includes a, c, g, or t, or contains no nucleotide
atgacaccaggctctacagtaatganttnannnccgnanaagntancncttntnanncnttnannngnncagtngnctntgaaaatcganccanncnttcctgtgaagggtgcctctcaccgtcgtgtctctnnnnnnnnnnnnnnnnnnaaaaaaactggtctgctttactgacagccgtagtgattattctaactattgctggaaacatactcgtcatcatggcagtgtccctagagaaaaagctgcagaatgccaccaactatttcctgatgtcacttgccatagctgatatgctgctgggtttccttgtcatgcccgtgtccatgttaac

SEQ ID NO: 276 - DNA, 297 bp, Homo sapiens
gcagccgcctcagctccaatggtcttctctccgcatcaccatcctcctcaccctcccagtctccccccagggacccccctggattccccatggctcctcccaatttcttccttccttccccatctccacccgccttcctgccctttgctggggtcctccgaggccctggccggccggtgcccccctccccagctccaggaggcagctgagggggatgggggggcagatcttggactcatgaggaggggcccccctgcccagaggggtcaacccttctggaaactgtgaagatctgac

SEQ ID NO: 277 - DNA, 496 bp, Homo sapiens
  misc_feature (43)..(43): n includes a, c, g, or t, or contains no nucleotide
  misc_feature (76)..(76): n includes a, c, g, or t, or contains no nucleotide
  misc_feature (95)..(95): n includes a, c, g, or t, or contains no nucleotide
  misc_feature (127)..(156): n includes a, c, g, or t, or contains no nucleotide
  misc_feature (163)..(163): n includes a, c, g, or t, or contains no nucleotide
  misc_feature (302)..(302): n includes a, c, g, or t, or contains no nucleotide
  misc_feature (319)..(334): n includes a, c, g, or t, or contains no nucleotide
  misc_feature (350)..(350): n includes a, c, g, or t, or contains no nucleotide
agactatcgagacagccatcagagggttctcgcttcagcacangatccggagttttgaagaagcgcgaggtctggnccgaattaatgagcgaatnccaccccgaaaggatagcatacacgctggtgnnnnnnnnnnnnnnnnnnnnnnnnnnnnnncacatgntgcgcacaggagcgaccaagggaagaaagcccattcatgacttagagtcctgccgtggctcaggtggatctaaaactcaagaacaaattctatttatttattattggaaaatgaaaagcaactcaaaacaacttcaacntggaggtgcatttatannnnnnnnnnnnnnnnttctgtaaaaaggtgnctgttttataaattcttttaatttatgttcaatatatataaaaagtgcatctgttttgtttttcccttttttctccataattttaagaaatgaatctgattgttgtcaacacatttgtgaagtcttgtgctataaaggggaacttc

SEQ ID NO: 278 - DNA, 433 bp, Homo sapiens
gaaataagaccactgttttgaactaccacaaaagtataaatgaatattttaatgccacaatctttcctgttgcctgtggagtctctgctgaaatgaatcaggattcgagctctaggatgagacagaaaatgaaagcatgttgtttgccaggacactgtgggtttatattgatgtgtaacaagttgatttggaacactggactctcattctgttattctggttttgttttttttgttttgttttttttcttttgtaaaggcaatgagctagtcccagaaaggatccttcagttacatacaatttgtttaatgaaatgtcatggctctgttcatatttttgtcttgttcttccaattggtatatacaactttcagagcctcttgtatttggaaggctggaagggcccagactttggaatagtgtcttggtttcac

SEQ ID NO: 279 - DNA, 492 bp, Homo sapiens
  misc_feature (83)..(83): n includes a, c, g, or t, or contains no nucleotide
  misc_feature (96)..(101): n includes a, c, g, or t, or contains no nucleotide
  misc_feature (171)..(191): n includes a, c, g, or t, or contains no nucleotide
  misc_feature (200)..(214): n includes a, c, g, or t, or contains no nucleotide
  misc_feature (257)..(257): n includes a, c, g, or t, or contains no nucleotide
  misc_feature (279)..(279): n includes a, c, g, or t, or contains no nucleotide
caactctgtggaactaaattgtttttactttgtgaaagctgctattttacggaaagattttgattatacagtttgtttttaanttgtcttttatannnnnntgtatttggtaagaatcggttgttacacaagctgttctttcccagttacaaaatcctgtgttcggttgtnnnnnnnnnnnnnnnnnnnnnttgttttcnnnnnnnnnnnnnnnttattttcactgacatttgagcatgttattttataaatgacgngattccagggtaggaagtgctntttattccccttttgttttttcttttaaaaaattacgtcagttaaaaaaataaaaaaactgcagtcttatggtttagaaaacttgtttagctccatagaggaaagaatgttaaactttgtattttaaaacatgattctctgaggttaaacttggttttcaaatgttatttttacttgtattttgcttttggtacggccagaaatcgagcttgt

SEQ ID NO: 280 - DNA, 567 bp, Homo sapiens
  misc_feature (359)..(383): n includes a, c, g, or t, or contains no nucleotide
ctgcaattgaggaacttgggatgctattaattttgtatttcagcaactgccccttctcctatcccaaagcaccaattactgccctctgcctcagcagtaccagtataagatgacattccaaagactggaggcaactcagcctgagttaattcacaaaattatgccatgctggggcttgagcttgagcttgggcttaggcttgggctcagcttttgaccctcaggcatctccttttccttcctgtcttcctctcccttctcctctgctgcagcatgattttcttaatcttcagacactcactattttcatgaacagttaccctctgtccccacaaccaaagacaactcatggcctccttnnnnnnnnnnnnnnnnnnnnnnnnntgtggctttgcaaaatgtacccaggtcacaaggggatttttttttttttagcaatgatatccctgtctgggtcactttttaagcttgtaaccgcccccccagacttataatcttaaatgtattttcctttgtttaagctgctgcttcctctgtttcattggattgtgccagttatcagtggctc

SEQ ID NO: 281 - DNA, 560 bp, Homo sapiens
  misc_feature (123)..(123): n includes a, c, g, or t, or contains no nucleotide
  misc_feature (142)..(232): n includes a, c, g, or t, or contains no nucleotide
  misc_feature (235)..(236): n includes a, c, g, or t, or contains no nucleotide
  misc_feature (239)..(242): n includes a, c, g, or t, or contains no nucleotide
  misc_feature (247)..(247): n includes a, c, g, or t, or contains no nucleotide
  misc_feature (249)..(249): n includes a, c, g, or t, or contains no nucleotide
  misc_feature (280)..(280): n includes a, c, g, or t, or contains no nucleotide
gctgaggtcggtcctctcagccctgcctgccctggcctgggctctcccagcctcccagccctctgccccctcagatggctttttgtttttgtttttttttgcatccatcagagactgcacctntgtgtggcaggcagggcannnnnnnnnnnnnnnnnnnnnnnnnnnnnnnnnnnnnnnnnnnnnnnnnnnnnnnnnnnnnnnnnnnnnnnnnnnnnnnnnnnnnnnnnnnttnnggnnnngaggngnaggctttctgtgtgactcgggagttcttccntgagggctgccagggggtggtgtgccaggacctcaggctgggcctttgtgctggccttgcagtgggtgtgtggggaagtcactgtcccactatgggtctccactacccagtcactgaccctgggagaccccttctgtgtgggagggagcgggggctggctagcgggccccccagccagggatcccagaggctgagggttggggagaggaagccatcatctcattacctctgtcagtgcaggggtggctgctgcttcccttgtgcacttgggtcgctgtga

SEQ ID NO: 282 - DNA, 323 bp, Homo sapiens
  misc_feature (34)..(35): n includes a, c, g, or t, or contains no nucleotide
  misc_feature (44)..(44): n includes a, c, g, or t, or contains no nucleotide
  misc_feature (54)..(54): n includes a, c, g, or t, or contains no nucleotide
  misc_feature (56)..(57): n includes a, c, g, or t, or contains no nucleotide
  misc_feature (71)..(71): n includes a, c, g, or t, or contains no nucleotide
  misc_feature (82)..(82): n includes a, c, g, or t, or contains no nucleotide
  misc_feature (91)..(91): n includes a, c, g, or t, or contains no nucleotide
  misc_feature (99)..(99): n includes a, c, g, or t, or contains no nucleotide
  misc_feature (141)..(141): n includes a, c, g, or t, or contains no nucleotide
  misc_feature (144)..(144): n includes a, c, g, or t, or contains no nucleotide
ccaagactgagtggttggatggcaagcatgtggnntttggcaangtgaaagaangnntgaatattgtggangccatggagcnctttgggtncaggaatngcaagaccagcaagaagatcaccattgctgactgtggacaantcnaataagtttgacttgtgttttatcttaaccaccagatcattccttctgtagctcaggagagcacccctccaccccatttgctcgcagtatcctagaatctttgtgctctcgctgcagttccctttgggttccatgttttccttgttccctcccatgcctagctggattgcagagttaag

SEQ ID NO: 283 - DNA, 511 bp, Homo sapiens
  misc_feature (55)..(55): n includes a, c, g, or t, or contains no nucleotide
  misc_feature (429)..(443): n includes a, c, g, or t, or contains no nucleotide
cagcctgcagccagctgagatggagggcctggcacagcggggcgtgcactgcccnagccccccgtagcaggggcatgactgtttcccaaccagcacccaaagacgggcgccattgccaagtcacaggatgtgatctaccccggacttcctatctgagcttcaagggagacatctcagggcaaagctttcgtgatggaggaggcaaagacagtagccccctccttatttcttttttctatctgttcctcttagcccccaaactcccaggttctcacttccttcttctggagtttaaccagatcctccccacccccgctccctcatagtctacccccacgcctcagtgtctcctcaggcacaggaagtgggcggtgggggaggggtaagggcctgacagtgggtgggtgggtatattcctcaggagtccannnnnnnnnnnnnnnctggaacttagagacgggagggacccgagcctggcttttgacctaagaaccctagcaggagaatacag

SEQ ID NO: 284 - DNA, 467 bp, Homo sapiens
gtccactccaaagtcagtactaagaaaagcaagagaaaaggtacagatgattttgactttgctggctcatttcaagggccaagaaaaaagaaaagaaacttaaatgattccagcctatttgtatctgctgaagagtttggccatctattggatgaaaatatgggatccaagtttgataacattggcatgaatgccatggctaacaaagataatgcaagtctcaaacagcttagatgggaggctgaacgtgatgactggctacacaacagagatgcaaaaagtatcatcaagaaaaagaaacattttaaaaagaagaggattaaaaccactcaaaaaactaaaaaacaaaggaaatgagttattaatgtaaattatagattaaaattctacttacatctaatttttgctgttcaaccatgttttttgatctagctctctgattccatacattccagacttctcagtgg

SEQ ID NO: 285 - DNA, 434 bp, Homo sapiens
  misc_feature (336)..(336): n includes a, c, g, or t, or contains no nucleotide
cccagatgtcacttacgtcaagaaggtccggaccctccgtatgcacctgttcacggccctgcagctgctctgcctggccctgctctgggccgtcatgtccacagctgcctccctggccttccccttcatcctcatcctcacagtgccgctccgcatggtggtgctcacccgtatcttcaccgaccgagagatgaaatgtctggatgctaacgaggcagagccggtgtttgatgagcgggagggtgtggacgagtacaatgagatgcccatgcctgtgtagccgccaccgagggacagccgagggaccgatggacgaggggacaggctggtgggatngggttccccctcccatgcccctccctcctttttatttaagtgaataatttaaagtcttctcctcccccactgcccctgcagtaaagtgctttggcccc

SEQ ID NO: 286 - DNA, 281 bp, Homo sapiens
  misc_feature (26)..(40): n includes a, c, g, or t, or contains no nucleotide
  misc_feature (106)..(120): n includes a, c, g, or t, or contains no nucleotide
aggtcactctggaatatagacccgtnnnnnnnnnnnnnnngaacgaggctgactgtgccaccgtcccgccagccattcgctcctactgatgagacaagatgtggtnnnnnnnnnnnnnnnttttgtaattatgtataatagctcatgcatgtgtccatgtcataactgtcttcatacgcttctgcactctggggaagaaggagtacattgaagggagattggcacctagtggctgggagcttgccaggaacccagtggccagggagcgtggcacttacctt

SEQ ID NO: 287 - DNA, 489 bp, Homo sapiens
  misc_feature (26)..(48): n includes a, c, g, or t, or contains no nucleotide
  misc_feature (63)..(63): n includes a, c, g, or t, or contains no nucleotide
  misc_feature (68)..(68): n includes a, c, g, or t, or contains no nucleotide
  misc_feature (74)..(75): n includes a, c, g, or t, or contains no nucleotide
  misc_feature (102)..(102): n includes a, c, g, or t, or contains no nucleotide
  misc_feature (109)..(122): n includes a, c, g, or t, or contains no nucleotide
  misc_feature (125)..(125): n includes a, c, g, or t, or contains no nucleotide
  misc_feature (183)..(183): n includes a, c, g, or t, or contains no nucleotide
  misc_feature (247)..(248): n includes a, c, g, or t, or contains no nucleotide
  misc_feature (250)..(251): n includes a, c, g, or t, or contains no nucleotide
agccacaatctactgctccatacggnnnnnnnnnnnnnnnnnnnnnnnacaacagaatgatcntgagnattccnnaaagtcctacctatgaaaatttcaccngaaaggnnnnnnnnnnnnnngcntctctcctgggaccgtggggttggaaagtcagctggacctcatggggcctggggctcncagacagaagcacctcagaatttccttcagtgcctcagagatgcctggatgtggcccctccccnncnnctcacccttaaggactcccaaacccattaatagttcagacacaggctccttcttggagcctatgggcttcagatgtctttgccccatttgtcacctcgcacacttatagcgtttcctcctcgaaattctaccaagactggtcaaatgttgctgaggggcctggaccagctgtcctttacaccaccttctcaacactgctgaaaagaacccaagagaattgtcacacatgacacaagat

SEQ ID NO: 288 - DNA, 413 bp, Homo sapiens
  misc_feature (251)..(269): n includes a, c, g, or t, or contains no nucleotide
  misc_feature (302)..(302): n includes a, c, g, or t, or contains no nucleotide
  misc_feature (382)..(382): n includes a, c, g, or t, or contains no nucleotide
tgtggcccatcttcaggatccaccaccagaaaacccgctacatcttcgacctcttttacaagcggaaagccatcagcagagaactctatgaatattgtattaaagaaggctatgcagacaaaaacctgattgcaaaatggaaaaagcaaggatatgagaacttgtgctgcctgcggtgcattcagacacgggacaccaacttcgggacgaactgcatctgccgcgtgcccaaaagcaagctggaagtgggnnnnnnnnnnnnnnnnnnncactgtggctgtcgtggctgctctggctgaggntggcgcgctccaccctggactctggacttcgcaggttcctgcctgtcacgccacccccttcctgggagcagcgagcagtnccccaggcccgagttggagcacggtctctat

SEQ ID NO: 289 - DNA, 502 bp, Homo sapiens
  misc_feature (68)..(86): n includes a, c, g, or t, or contains no nucleotide
  misc_feature (205)..(229): n includes a, c, g, or t, or contains no nucleotide
  misc_feature (377)..(414): n includes a, c, g, or t, or contains no nucleotide
attctaaggtgatgttcttagcactttaattcctgtcaaattttttgttctccccttctgccatcttnnnnnnnnnnnnnnnnnnntctactgtgtctctagggttaagccaaaagacaaaaaaaattttactacttttgagattgccccaatgtacagaattatataattctaacgcttaaatcatgtgaaagggttgctgctnnnnnnnnnnnnnnnnnnnnnnnnnaacccaaggaggaactcttgatcaagatgcccaaccctgtgatcagaacctccaaatactgccatgagaaactagagggcaggtgttcataaaagccctttgaacccccttcctgccctgtgttaggagatagggatattggcccctnnnnnnnnnnnnnnnnnnnnnnnnnnnnnnnnnnnnnnatagcactttgttcactgtcctgtgtcagagcactgagctccacccttttctgagagttattacagccagaaagtgtgggctgaagat

SEQ ID NO: 290 - DNA, 317 bp, Homo sapiens
  misc_feature (76)..(82): n includes a, c, g, or t, or contains no nucleotide
  misc_feature (84)..(87): n includes a, c, g, or t, or contains no nucleotide
  misc_feature (90)..(92): n includes a, c, g, or t, or contains no nucleotide
  misc_feature (238)..(267): n includes a, c, g, or t, or contains no nucleotide
aatgttgacaagctctggttgcttatttttagaaaatgaggacatttaataataataaaaaaaaagggattaatannnnnnnannnnaannnttttgtcttctgagtgttggagcttggctgaagacatgtttaatactgtacaatttctgaagatggttattaacactgtgctgttaagcatccatttaaaaatatttgttatcttctttgcctgcctgtattttaaaaagaaatannnnnnnnnnnnnnnnnnnnnnnnnnnnnnatgctgaatgcagtgatgttatcagtcagattctttccttggctcagttg

SEQ ID NO: 291 - DNA, 49 bp, Homo sapiens
ggctcgggaagttctgcgcatgcgtggcaccatttcccgtgaacaccca

SEQ ID NO: 292 - DNA, 530 bp, Homo sapiens
  misc_feature (71)..(71): n includes a, c, g, or t, or contains no nucleotide
  misc_feature (450)..(462): n includes a, c, g, or t, or contains no nucleotide
  misc_feature (464)..(472): n includes a, c, g, or t, or contains no nucleotide
  misc_feature (485)..(485): n includes a, c, g, or t, or contains no nucleotide
accttgccatgtccacgctgttggtcaaacccctctgtcatgcctctttaaagagaaaagaagagaaaganttttttttttttttaatggcagaccgaagtggagatcttgtagcctagataggatagtctgaccttctagcatagtctttttggcaaatgatttgtgttttcagtgtgtggggaagctgtcctgggggctggggcgacagatagcacataggctgtttctggggctgcaggggcttccctgagctggatgttgtgggtgttgccgtgcttcaggaagtgtggcgaccagaaagcgtagacccggggcccagggtctgcccgcccctgcagcctggcctccccgcacaggctgtggcttgcactccagccgctctagtctctcaggaatttgcttgttacttgtactgtgtaaataaagcttcctggttcaatacccaannnnnnnnnnnnnannnnnnnnntttctgttgggtntggtgaactggcaggtcccccctgctcacaggagcattagctctg

SEQ ID NO: 293 - DNA, 526 bp, Homo sapiens
  misc_feature (26)..(77): n includes a, c, g, or t, or contains no nucleotide
  misc_feature (79)..(79): n includes a, c, g, or t, or contains no nucleotide
  misc_feature (84)..(84): n includes a, c, g, or t, or contains no nucleotide
  misc_feature (258)..(273): n includes a, c, g, or t, or contains no nucleotide
  misc_feature (287)..(330): n includes a, c, g, or t, or contains no nucleotide
  misc_feature (377)..(391): n includes a, c, g, or t, or contains no nucleotide
taggtgaccctgtttaataggctttnnnnnnnnnnnnnnnnnnnnnnnnnnnnnnnnnnnnnnnnnnnnnnnnnnnnantttgnttaccacccatttctcccaccccaccctgcttttttgtttgtttgttttttcatcccccagcacactataatatagtgaactggaaaagtcccttccagaaacagcttggccagctttgtgaacctttgacatctgaaaacaaccaaggatccatctgggcttctcttccccannnnnnnnnnnnnnnncattttattgacannnnnnnnnnnnnnnnnnnnnnnnnnnnnnnnnnnnnnnnnnnngaactatggttggtcacgtctatctacaacctaatcctactctttgnnnnnnnnnnnnnnngccacagccttagcagagctggggttcctgtcttctgcacacgattgactttcttgatgggtaattttttttaagattataccaacagtggatcagctgggttttggccaggaagttgtctttgtggactctgcc

SEQ ID NO: 294 - DNA, 244 bp, Homo sapiens
  misc_feature (46)..(46): n includes a, c, g, or t, or contains no nucleotide
  misc_feature (93)..(151): n includes a, c, g, or t, or contains no nucleotide
ggtccctgagactctcctgtgcagcctctggattcacctttagcanctatgccatgagctgggtccgccaggctccagggaaggggctggagnnnnnnnnnnnnnnnnnnnnnnnnnnnnnnnnnnnnnnnnnnnnnnnnnnnnnnnnnnnccggttcaccatctccagagacaattccaagaacacgctgtatctgcaaatgaacagcctgagagccgaggacacggccgtatattactgtgc

SEQ ID NO: 295 - DNA, 434 bp, Homo sapiens
  misc_feature (37)..(82): n includes a, c, g, or t, or contains no nucleotide
ggcttgccattgtttactctcttatttaccaacttcnnnnnnnnnnnnnnnnnnnnnnnnnnnnnnnnnnnnnnnnnnnnnncccagcgcctgtgttctgtgttagaaaggttttatatatatataaaattacatatatatgtagaaatatatgtaattttgggggccctgttccttgcacattttacagttacctcatttttcccatgtatgtatttgagaaaatgctaatatatagagaaaaaaatggttcttaaagcttaaatgtgtggttttttccattccatgggattcacattggtttgtagcatttaacataactagtatgttgtattatatatatgtgtatactgattgaaatttttaacagatttgtactttttttaaaatgaaagttgctagttctgcttgaccaagtagtgcaatcattattt

SEQ ID NO: 296 - DNA, 463 bp, Homo sapiens
  misc_feature (63)..(64): n includes a, c, g, or t, or contains no nucleotide
  misc_feature (67)..(67): n includes a, c, g, or t, or contains no nucleotide
  misc_feature (70)..(70): n includes a, c, g, or t, or contains no nucleotide
  misc_feature (73)..(73): n includes a, c, g, or t, or contains no nucleotide
  misc_feature (76)..(76): n includes a, c, g, or t, or contains no nucleotide
  misc_feature (79)..(79): n includes a, c, g, or t, or contains no nucleotide
  misc_feature (81)..(81): n includes a, c, g, or t, or contains no nucleotide
  misc_feature (88)..(88): n includes a, c, g, or t, or contains no nucleotide
  misc_feature (90)..(90): n includes a, c, g, or t, or contains no nucleotide
  misc_feature (93)..(148): n includes a, c, g, or t, or contains no nucleotide
  misc_feature (152)..(152): n includes a, c, g, or t, or contains no nucleotide
  misc_feature (260)..(288): n includes a, c, g, or t, or contains no nucleotide
  misc_feature (361)..(377): n includes a, c, g, or t, or contains no nucleotide
  misc_feature (436)..(436): n includes a, c, g, or t, or contains no nucleotide
gaaacagcaaatcaaacttgtggtgggacagattccacggaaggattgtttaatatgggattnncanagncanttntgnancatcttngnaannnnnnnnnnnnnnnnnnnnnnnnnnnnnnnnnnnnnnnnnnnnnnnnnnnnnnnnttgnaagctttttggcaagagctaaatttatttctcttattactgtaaaaccatgcctagatcttttggttaactggctgcacatataccttaataaccaggattcgggaannnnnnnnnnnnnnnnnnnnnnnnnnnnnggaccattttactcagcctgccaagctgtgttctacacctttgtttttagacacaagcagcttttgagcggannnnnnnnnnnnnnnnngcagtatcctcagagtctgaattttgagcggatagtgatgagccagctaaatcccctgnagatttgcctgccctcagtggttaact

SEQ ID NO: 297 - DNA, 547 bp, Homo sapiens
tctccatgccttcttaggaagcagctatgaatccattgtccttgtagtttcttccctcctgttctctggttatagctggtcccaggtcagcgtgggaggcacctttgggttcccagtgcccagcactttgtagtctcatcccagattactaacccttcctgatcctggagaggcagggatagtaaataaattgctcttcctaccccatcccccatcccctgacaaaaagtgacggcagccgtactgagtctgtaaggcccaaagtgggtacagacagcctgggctggtaaaagtaggtccttatttacaaggctgcgttaaagttgtactaggcaaacacactgatgtaggaagcacgaggaaaggaagacgttttgatatagtgttactgtgagcctgtcagtagtgggtaccaatcttttgtgacatattgtcatgctgaggtgtgacacctgctgcactcatctgatgtaaaaccatcccagagctggcgagaggatggagctgggtggaaactgctttgcactatcgtttgcttggtgtttgt

SEQ ID NO: 298 - DNA, 350 bp, Homo sapiens
gtccagaactgttgcctgagacccctcctctctcacacagccctgccatgctgactcggtttcccctcagagccattgttgtctgggctcgagtttctgccccaggttgtgtgctggaatcggggggtggctctcctgccacccatggggagcgccaggagaggagggtcatggaggatgttggggctctgaccccaggagtggggtggagggcggagcctgctgggggccctgccttcacagagatgccgcgtgctgggaaggctcttggggtcccctgagcgtcttccagggtggctggagagcacagacgcgccagggagccccctctgtgctcctcagagttcaat

SEQ ID NO: 299 - DNA, 528 bp, Homo sapiens
  misc_feature (180)..(180): n includes a, c, g, or t, or contains no nucleotide
  misc_feature (204)..(204): n includes a, c, g, or t, or contains no nucleotide
  misc_feature (252)..(282): n includes a, c, g, or t, or contains no nucleotide
cttgtgattcatgcttactgtaaagtggaagttgagattattttaaaacttcaagctcagtaattttgaacactgaaacattcatctaggacataataacaaagttcagtattgaccataactgttaaaacaatttttagctttcctcaagttagttatgttgtaggagtgtacctaagncagtaagcgtatttaggttaatgncagtttcacttatgttaaatgttgctcttataccacaaatacattgannnnnnnnnnnnnnnnnnnnnnnnnnnnnnnttctgtaaaactcaaatataggagctgtgtctacgattcaaagtgaaaacatttggcatgtttgttaattctagctttttggtttaatatcctgtaaggcacgtgagtgtacactttttttttttttaaggatacgggacaattttaagatgtaataccaatactttagaagtttggtcgtgtcgtttgtatgaaaatctgaggctttggtttaaatctttccttgtattgtgatttccatttaga

SEQ ID NO: 300 - DNA, 61 bp, Homo sapiens
gatgcgtcgaggtccctgtctctgtcaatgtcatgggaaccaaaagtcactgagccgtcct

SEQ ID NO: 301 - DNA, 295 bp, Homo sapiens
gtgtactgtaaccttgcagtagagatgcagctgtccttcgtgtgtggaaacacacctctcctttacatagttgggaacctcattagaaatgacctcagctgccccatatctacgttcctttcagcagttgtccaagtaggagtgtatccagtgaagacatatcaaatcacaaagtcattgtcattagagtgtacttgattactgggcatccttgtaatataatttcataccactgacacattatacttgtaagagaacatctttcccagagtgcctcagaccttattgctttaaa

SEQ ID NO: 302 - DNA, 400 bp, Homo sapiens
ctgttttggatttaaccatgtaatccatgggaccaattgagagtcagctacttttataggcatcaaagtattctcagacacctttaatatctttatggaaacttaatttttggccttttatcaatatgtcataacagcattctgaagtcagacattgttaaattgagctattaaactaatgagttttatgtaagttatatggtcttaatttggtacttgtaaatagcactagttagactctttagaatactccaagagttagggcagcagagtggagcgatttagaaagaacattttaaaacaatcagttaatttaccatgtaaaattgctgtaaatgataatgtgtacagattttctgttcaaatattcaattgtaaacttcttgttaagactgttacg

SEQ ID NO: 303 - DNA, 565 bp, Homo sapiens
  misc_feature (26)..(47): n includes a, c, g, or t, or contains no nucleotide
  misc_feature (286)..(300): n includes a, c, g, or t, or contains no nucleotide
gggaagcctcaccttcagacccagtnnnnnnnnnnnnnnnnnnnnnngtggttgtcttaacatcgtagtcctagtttgcattttttaaatcccctctgtttaaaaggtttgtaaaacaaaaacaaaaaactaagtctgctcagtgaaatgctgtagaaccctaaataagtggtagaagagtgtcactgaattttgtctctgaattcagtataactgagttttgtccatgctggtgtctgggttataggcctgatgggcctggtagttttccatcttgttctggccnnnnnnnnnnnnnnntgcacttcctcaaagcttgtgtacagtgctcacctaaatccatctgactacttgttcctgtgccctcttgttttaggcctcgtttacttttaaaaaatgaaattgttcattgctgggagaagaatgttgtaatttttacttattaaagtcaacttgttaagttttttatgtattcctgttgggttttcttgttgatctcatgctagcagagcaaaaattgtaaaatattttgattaaaaatctagggacctttatgtcctatttg

SEQ ID NO: 304 - DNA, 252 bp, Homo sapiens
tattttggaccatgttatctgtggcacagtcagtgctgtgtttgaggtaaatgcagtaacggttagttttctactttgccttataaaaggtagaaaccatgtgtatgttatgtttgtctataaaagaaaaatactaatattaaattatttcttatgactgtgagtcactcacttatttttccaataattgatattgtacattcttagtgccattaggtatgtatgtatgtaacttttacagtttttcagctg

SEQ ID NO: 305 - DNA, 360 bp, Homo sapiens
  misc_feature (26)..(29): n includes a, c, g, or t, or contains no nucleotide
  misc_feature (32)..(43): n includes a, c, g, or t, or contains no nucleotide
  misc_feature (46)..(49): n includes a, c, g, or t, or contains no nucleotide
  misc_feature (51)..(51): n includes a, c, g, or t, or contains no nucleotide
  misc_feature (53)..(53): n includes a, c, g, or t, or contains no nucleotide
  misc_feature (101)..(101): n includes a, c, g, or t, or contains no nucleotide
  misc_feature (103)..(103): n includes a, c, g, or t, or contains no nucleotide
  misc_feature (107)..(107): n includes a, c, g, or t, or contains no nucleotide
  misc_feature (112)..(113): n includes a, c, g, or t, or contains no nucleotide
  misc_feature (115)..(116): n includes a, c, g, or t, or contains no nucleotide
  misc_feature (119)..(124): n includes a, c, g, or t, or contains no nucleotide
  misc_feature (128)..(128): n includes a, c, g, or t, or contains no nucleotide
  misc_feature (133)..(133): n includes a, c, g, or t, or contains no nucleotide
  misc_feature (335)..(335): n includes a, c, g, or t, or contains no nucleotide
gagtctacctcttcagtaggtttgtnnnnatnnnnnnnnnnnnagnnnncntntgctccccagtgctacctctctcttccctagggccttttgtggattgncngtantcccnncnntannnnnncacngtctngattagaagtgttttaatttctacacacccatagtgcacacttgtatattgaaaagatagggaagagagaaacatttatggaatcagtcgttggcaccttcaatacttcatgatttttgtcgagtttacttcatgaggaggtcagcccattggctcccatctgaaccactttgcctctgaaacttaattacatccagaaagnaggacacttgtatgctagtctatgg

SEQ ID NO: 306 - DNA, 211 bp, Homo sapiens
ccagcgcaaggggctgaactatcggtatcacctgggttgtaactgcaagatcaagtcctgctactacctgccttgctttgtgacttccaagaacgagtgtctctggaccgacatgctctccaatttcggttaccctggctaccagtccaaacactacgcctgcatccggcagaagggcggctactgcagctggtaccgaggatgggccccc

SEQ ID NO: 307 - DNA, 412 bp, Homo sapiens
  misc_feature (148)..(167): n includes a, c, g, or t, or contains no nucleotide
  misc_feature (262)..(263): n includes a, c, g, or t, or contains no nucleotide
  misc_feature (377)..(377): n includes a, c, g, or t, or contains no nucleotide
gatggcgttcccagaaagtattttaatatcaatagaccacagccaaagccttaaatcaaacccacacacaactgaaaattgcctcctccatctctcaccttttcctgtggagaagagaaggaaaagcacacgcatgcgcctcagcaannnnnnnnnnnnnnnnnnnntgtttgtccagtttagcatggctaggtctggaactataatagcagggtcagactgtgggttcctcttctcctgtgcttgagctctggtttgaganntggcgctaccaacctttttcctatatcccgagtggggcacagacggtggatctctgcccagtgtggtgtgtctggcttggcttttcaatattgtgaggtctgaatggatctganccctgtcagatgaaaatgattcacagctctggcag

SEQ ID NO: 308 - DNA, 445 bp, Homo sapiens
  misc_feature (63)..(90): n includes a, c, g, or t, or contains no nucleotide
  misc_feature (397)..(413): n includes a, c, g, or t, or contains no nucleotide
gcttttcaaatacatttcttaaggaactgtttatgattattactggatttgtcatttttgatnnnnnnnnnnnnnnnnnnnnnnnnnnnntgatgagaagaaatgttaaagtgctttctaaaaggaaattttttcacctttggaggagaatatattagagttgtgggtaatttttcacagccacctatgtacatactaattacccattggatacttatatctaaaagtctcatgctgaagtatagtttttgggaaagaatgattttaaataaagagattgtaaaagtaaaaaactgtaaatgtatatgtatgatagaattgtttcctctaagtgtagtttttctttcaactaaaattcagtttatgtgtaaaataattcagtcattaatagaaatgnnnnnnnnnnnnnnnnngtactgttttgccacatacttctaaagaacac

SEQ ID NO: 309 - DNA, 405 bp, Homo sapiens
  misc_feature (58)..(96): n includes a, c, g, or t, or contains no nucleotide
  misc_feature (305)..(321): n includes a, c, g, or t, or contains no nucleotide
gagtccgggtccagctcaaacaggaagatgggagcctctgccttgtacagttcccatnnnnnnnnnnnnnnnnnnnnnnnnnnnnnnnnnnnnnnngtatgcagcagaaatgatacctaaactaaaaacaaggacacaaaaaacaggaggtgctgaccaaagtcttcaacaaggagagggaagtaaaaaagggaaaggaaagaaaaagaagtaacctagtatcagcatcaagtatgtggtactactgtaagagacatgaatggagacttctaatttgtatcggagggaaacagaagctttttgtnnnnnnnnnnnnnnnnnactgtgaacccttgtgcctctcatctttatcatcggagttgacagtgaaacaaatttacatcagaagtttgcatctcgcgtata

SEQ ID NO: 310 - DNA, 458 bp, Homo sapiens
  misc_feature (182)..(182): n includes a, c, g, or t, or contains no nucleotide
  misc_feature (266)..(266): n includes a, c, g, or t, or contains no nucleotide
  misc_feature (293)..(316): n includes a, c, g, or t, or contains no nucleotide
  misc_feature (390)..(404): n includes a, c, g, or t, or contains no nucleotide
ttcgacccaagctcaactatcgagtgcccagccggggccataaactgactgtgaccctgtcatgtggcagaccttccatccgaaccacggcttgggaagactacatttggttccaggcaccagtgacatttaaaggcttccgcgagtgaatgagtgcttcttaatcctaaaaacacaatggnctgaattatctttctccatgtggcgctgaatcacccatctggtttggagctagagttgcttcctggtgagagaggaagcaactntccttctggttgtctgcctcccctcannnnnnnnnnnnnnnnnnnnnnnngtggctgtgactgtgactgtaatcattgctgaacaacatctctttgaatcaaaggttgattttcccagagggtnnnnnnnnnnnnnnntctattaggagttggaaagcaaaaatgggtccatagacactctatggaggtgtc

SEQ ID NO: 311 - DNA, 491 bp, Homo sapiens
  misc_feature (52)..(52): n includes a, c, g, or t, or contains no nucleotide
  misc_feature (55)..(55): n includes a, c, g, or t, or contains no nucleotide
  misc_feature (60)..(60): n includes a, c, g, or t, or contains no nucleotide
  misc_feature (62)..(67): n includes a, c, g, or t, or contains no nucleotide
  misc_feature (69)..(95): n includes a, c, g, or t, or contains no nucleotide
  misc_feature (97)..(126): n includes a, c, g, or t, or contains no nucleotide
  misc_feature (297)..(297): n includes a, c, g, or t, or contains no nucleotide
  misc_feature (302)..(302): n includes a, c, g, or t, or contains no nucleotide
tctctctctttgtgggttggccaggaggttcccccgaccaggttggggaganttngggcnannnnnntnnnnnnnnnnnnnnnnnnnnnnnnnnntnnnnnnnnnnnnnnnnnnnnnnnnnnnnnngattcccacagcacaaccggtcccttccatgccctgggatgcctcaccacacccaggtctcttcctttgctctgaggtcccttcaaggcctccccaatccaggccaaagccccatgtgccttgtccaggaactgcctgggccatgcgaggggccagcagagggcgccaccnaccanctgacggctggggacccacccagcccctctcccctctctgctccagactcacttgccattgccaggagatggccccaacaagcaccccgcttttgcagcagaggagctgagttggcagaccgggcccccctgaaccgcaccccatcccaccagccccggccttgctttgtctggcctcacgtgtctcag

SEQ ID NO: 312 - DNA, 566 bp, Homo sapiens
  misc_feature (111)..(111): n includes a, c, g, or t, or contains no nucleotide
  misc_feature (127)..(127): n includes a, c, g, or t, or contains no nucleotide
  misc_feature (383)..(441): n includes a, c, g, or t, or contains no nucleotide
tgtgcccaggaaatggctaaattcatttcaaaaaacaaacacgtgagcctgtgcatcttcactgcccgcatctatgatgatcaaggaagatgtcaggaggggctgcgcacnctggccgaggctgggnccaaaatttcaataatgacatacagtgaatttaagcactgctgggacacctttgtggaccaccagggatgtcccttccagccctgggatggactagatgagcacagccaagacctgagtgggaggctgcgggccattctccagaatcaggaaaactgaaggatgggcctcagtctctaaggaaggcagagacctgggttgagcctcagaataaaagatcttcttccaagaaatgcaaacaggctgttcaccaccannnnnnnnnnnnnnnnnnnnnnnnnnnnnnnnnnnnnnnnnnnnnnnnnnnnnnnnnnnaaaaattagagtgcattactttgaatcaaaaatttatttatatttcaagaataaagtactaagattgtgctcaatacacagaaaagtttcaaacctactaatccagcgacaatttgaatcggttt

SEQ ID NO: 313 - DNA, 563 bp, Homo sapiens
  misc_feature (42)..(42): n includes a, c, g, or t, or contains no nucleotide
  misc_feature (133)..(133): n includes a, c, g, or t, or contains no nucleotide
  misc_feature (428)..(428): n includes a, c, g, or t, or contains no nucleotide
  misc_feature (430)..(430): n includes a, c, g, or t, or contains no nucleotide
  misc_feature (458)..(459): n includes a, c, g, or t, or contains no nucleotide
  misc_feature (461)..(465): n includes a, c, g, or t, or contains no nucleotide
  misc_feature (527)..(527): n includes a, c, g, or t, or contains no nucleotide
agtaacttagtgacacataatgacaaccaaaatatttgaaancacttaagcactcctccttgtggaaagaatataccaccatttcatctggctagttcaccatcacaactgcattaccaaaaggggatttttnaaaacgaggagttgaccaaaataatatctgaagatgattgcttttccctgctgccagctgatctgaaatgttttgctggcacattaatcatagataaagaaagattgatggacttagccctcaaatttcagtatctatacagtactagaccatgcattcttaaaatattagataccaggtagtatatattgtttctgtacaaaaatgactgtattctctcaccagtaggacttaaactttgtttctccagtggcttagctcctgttcctttgggtgatcactagcacccattttngnagaaagctggttctacatggggggatanntnnnnnatagataatttgctgcatgttaattctcaagaactaagcctgtgccagtgctttcctaagcngtatacctttaatcagaactcattcccagaacctgg

SEQ ID NO: 314 - DNA, 169 bp, Homo sapiens
tcgacaagacgatccgggtaaagttccagggaggccgcgaagccagtggaatcctgaagggcttcgacccactcctcaaccttgtgctggacggcaccattgagtacatgcgagaccctgacgaccagtacaagctcacggaggacacccggcagctgggcctcgtggt

SEQ ID NO: 315 - DNA, 366 bp, Homo sapiens
  misc_feature (80)..(80): n includes a, c, g, or t, or contains no nucleotide
  misc_feature (124)..(158): n includes a, c, g, or t, or contains no nucleotide
cttagagccaagtgtcttttaaacattattttttatttctgatttcataattcagaactaaatttttcatagaagtgttnagccatgctacagttagtcttgtcccaattaaaatactatgcannnnnnnnnnnnnnnnnnnnnnnnnnnnnnnnnnnttagtcatcagatatgcttactaaatcttcagcatagaaggaagtgtgtttgcctaaaacaatctaaaacaattcccttctttttcatcccagaccaatggcattattaggtcttaaagtagttactcccttctcgtgtttgcttaaaatatgtgaagttttccttgctatttcaataacagatggtgctgctaattcccaacatttc

SEQ ID NO: 316 - DNA, 388 bp, Homo sapiens
  misc_feature (119)..(133): n includes a, c, g, or t, or contains no nucleotide
ttagtggtatttttggcacccttatatatgttttccaaactttcagcagtgatattatttccataacttaaaaagtgagtttgaaaaagaaaatctccagcaagcatctcatttaaatnnnnnnnnnnnnnnnttaaaaatacagcaatatgtgactttttaaaaaagctgtcaaataggtgtgaccctactaataattattagaaatacatttaaaaacatcgagtacctcaagtcagtttgccttgaaaaatatcaaatataactcttagagaaatgtacataaaagaatgcttcgtaattttggagtaggaggttccctcctcaattttgtatttttaaaaagtacatggtaaaaaaaaaaattcacaacagtatataaggctgt

SEQ ID NO: 317 - DNA, 130 bp, Homo sapiens
caaatgaaaagcaaacctcggggatactgtctgatcatcaacaatcacaattttgcaaaagcacgggagaaagtgcccaaacttcacagcattagggacaggaatggaacacacttggatgcagggtttg

SEQ ID NO: 318 - DNA, 569 bp, Homo sapiens
  misc_feature (43)..(43): n includes a, c, g, or t, or contains no nucleotide
  misc_feature (56)..(56): n includes a, c, g, or t, or contains no nucleotide
  misc_feature (70)..(70): n includes a, c, g, or t, or contains no nucleotide
  misc_feature (109)..(113): n includes a, c, g, or t, or contains no nucleotide
  misc_feature (135)..(135): n includes a, c, g, or t, or contains no nucleotide
  misc_feature (142)..(142): n includes a, c, g, or t, or contains no nucleotide
  misc_feature (181)..(181): n includes a, c, g, or t, or contains no nucleotide
  misc_feature (233)..(233): n includes a, c, g, or t, or contains no nucleotide
  misc_feature (236)..(236): n includes a, c, g, or t, or contains no nucleotide
  misc_feature (247)..(247): n includes a, c, g, or t, or contains no nucleotide
  misc_feature (259)..(260): n includes a, c, g, or t, or contains no nucleotide
  misc_feature (284)..(284): n includes a, c, g, or t, or contains no nucleotide
  misc_feature (293)..(293): n includes a, c, g, or t, or contains no nucleotide
  misc_feature (307)..(307): n includes a, c, g, or t, or contains no nucleotide
  misc_feature (314)..(314): n includes a, c, g, or t, or contains no nucleotide
  misc_feature (321)..(321): n includes a, c, g, or t, or contains no nucleotide
  misc_feature (346)..(346): n includes a, c, g, or t, or contains no nucleotide
  misc_feature (383)..(384): n includes a, c, g, or t, or contains no nucleotide
  misc_feature (416)..(421): n includes a, c, g, or t, or contains no nucleotide
  misc_feature (469)..(469): n includes a, c, g, or t, or contains no nucleotide
  misc_feature (476)..(477): n includes a, c, g, or t, or contains no nucleotide
  misc_feature (501)..(501): n includes a, c, g, or t, or contains no nucleotide
gatccaaactgtgttgttcttaaatcaaaaattggataatttntaatatttatgtnttaatcacacagtntgctctctgaagttctcttaagccttcagtttatactcnnnnnttaattttctttctgagctggngaactgnctttgcactttggttacacagaacattggtttccaattnagtttaactgaaatttgctgctgatatgttgagtttgttctttaaaaaatanctncatatatctcntctttcctcctnncttagaagaacagacctaactagngaatgtatnaatgaaaatgcatnctatttncagagcngacatgaagagtttagtttttttanctttataaactgtgaatatgagtatgccagctgcatnngatgtaactaatcatatttaaatatatttcannnnnnctttgactttagaccttttgaagtctgtataaacttgttttgaaatanagtctcnncttacgaatgtcataacaaaatanttttttgcatgataaaaaattactttgattacaaaaggcatattctttcatggtttctgcaatgagag

SEQ ID NO: 319 - DNA, 368 bp, Homo sapiens
  misc_feature (279)..(282): n includes a, c, g, or t, or contains no nucleotide
cttgtgaatagctcaaactaagcttacaaatcgcatgtaaaaaagcaaaaaagttatttgtgtctgtttatattgcttccttttttgtagcctttgtacctgtacagggtgacagtaagggccaagcaggagaggcgtaatccttgtataaaataggatccagcgacactcttgtatttatctgttctctttttagtcagtcacttcaaaaaaacaaaaaacaaacaaaaaaaagctgtacattttaacataaaataaattatgatgagccatttttannnncttgtgtcctgtcatattatgattgatagagaatgaccaatggaactgtatcatgtgtcacgcctcagaacacatacacattttgg

SEQ ID NO: 320 - DNA, 170 bp, Homo sapiens
  misc_feature (35)..(50): n includes a, c, g, or t, or contains no nucleotide
caagaacatgattatccaggggtattttctaattnnnnnnnnnnnnnnnnttatatagaagagttggctttaaaatgtttgcaaatgtctttttttttttaatactggaagaaaaaatattctgttgtgtctcatacagtgcttaggatgtctttcacagagcttattaa

SEQ ID NO: 321 - DNA, 559 bp, Homo sapiens
cggccagtggcactactttgatgacaacagcgtctcccctgtcaatgagaatcagatcgagtccaaggcagcctatgtcctcttctaccaacgccaggacgtggcgcgacgcctgctgtccccggccggctcatctggcgccccagcctcccctgcctgcagctccccacccagctctgagttcatggatgttaattgagagccctgggtcctgccacagaaaaaaaaaaaaaaaagccctctctgcaatctcgcttctcgtgtccgccccgcttctcttattcgtgttaggtgcccccgccaggcattgcaggcttagtcgtggctactgttctcctgtgccgctgcatcgctctctcccgggaaagaacaggtcgtgtctcctcctagcagtgcgcgccccgcctgtgtttgcccttccagcagtgaccctcccttctagtctttatttatggtcgtgcccttccctctcctcagcccagagtgttctgcgtgggtggtgatgggggttcacctgaacacagagtgtattttcttattgaggccctgtaccttctgc

SEQ ID NO: 322 - DNA, 534 bp, Homo sapiens
  misc_feature (27)..(27): n includes a, c, g, or t, or contains no nucleotide
  misc_feature (30)..(30): n includes a, c, g, or t, or contains no nucleotide
  misc_feature (45)..(45): n includes a, c, g, or t, or contains no nucleotide
  misc_feature (150)..(150): n includes a, c, g, or t, or contains no nucleotide
  misc_feature (224)..(224): n includes a, c, g, or t, or contains no nucleotide
  misc_feature (237)..(237): n includes a, c, g, or t, or contains no nucleotide
  misc_feature (285)..(285): n includes a, c, g, or t, or contains no nucleotide
acagctgacagttgaattgacactttnatnggggcagaatggaancagtccaagaatgtagatactgattctttctccataaatgttcttatagtgtgttcatcctagagttatttttttgtttgtttttttcctttttggatcttgatngataactgccatgatattttgctttgatgtgtttctacatgtagttgcacacggttcagtaaaaataatgctgnctatcgagtatgncaaatattgaagtatgatggtttgactgtatggcagtgttgtagcagncctcttgtttttttccccattgcctctttttttaaaaaacttataaagtcactttttatttttcctcagtcttcaatgacgagagcaatattaagaagacattgctatctaatttttaatctttttaaatgaaaaattcctatgttcagtagcgtggttgatgctattgtttagccttcccctccaaattgtatacattggcttggaatgttcacaacttgcgtgcgtggcagcggaagacgattccca

SEQ ID NO: 323 - DNA, 547 bp, Homo sapiens
  misc_feature (383)..(386): n includes a, c, g, or t, or contains no nucleotide
  misc_feature (389)..(394): n includes a, c, g, or t, or contains no nucleotide
  misc_feature (414)..(414): n includes a, c, g, or t, or contains no nucleotide
tctgcaagagttcttagtaacttcttgagtgtggtagactttggaacatgtaaattttttgcttgtaatgttatcctgtggtaggattttggcaggtacacacactgccctattttattttgagtctaagttaaatgttttctgaaaagagatacatgcactgaactctttccactgcgaatcaagatgtggtaatataaaaggatcaagacaaatgagatctaatactactgtcagttttaatgtccactgtgttttatacagtatctttttttgttcactttggaaatttttactaaaaattgcaaaaaataaagtattgtgcaaagatgtaaggttttttgaaacttgaaatgcattaataaatagacgattaaatcaannnnaannnnnnatactctttgaactctgagnactatcacaagaagcttcccacaaggcagtgttttcttacagttgtctcttcctacaaaagtatagattatctttattcttaatactttggaatccatgtagaaaatttccagttagatactctgcgtacaca

SEQ ID NO: 324 - DNA, 499 bp, Homo sapiens
  misc_feature (128)..(128): n includes a, c, g, or t, or contains no nucleotide
  misc_feature (250)..(250): n includes a, c, g, or t, or contains no nucleotide
  misc_feature (334)..(348): n includes a, c, g, or t, or contains no nucleotide
gctacagcctcatcgaatttgatacattcgtcagacacaagatcccagtgatggccttggtagggaatgatgctggctggacacagatttctcgggagcaggtgccctctctgggcagcaacgtggcntgtggcctggcctacactgattatcacaaggcagccatgggtctgggggcccggggcttgctgctctcacgggagaacgaggatcaggtggtcaaggtgctgcacgatgcccagcagcagtnccgagacggccacccggttgtggtcaacatcctcattgggaggacggacttccgcgatggctccattgctgtatagggccttgnnnnnnnnnnnnnnnggctgccttcctgcccctggactgtgtccagctggtttggagtctcatcattgcttgccctgggcctatcccatgaggcccagtgactccacaacctccctgaggaggggatggaggggtcaaatctcagagaggctctcttgtgagctct

SEQ ID NO: 325 - DNA, 248 bp, Homo sapiens
  misc_feature (71)..(74): n includes a, c, g, or t, or contains no nucleotide
ttcacattggaaacaagtcagtcattcagatatgattcaaatgtctataaaccgaactgatgtaagtaaannnnctctcacttgttttatttaacctctaaattctttcattttaggggtagcatttgtgttgaagaggttttaaagcttccattgttgtctgcaactctgaagggtaattatatagttacccaaattaagagagtctatttacggaactcaaatacgtgggcattcaaatgtattac

SEQ ID NO: 326 - DNA, 543 bp, Homo sapiens
  misc_feature (173)..(173): n includes a, c, g, or t, or contains no nucleotide
  misc_feature (344)..(372): n includes a, c, g, or t, or contains no nucleotide
cttcaagaactgtttatagaagcttgagaatggggtaaaaatttctgctagcaaaatcaagttctttttgaaattttatcagtaatccagaatttagtagtccatgccttctcactcagcatttagaaataaaaatgtggtttcttaaacgtatatcctttcatgtatatttnccacatttttgtgcttggatataagatgtatttcttgtagtgaagttgttttgtaatctactttgtatacattctaattatattatttttctatgtattttaaatgtatatggctgtttaatctttgaagcattttgggcttaagattgccagcagcacacatcagatgcnnnnnnnnnnnnnnnnnnnnnnnnnnnnnatagagtctagactcgggccacttggagttgtgtactccaaagctaaggacagtgatgaggaagatggcagtggccaccggaggactggagcagtccctcctcatggcggcctgtgaccaaggtcggggaggagtggagctatccttccatgatctgatcatgtacagttc

SEQ ID NO: 327 - DNA, 475 bp, Homo sapiens
  misc_feature (41)..(65): n includes a, c, g, or t, or contains no nucleotide
  misc_feature (142)..(142): n includes a, c, g, or t, or contains no nucleotide
  misc_feature (146)..(146): n includes a, c, g, or t, or contains no nucleotide
  misc_feature (157)..(159): n includes a, c, g, or t, or contains no nucleotide
  misc_feature (161)..(162): n includes a, c, g, or t, or contains no nucleotide
  misc_feature (200)..(200): n includes a, c, g, or t, or contains no nucleotide
  misc_feature (214)..(214): n includes a, c, g, or t, or contains no nucleotide
  misc_feature (344)..(358): n includes a, c, g, or t, or contains no nucleotide
gtcaaatgtctccatacaggcatcatacacctgttccgaannnnnnnnnnnnnnnnnnnnnnnnnaggtgaaatagtctgtaagatgcctgcattcatgatttccccgaagcagaaacaatgttttgggatgattaatcttnaaantccataaatannncnnacactctatactgaaatagcctctgtccacatagtcancccagaaagaggtnagcgtgtgttactaggtgatcctccaacttcaaataacttcattaggtcaaagaattgtccatgaatatcaccacatactgtgattggagcatctacttctatcatagtcttctcttgcctcaggatggnnnnnnnnnnnnnnnttatctttaaggctacttcctcttccagtcgtccttcctttaccaaatggttttttaaaacatcaactttaggtttcccattctcaaatacttccttgaaagtaagccgttgggttg

SEQ ID NO: 328 - DNA, 321 bp, Homo sapiens
agctcaactccagtaaagaactaagaacagtgtataacatgaagataacattttgtctttgaccactgtcttttgaatgggcccacagtgtttatgtactcttaacaactcacagaataatacatgttcactttattttgtaaaattgggttgagaggaaactaatggagtttcattgtaactgtcctttgtaatttatataaatgtattattttcctatatccttggttcttttctgataatttacagatttagcttttcttttgttatataaactgctagccacaaattttagttatgtaaaaggctacccttgacaag

SEQ ID NO: 329 - DNA, 196 bp, Homo sapiens
  misc_feature (65)..(114): n includes a, c, g, or t, or contains no nucleotide
ctgaggtgcgccttcttgatcttctcgaagaagacgtccttcttgttaaggaagagcacgatggnnnnnnnnnnnnnnnnnnnnnnnnnnnnnnnnnnnnnnnnnnnnnnnnnnctctcgtgcatgcggttcacttcgtcgtcctccactagcaccatgtcgtagggcgctcagcgccgcgatgaagatgatgcag

SEQ ID NO: 330 - DNA, 580 bp, Homo sapiens
  misc_feature (26)..(28): n includes a, c, g, or t, or contains no nucleotide
  misc_feature (30)..(42): n includes a, c, g, or t, or contains no nucleotide
  misc_feature (118)..(118): n includes a, c, g, or t, or contains no nucleotide
  misc_feature (204)..(204): n includes a, c, g, or t, or contains no nucleotide
  misc_feature (234)..(236): n includes a, c, g, or t, or contains no nucleotide
  misc_feature (238)..(259): n includes a, c, g, or t, or contains no nucleotide
  misc_feature (410)..(410): n includes a, c, g, or t, or contains no nucleotide
  misc_feature (446)..(446): n includes a, c, g, or t, or contains no nucleotide
  misc_feature (476)..(476): n includes a, c, g, or t, or contains no nucleotide
cttggtgccagctactggtaccgtgnnngnnnnnnnnnnnnnctctgccagctcaagggacccacctgccagtacagggcagcccaatctggtccctctgaacggccaggacctccgncagagggccctgctggcacgaggcactaagtctcaggggccagccaagcccccacccccaaggaagccactgcctgccgacccccnagggccggtgcccatcgggtgacctgcccnnngnnnnnnnnnnnnnnnnnnnnnncctagtggtaccctccagaccagcgccaccgcctccgacagtgtcctcgctctacctctgacctctccggaggttccgctgcctccaagccggacttagggcttcaagaggcgggcgtgccctctggagtcccctaccatgactgaaggcnccagagactggcggtgtcttaagactccgggcaccnccacgcgctgtcaagcaacactctgcgganctgccggcgtagttgcagcgggggcttggggaggggctgggggttggacgggattgaggaaggtccgcacagcctgtctctgctcagttgcaataaacgtgaca

SEQ ID NO: 331 - DNA, 583 bp, Homo sapiens
  misc_feature (282)..(324): n includes a, c, g, or t, or contains no nucleotide
  misc_feature (352)..(366): n includes a, c, g, or t, or contains no nucleotide
  misc_feature (375)..(441): n includes a, c, g, or t, or contains no nucleotide
cctctaggtgatctgtgaaaatggttcgctattcacttgacccggagaaccccacgaaatcatgcaaatcaagaggttccaatcttcgtgttcactttaagaacactcgtgaaactgctcaggccatcaagggtatgcatatacgaaaagccacgaagtatctgaaagatgtcactttacagaaacagtgtgtaccattccgacgttacaatggtggagttggcaggtgtgcgcaggccaagcaatggggctggacacaaggtcggtggcccaaaaagagtnnnnnnnnnnnnnnnnnnnnnnnnnnnnnnnnnnnnnnnnnnnctgaacttaagggtttagatgtagattnnnnnnnnnnnnnnnatatccaannnnnnnnnnnnnnnnnnnnnnnnnnnnnnnnnnnnnnnnnnnnnnnnnnnnnnnnnnnnnnnnnnngctctccctgccacattgagatgatccttacggaaaaggaacagattgttcctaaaccagaagaggaggttgcccagaagaaaaagatatcccagaagaaactgaagaaacaaaaacttatggcacgggagtaaattcagca

SEQ ID NO: 332 - DNA, 550 bp, Homo sapiens
  misc_feature (26)..(46): n includes a, c, g, or t, or contains no nucleotide
  misc_feature (409)..(425): n includes a, c, g, or t, or contains no nucleotide
gtattgtgcgctaaacttttctgatnnnnnnnnnnnnnnnnnnnnntggtccgtgctaaggacttgttagatctagttcactctccatttaataattatatgctatttctatattttcattctcctatcacctgtcttgcctttttcattattttattatgaaacttgtgtaaatacaattttgtttctgtactttttggcataacataaatctgtgaacttgaaatttgaattttgtgttagagatttttttgttgtttgtttagtcttgtctcagattttattatgtaaatcccattattcaaagttgcctaaatccatttggaaatctttaaaaaaaaaattggggattcttaaagttgaatttattggcttttctgatccagttttgtttggaccaaaaaccagnnnnnnnnnnnnnnnnnagcatatatttttatatttactaaaatggactgtggtgactttggataataaggaaaagtttaatattaaagccatgtttattacagtataattaacatgttaaaccatgggataaatgccatca

SEQ ID NO: 333 - DNA, 460 bp, Homo sapiens
  misc_feature (91)..(91): n includes a, c, g, or t, or contains no nucleotide
  misc_feature (104)..(105): n includes a, c, g, or t, or contains no nucleotide
  misc_feature (178)..(226): n includes a, c, g, or t, or contains no nucleotide
ggatttacccaggactctatttatacaaccctgactgacagcctcctttcagcagagtttcaaagaatatgctgaaatacaggaaaacacnccccccccccccnnttttttttttttttttacattttaggacactgtgaggggaaaggacaattttgaaattccttttcaaggaaannnnnnnnnnnnnnnnnnnnnnnnnnnnnnnnnnnnnnnnnnnnnnnnnatttaaacttaatatcttgaacctaaagaatgctgacttttcctacatttccagagttaggcagtattctacacttaaagactactactatttttataaaaggtaatctattcaaatttcttcacagatttcaagtctctcaaacatcaagacaacttcagcagtcggtacaagtcacatttcattttgattgaatacatgatcttgaacagctcctgtacttgctctttgtaa

SEQ ID NO: 334 - DNA, 98 bp, Homo sapiens
aaacctcaatgctgcctccagagctttttggaaatactcagatcctggccgcctttgtaaccttctctaaacgtcaggcctggacttaaaagattttt

SEQ ID NO: 335 - DNA, 519 bp, Homo sapiens
  misc_feature (26)..(40): n includes a, c, g, or t, or contains no nucleotide
  misc_feature (224)..(224): n includes a, c, g, or t, or contains no nucleotide
tatgcctgtgcaaagaagaggctcannnnnnnnnnnnnnnagctttcctgggggactagagctccttctggccatgttatatgaaatgtaattcttattttataaataatgtgatgtaaatgtaactggtgccccctccccgatgtgactgagggtgagtgagtggtggcggggctgctccttcccacccctcagaacagctctgatcctcgttaatacctggnctgcgtgtgcagctgaggagggagtgaacctcaagcctaaatacctgttaggattggagggtctgggtgggcctgggcctagcaatcaagcttctacctgtaccttatgtaaggtagaccctcctagtgtcagtacctgagctagtttacctcagttccgcaggcaggacagccggtccgggaaccctgagtgagaatgagtgtggatgtgtacagtacacgcactggacggcagcgggaggctgggactttccattacaaatagagacttcattcctgttgagtctagttggaa

SEQ ID NO: 336 - DNA, 366 bp, Homo sapiens
  misc_feature (103)..(164): n includes a, c, g, or t, or contains no nucleotide
  misc_feature (166)..(166): n includes a, c, g, or t, or contains no nucleotide
  misc_feature (176)..(203): n includes a, c, g, or t, or contains no nucleotide
aggtgctcagagagccggcccgcctgaatcattctcgatttaactcgagaccttttcaacttggcttcctttcttggttcataaatgaattttagtttggttnnnnnnnnnnnnnnnnnnnnnnnnnnnnnnnnnnnnnnnnnnnnnnnnnnnnnnnnnnnnnntngcttactaannnnnnnnnnnnnnnnnnnnnnnnnnnntgctttctgttgtcattgctgttgtccctctgctacgttcctattgtcattaaaggtatcacggtcgccacctggcattccttctgaccacagcatcattttgcattcaaattaagggttaagaaaagagatattttaaaatgagagtcacttgatgtgccat

SEQ ID NO: 337 - DNA, 441 bp, Homo sapiens
  misc_feature (205)..(324): n includes a, c, g, or t, or contains no nucleotide
accagcgaactgagggtgacagtcaggaaatggtacggctgctgcttcaggcaattcagagcttcgagaagaaagtgcgagtgatctatacgcagctcagtaaaactgtggtttgcaagcagaaggcgctggaactgttgcccaaggtggaagaggtggtgagcttaatgaatgaggatgagaagactgttgtccggctgcaggnnnnnnnnnnnnnnnnnnnnnnnnnnnnnnnnnnnnnnnnnnnnnnnnnnnnnnnnnnnnnnnnnnnnnnnnnnnnnnnnnnnnnnnnnnnnnnnnnnnnnnnnnnnnnnnnnnnnnnnntgtctcagccctccacggcctccaacagcttacctgagccagccaagaagagtgaagaactggtggctgaagcacataacctctgcaccctgctagaaaatgccatacaggacactg

SEQ ID NO: 338 - DNA, 326 bp, Homo sapiens
catgcacatcagagaaagaaactgcatgtttgttgttgatgatgaaataaaaatgctagcgacagtctttcttactggtgcttaagctcttctttgcacaaagctttataaagggaattcaaaggaagccctttagaattagagtcttgagggacagcactaacaggcctttattaagtatgattgattgttaaatttcagggaacatgattggtctgctgtgtatttgaattcatgtaacaaagaactgttacgatgggattctgctcattttattaaaaagctactgacttgactgtcatcctgttcttgttagccattgtgaa

SEQ ID NO: 339 - DNA, 340 bp, Homo sapiens
  misc_feature (72)..(73): n includes a, c, g, or t, or contains no nucleotide
  misc_feature (96)..(96): n includes a, c, g, or t, or contains no nucleotide
  misc_feature (104)..(104): n includes a, c, g, or t, or contains no nucleotide
  misc_feature (106)..(106): n includes a, c, g, or t, or contains no nucleotide
  misc_feature (113)..(113): n includes a, c, g, or t, or contains no nucleotide
  misc_feature (116)..(117): n includes a, c, g, or t, or contains no nucleotide
  misc_feature (119)..(119): n includes a, c, g, or t, or contains no nucleotide
  misc_feature (127)..(127): n includes a, c, g, or t, or contains no nucleotide
  misc_feature (130)..(130): n includes a, c, g, or t, or contains no nucleotide
  misc_feature (134)..(134): n includes a, c, g, or t, or contains no nucleotide
  misc_feature (156)..(156): n includes a, c, g, or t, or contains no nucleotide
  misc_feature (163)..(163): n includes a, c, g, or t, or contains no nucleotide
  misc_feature (187)..(187): n includes a, c, g, or t, or contains no nucleotide
  misc_feature (215)..(215): n includes a, c, g, or t, or contains no nucleotide
  misc_feature (217)..(217): n includes a, c, g, or t, or contains no nucleotide
  misc_feature (219)..(220): n includes a, c, g, or t, or contains no nucleotide
  misc_feature (265)..(280): n includes a, c, g, or t, or contains no nucleotide
cagggctgcagtctctccaggtgtacagctgctgtccctgccctgtcctgtccttgcacagtctcctatgtnntgagccccagtgccttctgttcngggccctncntttggtnggnnanggcagagnccntgancccttgaatggttgtccttgantctgtgnctgctgccttctgcagagaggcanctaagctgtttaaagagcccagtgattntngnngctcctcctagaggtgggagggggcaagaggcctccttggtcagnnnnnnnnnnnnnnnngcagggacttggttttttgttccaacagtggccttctccgggcttcatagttctttgtaa

SEQ ID NO: 340 - DNA, 547 bp, Homo sapiens
  misc_feature (77)..(77): n includes a, c, g, or t, or contains no nucleotide
  misc_feature (80)..(80): n includes a, c, g, or t, or contains no nucleotide
  misc_feature (117)..(117): n includes a, c, g, or t, or contains no nucleotide
  misc_feature (119)..(119): n includes a, c, g, or t, or contains no nucleotide
  misc_feature (274)..(274): n includes a, c, g, or t, or contains no nucleotide
gccccaggcaagctggaacttgggtggggaggggacatgaggaggataaacagctgactgtggcttcaaggacatcnggnccaccccaagtcctcagtgtcctactcctggcaaggnanttgggtttggatcaaaagtgtttaaaattaatatgttgtcagtgattagaacaacactgtttacataaaaaccatttttctaattctaacaagttagaatgtgaggaaggaatgaacatgagtgtttaggaacctgccctttggtgctgggctgncgtcccgcactggggtgtcctcgctgtctgggggctgctctgctgccccggcccaggtccccttgtggtgttgccagacgggcctcatggtctgctgtgcagagagaggcaggaaggatccctgaagagtcttggagaaaaggttctgtgccctcaggtggggcttaccccctcgtatttataatcttaatttatatagtgaccaccgtggaaacaaacgcctcttgtattgtcatgtacatagtccatacctgagtgctgtacataagttgt

SEQ ID NO: 341 - DNA, 434 bp, Homo sapiens
  misc_feature (308)..(308): n includes a, c, g, or t, or contains no nucleotide
  misc_feature (310)..(323): n includes a, c, g, or t, or contains no nucleotide
  misc_feature (325)..(327): n includes a, c, g, or t, or contains no nucleotide
  misc_feature (332)..(333): n includes a, c, g, or t, or contains no nucleotide
gtgccagctgtgatattgtgcataccatatggaccattttaaagaaaattttaaaatttcaaatagattcaacaattacattacttgctttcacattttaaaggcactttaaaaaaatctacttctcttgtaggttttgcggctagttggctattcaagaaacctcgcccctctgaatgtcatactgtaatctttaaggaagaaagctacatgaattaattgtactctatgggaaaatttctttggaaagatattttgtaaaacttttttttccaagtaaaaactttatgaaacttggtctcaaaaanannnnnnnnnnnnnnannnaaaanngagtacagatatgtccttgattcatatgtatgctacatgtatcacacaacagatctggaattctttcagttcctcagatacttctcccttagtttttgcag

SEQ ID NO: 342 - DNA, 439 bp, Homo sapiens
  misc_feature (108)..(108): n includes a, c, g, or t, or contains no nucleotide
  misc_feature (127)..(127): n includes a, c, g, or t, or contains no nucleotide
  misc_feature (130)..(130): n includes a, c, g, or t, or contains no nucleotide
  misc_feature (139)..(139): n includes a, c, g, or t, or contains no nucleotide
  misc_feature (159)..(160): n includes a, c, g, or t, or contains no nucleotide
  misc_feature (183)..(183): n includes a, c, g, or t, or contains no nucleotide
  misc_feature (193)..(193): n includes a, c, g, or t, or contains no nucleotide
  misc_feature (198)..(198): n includes a, c, g, or t, or contains no nucleotide
  misc_feature (239)..(239): n includes a, c, g, or t, or contains no nucleotide
  misc_feature (243)..(243): n includes a, c, g, or t, or contains no nucleotide
  misc_feature (245)..(245): n includes a, c, g, or t, or contains no nucleotide
  misc_feature (265)..(265): n includes a, c, g, or t, or contains no nucleotide
  misc_feature (280)..(280): n includes a, c, g, or t, or contains no nucleotide
  misc_feature (319)..(319): n includes a, c, g, or t, or contains no nucleotide
gtcatctccaacgacaaaaggagcttttgccactgactcggccgtgtcctgacacctccagaacgcaggtgctggcgcccgttctgcctgggaccccgggaacctctnctgccggaagccggacggncangggatgggnccccaacttcgccctgcccnnacttgacttcaccaaatcccttncctggagacntaaancctggtgctcaggagcgaaggactgtgaacttgtggcctgnaagnanccagagctagctctggccanccagctgggcgacgntcaccctgctcccaccccacccccaagttctaaggtctnttcagagcgtggaggtgtggaaggagtggctgctctccaaactatgccaaggcggcggcagagctggtcttctggtctccttggagaaaggttctgttgccctgatttatgaactctata

SEQ ID NO: 343 - DNA, 546 bp, Homo sapiens
  misc_feature (73)..(73): n includes a, c, g, or t, or contains no nucleotide
  misc_feature (76)..(76): n includes a, c, g, or t, or contains no nucleotide
  misc_feature (80)..(80): n includes a, c, g, or t, or contains no nucleotide
  misc_feature (179)..(179): n includes a, c, g, or t, or contains no nucleotide
  misc_feature (185)..(185): n includes a, c, g, or t, or contains no nucleotide
  misc_feature (187)..(188): n includes a, c, g, or t, or contains no nucleotide
  misc_feature (192)..(192): n includes a, c, g, or t, or contains no nucleotide
  misc_feature (205)..(267): n includes a, c, g, or t, or contains no nucleotide
  misc_feature (400)..(400): n includes a, c, g, or t, or contains no nucleotide
  misc_feature (428)..(428): n includes a, c, g, or t, or contains no nucleotide
  misc_feature (430)..(432): n includes a, c, g, or t, or contains no nucleotide
  misc_feature (434)..(434): n includes a, c, g, or t, or contains no nucleotide
  misc_feature (436)..(436): n includes a, c, g, or t, or contains no nucleotide
  misc_feature (439)..(440): n includes a, c, g, or t, or contains no nucleotide
  misc_feature (442)..(449): n includes a, c, g, or t, or contains no nucleotide
  misc_feature (451)..(451): n includes a, c, g, or t, or contains no nucleotide
  misc_feature (453)..(455): n includes a, c, g, or t, or contains no nucleotide
  misc_feature (457)..(460): n includes a, c, g, or t, or contains no nucleotide
  misc_feature (463)..(486): n includes a, c, g, or t, or contains no nucleotide
  misc_feature (488)..(493): n includes a, c, g, or t, or contains no nucleotide
  misc_feature (495)..(496): n includes a, c, g, or t, or contains no nucleotide
  misc_feature (498)..(500): n includes a, c, g, or t, or contains no nucleotide
tccactgaagtgttagaaagctttaaattggccagggagagctgggagttgctctattccctagaattccttnacnaagnatttacaaggatttgcttggcctggaagacggatacttggctttggttaagaatcttcctcactgatatgatcatctatcagggtcaatataaaaaggncgatancnngccntgcatcacttagnnnnnnnnnnnnnnnnnnnnnnnnnnnnnnnnnnnnnnnnnnnnnnnnnnnnnnnnnnnnnnngggcgctcatccagctggcgacgtgccactttgcgctaggggagtacagaatgacatgtgaaaaagtccttgatttgatgtgctacatggtactccccattcaagatggaggcaaatcccaggaggaaccctncgaaagtaaagcccaaatttagaaaagntnnngntntgnngnnnnnnnntngnnncnnnnagnnnnnnnnnnnnnnnnnnnnnnnntnnnnnntnncnnnttttaagcttagagctttcacagacaacagagacgacatggcattg

SEQ ID NO: 344 - DNA, 503 bp, Homo sapiens
  misc_feature (26)..(26): n includes a, c, g, or t, or contains no nucleotide
  misc_feature (31)..(32): n includes a, c, g, or t, or contains no nucleotide
  misc_feature (34)..(34): n includes a, c, g, or t, or contains no nucleotide
  misc_feature (39)..(39): n includes a, c, g, or t, or contains no nucleotide
  misc_feature (46)..(46): n includes a, c, g, or t, or contains no nucleotide
  misc_feature (55)..(55): n includes a, c, g, or t, or contains no nucleotide
  misc_feature (64)..(64): n includes a, c, g, or t, or contains no nucleotide
  misc_feature (92)..(92): n includes a, c, g, or t, or contains no nucleotide
  misc_feature (101)..(101): n includes a, c, g, or t, or contains no nucleotide
  misc_feature (175)..(175): n includes a, c, g, or t, or contains no nucleotide
  misc_feature (236)..(236): n includes a, c, g, or t, or contains no nucleotide
  misc_feature (278)..(278): n includes a, c, g, or t, or contains no nucleotide
  misc_feature (280)..(294): n includes a, c, g, or t, or contains no nucleotide
  misc_feature (400)..(419): n includes a, c, g, or t, or contains no nucleotide
ccacagtgttatctgtgtaaatagcnttaanntntttcntctgtgncttaggtgnaagttttgnttcatgtagcaaccaggtagacagtganccaaataanggctgtaaatgtgctgtagttttctactgtgatgtacttgaaggagaacctgtgtcctctacttttctgatctncccacaagtattttgtgtttgtttcctgagtcctgaggttattattttactcctgttttgncccccagttttctttgttttttttctggagacccagggaggncnnnnnnnnnnnnnnntttgtaaggaatggatcatggtctgggtttccaaaactaccctagtacagtgaatgagagaaatctgcctggaaattgtttcagaaccatgtacctttatgctttnnnnnnnnnnnnnnnnnnnntttttgtaaccccaaaatgaaaactgtttagtaaaggggatctattttgtgtgttttgaaacttaggtgcaatgtcccctggaa

SEQ ID NO: 345 - DNA, 608 bp, Homo sapiens
  misc_feature (101)..(148): n includes a, c, g, or t, or contains no nucleotide
  misc_feature (414)..(433): n includes a, c, g, or t, or contains no nucleotide
gcttgatggtcgaggccatctcctgggccgcctggcggccatcgtggctaaacaggtactgctgggccggaaggtggtggtcgtacgctgtgaaggcatcnnnnnnnnnnnnnnnnnnnnnnnnnnnnnnnnnnnnnnnnnnnnnnnnctccgcaagcggatgaacaccaacccttcccgaggcccctaccacttccgggcccccagccgcatcttctggcggaccgtgcgaggtatgctgccccacaaaaccaagcgaggccaggccgctctggaccgtctcaaggtgtttgacggcatcccaccgccctatgacaagaaaaagcggatggtggttccggctgccctcaaggtcgtgcgtctgaagcctacaagaaagtttgcctatctggggcgcctggctcacgaggttgnnnnnnnnnnnnnnnnnnnnacagccaccctggaggagaagaggaaagagaaagccaagatccactaccggaagaagaaacagctcatgaggctacggaaacaggccgagaagaacgtggagaagaaaattgacaaatacacagaggtcctcaagacccacggactcctggtctgagcccaataaagactgttaa

SEQ ID NO: 346 - DNA, 549 bp, Homo sapiens
  misc_feature (43)..(62): n includes a, c, g, or t, or contains no nucleotide
  misc_feature (466)..(476): n includes a, c, g, or t, or contains no nucleotide
cagagtaacctacaagaagttttagaaagggaacgaagagaannnnnnnnnnnnnnnnnnnnaaaggaagatgattgaagaatcactgaagattaaaataaaaaaggaattagaaatggaaaatgaattagaaatgagtaatcaagaaataaaagacaaatctgctcacagtgaaaatcctttagagaaatacatgaaaatcatccagcaggagcaagaccaggagtcggcagataagagctcaaaaaagatggtccaagaaggctccctagtggacacgctgcaatctagtgacaaagtcgaaagtttaacaggcttttctcatgaagaactagacgactcttggtaaccatgtttgctgcccagcttctaacttacataccgtgagaagttacgtaacatttactcctttgtaaatgtttccctatcatcagacaaaactcaataaaaatgtgtgtaatccaannnnnnnnnnnttttccataattaattttgataccatagtgtgtgaaccaagaataatctagtcacgtgaaacctcttctccag

SEQ ID NO: 347 - DNA, 433 bp, Homo sapiens
gttgcagaccaggttctgaatcccatgctgggcagatctattgttgcacaggatttctggctattacaagtcagttgcatcaagtaaattctgatttacttggctggtggctttgtgaacgacaattaccctcaggcgggctcaatggaaggccggagaagttaccagatgtatgctactcatggtgggtcctggcttccctaaagataattggaagacttcattggattgatagagagaaactgcgtaatttcattttagcatgtcaagatgaagaaacggggggatttgcagacaggccaggagatatggtggatccttttcataccttatttggaattgctggattgtcacttttgggagaagaacagattaaacctgttaatcctgtcttttgcatgcctgaagaagtgcttcagagagtgaatgttca

SEQ ID NO: 348 - DNA, 563 bp, Homo sapiens
  misc_feature (88)..(108): n includes a, c, g, or t, or contains no nucleotide
  misc_feature (136)..(136): n includes a, c, g, or t, or contains no nucleotide
  misc_feature (138)..(152): n includes a, c, g, or t, or contains no nucleotide
  misc_feature (156)..(156): n includes a, c, g, or t, or contains no nucleotide
  misc_feature (265)..(265): n includes a, c, g, or t, or contains no nucleotide
  misc_feature (297)..(297): n includes a, c, g, or t, or contains no nucleotide
  misc_feature (412)..(429): n includes a, c, g, or t, or contains no nucleotide
  misc_feature (513)..(514): n includes a, c, g, or t, or contains no nucleotide
  misc_feature (516)..(517): n includes a, c, g, or t, or contains no nucleotide
  misc_feature (520)..(524): n includes a, c, g, or t, or contains no nucleotide
  misc_feature (526)..(526): n includes a, c, g, or t, or contains no nucleotide
  misc_feature (528)..(528): n includes a, c, g, or t, or contains no nucleotide
  misc_feature (530)..(531): n includes a, c, g, or t, or contains no nucleotide
  misc_feature (534)..(538): n includes a, c, g, or t, or contains no nucleotide
cattgagctaactgttggggagcaatttggtagttgtagacatttgcagggaagggagatgtctgattctaaatgggagttgatgctnnnnnnnnnnnnnnnnnnnnnatccagccctgagacatgtaggaaacancnnnnnnnnnnnnnnntctngaagattcccagaagccacaaggattgaagggaaaaggtgatcctggtaactgttccaggattgctccaggtttgagatggtattgctaaatttaaaattaaacaaganacccaacaacagcttttaaagtgtcttctatntcattgtattttttttaacttgccccaatgatagaaaagtcttttgctgaaatgattttgatgatttttgtttatcgtttataaaaaggaaaagaaatatacaaactttgacttnnnnnnnnnnnnnnnnnnttctttaagatgtgcattcctttctgcttgctctctagtaaatgttttactaccgggaaaaaaaaaaaaaaaaaaaaaaaaaannannaannnnnananannaannnnngtgccgcacacagtgtagggacaga

SEQ ID NO: 349 - DNA, 457 bp, Homo sapiens
  misc_feature (139)..(148): n includes a, c, g, or t, or contains no nucleotide
  misc_feature (150)..(156): n includes a, c, g, or t, or contains no nucleotide
  misc_feature (244)..(285): n includes a, c, g, or t, or contains no nucleotide
cagccttgaagttggggtcagcctcggcaggagtcccactcctcctggggtgctgcctgccaccaagagctcccccacctgtaccaccatgtgggactccaggcaccatctgttctccccagggacctgctgacttgannnnnnnnnnannnnnnncccttgctcctctgtgttgctttgggccacctggggctgcaccccctgccctttctctgccccatccctaccctagccttgctctcannnnnnnnnnnnnnnnnnnnnnnnnnnnnnnnnnnnnnnnnngacacccctcccttggactctgcctgggctggagtctagggctggggctacatttggcttctgtactggctgaggacaggggagggagtgaagttggtttggggtggcctgtgttgccactctcagcaccccacatttgcatctgctggtggacctgccaccatcacaataa

SEQ ID NO: 350 - DNA, 607 bp, Homo sapiens
  misc_feature (41)..(41): n includes a, c, g, or t, or contains no nucleotide
  misc_feature (94)..(94): n includes a, c, g, or t, or contains no nucleotide
  misc_feature (115)..(146): n includes a, c, g, or t, or contains no nucleotide
  misc_feature (254)..(283): n includes a, c, g, or t, or contains no nucleotide
  misc_feature (398)..(558): n includes a, c, g, or t, or contains no nucleotide
cctgtgcagtagagagcctttctccagcccatgctggctgnggccggggctgccgcatctgcctggagcctgggcagcacctccgggactgacnttcggcagtggctgggggacnnnnnnnnnnnnnnnnnnnnnnnnnnnnnnnnacagaagaaaaacactgagaaaaagcattaaaaataagccaaaataagactattggtaaacacctaaatttttgtaagaaaatttaaaaattaaagcagcaaaggaannnnnnnnnnnnnnnnnnnnnnnnnnnnnncaagtggctggcttctcccttgtgtcgggcctctgcgcgtctggggcagggccctgggtggaggtggtcccaggtgcccatctgctgtgtcctgcagaggctctgtttctggtcnnnnnnnnnnnnnnnnnnnnnnnnnnnnnnnnnnnnnnnnnnnnnnnnnnnnnnnnnnnnnnnnnnnnnnnnnnnnnnnnnnnnnnnnnnnnnnnnnnnnnnnnnnnnnnnnnnnnnnnnnnnnnnnnnnnnnnnnnnnnnnnnnnnnnnnnnnnnnnnnnctgggcctgggaactgggcccttggagcctctgaggtggctagcagtct

SEQ ID NO: 351 - DNA, 599 bp, Homo sapiens
  misc_feature (139)..(139): n includes a, c, g, or t, or contains no nucleotide
  misc_feature (217)..(217): n includes a, c, g, or t, or contains no nucleotide
  misc_feature (219)..(234): n includes a, c, g, or t, or contains no nucleotide
  misc_feature (237)..(237): n includes a, c, g, or t, or contains no nucleotide
  misc_feature (531)..(532): n includes a, c, g, or t, or contains no nucleotide
  misc_feature (537)..(537): n includes a, c, g, or t, or contains no nucleotide
gtgttctctggatttcttctcccaacaactacaaccctggacttgcctccccaggcctcttgcctgtaaatagaagcccgcaaactgtacagatttacagaggcatcgagactgggccctgggagttgccatctgaganccgatggccccagcatcccccaggtgcctgcctggcaccacagtgaccctggcctcagcgtggcaaatgcatgtaaanannnnnnnnnnnnnnnngtngctccagagagccccctgaagacagtgtccctccctcctgtgagtcctttctcctgtacagaacctgcctggggtgggtgggggtctgccattccctcccccaggccttccctgccccttctctcccctgtaacctgtttattaaccatacctgtcctgagttcatggccaaaaccttaaataagaaaaacaaaagaaaaagacagtggaaaaaagagaccaaggcgcctgccccactgcgggtactctcctgttccagccttgtgaaggaactggttttgtttttgtttttgnnttttntttttttttgtttgtttgtttgttttttaacacttcctgtgctgtgcccatttataagagga

SEQ ID NO: 352 - DNA, 444 bp, Homo sapiens
  misc_feature (88)..(88): n includes a, c, g, or t, or contains no nucleotide
  misc_feature (95)..(95): n includes a, c, g, or t, or contains no nucleotide
  misc_feature (98)..(98): n includes a, c, g, or t, or contains no nucleotide
  misc_feature (177)..(213): n includes a, c, g, or t, or contains no nucleotide
cctcagagctctattttcctgcagacaccagctctccttcctgcctttagatcctgagaaggagggaaatgaggggtgctgacacagnccctctnggnagagctctgcctagtctggtttggcgagggcccttgatcaccttgcccctcctccctgtcttctctgattcttttcccnnnnnnnnnnnnnnnnnnnnnnnnnnnnnnnnnnnnnatcatgtctctgtgggtggggtgggagaaacctctgctgcacacctctgtttggaacctgggcagagcaggaggtaaggcaaaggcaggcaggcaccaagaaccagaccccttgagaaggcgctgtgggtgggtctttgttctgctgttctgcctttcctgacaggtggggttggggcacacagacattggaatatttgtactgctctcgtgccatttgagaggctgctgc

SEQ ID NO: 353 - DNA, 354 bp, Homo sapiens
  misc_feature (95)..(110): n includes a, c, g, or t, or contains no nucleotide
  misc_feature (112)..(112): n includes a, c, g, or t, or contains no nucleotide
cacttcaaagctatggaatggattttagcacctttaaaaaaaaaaaaaaactttgacttttaatttatatagtgatatgctgacaggctgacacnnnnnnnnnnnnnnnntnttttctgcgttcagtgttgaggcggctgcttacaagaggcactggttttgtatataaagacactcgggttgttttgtagctctttttcttattggctgtactaacgcttgctgaggttatctgtaataagggaggtaacaagtggcaaccccctccccaccaaccatcccctttgctgctttctgtgtctttcttgttcagttaccaaaatagctgtaagcctatctaatgctaggtgtgtg

SEQ ID NO: 354 - DNA, 503 bp, Homo sapiens
  misc_feature (55)..(71): n includes a, c, g, or t, or contains no nucleotide
  misc_feature (94)..(95): n includes a, c, g, or t, or contains no nucleotide
  misc_feature (99)..(100): n includes a, c, g, or t, or contains no nucleotide
  misc_feature (102)..(102): n includes a, c, g, or t, or contains no nucleotide
  misc_feature (127)..(127): n includes a, c, g, or t, or contains no nucleotide
  misc_feature (129)..(129): n includes a, c, g, or t, or contains no nucleotide
  misc_feature (211)..(211): n includes a, c, g, or t, or contains no nucleotide
  misc_feature (273)..(273): n includes a, c, g, or t, or contains no nucleotide
  misc_feature (285)..(285): n includes a, c, g, or t, or contains no nucleotide
agaagtgctcaatgaccctgagaacatggagaagcgcaggagccgtgagagcctnnnnnnnnnnnnnnnnnagtacgagagtggccctgacggnngggnngnagtgagtatgagcgtagagtggaangngggcgtctctggccgagcctctttttgtggaaaacgacagcagcagcagtggcctggaagacgccaccgctaactgaccccnacctggccccgctccaggatgggactgccgagtgtggcccggagctggcccgggacagccanggcggcaggganggcccctggccgggagccgcagcgctcactcatttctcctgcgtctgtgtgcataggacatgatactaataaccacacggctggcgtgaccttggggctggggctgggcctaagctggtgccctggtgcggcgtggtctctcccaggagacctggggcatgagctgggcccacggctcccttcccatgtgtaacttcctcacgttgtgtgcgataacg

SEQ ID NO: 355 - DNA, 401 bp, Homo sapiens
  misc_feature (127)..(127): n includes a, c, g, or t, or contains no nucleotide
  misc_feature (138)..(138): n includes a, c, g, or t, or contains no nucleotide
  misc_feature (165)..(165): n includes a, c, g, or t, or contains no nucleotide
  misc_feature (178)..(178): n includes a, c, g, or t, or contains no nucleotide
  misc_feature (341)..(356): n includes a, c, g, or t, or contains no nucleotide
ctaactgtgaatgaggagagtacctgctgcaggacctggaggtcaggtgtgaatgctgtattggcacagggaataaatatcctggcgtctggagccttcacctctccgtcaagtccttcctgtgatnactgccatggncacaggatctgagttgcagctctgcanccctaaatcacanccctgggcattgtctgggctgcagggctgccaggttctgtacttgtgtccagctgtggccctggatgctggagctggagggttttctgtgctcagactgtagcctgtagctcttggcctgtgtagagccccctcctgtgccctcagtggctgtcgtttgttannnnnnnnnnnnnnnngggaaaggtcaggcagaatttttctgccctacaaagggtggaaga

SEQ ID NO: 356 - DNA, 307 bp, Homo sapiens
  misc_feature (177)..(177): n includes a, c, g, or t, or contains no nucleotide
  misc_feature (179)..(193): n includes a, c, g, or t, or contains no nucleotide
aaaggcacctaagctattgctaattgaattgctgctagaattagaaattatgctttagaatagaattggtatttctgtgattctttttgcttcttggtattttctcttgtatctatgtatctagtattgaggcttgctctttcatgtggctttatcctctctttaatagctgttgtnannnnnnnnnnnnnnntggctgcttcaggatcagcttgcagagtcttgcttttaggttagatacaaacaaagtaaatcatagttggtgtaaatccagcaaaaaacagctggctttggaatggagaacact

SEQ ID NO: 357 - DNA, 502 bp, Homo sapiens
  misc_feature (30)..(44): n includes a, c, g, or t, or contains no nucleotide
  misc_feature (53)..(53): n includes a, c, g, or t, or contains no nucleotide
ccctgcacattggaaatgaattacaggcannnnnnnnnnnnnnncaggcaggnttcctgtggactttgagattcatgttacctcatcttcttttttaaactgtacccaacttgtgagggtactctgtctaatgtatatttctagtgtttacagacagtaaatgtgtatatgtagtaactatttacagaacatgcatccttaaactgtgacttctcacctagtgcagaacttttaccaggctgtaaaagcaaaacctcgtatcagctctggaacaatacctgcagttattcttcagctgtttggacaacttagattgggtttataactattaggaatcactgcacagtttatttgggttgtgttttgtgtctgagtcccctccctcatcccttagggtccagaagagcaatggaggaagtgacagctaatgttgcagttcttattgtatggcataggactggcattatatagcagaaatcaactactgtacaatttcttgggg

SEQ ID NO: 358 - DNA, 501 bp, Homo sapiens
  misc_feature (328)..(350): n includes a, c, g, or t, or contains no nucleotide
catctctgtggatgataagtacatagtcactggctcgggggacaagaaggctacagtctatgaagtcatctactgaaaacattatgtggtttaacgtttatagttgaattgggccaaaatgtttcgaatttatagaaatagaaaagttgtaactttaaaagagaaaaaaaattacaaacacctgtttccaaaccttgacagaaaactactttgagtctacaaagaggaggcgacaagtccatcagcagaaagtcacctgtctacatagaccaaatggagcaccaaggccaagcggacagaggggccatgggttgtaggattgaggaannnnnnnnnnnnnnnnnnnnnnnagcccattctttctttctgggtgatctggggatcacgccttgcccaagtgtgagattacctttctgttccttgcagttcacctcactttccgtcctttgtagagcagtggtgtctccaatgaacttgtttcctggttttgcatcttgtgaa

SEQ ID NO: 359 - DNA, 325 bp, Homo sapiens
  misc_feature (163)..(177): n includes a, c, g, or t, or contains no nucleotide
agagtcagtcattggctttgtcatttaccctttgagagttccacaagtggtagtagagtggtttaacgtctttcctctagtactaccagtattcataaatgtataccccttactgtaatttgttcctcttagaagtcagatcatctgatttatagaggattannnnnnnnnnnnnnnttgaaaaggcttattttatacatacgtattatatagagaaacaaatgtttttattaaatgtttcattgacccaagtaatttaaaagtaatatgttacctatgtctttcaggaaaaataattatagcagctgatctgtaaatgacttta

SEQ ID NO: 360 - DNA, 92 bp, Homo sapiens
cccgggacgataacctggcagtggaaggaaagaagcatggtctactttaggtgtgcgctgggtctctggtgctcttcactgttgcctgtcac

SEQ ID NO: 361 - DNA, 333 bp, Homo sapiens
  misc_feature (45)..(60): n includes a, c, g, or t, or contains no nucleotide
  misc_feature (74)..(88): n includes a, c, g, or t, or contains no nucleotide
  misc_feature (172)..(176): n includes a, c, g, or t, or contains no nucleotide
tcaatcagtgtgatcagtttgattctgtaatgagcacagcacctnnnnnnnnnnnnnnnnctgttttgaggacnnnnnnnnnnnnnnnactttgttcgtaaacaatatcccaatagatttgttgacttgaggtctggtttggttttgtttttgttttgttttgttttgtttnnnnnccaatagaattaagaattctaatgttgaaaaactgcacaaatttttatgggacaaagcctagaaaagagaaatgtagtttgaatcataatctaaatcatcgtatgatagaagagggaaagttttggtgccataatttctcctttcactggtgttgga

SEQ ID NO: 362 - DNA, 163 bp, Homo sapiens
gtccataactgattatgcttatgtacttacttacacatttttaactttatgaccagcctaaatattctgggggaagtggggtataatatttaacgaatcatgattcagattgtaccattacatgtttcagtgcagcatggttactaacgctatgtcagactaa

SEQ ID NO: 363 - DNA, 501 bp, Homo sapiens
  misc_feature (195)..(226): n includes a, c, g, or t, or contains no nucleotide
gcctcagatttcttctagtatttgcttctgatgaatgattatggtctatacataaaaaagtaagactaagtattgctgaatttgcagttatgttgtcgtgtataagagctacttccaagtgtggttacaaatgaacccatggaatgatgacttcatgttcttctcgtgggtttgtgccgtgctgctttccaaatnnnnnnnnnnnnnnnnnnnnnnnnnnnnnnnntcagttctgtgaaatattttgggatctataccaattaaacattttcatagttctgcctattgtccttccctgaggctccattgctgcttggtggccattctctgcctttttacagtcacctgaacaatgacccatcatctcttgcttgcttgaaatcttgctgaaatgttctcatttcctgtttgctgtatgggctcgggtgggatgtttgttggctctgttgtgtttattcaccaatttgtacattatttgttgtcctttactactgtaaacag

SEQ ID NO: 364 - DNA, 419 bp, Homo sapiens
  misc_feature (65)..(65): n includes a, c, g, or t, or contains no nucleotide
  misc_feature (71)..(73): n includes a, c, g, or t, or contains no nucleotide
  misc_feature (75)..(77): n includes a, c, g, or t, or contains no nucleotide
  misc_feature (79)..(80): n includes a, c, g, or t, or contains no nucleotide
  misc_feature (128)..(160): n includes a, c, g, or t, or contains no nucleotide
  misc_feature (262)..(262): n includes a, c, g, or t, or contains no nucleotide
  misc_feature (313)..(314): n includes a, c, g, or t, or contains no nucleotide
  misc_feature (319)..(322): n includes a, c, g, or t, or contains no nucleotide
  misc_feature (324)..(325): n includes a, c, g, or t, or contains no nucleotide
  misc_feature (327)..(332): n includes a, c, g, or t, or contains no nucleotide
  misc_feature (335)..(335): n includes a, c, g, or t, or contains no nucleotide
  misc_feature (337)..(342): n includes a, c, g, or t, or contains no nucleotide
  misc_feature (345)..(350): n includes a, c, g, or t, or contains no nucleotide
  misc_feature (352)..(355): n includes a, c, g, or t, or contains no nucleotide
  misc_feature (359)..(359): n includes a, c, g, or t, or contains no nucleotide
cattgtgcattatatcaatgtgcattcctgtagttcattaacaaggtacatgcaatagtctaaanaaccannntnnntnntatagtggcttaacatttaatctgtctccaatattttaaccaagtgannnnnnnnnnnnnnnnnnnnnnnnnnnnnnnnntgaacaaatcatggctgttatattaacttgaaataaaatatatttaaacatgtagttaacatgctctttctcatcatgaattataaaggtgcccaaattatngggtatcttgatttttttcaaaaattggttgtgtgaatccagctcttgctnntggcnnnnanngnnnnnnaantnnnnnncannnnnncnnnntccncaatagctacacatacccccttgcctagttagtcttgcactgctttacaactctcttagg

SEQ ID NO: 365 - DNA, 163 bp, Homo sapiens
ggttgcgctgacctaggaatgttggtcatatcaaacattaaaaatgaccactcttttaatgaaattaacttttaaatgtttataggagtatgtgctgtgaagtgatctaaaatttgtaatatttttgtcatgaactgtactactcctaattattgtaatgtaa

SEQ ID NO: 366 - DNA, 526 bp, Homo sapiens
  misc_feature (170)..(217): n includes a, c, g, or t, or contains no nucleotide
  misc_feature (341)..(358): n includes a, c, g, or t, or contains no nucleotide
  misc_feature (374)..(413): n includes a, c, g, or t, or contains no nucleotide
tgctgcagaaagtgtccttttagtggcttcttaaaattgagtggcattttataatgaacttaccaatataaaaacatgatttggttcctgagctgttgttgttggacttgtgttccaatgagtgactaggaaaaaataaattggcaaaaacctagagttttctgctatcnnnnnnnnnnnnnnnnnnnnnnnnnnnnnnnnnnnnnnnnnnnnnnnnttgatcagagcaaaacatgcagagcccttagcagaaacccactttaatgcattttcttcatatccctaaagttccttaaaaatatgtgacaatgcatcaggaagaggagaactgaagagtagannnnnnnnnnnnnnnnnntttatcagtgacatgnnnnnnnnnnnnnnnnnnnnnnnnnnnnnnnnnnnnnnnntgccgtgtacatatggaccgtgctatgatgtgtctcacattggatgatattccactttgggaattttagtatttgtatatagaaaatgggtttaataactcaccatggttttg

SEQ ID NO: 367 - DNA, 145 bp, Homo sapiens
agaagaccatatactggcaatcctcagtacacttacaacaattggtctcccccagtgcaaagcaatgaaacgtccaatggttatttcttggagagatcacatagtgctaggatgacacttgcaaaagcttgtgaactctgtccag

SEQ ID NO: 368 - DNA, 279 bp, Homo sapiens
  misc_feature (148)..(149): n includes a, c, g, or t, or contains no nucleotide
ccctgtgtagattctggtaatgatctgtctcagggtatgtgtatttttgaagagtgttatgtccttagttttaattttgagtaaagaaaaggctaaaatcatgaattagttacaagcaacagtaccaacttatgtgacccctgagggnnggggctgtgagctcttaatttgtttttgattctgaaaaactctgcttcctggcatccaggagttagagattgagcctttcatcttctttctcaacactagtttttgatgctttctttcatgggaatagtc

SEQ ID NO: 369 - DNA, 283 bp, Homo sapiens
ttgtattcttctgttagataagaccttttacccatttaatttgtctttaaggacagtcatttggcttctgaatgtttgaaacgattttaaaaaataagtagtgctatggttgtttctataattctaacctttgatagtaatcagaatgtattacatttcatttctgaatagcttttgaatttatgaaaaattattaacaatgaaaaattggtaattttattaagttatatgtgtttaaatattatattagcttatttctcttgcattaatagtactgctgttt

SEQ ID NO: 370 - DNA, 420 bp, Homo sapiens
  misc_feature (86)..(86): n includes a, c, g, or t, or contains no nucleotide
  misc_feature (89)..(290): n includes a, c, g, or t, or contains no nucleotide
gtacagccttcattctgttgcaattaagttttagtacttgtatgaaaggtgtgaattagaaagtcacatatatacatatgtatctnatnnnnnnnnnnnnnnnnnnnnnnnnnnnnnnnnnnnnnnnnnnnnnnnnnnnnnnnnnnnnnnnnnnnnnnnnnnnnnnnnnnnnnnnnnnnnnnnnnnnnnnnnnnnnnnnnnnnnnnnnnnnnnnnnnnnnnnnnnnnnnnnnnnnnnnnnnnnnnnnnnnnnnnnnnnnnnnnnnnnnnnnnnnnnnnnnnnnnnnnnnnaaatggggtgatttgcttcattgagatcttgctcccaggtaaccttaagaagattttagtccctaaagaaatgaacctttccttatcaaatagaatatcactgatatactgctgcatgaataagaaccat

SEQ ID NO: 371 - DNA, 591 bp, Homo sapiens
  misc_feature (144)..(144): n includes a, c, g, or t, or contains no nucleotide
  misc_feature (156)..(156): n includes a, c, g, or t, or contains no nucleotide
  misc_feature (166)..(166): n includes a, c, g, or t, or contains no nucleotide
  misc_feature (190)..(190): n includes a, c, g, or t, or contains no nucleotide
  misc_feature (214)..(214): n includes a, c, g, or t, or contains no nucleotide
  misc_feature (225)..(225): n includes a, c, g, or t, or contains no nucleotide
  misc_feature (233)..(233): n includes a, c, g, or t, or contains no nucleotide
  misc_feature (440)..(454): n includes a, c, g, or t, or contains no nucleotide
  misc_feature (504)..(531): n includes a, c, g, or t, or contains no nucleotide
  misc_feature (538)..(547): n includes a, c, g, or t, or contains no nucleotide
  misc_feature (552)..(554): n includes a, c, g, or t, or contains no nucleotide
  misc_feature (556)..(561): n includes a, c, g, or t, or contains no nucleotide
  misc_feature (563)..(564): n includes a, c, g, or t, or contains no nucleotide
gatatgtactgctgggtacatggacagtaagtgtgttttcagatggagtaccagcaccgaaaatgggttgagggaggatgggttgtatgtatgtttctgcccactaattttgagcagccatattatgaattaaatcgtcacagnccaagtaataancccaagaatnggtatgagtttcatgtgtaatagnctcaaatggaataagcatgaatgnctggagtgganccattatncctcaaatattctatgtcacttctcatttaaagactcttgttatgaactattagaaactttaggcaaaatcaaaagtatttgcggcaaaataaaggcctattctactcttatttaaagtgaaacactgtatacttgtttctctccaaagcgaaattaagtatttataatttcaattgcctcgataagtttccaagtcactgaaatcnnnnnnnnnnnnnnntgtattgttgcacaactttaagataatttttgtctcaatgtcaacttttnnnnnnnnnnnnnnnnnnnnnnnnnnnnagaaaannnnnnnnnnaaaannnannnnnncnntgtgtctcgagctgttctttagagcgc

SEQ ID NO: 372 - DNA, 249 bp, Homo sapiens
tttgcactccaaaagcttatttggatttttttcttgcactgttttgtgtaatgcagaataatgattttatttctacagctttgtagattctaacatttatgtatctttattttcatattgtacagtaattttactttaaattatttaaataggctattttatttatttcaaatgcagttgtattagttctcattattgaactgtctgtgcactgtatgtagcaagcatttttcatctgttgtatacaag

SEQ ID NO: 373 - DNA, 233 bp, Homo sapiens
  misc_feature (183)..(183): n includes a, c, g, or t, or contains no nucleotide
acgaacttagcttggcctattctaggtagttccaaatagtatttttgttgtcaaactttaaaatttatattaatttgcaaatgtatgtctctgagtaggacttggacctttcctgagatttattttatccgtgatgtattttttttaattcttttgatacagagaagggtctttttttttttnaagtatttcagtgaaaacttggtgtaagtctgaacccatcttttgaaatg

SEQ ID NO: 374 - DNA, 257 bp, Homo sapiens
  misc_feature (36)..(36): n includes a, c, g, or t, or contains no nucleotide
  misc_feature (101)..(116): n includes a, c, g, or t, or contains no nucleotide
ctctgtccatttatccacaggaaagtgttatttttnaaggaaggttcatgtagagaaaagcacacttgtaggataagtgaaatggatactacatctttaannnnnnnnnnnnnnnntgtgtatggaaaaaccatttgaagtgtacctgtgtacataactctgtaaaaacactgaaaaattatactaacttatttatgttaaaagattttttttaatctagacaatatacaagccaaagtggcatgttttgtgcattt

SEQ ID NO: 375 - DNA, 578 bp, Homo sapiens
cctgctgaaaacttccgtgttctagtgaaacagaagaaggccagctttgaggaagcgagtaaccagctcataaatcacatcgaacagtttttggatactaatgaaacaccgtattttatgaagagcatagactgcatccgagccttccgggaagaagccattaagttttcagaagagcagcgctttaacaacttcctgaaagcccttcaagagaaagtggaaattaaacaattaaatcatttctgggaaattgttgtccaggatggaattactctgatcaccaaagaggaagcctctggaagttctgtcacagctgaggaagccaaaaagtttctggcccccaaagacaaaccaagtggagacacagcagctgtatttgaagaaggtggtgatgtggacgatttattggacatgatataggtcgtggatgtatggggaatctaagagagctgccatcgctgtgatgctgggagttctaacaaaacaagttggatgcggccattcaaggggagccaaaatctcaagaaattcccagcaggttacctggaggcggatcatctaattctctgtggaatgaa

SEQ ID NO: 376 - DNA, 471 bp, Homo sapiens
  misc_feature (26)..(27): n includes a, c, g, or t, or contains no nucleotide
  misc_feature (170)..(200): n includes a, c, g, or t, or contains no nucleotide
  misc_feature (262)..(262): n includes a, c, g, or t, or contains no nucleotide
agtcacccattccaggtgccacaggnnggggatgtttagtaatccaggatttctctgagaactgggatatgtggcctttttttttttctttttatcttttatctggaaactgggtttgggtcaaccccaggagtatttgcagaaggcccagcacagtggggggtattggnnnnnnnnnnnnnnnnnnnnnnnnnnnnnnntagataaccgtgtgagcttggactgagcgttggtggttcttcccaaaggaaaggaatttctncccggcctgccaggtctctgggccttcagcgcgggtcctggtgctgcggccacaccaccctggggtgctcattgacagagctgccataatgaacttgaaaggacgggaatcacgagggaagctggggctcccctgcccacaggagaggatccccgttcttcaagcttctctgctcagtgtctactaacgaccgacatttgctaatgtaa

SEQ ID NO: 377 - DNA, 293 bp, Homo sapiens
  misc_feature (29)..(61): n includes a, c, g, or t, or contains no nucleotide
cttatgtctttttggcagctcagaaggannnnnnnnnnnnnnnnnnnnnnnnnnnnnnnnntaaatcttgccagttatatcactgcattaatcatagcacattgcgaacacataatatctcgactttgatgattttaggttgcatccctgggctagggattcctgttaatctgtccgaggcttgggctgccacacctgctttgcattttgtgaaacttcttctacttcaggttactcattgtgcccgtagagccttaggcatgataatttttgctatcgtttccttggtcaca

SEQ ID NO: 378 - DNA, 458 bp, Homo sapiens
  misc_feature (28)..(29): n includes a, c, g, or t, or contains no nucleotide
  misc_feature (48)..(48): n includes a, c, g, or t, or contains no nucleotide
  misc_feature (183)..(183): n includes a, c, g, or t, or contains no nucleotide
cgatccgccatctgcggtggagccgcanncaaaatgcagattttcgtnaaaacccttacggggaagaccatcaccctcgaggttgaaccctcggatacgatagaaaatgtaaaggccaagatccaggataaggaaggaattcctcctgatcagcagagactgatctttgctggcaagcagctngaagatggacgtactttgtctgactacaatattcaaaaggagtctactcttcatcttgtgttgagacttcgtggtggtgctaagaaaaggaagaagaagtcttacaccactcccaagaagaataagcacaagagaaagaaggttaagctggctgtcctgaaatattataaggtggatgagaatggcaaaattagtcgccttcgtcgagagtgcccttctgatgaatgtggtgctggggtgtttatggcaagtcactttgacagacattattgtgg

SEQ ID NO: 379 - DNA, 187 bp, Homo sapiens
gagtcttgctgatttgcagaatgatgaagttgcatttagaaaattcaagctgattactgaagatgttcagggtaaaaactgcctgactaacttccatggcatggatcttacccgtgacaaaatgtgttccatggtcaaaaaatggcagacaatgattgaagctcacgttgatgtcaagactaccgat

SEQ ID NO: 380 - DNA, 408 bp, Homo sapiens
  misc_feature (229)..(229): n includes a, c, g, or t, or contains no nucleotide
  misc_feature (379)..(379): n includes a, c, g, or t, or contains no nucleotide
agattcacagcacgtttccatcttgctgcccaaatgttcccagcaggccacaggcaatgtgaagtattcatccggccaaccaatgtttcctgacgtacagtgttgcccttttcagcaaatgccaattccaagttccattaaatcagaagctccatggctccttggcccacgatgttgagtgctgactgtgtgttctactgaaagagtaaaacactgactatccaaaganaaatggatattttgtttttataataaccatatattattgttttcttcttccctttctatgcaagtgtaaattaatgaacagagaggtatttggaaatggtaatacatttgtcacggatttgtataatgtatacagcattgggaaagtggntgggggctttctaatatgataccgtcttt

SEQ ID NO: 381 - DNA, 571 bp, Homo sapiens
  misc_feature (71)..(71): n includes a, c, g, or t, or contains no nucleotide
  misc_feature (312)..(312): n includes a, c, g, or t, or contains no nucleotide
  misc_feature (374)..(374): n includes a, c, g, or t, or contains no nucleotide
  misc_feature (376)..(376): n includes a, c, g, or t, or contains no nucleotide
  misc_feature (381)..(381): n includes a, c, g, or t, or contains no nucleotide
  misc_feature (409)..(409): n includes a, c, g, or t, or contains no nucleotide
  misc_feature (416)..(416): n includes a, c, g, or t, or contains no nucleotide
  misc_feature (474)..(474): n includes a, c, g, or t, or contains no nucleotide
  misc_feature (516)..(541): n includes a, c, g, or t, or contains no nucleotide
ggggtcatccaccttgctctgtgaagacggctgcctggcattggtagacaccggtgcatcctacatctcangttctaccagctccatagagaagctcatggaggccttgggagccaagaagaggctgtttgattatgtcgtgaagtgtaacgagggccctacactccccgacatctctttccacctgggaggcaaagaatacacgctcaccagcgcggactatgtatttcaggaatcctacagtagtaaaaagctgtgcacactggccatccacgccatggatatcccgccacccactggacccacctgggncctgggggccaccttcatccgaaagttctacacagagtttgatcggcgtaacaaccgcattngnttcgncttggcccgctgaggccctctgccaccncaggcangccctgccttcagccctggcccagagctggaacactctctgagatgcccctctgcctnggcttatgccctcagatggagacattggatgtggagctcctnnnnnnnnnnnnnnnnnnnnnnnnnnccagcccttccctgctttgaggacaaagag

SEQ ID NO: 382 - DNA, 109 bp, Homo sapiens
  misc_feature (50)..(51): n includes a, c, g, or t, or contains no nucleotide
gatcagcttggtagacagtattagcggagaaacaccttgatcttggtttnngcaagcccttctcccatcagtcctagattaggccctgttcagccatgcaggggtgttg

SEQ ID NO: 383 - DNA, 145 bp, Homo sapiens
  misc_feature (92)..(109): n includes a, c, g, or t, or contains no nucleotide
gaagaatgccaagcagccctttctctgtttaacggacgatggtatgcaggacgacagctgcaatgtgaattctgcccagtgacccggtggannnnnnnnnnnnnnnnnntatttgaaatacaacaatgtccaagaggaaaacact

SEQ ID NO: 384 - DNA, 133 bp, Homo sapiens
tgcagcttggatacccaggacctacaagatcaactaaaaaggtcagaggcagagaaactcaccctggtgaccagagtacagcagttgcagggtttgcttcaaaatcaatccttacagcttcaagaacaggaga

SEQ ID NO: 385 - DNA, 472 bp, Homo sapiens
  misc_feature (147)..(206): n includes a, c, g, or t, or contains no nucleotide
tctttggcgccatctggagtactacttgttacattgcatgcccacggattctcaagattccttatttgcctcgagaaccttgtttaaaagcagaagactgcaagattccttcgcctcagaaaccaatctagattttagaagtgggcnnnnnnnnnnnnnnnnnnnnnnnnnnnnnnnnnnnnnnnnnnnnnnnnnnnnnnnnnnnntggagaatcactacaaaagaaacttctggacattgaaggattatattcaaaagttcgatctcgatatagtttcatacaggctcttgtcagacgtatccgtggcctcttgaggatatcaaggaactgagagcccgtgcttatgctcttctatgagagagatgaattggggagaattgtctccattttatagattagtttctttctaaattatgaccaaaaatattttgctatttctttctttgtatatggacatcttttctgtaaac

SEQ ID NO: 386 - DNA, 542 bp, Homo sapiens
  misc_feature (117)..(117): n includes a, c, g, or t, or contains no nucleotide
  misc_feature (139)..(174): n includes a, c, g, or t, or contains no nucleotide
  misc_feature (214)..(214): n includes a, c, g, or t, or contains no nucleotide
  misc_feature (250)..(255): n includes a, c, g, or t, or contains no nucleotide
  misc_feature (257)..(258): n includes a, c, g, or t, or contains no nucleotide
  misc_feature (261)..(262): n includes a, c, g, or t, or contains no nucleotide
  misc_feature (264)..(266): n includes a, c, g, or t, or contains no nucleotide
  misc_feature (268)..(270): n includes a, c, g, or t, or contains no nucleotide
  misc_feature (272)..(273): n includes a, c, g, or t, or contains no nucleotide
  misc_feature (276)..(285): n includes a, c, g, or t, or contains no nucleotide
  misc_feature (289)..(289): n includes a, c, g, or t, or contains no nucleotide
  misc_feature (291)..(293): n includes a, c, g, or t, or contains no nucleotide
  misc_feature (295)..(302): n includes a, c, g, or t, or contains no nucleotide
  misc_feature (305)..(306): n includes a, c, g, or t, or contains no nucleotide
  misc_feature (310)..(310): n includes a, c, g, or t, or contains no nucleotide
  misc_feature (317)..(318): n includes a, c, g, or t, or contains no nucleotide
  misc_feature (426)..(440): n includes a, c, g, or t, or contains no nucleotide
gaccagccaccattgtctctgttcagccaagtgtgcaagtaggctgcccgccaagagggggcctctgctacccgctgctgcctgccggctgacacactgcctccccagccttcctgntaggccaccctcctcccttccnnnnnnnnnnnnnnnnnnnnnnnnnnnnnnnnnnnnaaagtaaggttggcccttggaggccatgtttgggtctccngccagggcctagggctaggccatgcacccaatgggnnnnnnannaannannngnnnannaannnnnnnnnnaaanannnannnnnnnnagnntgtnaggaagnnaggtcaggcagctaggaccacctgcagtgtggcaggcttcatccctctttgctccaagtgtgtatgtgtgtctgtgcatgtgtgtagtgtctgtgtctgtgtgttcannnnnnnnnnnnnnncacacggtcataggccatcaaagctggaggagacctcagaatcattcattcacctacttgctcatttattcattcattcattttgcagataatatgggacgc

SEQ ID NO: 387 - DNA, 529 bp, Homo sapiens
  misc_feature (27)..(139): n includes a, c, g, or t, or contains no nucleotide
  misc_feature (153)..(153): n includes a, c, g, or t, or contains no nucleotide
  misc_feature (201)..(201): n includes a, c, g, or t, or contains no nucleotide
  misc_feature (236)..(236): n includes a, c, g, or t, or contains no nucleotide
  misc_feature (262)..(262): n includes a, c, g, or t, or contains no nucleotide
  misc_feature (283)..(283): n includes a, c, g, or t, or contains no nucleotide
  misc_feature (310)..(326): n includes a, c, g, or t, or contains no nucleotide
  misc_feature (334)..(334): n includes a, c, g, or t, or contains no nucleotide
  misc_feature (364)..(364): n includes a, c, g, or t, or contains no nucleotide
  misc_feature (375)..(375): n includes a, c, g, or t, or contains no nucleotide
  misc_feature (405)..(405): n includes a, c, g, or t, or contains no nucleotide
  misc_feature (415)..(415): n includes a, c, g, or t, or contains no nucleotide
ggcaacttctatgtacctgcagaaccnnnnnnnnnnnnnnnnnnnnnnnnnnnnnnnnnnnnnnnnnnnnnnnnnnnnnnnnnnnnnnnnnnnnnnnnnnnnnnnnnnnnnnnnnnnnnnnnnnnnnnnnnnnnnnnnntcaacaaggcttcnattaacatgctgaggattgtagagccatatattgcatgggggtacccnaatctgaagtcagtaaatgaactaatctacaagcntggttatggcaaaatcaataagaagngaattgctttgacagataacnctttgattgctcgatctcttggtaaannnnnnnnnnnnnnnnnggaggatntgattcatgagatctatactgttggaaaangcttcaaagangcaaataacttcctgtggcccttcaaattntcttctccangaggtggaatgaagaaaaagaccacccattttgtagaaggtggagatgctggcaacagggaggaccagatcaacaggcttattagaagaatgaactaaggtgtctaccatgatt

SEQ ID NO: 388 - DNA, 345 bp, Homo sapiens
  misc_feature (82)..(82): n includes a, c, g, or t, or contains no nucleotide
  misc_feature (246)..(246): n includes a, c, g, or t, or contains no nucleotide
  misc_feature (249)..(263): n includes a, c, g, or t, or contains no nucleotide
ctagatgtctctgaaggtaagatcatttaatatctttgatatgcttacgagtaagtgaatcctgattatttccagacccacnaccagagtggatcttattttcaaagcagtatagacaattatgagtttgccctctttcccctaccaagttcaaaatatatctaagaaagattgtaaatccgaaaacttccattgtagtggcctgtgcttttcagatagtatactctcctgtttggagacagaggnagnnnnnnnnnnnnnnntctctttttcagctcaattgtatctgacccttctttaagttatgtgtgtggggagaaatagaatggtgctcttatctttctt

SEQ ID NO: 389 - DNA, 143 bp, Homo sapiens
agttacagccgaatgggctacatggatccacgggaaagagacatgcgaatgggtggcggaggagcaatgaggtgcggggcctgtgggtggacagggtcctagaggaatggggcctggaactccagcaggatatggtagaggga

SEQ ID NO: 390 - DNA, 568 bp, Homo sapiens
  misc_feature (278)..(302): n includes a, c, g, or t, or contains no nucleotide
  misc_feature (395)..(415): n includes a, c, g, or t, or contains no nucleotide
  misc_feature (502)..(502): n includes a, c, g, or t, or contains no nucleotide
  misc_feature (510)..(510): n includes a, c, g, or t, or contains no nucleotide
  misc_feature (536)..(536): n includes a, c, g, or t, or contains no nucleotide
  misc_feature (543)..(543): n includes a, c, g, or t, or contains no nucleotide
taagactcttaaaatacggtacctggcaatgtttatttcataaagaattgtgaacttcttgaatctagggagggggaatgtagtgaagggatgtatcaagtggggtggtgggagggggaggcaaggttatatgcactttctcatgatttacagagaagtgaataactgcaaagtgaagttgcttcttctacttcagtcttctctcactttgatttgctagttgttatcaattaatgacaattacaaacctactgtatctctaatacagtgtgactggnnnnnnnnnnnnnnnnnnnnnnnnnaagtgccaagtttgtttttgggttcctggaacagcgctcacctttgtttagaacactggtttaaagggataatcatctctgtcacattagacnnnnnnnnnnnnnnnnnnnnnactcattttaggaaaaaaaaaagcatgatctgaaaaatacttttggtggtatgttggttaccctcctagctttccatttggtttagnaacataangcaaataggacacagtccatactgtncactggntctggcactgtgtgggagcttcgct

SEQ ID NO: 391 - DNA, 160 bp, Homo sapiens
gtatatgttatttaccttcagatctaaatggtaatctgaacccaaatttgtataaagacttttcaggtgaaaagacttgattttttgaaaggattgtttatcaaacacaattctaatctcttctcttatgtatttttgtgcactaggcgcagttgtgtag

SEQ ID NO: 392 - DNA, 565 bp, Homo sapiens
  misc_feature (65)..(79): n includes a, c, g, or t, or contains no nucleotide
  misc_feature (211)..(211): n includes a, c, g, or t, or contains no nucleotide
  misc_feature (401)..(401): n includes a, c, g, or t, or contains no nucleotide
aggacagcttcgacaccatccacttctttgggaacgagactagccctggtgggaacgactttgannnnnnnnnnnnnnnccggactgttggccacagcgtggtgtctcctcaggacacggtgcagcgatgccgggagattttcttcccagagacagctcatgaggcgtgaccggggcccacatctgtgtgtcgtgacttctgaagagtttngcctaggcctaaagagaggtcctggtgttggatagatgccagggcccctcctctggcccaggacgcctgctgcaagcccacccagatggggccagagtctgtgtggacaaccgtccccagccagtctgctcctagtggcactggcttcgtcctcccagggcccagagtgttccccatgctccacctggtngcccaggccacagctgctgcttgtatttcggtacagaagaggtttctttctgcaccaggaggaggcgtgctcaagtatcggtacgagatctagcctgccctgcctgcctgccctgggcgatgaggtacggtggggaaggtgcctattttagagaactttgtcac

SEQ ID NO: 393 - DNA, 553 bp, Homo sapiens
  misc_feature (35)..(57): n includes a, c, g, or t, or contains no nucleotide
  misc_feature (230)..(255): n includes a, c, g, or t, or contains no nucleotide
  misc_feature (332)..(353): n includes a, c, g, or t, or contains no nucleotide
  misc_feature (355)..(355): n includes a, c, g, or t, or contains no nucleotide
  misc_feature (357)..(357): n includes a, c, g, or t, or contains no nucleotide
  misc_feature (360)..(362): n includes a, c, g, or t, or contains no nucleotide
  misc_feature (373)..(375): n includes a, c, g, or t, or contains no nucleotide
  misc_feature (377)..(377): n includes a, c, g, or t, or contains no nucleotide
  misc_feature (386)..(388): n includes a, c, g, or t, or contains no nucleotide
  misc_feature (483)..(483): n includes a, c, g, or t, or contains no nucleotide
  misc_feature (504)..(518): n includes a, c, g, or t, or contains no nucleotide
gcctagcgatggagggacactctaacacaactttnnnnnnnnnnnnnnnnnnnnnnncagggaaaaagatgggatgacagatggggtcagacagaaagagcttctgggaaacaagcttacatagtcttttttaaaatgcacaaagcctcccagctaagaggtcacttggtttgggcttcattaggactgagactttgttgagttctttctgggacttggagagtggatgnnnnnnnnnnnnnnnnnnnnnnnnnngctctcccgagggtgccactttctcaagatgaaaactgtgactgaaaaaattaataataaatgtttctgagctgccnnnnnnnnnnnnnnnnnnnnnnananaannnactagactccnnnangcctgcctnnnatacaagaggcatcattggctccaattttagagaacttgaaagcaaggctttggacaaaattttgagaccctaatcactttaccttcctccaaanttacccaacatacggtaaacnnnnnnnnnnnnnnngtatgtatgtatttagttcaggttgacttgtgtcc

SEQ ID NO: 394 - DNA, 593 bp, Homo sapiens
  misc_feature (228)..(255): n includes a, c, g, or t, or contains no nucleotide
  misc_feature (257)..(258): n includes a, c, g, or t, or contains no nucleotide
catccggacatgtacagatatcaagccagaatggttggtgaaaattgcccctcaatattatgacatgagcaatttcccacagtgtgaagcaaagagacagttggaccgcatcattgccaaacttcaatccaaggaatattcacagtactgaattcagtgcttagaactgaagttattgagaggacagctttaaaagatgaatgaactcaaaagttcgagttgtgctcnnnnnnnnnnnnnnnnnnnnnnnnnnnntnntgaaagctttttaatttttctttacagtaaatattccattctgatttcataaattaaacatttatgcctcccttttgtgttgacactgtagctcatactggaaaagtcgatcaatgttttgcagtttattgaaagtagttctatatataacaatgttataagcatttctttagaaatggttgaaaatgcttctaaaatgtgattatcgaccatggtatgcatgatcgttgtaattgttgacattccttttagaagttgtgaaatgttacaacttgtgcttatgtagacacaatcttctgtctcagtacagaggcactgacttcaataaagtctat

SEQ ID NO: 395 - DNA, 144 bp, Homo sapiens
  misc_feature (44)..(44): n includes a, c, g, or t, or contains no nucleotide
  misc_feature (52)..(52): n includes a, c, g, or t, or contains no nucleotide
  misc_feature (108)..(108): n includes a, c, g, or t, or contains no nucleotide
ctcactgtaaaccctcctctcatatgcagatctacaacatgtgnaatataanattcctgattatatcatgaccactcccagtgggctctgctggtagcttgtttggtntaggtatagatccagtgcttttccctctttattctt

SEQ ID NO: 396 - DNA, 323 bp, Homo sapiens
  misc_feature (72)..(172): n includes a, c, g, or t, or contains no nucleotide
  misc_feature (176)..(176): n includes a, c, g, or t, or contains no nucleotide
  misc_feature (182)..(182): n includes a, c, g, or t, or contains no nucleotide
  misc_feature (278)..(278): n includes a, c, g, or t, or contains no nucleotide
gatcgctgagctagagatgaccatcttcctcatcaatatgctggagaacttcagagttgaaatccaacaccnnnnnnnnnnnnnnnnnnnnnnnnnnnnnnnnnnnnnnnnnnnnnnnnnnnnnnnnnnnnnnnnnnnnnnnnnnnnnnnnnnnnnnnnnnnnnnnnnnnnnaganaggatngcctgcagccacatgggaggaaggcccaggggtggggcccatggggtctctgcatcttcagtcgtctgtcccaagtcctgctcctttctgcccagnctgctcagcaggttgaatgggttctcagtggtcaccttcctcagc

SEQ ID NO: 397 - DNA, 517 bp, Homo sapiens
  misc_feature (156)..(172): n includes a, c, g, or t, or contains no nucleotide
  misc_feature (277)..(292): n includes a, c, g, or t, or contains no nucleotide
  misc_feature (305)..(388): n includes a, c, g, or t, or contains no nucleotide
gaggctgtaacatgcccagaagctgttgtggccgacacttcaacaatagggaaaaaaaggtagaaaatatccctactgacagtaactacctgtcacatatttctcttaggacttttaaagatgagccattaaaatagaatgatcctttatggaccnnnnnnnnnnnnnnnnnaaaatgaatccagattgctgtcattttcttttcttttgggtggtggggcttgatgtagattttactctatgtacagaatttaacgttgaatatattaaaataacnnnnnnnnnnnnnnnngcggaggttagannnnnnnnnnnnnnnnnnnnnnnnnnnnnnnnnnnnnnnnnnnnnnnnnnnnnnnnnnnnnnnnnnnnnnnnnnnnnnnnnnnngtagaaaattttttcagatggacaaaatgtatatggtacagatgtaaagttttctatgtaaaaaattctgtacaactttctgtacaatattgattcccatctggcatattctaatcaggttataggtca

SEQ ID NO: 398 - DNA, 378 bp, Homo sapiens
  misc_feature (244)..(287): n includes a, c, g, or t, or contains no nucleotide
ggttcccagtaattacagtaaggagtttttctatattttcacagttggatttatctaaggatatttctcagcatattaaggaatccttttctacatttgagcaaatactgaggttcatgttgtaccaaataataataaattgcttttgtgtttaatatgtaacacgtaagaacaattgaaattttcttctaagatttaatactagtcttttagtataaaggaatgtaactggagaaaaaaattnnnnnnnnnnnnnnnnnnnnnnnnnnnnnnnnnnnnnnnnnnnnaatttgtcacaatgttacaatcaggaagttttttttctggtttcttcttccaaaggaaaataatagcctacttgtattttgaagtaactga

SEQ ID NO: 399 - DNA, 399 bp, Homo sapiens
  misc_feature (158)..(158): n includes a, c, g, or t, or contains no nucleotide
atttttcacatataagtgggctaaccaatattttcaaaagaacttcatcattgtacaactaacaacagtaactagcccttaattatggtgacagttccttattggtgtgtgtgagattactctagcaactattacagtataacacagatgatcttctnccacacaccccatcacccagataatttacagttctgttaacagtgaggttgataaagtattactgataaaaaattatctaaggaaaaaaacagaaaattatttggtgtggccatcttacctgcttatgtctcctacacaaagctaaatattctagcagtgatgtaatgaaaaattacatcttactgttgatatatgtatgctctggtacacagatgtcattttgttgtcacagcactacag

SEQ ID NO: 400 - DNA, 556 bp, Homo sapiens
  misc_feature (44)..(75): n includes a, c, g, or t, or contains no nucleotide
  misc_feature (100)..(129): n includes a, c, g, or t, or contains no nucleotide
  misc_feature (180)..(453): n includes a, c, g, or t, or contains no nucleotide
aacaggactgagacctaacttaacaatgcatttggccacctagnnnnnnnnnnnnnnnnnnnnnnnnnnnnnnnntttagtggaagtggtgaagaccaannnnnnnnnnnnnnnnnnnnnnnnnnnnnnttggaggagaaaaggcattagtgaggtagactcaaagcctttggctgcaannnnnnnnnnnnnnnnnnnnnnnnnnnnnnnnnnnnnnnnnnnnnnnnnnnnnnnnnnnnnnnnnnnnnnnnnnnnnnnnnnnnnnnnnnnnnnnnnnnnnnnnnnnnnnnnnnnnnnnnnnnnnnnnnnnnnnnnnnnnnnnnnnnnnnnnnnnnnnnnnnnnnnnnnnnnnnnnnnnnnnnnnnnnnnnnnnnnnnnnnnnnnnnnnnnnnnnnnnnnnnnnnnnnnnnnnnnnnnnnnnnnnnnnnnnnnnnnnnnnnnnnnnnnnnnnnncccgggtccgagtaccccacctggaagctgcgtccgtgccgagcccagcgtgtcgctgtttcccaccctcgccggggatggaagcacgcaagcgcagacctcg

SEQ ID NO: 401 - DNA, 517 bp, Homo sapiens
tggatgcagcggttttcatggagactgtcttacgctgacaaagattattgaagcaagactaaagatgtataagcattccaataataaggccatgactacgggggcaattgctgcaatgctgtctacaatcctgtattcaaggcgcttctttccatactatgtttacaacatcatcggtggacttgatgaagaaggaaagggggctgtatacagctttgatccagtagggtcttaccagagagactccttcaaggctggaggctcagcaagtgccatgctacagcccctgcttgacaaccaggttggttttaagaacatgcagaatgtggagcatgttccgctgtccttggacagagccatgcggctggtgaaagatgtcttcatttctgcggctgagagagatgtgtacactggggacgcactccggatctgcatagtgaccaaagagggcatcagggaggaaactgtttccttaaggaaggactgatctgtgtgctcttatcaccaatcagttcag

SEQ ID NO: 402 - DNA, 517 bp, Homo sapiens
taaagcagtctttatatgcattccgaggccagagtaacattttgaactttggggggatatttgttcatcacttgggtagaagaggagcaaaaatacctctgttttctcttgccaaagtaagatgaagctattccaggttgagggatttttctttgcacggggttgattaatttctgcacagggagtgagattattaaagtaacacacacacaaagtaaattgcaaaatgaaaaaaattagaagcaaatgagttttggaccaatattgttgataaatctaaattgttaagagagatcttataatgcaacatcaaattctttattcaattttactgaagtactggctctttcctgctctggacaagaattgagcaacttgtctgatgactgggaaaggaggacctgcaaccatctgacttggtctctgttaatgacgtctctccctctaaaccccattaaggactgggagaggcagagcaagcctcagagcccaggcctcagtggtcattaagatgtta

SEQ ID NO: 403 - DNA, 444 bp, Homo sapiens
  misc_feature (366)..(377): n includes a, c, g, or t, or contains no nucleotide
gtatacaccatgagcaaagctcaccctcccgagttgaaaaaatttatggacaagaagttatcattgaaattaaatggtggcagacatgtccaaggaatattgcggggatttgatccctttatgaaccttgtgatagatgaatgtgtggagatggcgactagtggacaacagaacaatattggaatggtggtaatacgaggaaatagtatcatcatgttagaagccttggaacgagtataaataatggctgttcagcagagaaacccatgtcctctctccatagggcctgttttactatgatgtaaaaattaggtcatgtacattttcatattagactttttgttaaataaacttttgtaatagtcnnnnnnnnnnnntcagatgttctgaatatagaatatcagctctcattccagttttttctaacatgaattttcctggttg

SEQ ID NO: 404 - DNA, 94 bp, Homo sapiens
aggcgcatttcagatgatgacactgccacctctgacttctgcctctggccttccactctcagtaagaagagccaggcaggtgcttcagaactgg

SEQ ID NO: 405 - DNA, 500 bp, Homo sapiens
  misc_feature (180)..(180): n includes a, c, g, or t, or contains no nucleotide
  misc_feature (182)..(183): n includes a, c, g, or t, or contains no nucleotide
  misc_feature (202)..(202): n includes a, c, g, or t, or contains no nucleotide
  misc_feature (283)..(299): n includes a, c, g, or t, or contains no nucleotide
  misc_feature (338)..(338): n includes a, c, g, or t, or contains no nucleotide
ggaattgaacagcaacctcaacataagattttttttctagtagcctcccactgattaaagaagcaagtttgaggtttcatccttcaaaagggggttccgagagagcaccgtagggcttttctcaaatagaaaagccagattttgaaaaaattttaaagataaaataggacatattttgcngnnatatatatatatatatacncaaacacatctccaggtatagagaaccatccagatgttcacttttgaaaatatctaatgatgcaaagttttattcttgaannnnnnnnnnnnnnnnntcaaacaattaacaaatatatttaagtactaaaggtgantttttttttaaagactttttcaaattgtcaaatgatttaatgcagatgaacatatttctattttaagtaacgggaatctgtaagaatgtttgcttgagatatggttaacttttttcttttgttggttttgacttagatggacaccatgagatgttaatattc

SEQ ID NO: 406 - DNA, 605 bp, Homo sapiens
  misc_feature (39)..(59): n includes a, c, g, or t, or contains no nucleotide
  misc_feature (421)..(435): n includes a, c, g, or t, or contains no nucleotide
  misc_feature (514)..(528): n includes a, c, g, or t, or contains no nucleotide
ttgatttcttcctgggggcctctctcaaggatgaggttnnnnnnnnnnnnnnnnnnnnnaagcagacccgtgccggccagcgcaccaggttcaaggcatttgttgctatcggggactacaatggccacgtcggtctgggtgttaagtgctccaaggaggtggccaccgccatccgtggggccatcatcctggccaagctctccatcgtccccgtgcgcagaggctactgggggaacaagatcggcaagccccacactgtcccctgcaaggtgacaggccgctgcggctctgtgctggtacgcctcatccctgcacccaggggcactggcatcgtctccgcacctgtgcctaagaagctgctcatgatggctggtatcgatgactgctacacctcagcccggggctgcactgccaccctggnnnnnnnnnnnnnnnccacctttgatgccatttctaagacctacagctacctgacccccgacctctggaaggagactgtattcaccaagtctcnnnnnnnnnnnnnnnctgaccacctcgtcaagacccacaccagagtctccgtgcagcggactcaggctccagctgtggctacaacatagggt

SEQ ID NO: 407 - DNA, 126 bp, Homo sapiens
aatccctctaagtctgcttgatagagtggatagtatgttaaaactgtgtactttaaaaaaaaattcaacctttacatctagaataatttgcatctcattttgcctaaattggttctgtattcataa

SEQ ID NO: 408 - DNA, 535 bp, Homo sapiens
  misc_feature (174)..(189): n includes a, c, g, or t, or contains no nucleotide
  misc_feature (329)..(357): n includes a, c, g, or t, or contains no nucleotide
  misc_feature (442)..(457): n includes a, c, g, or t, or contains no nucleotide
ccaagatcgtgaagcccaatggcgagaagccggacgagttcgagtccggcatctcccaggctcttctggagctggagatgaactcggacctcaaggctcagctcagggagctgaatattacggcagctaaggaaattgaagttggtggtggtcggaaagctatcataatctttnnnnnnnnnnnnnnnntgaaatctttccagaaaatccaagtccgcctagtacgcgaattggagaaaaagttcagtgggaagcatgtcgtctttatcgctcagaggagaattctgcctaagccaactcgaaaaagccgtacaaaaaataagcaaaannnnnnnnnnnnnnnnnnnnnnnnnnnnntgcacgatgccatccttgaggacttggtcttcccaagcgaaattgtgggcaagagaatccgcgtcaaactagatggcagccggcnnnnnnnnnnnnnnnnggacaaagcacagcagaacaatgtggaacacaaggttgaaactttttctggtgtctataagaagctcacgggcaagga

SEQ ID NO: 409 - DNA, 480 bp, Homo sapiens
  misc_feature (67)..(107): n includes a, c, g, or t, or contains no nucleotide
  misc_feature (406)..(406): n includes a, c, g, or t, or contains no nucleotide
agcaacaaatccacagcccctgatgacttgtgggtgctcctggctcaacccaaccaacaggactgannnnnnnnnnnnnnnnnnnnnnnnnnnnnnnnnnnnnnnnnccaggcctccccaggcacaccactctgcccagggaatgggggctttgggtcatctcccactgcctgggggagtcagatggggtgcaggaatctggctcttcagccatctcaggtttagggggtttgtaacagacattattctgttttcactgcgtatccttggtaagccctgtggactggttcctgctgtgtgatgctgagggttttaaggtggggagagataagggctctctcgggccatgctacccggtatgactgggtaatgaggacagactgtggacaccccatctacctgagtntgattctttagcagcagagactgaggggtgcagagtgtgagctgggaaaggtttgtggctccttgcagcctcca

SEQ ID NO: 410 - DNA, 189 bp, Homo sapiens
  misc_feature (33)..(49): n includes a, c, g, or t, or contains no nucleotide
tctaaaacctgtaggaaagaatctttagaagcnnnnnnnnnnnnnnnnntgtagcccaatctctacccatgataggagagtaaggcttatatattttatagtagggcactaaatacaggaaccatgtatttaaaaactttttagtgattatctcagaattctaggtgtccctctgctgtacatccctaa

SEQ ID NO: 411 - DNA, 524 bp, Homo sapiens
  misc_feature (89)..(89): n includes a, c, g, or t, or contains no nucleotide
  misc_feature (161)..(175): n includes a, c, g, or t, or contains no nucleotide
  misc_feature (356)..(385): n includes a, c, g, or t, or contains no nucleotide
attggccttttacctggatataaattaattgtgcctgccaccaccatccaacagacctggtgctctaatgccaagttatacacgggacnagttgctggcatgtcttcattggctatataaaatgtggccaagaagataggctctcagtaagaagtctgatnnnnnnnnnnnnnnntccctgctttctggtataaagctctcaaatgtgaccatgtgaatctgggtgggataatggactcagctctgtctgctcaatgccattgtgcagagaagcaccctaatgcataagctttttaatgctgtaaaatatagtcgctgaaattaaatgccactttttcagaggtgaattaatggannnnnnnnnnnnnnnnnnnnnnnnnnnnnngtataaaacttgataaatggaactattccatcaataggcaaaagtgtaacaacctatctagatggatagtatgtaatttctgcacaggtctctgtttagtaaatacatcactgtataccgatcaggaatcttgctccaa

SEQ ID NO: 412 - DNA, 51 bp, Homo sapiens
cactgtattcagctctgtcaagaatggtccaggttcttctagatgatctgc

SEQ ID NO: 413 - DNA, 414 bp, Homo sapiens
  misc_feature (302)..(311): n includes a, c, g, or t, or contains no nucleotide
ttaatacattgatcaggccatccaggacaccacgattctcccaaagtaccttgaactcttagtgattgagactcaaaaaaacaaaaaagacttgagacaatgttttcttcaacatgctccaaatataagacatttgtttgctgtacagaaagtatcacaaatggaatatatcagtacctctcaagctagtgtttctagctaaataaatgggtgtatataattttatggtggaaaagaactgtactgtctgttatgatttccttcaatgtgcataatgataaaataaataattttaatattcnnnnnnnnnnatggttacctgacctaaattagataaattgtagggctttagctttcttatttttgtcaaaagttggtgttgacatacattccctctaatttgaactggtattg

SEQ ID NO: 414 - DNA, 144 bp, Homo sapiens
actccccagggctgaagctgggatcccggccagccaggtgacccccacgctctggatgtctctgctctgttccttccccgagcccctgccccggctccccgccaaagcacccctgcccactcgggcttcatcctgcacaataaa

SEQ ID NO: 415 - DNA, 507 bp, Homo sapiens
  misc_feature (119)..(140): n includes a, c, g, or t, or contains no nucleotide
  misc_feature (252)..(259): n includes a, c, g, or t, or contains no nucleotide
  misc_feature (266)..(315): n includes a, c, g, or t, or contains no nucleotide
  misc_feature (428)..(481): n includes a, c, g, or t, or contains no nucleotide
ccatggcttgaaacctctgcctgatgtggctccttcctttttcccatttgtcaaaccctcttcaaaggaggaacagataagactgggtcagcctagtcatgcctcccaactgtggtggnnnnnnnnnnnnnnnnnnnnnngggtggatggagaagaggttgctgattaaaatacactccccctataaaggggaagggggagtgtgacactttctttccatgttcaagtgaaaataaataatgtaccctgcannnnnnnnccccttnnnnnnnnnnnnnnnnnnnnnnnnnnnnnnnnnnnnnnnnnnnnnnnnnntcctttttccttccccctcctccactcctacgcccactcccatgcttgggagaatggggctgggacatgcactgagtgttgcacttttatttaggtagggaggcatgttgaannnnnnnnnnnnnnnnnnnnnnnnnnnnnnnnnnnnnnnnnnnnnnnnnnnnnnccttctagttcccaaaggcgatgtcc

SEQ ID NO: 416 - DNA, 343 bp, Homo sapiens
tgctctgaggggacagacaaggcttgggtgtatatgccaaccagatctcattgaagtatcagcttgtttggtactaggtgcaagtgtagcatgtcacatgtgaccatgttggatcattgacaatttttaggtatgtactgacctacatttatgatgaagatcctgagcggaggttaagatattaagttattttccatatgaatcagaattatattgattctgtgcaatcaaaacaaaaggcagaatagaatgctgagattggttaagtttgcaatgaccatcttgaaccacagatttctgctatgtgtcatcaaaacatctagttctgagtaacattttcacg

SEQ ID NO: 417 - DNA, 529 bp, Homo sapiens
  misc_feature (144)..(144): n includes a, c, g, or t, or contains no nucleotide
  misc_feature (146)..(147): n includes a, c, g, or t, or contains no nucleotide
  misc_feature (149)..(149): n includes a, c, g, or t, or contains no nucleotide
  misc_feature (155)..(156): n includes a, c, g, or t, or contains no nucleotide
  misc_feature (168)..(168): n includes a, c, g, or t, or contains no nucleotide
  misc_feature (188)..(194): n includes a, c, g, or t, or contains no nucleotide
  misc_feature (196)..(198): n includes a, c, g, or t, or contains no nucleotide
  misc_feature (200)..(201): n includes a, c, g, or t, or contains no nucleotide
  misc_feature (203)..(205): n includes a, c, g, or t, or contains no nucleotide
  misc_feature (207)..(215): n includes a, c, g, or t, or contains no nucleotide
  misc_feature (219)..(221): n includes a, c, g, or t, or contains no nucleotide
  misc_feature (229)..(233): n includes a, c, g, or t, or contains no nucleotide
  misc_feature (243)..(246): n includes a, c, g, or t, or contains no nucleotide
  misc_feature (248)..(248): n includes a, c, g, or t, or contains no nucleotide
  misc_feature (252)..(252): n includes a, c, g, or t, or contains no nucleotide
  misc_feature (254)..(293): n includes a, c, g, or t, or contains no nucleotide
  misc_feature (296)..(311): n includes a, c, g, or t, or contains no nucleotide
  misc_feature (313)..(313): n includes a, c, g, or t, or contains no nucleotide
  misc_feature (331)..(331): n includes a, c, g, or t, or contains no nucleotide
  misc_feature (342)..(342): n includes a, c, g, or t, or contains no nucleotide
  misc_feature (364)..(364): n includes a, c, g, or t, or contains no nucleotide
  misc_feature (377)..(377): n includes a, c, g, or t, or contains no nucleotide
  misc_feature (385)..(455): n includes a, c, g, or t, or contains no nucleotide
  misc_feature (463)..(463): n includes a, c, g, or t, or contains no nucleotide
  misc_feature (475)..(475): n includes a, c, g, or t, or contains no nucleotide
  misc_feature (484)..(484): n includes a, c, g, or t, or contains no nucleotide
  misc_feature (501)..(501): n includes a, c, g, or t, or contains no nucleotide
ttagcctcagtggagctgtggttctcttggtactttcttgtcaaacaaaaccaatggctctgggtttggagaacacagtggctggttttaaaaattctttccacacctgtcaaaccaaaaatctatcagcccacgtggtgtggntnngntgaacnntgcatgccaggnggaagcagtccctcctcacnnnnnnncnnncnngnnngnnnnnnnnnagannntgaatggnnnnnctgagtattnnnngncatncnnnnnnnnnnnnnnnnnnnnnnnnnnnnnnnnnnnnnnnncannnnnnnnnnnnnnnngntgccctccgatgggtggnaataagtctgnttcatgccaaggctgggctttnggtcccaccaagnatgagttnnnnnnnnnnnnnnnnnnnnnnnnnnnnnnnnnnnnnnnnnnnnnnnnnnnnnnnnnnnnnnnnnnnnnnngtaagggnaaaagagctggnaggtggggnagagaaagatctccttncagttggggagtccttccactttcaaca

SEQ ID NO: 418 - DNA, 468 bp, Homo sapiens
  misc_feature (26)..(62): n includes a, c, g, or t, or contains no nucleotide
  misc_feature (429)..(443): n includes a, c, g, or t, or contains no nucleotide
ttttgcatcagtcacgttaaccagannnnnnnnnnnnnnnnnnnnnnnnnnnnnnnnnnnnngcgtctggggaggaataaaaagacatcgttcccgcttctgcgttttgttattcctactgccgccataggaattatttcgttggctgaacgttaccagcaccccgagaacacattttgatagaatcagagtagaggacatggctgtcttctaaaaagccacgacatgaaaatgacaatccctttcgtctccttcctccgctgcttccacctaacgcagcctcctgcctccgcctttgtttcatagtgaggattttattttgcacggcgccctccctctaaatacctaccctagatgatttcatcctgcccctcacttcttaacatattcctgtgtctttgtaatggccaaatttctccttccactcgnnnnnnnnnnnnnnnttcatgggagtcattttattcctta

SEQ ID NO: 419 - DNA, 235 bp, Homo sapiens
acgcctgttgttttggctcaatttgggtttgttggtcacatggagctcttccatttcgtttagctgaataatgagttgttcctagaggagacagcctgtctctccttgttgcccccaaagcccatgccctgccgtggtggcagctggggctgtggatgggaggggtccccaacatggatgtgttgcccctcctccgcatgccaacgcagttcatgtacaaggcccctctgcaact

SEQ ID NO: 420 - DNA, 136 bp, Homo sapiens
agcaggcccagtttctgccattccagctgtgggcacgtcagcgaaggcaagcgcaggttcacctacgaccacgctgagctggaaaggaaaatcgcgtgctgctccccgcccccagactacaactcggtggtcctgt

SEQ ID NO: 421 - DNA, 521 bp, Homo sapiens
  misc_feature (26)..(27): n includes a, c, g, or t, or contains no nucleotide
  misc_feature (38)..(38): n includes a, c, g, or t, or contains no nucleotide
  misc_feature (43)..(43): n includes a, c, g, or t, or contains no nucleotide
  misc_feature (54)..(71): n includes a, c, g, or t, or contains no nucleotide
  misc_feature (81)..(81): n includes a, c, g, or t, or contains no nucleotide
  misc_feature (91)..(91): n includes a, c, g, or t, or contains no nucleotide
  misc_feature (122)..(122): n includes a, c, g, or t, or contains no nucleotide
  misc_feature (125)..(142): n includes a, c, g, or t, or contains no nucleotide
  misc_feature (188)..(188): n includes a, c, g, or t, or contains no nucleotide
  misc_feature (193)..(193): n includes a, c, g, or t, or contains no nucleotide
  misc_feature (196)..(224): n includes a, c, g, or t, or contains no nucleotide
ctgttgaagcactgtacaagtttgtnnggttcctaagnccccncagtgaatgtnnnnnnnnnnnnnnnnnntggttgtaancatttgtagncaggttacatagctggagtcttttgtgcaanttnnnnnnnnnnnnnnnnnnattctgtggtatctgtgttgaataaagaaaaaggtagcagtgcttnctctnggnnnnnnnnnnnnnnnnnnnnnnnnnnnnnaggtgtatggaagggactgtttgcccgtatcatcatgattggtaccctgactgcactacagtggtttatctatgactccgtgaaggtctacttcagacttcctcgccctcctccacccgagatgccagagtctctgaagaagaagcttgggttaactcagtagttagatcaaagcaaatgtggactgaatctgcttgttgatcagtgttgaagaaagtgcaaaaggaacttttatatatttgacagtgtaggaaattgtctattcctgatataattactgtagtactcttgcttaag

SEQ ID NO: 422 - DNA, 333 bp, Homo sapiens
atcttaatgtgtctcgctggttttgtcacattcagcattatccaggcatcaggcaacatctgtctagtgttgtcttcatcaagaacagactatatactaattcccactagaagctgtccatgccatacagaagatctattaaaaatgttttaaatggaaaatgtactctagaccacaggactaatgtaaattaatatacagtcattcattatttgttgaagttgatagaatttttgaagtgtaaacttgtgtctgaatgttttatttgttctttagctgaagttttgcaatttttatgtcaaaattcaattgctattaaacaagttgagatcc

SEQ ID NO: 423 - DNA, 374 bp, Homo sapiens
  misc_feature (101)..(101): n includes a, c, g, or t, or contains no nucleotide
  misc_feature (160)..(272): n includes a, c, g, or t, or contains no nucleotide
atgagcaaaacactgtccagtctttgttacgattttgtaataaatgtgtacattttttttaaatttttggacatcacatgaataaaggtatgtatgtacgnaatgtgtatatattatatatatgacatctattttggaaaatgtttgccctgctgtaccnnnnnnnnnnnnnnnnnnnnnnnnnnnnnnnnnnnnnnnnnnnnnnnnnnnnnnnnnnnnnnnnnnnnnnnnnnnnnnnnnnnnnnnnnnnnnnnnnnnnnnnnnnnnnnnnncagccaaggacatccatacccaagtgaatgtgatgggacttaaaagaagtgaactgagacaattcactctggctgtttgaacagcagcgtttcataggaaga

SEQ ID NO: 424 - DNA, 488 bp, Homo sapiens
  misc_feature (205)..(229): n includes a, c, g, or t, or contains no nucleotide
  misc_feature (430)..(430): n includes a, c, g, or t, or contains no nucleotide
  misc_feature (432)..(432): n includes a, c, g, or t, or contains no nucleotide
  misc_feature (436)..(437): n includes a, c, g, or t, or contains no nucleotide
gtcttttaaacctcttggcattttgttttttttggattccccaagcattattcaaaaactggacagcagctcttttcactggtaacctcttgttggcaagagacaggaacttatttacagtagtcctgttggttcctggcccatataatgaattatgtatgaaggcttgtgctgcttgttgccttgaatctctcagatcttggtnnnnnnnnnnnnnnnnnnnnnnnnntttattctggctgacagactgtactttttgtactttaactttcttggagtcatttcctttttcacagtcttcatttttcttttgcaaattaacttctttcacctttcctggcgatttcttgatgttagtctgtgaagctgtggttaacttctccaaaatagtgtctggaaggagttttcttttcttctgttcgatgaacangntccnngcgtcgcttcctcttctccttcaggagcgttttatccctgcgcacggtctc

SEQ ID NO: 425 - DNA, 331 bp, Homo sapiens
  misc_feature (93)..(116): n includes a, c, g, or t, or contains no nucleotide
tgaaggtgttcgtctgctgcgcctccacatcgcactccggggagaagccggtccccactctcccccagttcaccatgggccccaatgtgaagnnnnnnnnnnnnnnnnnnnnnnnnggagagaaccctcaggtgcccaagcttgagaagagcatcagcgggaccagccccaaacgggaacacctgcccctggccgtgggcatcgccttcttcctcatgacgttcttggcctcctagctctgccccctcccctggggggggagagatggggcggggcttggaaggagcagggagcctttggcctctccaagggaagcctagtgggcctagac

SEQ ID NO: 426 - DNA, 431 bp, Homo sapiens
  misc_feature (36)..(51): n includes a, c, g, or t, or contains no nucleotide
  misc_feature (59)..(61): n includes a, c, g, or t, or contains no nucleotide
  misc_feature (93)..(108): n includes a, c, g, or t, or contains no nucleotide
  misc_feature (185)..(199): n includes a, c, g, or t, or contains no nucleotide
  misc_feature (335)..(352): n includes a, c, g, or t, or contains no nucleotide
caaagtcagcatctggatgaagaagtgtatcgaaannnnnnnnnnnnnnnntggatgannngccctcaaggccctcagacaagtattctaagnnnnnnnnnnnnnnnnaaagatgtcttgcttcttctaatttactatttaagattgtatttgggtgtattgcttctgatgataaatacggtctnnnnnnnnnnnnnnnataagaaaggcatattcctgagggtccatttcctattattaccacaggaaaagtcactgacgaatcttccagtaaagaagtttcttcaactaatggcatcgctttaacttttcgccccaagttgtcaccaaagtannnnnnnnnnnnnnnnnnaatctctccttcagtttcagtgtcactatagtttctgaaatgaccggccagggagcagcggcagcaccacacgggcatg

SEQ ID NO: 427 - DNA, 504 bp, Homo sapiens
  misc_feature (28)..(28): n includes a, c, g, or t, or contains no nucleotide
  misc_feature (133)..(149): n includes a, c, g, or t, or contains no nucleotide
taactaaggttttgctactaatgtcagnccatttactctcccactaattgggattattttttaaaagaggtctttctccccgaaatacaagttttagaaaatcttagaagaggggtgggtgcatgtcttaatnnnnnnnnnnnnnnnnntttggggttgaacttacttgaatggattaaaaattgcattgtgttacagagctagaaaattttatgtatgaaaaacgataatagccttacactgagtacaaataatactttaagagcatgtgaagatgtgatcatttgtgatgttacttgtaaaaaaaagtatatatacatatcttttgaagtgttaaaaggaaactagtactttatattctttatcatatcactttttgtaagtgttgaatatattcctgtttatttttctatgttctgttttgtagccttaagaagtgtttcaaacatatctgaatgtataaaataagagtaaatgccctacatggtgtgatgctgcattata

SEQ ID NO: 428 - DNA, 523 bp, Homo sapiens
  misc_feature (119)..(194): n includes a, c, g, or t, or contains no nucleotide
  misc_feature (204)..(210): n includes a, c, g, or t, or contains no nucleotide
  misc_feature (226)..(226): n includes a, c, g, or t, or contains no nucleotide
  misc_feature (237)..(237): n includes a, c, g, or t, or contains no nucleotide
gcgcaaactgcttcccgctgttggccatcccttccccagccacaggtgtccctgcccccaggacagtccagggccaggggcttctgtgagaggcagagggggaccctcaccaaatcttnnnnnnnnnnnnnnnnnnnnnnnnnnnnnnnnnnnnnnnnnnnnnnnnnnnnnnnnnnnnnnnnnnnnnnnnnnnncccacccgannnnnnngcatggccaagagccnagcttgcaccnacccacctgggaggccgaggaggaggtcccctgggcacagggcctctttgggacttcagaggaaatctcccagtcccactctcggagggttaagagaaggcctcctgcagctgtgccgtccacacctctaggtcgccagagccctggcccccagcccccagcaagcctgagcccgggaagaaccagaggccctcccgagagacccagtcacacgtctctgctttaagccttagccagctagtgacgagtacaacgagataacgcccatgtgttttggaacatttat

SEQ ID NO: 429 - DNA, 613 bp, Homo sapiens
cgatacgacaatggaagcggatatagaaggggaggttctagttacagtggtggaggctatggcggtggatatagcagtggaggctatggtagcggaggctatggtggcagcgcaactccttcgggcaggatatgtgcaggtgttggtggaggctatagaggagtttcccgaggtggctttagaggcaactctggaggagactacagagggcctagtggaggctacagaggatctgggggattccagcgaggaggtggtaggggggcctatggaactggctacttggacattgaagaggaggtggcggctataaaacttggttatgtcagttctgtgtgtagacagtaaggaaaaaaaggcatgctatgtgttacgtgttttttccagtatgtttatttgccaccaaaaagtaaatgcattttcacccattctgtggttcattgtagtttaaggaaaccaagcatatagatgcattagtgattttgtttattttatgtaaaatataacgatcttcttttaaaaataccacagtttgtatttttctttaaggagtaaagatttgcctttaaataacttggtattttcctggctttcgtttaatacaatagaaaat

SEQ ID NO: 430 - DNA, 288 bp, Homo sapiens
  misc_feature (181)..(185): n includes a, c, g, or t, or contains no nucleotide
  misc_feature (187)..(191): n includes a, c, g, or t, or contains no nucleotide
  misc_feature (194)..(197): n includes a, c, g, or t, or contains no nucleotide
  misc_feature (199)..(203): n includes a, c, g, or t, or contains no nucleotide
  misc_feature (205)..(209): n includes a, c, g, or t, or contains no nucleotide
  misc_feature (260)..(260): n includes a, c, g, or t, or contains no nucleotide
tcctcgctgccattctctgggctggaatgtgaagcctcagtcactctaaatgaagaattttcttttgaatgttttgtatgtaaaatagcaagtggctatttttaaagttaagtttgtataaatagttagatattctagatttacattaaattgtaaaataaatggacttattgaagcatannnnnannnnnaannnnannnnnannnnnaaacatgcatagctatttttatcactctaatcagtaaggctactatctagnctcgaatgctttcatacaagtgattttc

SEQ ID NO: 431 - DNA, 461 bp, Homo sapiens
  misc_feature (35)..(50): n includes a, c, g, or t, or contains no nucleotide
  misc_feature (107)..(114): n includes a, c, g, or t, or contains no nucleotide
  misc_feature (127)..(133): n includes a, c, g, or t, or contains no nucleotide
  misc_feature (135)..(135): n includes a, c, g, or t, or contains no nucleotide
  misc_feature (137)..(137): n includes a, c, g, or t, or contains no nucleotide
  misc_feature (142)..(143): n includes a, c, g, or t, or contains no nucleotide
  misc_feature (145)..(154): n includes a, c, g, or t, or contains no nucleotide
  misc_feature (158)..(159): n includes a, c, g, or t, or contains no nucleotide
  misc_feature (161)..(163): n includes a, c, g, or t, or contains no nucleotide
  misc_feature (198)..(212): n includes a, c, g, or t, or contains no nucleotide
  misc_feature (275)..(275): n includes a, c, g, or t, or contains no nucleotide
  misc_feature (290)..(290): n includes a, c, g, or t, or contains no nucleotide
gtctgacatataacaccacctgctgcaacaaggannnnnnnnnnnnnnnnggaccccggcccactccagccctgggccttgtcttccttacctccttggctggcctnnnnnnnnggctgctgcactnnnnnnnantncattnncnnnnnnnnnncccnncnnncttggcctgagcctctctccctgtgtctctgtatnnnnnnnnnnnnnnnaatcgtctctccctagctcccatttctttaattaaacactgttccgagtggtctcctcatccntccttcccacctcanacccttcactctcctttttctgggtcccttcccacttccttccaggacctccattggctcctagaagggctccccactttgcttcctatactctgctgtcccctacttgaggagggattgggatctgggcctgaaatggggcttctgtgttgtccccagtgaaggctccca

SEQ ID NO: 432 - DNA, 393 bp, Homo sapiens
  misc_feature (251)..(273): n includes a, c, g, or t, or contains no nucleotide
  misc_feature (340)..(354): n includes a, c, g, or t, or contains no nucleotide
cagtgtcccattgtggagcgcctcactaactccatgatgatgcacggccgcaacaacggcaagaagctcatgactgtgcgcatcgtcaagcatgccttcgagatcatacacctgctcacgggcgagaaccctctgcaggtcctggtgaacgccatcatcaacagtggtccccgggaggactccacacgcattgggcgcgccgggactgtgagacgacaggctgtggatgtgtcccccctgcgccgtgtgannnnnnnnnnnnnnnnnnnnnnnacaggcgctcgtgaggctgccttccggaacattaagaccattgctgagtgcctggcagatgagctcnnnnnnnnnnnnnnnggctcctcgaactcctatgccattaagaagaaggacgag

SEQ ID NO: 433 - DNA, 295 bp, Homo sapiens
ctttgctcagtggatcacacacatggaaggtgatgggggcatgggtggagggtccctaattctcttcgctgtgatgcatgagctccctcgctgtatgatttaggcttctatgtccaacagagtggactcttccctctcgctcccctctgccggtcccccatgccaccacccaccccaaacttccaggttccatccaccaccttgccaatggtgtagctgtcctctcagaactcctgtgtgtggaaggcacccgccctttccttgccttctttactcggcgtgctccttttctctt

SEQ ID NO: 434 - DNA, 331 bp, Homo sapiens
  misc_feature (151)..(171): n includes a, c, g, or t, or contains no nucleotide
tacttacaaaatagatcgcggattcaggtgtggctctatgagcaagtgaatatgcggatagaaggctgtatcattggttttgatgagtatatgaaccttgtattagatgatgcagaagagattcattctaaaacaaagtcaagaaaacaannnnnnnnnnnnnnnnnnnnnggagataatattactctgctacaaagtgtctccaactagaaatgatcaatgaagtgagaaattgttgagaaggatacagtttgtttttagatgtcctttgtccaatgtgaacatttattcatattgttttgattaccctcgtgttactacaagatggcaa

SEQ ID NO: 435 - DNA, 415 bp, Homo sapiens
ttggcagatgctcgttctttagcagacatagcaagagaagaagcttccaacttcagatctaactttggctacaacattccactaaaacatcttgcagacagagtggccatgtatgtgcatgcatatacactctacagtgctgttagaccttttggctgcagtttcatgttagggtcttacagtgtgaatgacggtgcgcaactctacatgattgacccatcaggtgtttcatacggttattggggctgtgccatcggcaaagccaggcaagctgcaaagacggaaatagagaagcttcagatgaaagaaatgacctgccgtgatatcgttaaagaagttgcaaaaataatttacatagtacatgacgaagttaaggataaagcttttgaactagaactcagctgggttggtgaat

SEQ ID NO: 436 - DNA, 175 bp, Homo sapiens
ctgcaaacaatggacggagattcttcactttacagagcacagtggcctgaccacaggggtggccttcgggcatcacgccaagttcatcgcttcaacaggcatggacagaagcctcaagttctacagcctgtaggccctggcccttctgatggaagctgggcctcatctcagtaga

SEQ ID NO: 437 - DNA, 521 bp, Homo sapiens
  misc_feature (67)..(67): n includes a, c, g, or t, or contains no nucleotide
  misc_feature (69)..(84): n includes a, c, g, or t, or contains no nucleotide
  misc_feature (98)..(98): n includes a, c, g, or t, or contains no nucleotide
  misc_feature (210)..(225): n includes a, c, g, or t, or contains no nucleotide
  misc_feature (364)..(383): n includes a, c, g, or t, or contains no nucleotide
  misc_feature (453)..(486): n includes a, c, g, or t, or contains no nucleotide
cttttggcaagttgatggcaaggacttgattgtgtcattaagcaaaagaatgtattggaagttgatngnnnnnnnnnnnnnnnntgtagtagtaactnggccgattgctaaagagttcataaggaggtgagaagtaatttttttaaaggagaaaaattttttggctttagatttaaagtaaattgaaatgttttaaagaaaaaagtattnnnnnnnnnnnnnnnnattaataatataagagctgaaatgtaagtcatttcttcagtccttctcctctgtcggaatcttttttgttttaccataaattcacctgacgagggcactctgagatagcactgctctggggccatctgatcaccatcgnnnnnnnnnnnnnnnnnnnnttgcctgcagcttttacttaaccctgtagtttctggacgtttgtgcagtattgaaaagacaggagaaaannnnnnnnnnnnnnnnnnnnnnnnnnnnnnnnnnactaaaaacaaggaaatgtacctctttcttcagaa

SEQ ID NO: 438 - DNA, 489 bp, Homo sapiens
  misc_feature (31)..(31): n includes a, c, g, or t, or contains no nucleotide
  misc_feature (37)..(37): n includes a, c, g, or t, or contains no nucleotide
  misc_feature (42)..(45): n includes a, c, g, or t, or contains no nucleotide
  misc_feature (48)..(50): n includes a, c, g, or t, or contains no nucleotide
  misc_feature (52)..(53): n includes a, c, g, or t, or contains no nucleotide
  misc_feature (55)..(55): n includes a, c, g, or t, or contains no nucleotide
  misc_feature (57)..(57): n includes a, c, g, or t, or contains no nucleotide
  misc_feature (59)..(61): n includes a, c, g, or t, or contains no nucleotide
  misc_feature (63)..(65): n includes a, c, g, or t, or contains no nucleotide
  misc_feature (67)..(67): n includes a, c, g, or t, or contains no nucleotide
  misc_feature (69)..(160): n includes a, c, g, or t, or contains no nucleotide
  misc_feature (377)..(456): n includes a, c, g, or t, or contains no nucleotide
gacattcattcctattttactgggcacctangaatgnatgcnnnntgnnngnnananannnannnanannnnnnnnnnnnnnnnnnnnnnnnnnnnnnnnnnnnnnnnnnnnnnnnnnnnnnnnnnnnnnnnnnnnnnnnnnnnnnnnnnnnnnnnnnnngggactctgcagtttcttcctgtcaaaatctctcctaccaagatggtgttccactgtccagcccagcatgagtagcaggtagagcacagctttactggctgtttgtatgctttggtttagtgcaatgtgtggtagattacttatcagaaaacatatatgtcatctctagaacgaagaaaaagcatagtagttcaattcccagtgtgtccctttgatnnnnnnnnnnnnnnnnnnnnnnnnnnnnnnnnnnnnnnnnnnnnnnnnnnnnnnnnnnnnnnnnnnnnnnnnnnnnnnnnctctgtgtttctgtactgatgtgtcacttatta

SEQ ID NO: 439 - DNA, 574 bp, Homo sapiens
  misc_feature (40)..(40): n includes a, c, g, or t, or contains no nucleotide
  misc_feature (44)..(44): n includes a, c, g, or t, or contains no nucleotide
  misc_feature (46)..(47): n includes a, c, g, or t, or contains no nucleotide
  misc_feature (51)..(51): n includes a, c, g, or t, or contains no nucleotide
  misc_feature (53)..(53): n includes a, c, g, or t, or contains no nucleotide
  misc_feature (67)..(67): n includes a, c, g, or t, or contains no nucleotide
  misc_feature (110)..(110): n includes a, c, g, or t, or contains no nucleotide
  misc_feature (123)..(124): n includes a, c, g, or t, or contains no nucleotide
  misc_feature (128)..(128): n includes a, c, g, or t, or contains no nucleotide
  misc_feature (134)..(134): n includes a, c, g, or t, or contains no nucleotide
  misc_feature (137)..(137): n includes a, c, g, or t, or contains no nucleotide
  misc_feature (146)..(146): n includes a, c, g, or t, or contains no nucleotide
  misc_feature (168)..(168): n includes a, c, g, or t, or contains no nucleotide
  misc_feature (199)..(199): n includes a, c, g, or t, or contains no nucleotide
  misc_feature (224)..(224): n includes a, c, g, or t, or contains no nucleotide
  misc_feature (244)..(244): n includes a, c, g, or t, or contains no nucleotide
  misc_feature (251)..(251): n includes a, c, g, or t, or contains no nucleotide
  misc_feature (255)..(255): n includes a, c, g, or t, or contains no nucleotide
  misc_feature (277)..(277): n includes a, c, g, or t, or contains no nucleotide
  misc_feature (322)..(322): n includes a, c, g, or t, or contains no nucleotide
  misc_feature (340)..(340): n includes a, c, g, or t, or contains no nucleotide
  misc_feature (343)..(343): n includes a, c, g, or t, or contains no nucleotide
  misc_feature (407)..(408): n includes a, c, g, or t, or contains no nucleotide
  misc_feature (421)..(421): n includes a, c, g, or t, or contains no nucleotide
gaagcacgacctgctgaggctggcaaaggaggaggtgagnccgncnngagntnaggcagcgggtgcncatggctgacaacgaggtcatggacgcctttcgcaagatcatnggctgcccggcannaagnagcggnctnccaccaagnaaagaaaaggaccaggcctggnaagactctgaaggagcgtgagagcatcctgnaagctgctggatgggtagccctcancccctgcctcaggctgattnatctggncctnaggggaggggaagggaggcccnacttccttctttgggcacaggaaacattggcctgtggctgtcccntcaaatggcggcagtctnctnagagggccgtggcccttcccctgaggtcttttggcctagctctgtacaaccaggacacaggaanncctgctgggctancctgaggcctagtctctgcttggtccccgagatggggttggaggggacttcgtttctgggtcttcctcttcccctctttaccatcccccactccctaatcccctacccctgtctccccttcaaggacttctcccttgtggttttgtaaagtgc

SEQ ID NO: 440 - DNA, 523 bp, Homo sapiens
tctttttcctgctgctgtgaaggtatagcaccacccaggtcctcctgcagtgcggcatccccttggcagctgccgtcagccaggccagccccagggagcttaaaacagacattccacagggcctgggcccctgggaggtgaggtgtggtgtgcggcttcacccagggcagaacaaggcagaatcgcaggaaacccgcttccccttcctgacagctcctgccaagccaaatgtgcttcctgcagctcacgcccaccagctactgaagggacccaaggcaccccctgaagccagcgatagagggtccctctctgctccccagcagctcctgcccccaaggcctgactgtatatactgtaaatgaaactttgtttgggtcaagcttccttctttctaacccccagactttggcctctgagtgaaatgtctctctttgccctgtggggcttctctccttgatgcttctttctttttttaaagacaacctgccattaccacatgactcaataaaccattgctcttcaa

SEQ ID NO: 441 - DNA, 94 bp, Homo sapiens
gatcaagggacggctgaacagacttcccgctgctggtgtgggtgacatggtgatggccacagtcaagaaaggcaaaccagagctcagaaaaaag

SEQ ID NO: 442 - DNA, 540 bp, Homo sapiens
atggttaacctcagctgtgatcttatgtatgtaaagtgaaatttaaatagataattataggttgattacaaaatccatagtgtcattttattttagtcattattgaattataccatttactctgttttcttatagtcttaattttattatattttgttgttactgtattatatttgaaaaccttcaaattagaatacattgtacagttaaagaaattgacttggtacttaaaagaaagatttcccattgcatacaggttattggagaaattttccttttgttgcatttgtggaagttagttttctggcccgtggcctttaattttcttaatcaacctaattacatcaggatagaggtagagtttctgtaaaagaagagacattaagagttcctgaaatttatatctggcatacggataggcttatattcaaaacatcttagtcatacgaccataaattaaaagtggagtcactaaatagtttgcagtacgtttctaatataagtgtaggtgggtatcaaaacaagacaaatgctgttcag

SEQ ID NO: 443 - DNA, 469 bp, Homo sapiens
  misc_feature (26)..(26): n includes a, c, g, or t, or contains no nucleotide
  misc_feature (39)..(39): n includes a, c, g, or t, or contains no nucleotide
  misc_feature (41)..(41): n includes a, c, g, or t, or contains no nucleotide
  misc_feature (44)..(44): n includes a, c, g, or t, or contains no nucleotide
  misc_feature (64)..(64): n includes a, c, g, or t, or contains no nucleotide
  misc_feature (72)..(72): n includes a, c, g, or t, or contains no nucleotide
  misc_feature (100)..(119): n includes a, c, g, or t, or contains no nucleotide
  misc_feature (176)..(176): n includes a, c, g, or t, or contains no nucleotide
  misc_feature (411)..(411): n includes a, c, g, or t, or contains no nucleotide
  misc_feature (419)..(419): n includes a, c, g, or t, or contains no nucleotide
  misc_feature (421)..(423): n includes a, c, g, or t, or contains no nucleotide
ggatcgtctgctgaatacaagaaagnaattgaggaactnanggnactgctacccgaaattaganagaagatngaagatgcaaaggagtctcagcgtagtnnnnnnnnnnnnnnnnnnnntctgaaagctactctggtggagagttctacttcaggtttcactcctggtggaggagnctcttcagtctccatgattgccagtagaaagccaacagacggtgcttcctcatcaaattgtgtgactgatatttcccaccttgtcagaaagaagaggaaaccagaggaagagagtccccggaaagatgatgcaaagaaagccaaacaagagccggaggtgaacggaggcagtggggatgctgtccccagtggaaatgaagtttcggaaaacatggaggaggaggctgagaatcangctgaaancnnngcagcagtggaggggacagtggaggctggagctacagttgaaagca

SEQ ID NO: 444 - DNA, 372 bp, Homo sapiens
taataaaactgcacagtgctgttggtggcagtgacttcttttgagttaggttaataaatcaagccatagagcccctcctggttgatacttgttccagatggggcctttggggctggtagaaatacccaacgcacaaatgaccgcacgttctctgccccgtttcttgccccagtgtggtttgcattgtctccttccacaatgactgctttgtttggatgcctcagcccaggtcagctgttactttctttcagatgtttatttgcaaacaaccattttttgttctgtgtcccttttaaaaggcagattaaaagcacaagcgtgtttctagagaacagttgagagagaatctcaagattctacttggtggtttgc

SEQ ID NO: 445 - DNA, 350 bp, Homo sapiens
  misc_feature (35)..(35): n includes a, c, g, or t, or contains no nucleotide
  misc_feature (48)..(48): n includes a, c, g, or t, or contains no nucleotide
  misc_feature (212)..(245): n includes a, c, g, or t, or contains no nucleotide
tcaacacaatgattttgtacatagggtagggaagncagtgatgctctncaatgggaagatgtgcaacacaaattaaggggaactccatgtattttacctacttcagcaatggaactgcaacttggggctttgtgaataaaatttagctgccttgtatagtcgtttgaaagaatatgtgatctgtgagagaattatagtttttttttagaagnnnnnnnnnnnnnnnnnnnnnnnnnnnnnnnnnngccacagatcttttgttctctgtaatgaggattaattgctgtttaaacaaaaatgtaattgttcatctttaaattctttccttttcataagaggatcaagctgta

SEQ ID NO: 446 - DNA, 152 bp, Homo sapiens
agcgccgcaagttcctggagacggtggagttgcagatcagcttgaagaactatgatccccagaaggacaagcgcttctcgggcaccgtcaggcttaagtccactccccgccctaagttctctgtgtgtgtcctgggggaccagcagcactgt

SEQ ID NO: 447 - DNA, 598 bp, Homo sapiens
  misc_feature (242)..(242): n includes a, c, g, or t, or contains no nucleotide
  misc_feature (259)..(259): n includes a, c, g, or t, or contains no nucleotide
  misc_feature (400)..(401): n includes a, c, g, or t, or contains no nucleotide
  misc_feature (443)..(461): n includes a, c, g, or t, or contains no nucleotide
  misc_feature (533)..(564): n includes a, c, g, or t, or contains no nucleotide
atttcttgaggtactctgcacatacgcaccacatctctatctggcctttgcatggagtgaccatagctccttctctcttacattgaatgtagagaatgtagccattgtagcagcttgtgttgtcacgcttcttcttttgagcaactttcttacactgaagaaaggcagaatgagtgcttcagaatgtgatttcctactaacctgttccttggataggctttttagtatagtatttttttttngtcattttctccatcancaaccagggagactgcacctgatggaaaagatatatgactgcttcatgacattcctaaactatcttttttttattccacatctacgtttttggtggagtcccttttgcatcattgttttaaggatgataaaaaaaaataannactagggacaatacagaacccattccatttatctttctacannnnnnnnnnnnnnnnnnnttcttagagttaccacaccccatgagggaagctctaaatagccaacacccatctgttttttgtaaaaacagnnnnnnnnnnnnnnnnnnnnnnnnnnnnnnnnacttttcctaactcccactctaggctattgtttg

SEQ ID NO: 448 - DNA, 151 bp, Homo sapiens
  misc_feature (75)..(93): n includes a, c, g, or t, or contains no nucleotide
  misc_feature (120)..(120): n includes a, c, g, or t, or contains no nucleotide
tgtcctgggccctgtgaactgggctgctctccgtggcagcggctggtggtgctaaaggctgattttctctcagcnnnnnnnnnnnnnnnnnnnagtttcctcagagaacctttcagattnacaattctgtacttacgtttaatgtctctga

SEQ ID NO: 449 - DNA, 544 bp, Homo sapiens
  misc_feature (33)..(67): n includes a, c, g, or t, or contains no nucleotide
  misc_feature (96)..(103): n includes a, c, g, or t, or contains no nucleotide
  misc_feature (110)..(110): n includes a, c, g, or t, or contains no nucleotide
ttcgaggtgccctgtgaccaagtccagaaggtnnnnnnnnnnnnnnnnnnnnnnnnnnnnnnnnnnntgggcaagaacgaggccatcgggagggtnnnnnnnngggcggncgccggcggggctggcctgcggcactgggcggacatgctggccaacccgcggcggcccattgcccagtggcactcgctgcggcccccggaccgagtgaggctgctgcctgcgccctgactcccaccccaagcccccggccaagcctggactctagcccctgaccccagactcccgagaccggccaaagccaagccagccccacccttaagcttcctctgacggttaccctccccccaccttccaccccaaccatctgaaccattcctgtcttctcacccccaacgatgccaatcacgacaactttccagcacactcccccgaccctcgcggacacacccagatgccccagggaccccgggaagggaaggcagcctggtttctcctgcccccgggtcctgccccctgctttgacaatcagccatcctcgtctgct

SEQ ID NO: 450 - DNA, 428 bp, Homo sapiens
  misc_feature (168)..(197): n includes a, c, g, or t, or contains no nucleotide
  misc_feature (231)..(231): n includes a, c, g, or t, or contains no nucleotide
attcttgtttgctgcagtcaatatttggcagtttaaattagcacagacgttgaggccttgctgagttattaggctatgtaaaagaggttaaaaatatgatcattctttattgttaattggtaatattttctcatacattaggtaaatgtcaagctttgggtctctggnnnnnnnnnnnnnnnnnnnnnnnnnnnnnnttggtaacagaatttaaggatgatggaatgatgnaaggtattacatatttctaaaacttaattaagctctaggtcagataacaatggagtaaagtgatacctgcatttttttccccagtgtaatcttaatttactattgtatttttcacttaaaattttgtagggaaaaaaagttttcaagggaacactaagattaaattgactaggttcaaatatgcttccttatgagat

SEQ ID NO: 451 - DNA, 457 bp, Homo sapiens
  misc_feature (229)..(262): n includes a, c, g, or t, or contains no nucleotide
atccaagtcatctgattgaagagcatgacagaaacaaaatgtattcaccaagcattttaggatttgactttttcactaaccagttgacgagcagtgcatttacaaggcactgccaaacaagatgcccttgggagctgtgagggaaagaggacctgcgggcttagatcaatctcaattccttttcatgccctcctgcattgctgctgcgtgggtatttgtctccttagcnnnnnnnnnnnnnnnnnnnnnnnnnnnnnnnnnnaggtggagcatcagcagtgagtgaggccattcttcatccttaggatgtggcaatgaaatgatggtgcaagttcctttctcttttgtgaatctttccccccatttcctgtttacatgtaacccaacaaaatgcaatttctagtgccttctgtccaatcagttctttcctctgagtgagacgtacttggctacagat

SEQ ID NO: 452 - DNA, 113 bp, Homo sapiens
tgtctttcttcatgaatgcttcatggggctccaggaagcctgtatcacctgtgtaagttggtatttgggcactttatatttttctaaaaacgtgttttggatcctgtactcta

SEQ ID NO: 453 - DNA, 474 bp, Homo sapiens
  misc_feature (47)..(67): n includes a, c, g, or t, or contains no nucleotide
  misc_feature (341)..(341): n includes a, c, g, or t, or contains no nucleotide
  misc_feature (347)..(347): n includes a, c, g, or t, or contains no nucleotide
tttctacaccagacctgcttggcaccacagggagctcttttcctgcnnnnnnnnnnnnnnnnnnnnncaccaccagccagacattacagccaaccttgctgattgtcacaagcaggaccttggggccactggcactgtcagatagtaagccatttcttgggtagaggaggaaactcctctccacaaatccacttgggcctgtgcaaatggcacttgaaagagtccccatgcacttggagtccatgagccaatgggatatgcaaagacgcttaaacatttcagggctggtttctctgttcatatccaattctggtgcttaggaacagggacccatgctgatncccaanggcaaaaagccccacttcctttaaggaagtgaacaggcctgaccctgatgcccaataacgggcaaccctaggctttttgtttttcttgcttttattcctttttgttgttggccttgtgctgcgtttg

SEQ ID NO: 454 - DNA, 599 bp, Homo sapiens
  misc_feature (41)..(41): n includes a, c, g, or t, or contains no nucleotide
  misc_feature (63)..(103): n includes a, c, g, or t, or contains no nucleotide
  misc_feature (105)..(156): n includes a, c, g, or t, or contains no nucleotide
  misc_feature (447)..(466): n includes a, c, g, or t, or contains no nucleotide
tggaaaggccccagcgcacggacatctgaggagctgtttcngttcctctgcccgccatgccgnnnnnnnnnnnnnnnnnnnnnnnnnnnnnnnnnnnnnnnnncnnnnnnnnnnnnnnnnnnnnnnnnnnnnnnnnnnnnnnnnnnnnnnnnnnnnacctgcggaccgcgtgaacgtgacggtacggccgggcctggccatggcgctgagcgggtccaccgagccctgcgcgcagctgtccatctcctccatcggcgtagtgggcaccgccgaggacaaccgcagccacagcgcccacttctttgagtttctcaccaaggagctagccctgggccaggaccggatacttatccgctttttccccttggagtcctggcagattggcaagatagggacggtcatgacttttttatgattgggcacggagggatccagggcatctgtgannnnnnnnnnnnnnnnnnnnagatctcttggcagagtgagggcctggagataaccagctttggattatcccgcatgcaacattcctgtgatcacataatcctcttcttcatcctcatatgaaataaatgaagagagcttcctcattcaaaaaa

SEQ ID NO: 455 - DNA, 243 bp, Homo sapiens
gactgtgttgcctgggtgctcattcagagaggggctatcatctgggagcctgtgcccctgggtcctcgagggtcatggcttgtccctggtcagtcctgtctgactgacctcagggcctcacctctctgcccttccctgcccggttcctactcacctggctagggccagtgcccattttcagccctacccattgatcatttcaagaaacctctgtttactgtgtggcacccaggcaaaacatgc

SEQ ID NO: 456 - DNA, 551 bp, Homo sapiens
  misc_feature (350)..(350): n includes a, c, g, or t, or contains no nucleotide
cagctggacaggttgattataccaaggcttgggaagagtactacaagaaaatgggtcaggcagttcctgctccgactggggctcctccaggtggtcagccagattatagtgcagcctgggctgagtattatagacaacaagcagcctattatgcccagacaagtccccagggaatgccacagcatcctccagcacctcagggccaataataagaagtggacaatacagtatttgcttcattgtgtgggggaaaaaaacctttgttaaatatatggatgcagacgacttgatgaagatcttaattttgtttttggtttaaaatagtgtttccttttttttttttttttttngaaaatgtacaaaatatctatcactactgataggaggttaatatttctgtgtagaaatgaaaattggtttgtttttagtatttagtgtagatgtacacattccagcaaatgtatttgcaattatgtggttgatgctttgtgatataaatgtactttttcaatgtatactttcacttttaaaatgcctgttttgtgctttac

SEQ ID NO: 457 - DNA, 367 bp, Homo sapiens
  misc_feature (215)..(230): n includes a, c, g, or t, or contains no nucleotide
tcgtcttcctacacataggaggctcattctctggacacactatcacctattacattttactgattaacaaataaattggaatttaaaaatatcgatatcaccatgatttaatccagatctgggattatgtagctaaacattgtgatgattattatttaaaaccattatttaataagagtaaaaatatgtgaatctggatatatttaaaaaaagannnnnnnnnnnnnnnnaatatattaggcactactgattttttagttaaattgatgcactacacttttgatgtttgaagttacaaacctgtaatttttttgtaaaggaaataattgccaaatacctaggcccattgctgacgattagttctaaa

SEQ ID NO: 458 - DNA, 314 bp, Homo sapiens
  misc_feature (85)..(99): n includes a, c, g, or t, or contains no nucleotide
ctgcgcgtcgccaaagtgacaggcggtgcggcctccaagctctctaagatccgagtcgtccggaaatccattgcccgtgttctcnnnnnnnnnnnnnnnactcagaaagaaaacctcaggaaattctacaagggcaagaagtacaagcccctggacctgcggcctaagaagacacgtgccatgcgccgccggctcaacaagcacgaggagaacctgaagaccaagaagcagcagcggaaggagcggctgtacccgctgcggaagtacgcggtcaaggcctgaggggcgcattgtcaataaagcacagctggctg

SEQ ID NO: 459 - DNA, 488 bp, Homo sapiens
  misc_feature (227)..(228): n includes a, c, g, or t, or contains no nucleotide
  misc_feature (230)..(249): n includes a, c, g, or t, or contains no nucleotide
  misc_feature (253)..(253): n includes a, c, g, or t, or contains no nucleotide
aggtttctacaacatattgtttcagtgttcaaataaactgaaggactcaacattacatttgaactatatccttcctagtgggttagtgtgaaaaagagtttggctgattcctaaaactctgccagccctgcagtaatctccagggcctggttattgttcagacattccatggtgattcctgggaaggaagcttggctgctcagtttctgagtctggggtgagataanntnnnnnnnnnnnnnnnnnnnnttcntttggtgtaatctctcatggtgaaatctgctctgtacatcagacaattgcattgctaccaagtttcataccaaatatttgaaaggatggtattgaatctaaaaccaaatattagtttttattaaactcatgggaaggctaatatattccaacgtaaattattacatatggttaagtaattgcatgttaatttattttaatgtaaatatttttgttactgttctgagccaaattct

SEQ ID NO: 460 - DNA, 344 bp, Homo sapiens
  misc_feature (67)..(92): n includes a, c, g, or t, or contains no nucleotide
  misc_feature (140)..(140): n includes a, c, g, or t, or contains no nucleotide
agagaagcctgctgccgtcagtatgagatgggagaatgcacacgaggcggcttctgcaacttcatgnnnnnnnnnnnnnnnnnnnnnnnnnngcggcgggagctgtatggccgccgtcgcaagaagcatagatcaagatnccgatcccgggagcgtcgttctcggtctagagaccgtggtcgtggcggtggcggtggcggtggtggaggtggcggcggacgggagcgtgacaggaggcggtcgagagatcgtgaaagatctgggcgattctgagccatgccatttttaccttatgtctgctagaaagtgttgtagttgattgaccaaaccagttcataagggga

SEQ ID NO: 461 - DNA, 227 bp, Homo sapiens
  misc_feature (89)..(89): n includes a, c, g, or t, or contains no nucleotide
  misc_feature (91)..(98): n includes a, c, g, or t, or contains no nucleotide
  misc_feature (100)..(107): n includes a, c, g, or t, or contains no nucleotide
  misc_feature (109)..(113): n includes a, c, g, or t, or contains no nucleotide
  misc_feature (116)..(117): n includes a, c, g, or t, or contains no nucleotide
  misc_feature (119)..(119): n includes a, c, g, or t, or contains no nucleotide
  misc_feature (122)..(126): n includes a, c, g, or t, or contains no nucleotide
  misc_feature (128)..(130): n includes a, c, g, or t, or contains no nucleotide
  misc_feature (144)..(176): n includes a, c, g, or t, or contains no nucleotide
  misc_feature (178)..(180): n includes a, c, g, or t, or contains no nucleotide
  misc_feature (184)..(184): n includes a, c, g, or t, or contains no nucleotide
  misc_feature (186)..(188): n includes a, c, g, or t, or contains no nucleotide
  misc_feature (190)..(190): n includes a, c, g, or t, or contains no nucleotide
  misc_feature (192)..(194): n includes a, c, g, or t, or contains no nucleotide
  misc_feature (196)..(197): n includes a, c, g, or t, or contains no nucleotide
tataaaggcccatgggaagagttacggattgtacatgggaagaatccataaggagtattgccttgctcaagaatttaatccgctgacantnnnnnnnntnnnnnnnncnnnnnttnntntgnnnnntnnnttgctccttagggnnnnnnnnnnnnnnnnnnnnnnnnnnnnnnnnngnnngatnannnanannnanncattccttgtgggtgttggacacagcttga

SEQ ID NO: 462 - DNA, 142 bp, Homo sapiens
cttgttagctgagctcacgtcccctgatgctggtaacctgaaagatacgacattgctgagccttactgggttgaaaaggagtagctcagacctgtttttatttgctcaataactctactcatttgtatcttttcagcactta

SEQ ID NO: 463 - DNA, 573 bp, Homo sapiens
  misc_feature (171)..(174): n includes a, c, g, or t, or contains no nucleotide
  misc_feature (177)..(177): n includes a, c, g, or t, or contains no nucleotide
  misc_feature (194)..(227): n includes a, c, g, or t, or contains no nucleotide
  misc_feature (285)..(301): n includes a, c, g, or t, or contains no nucleotide
  misc_feature (412)..(426): n includes a, c, g, or t, or contains no nucleotide
cacatgctggttactttaagattgtgtgtgttgattagtcacaatgatagactataacatgagacaatacaaagttacatttttggaccatattaaaactgcaagaagacaggggtcttactgaagatcttttagaaaacttaaatcctgtcacaggatatttagacatgnnnngantgtagctcaatttttannnnnnnnnnnnnnnnnnnnnnnnnnnnnnnnnntgacacattttcaaattaagattatgcttattttgtacagaaaacaatgtttaaacannnnnnnnnnnnnnnnntgtaataagtaacacagagttttaaaacaaattaattatttagctttattgaagtttgtttttttccttccgaacctggagtatcatattataaacagcagtttcacaccnnnnnnnnnnnnnnntttctttttgtacatactgattggacctttctttactgttacgtggacactttctatgttagttttgatgcataattctttgaatccttttatacaaactagaatgtatgtgtaagaatacctgtccctgcaatgtagtaactacaa

SEQ ID NO: 464 - DNA, 331 bp, Homo sapiens
  misc_feature (258)..(275): n includes a, c, g, or t, or contains no nucleotide
cctcagccagtgcatctaatcaggcgggatcttctcaggatgaagaagatgatgatgatatctgaaattcaccagctgagtttctatttcttctataaatgtttttccctgcacaacaaaaacagtgaaagaaatgcttatctgtaattttgtatgcatcttggtggacttgtcattggtattctagggatgtctgctattaagtttcatctattgtgtgctatacatgtaaaaactgtctctttgaactattgaaannnnnnnnnnnnnnnnnntatcaattttgaatttttaatggtgtttatgaaattttagatagcagcgagtcctt

SEQ ID NO: 465 - DNA, 518 bp, Homo sapiens
  misc_feature (455)..(493): n includes a, c, g, or t, or contains no nucleotide
cctcggtgtgtcctggagctgtgctgggcagcagggcctcgcgtaaggaactgctggaacccactgagcccttcccggggtttcccgccgcacttagtgtgttccttcaggctagtgaggtttcattctgtttatttgcaagcttatcaaaagtttgtggaagatacattgttgggttccagaggctggagtcatgctgcccacatcttgtttgggaaagcaaaagctcccagtgagctggtgtccccgtgtgtctttcatgggactgtcccctttagagatcccacctgtcagagccacagcttcggggtcctgtcatcacatcccctgggaggggaggcaggaggaggccgagggccccaggatgtctgcctggtcccttctcactgtgaggacgcccttggcacacctttctcaagtcacacaaattattgcagttacatacagaattgctnnnnnnnnnnnnnnnnnnnnnnnnnnnnnnnnnnnnnnntgacaaaagtcttttctgggacaac

SEQ ID NO: 466 - DNA, 481 bp, Homo sapiens
gaacaaagatgccctagtcaggcaccagcaactctcagaccttcacaagcaaaacatggacatctaccgacgatccaggctgagcgagcaggagctggaagccttggagctaagggagagagagatgaaataccgagaccgagctgcagaaagacgggagaagtacggcattccagaacctccagagcccaagcgcaagaagcagtttgatgccggcactgtgaattacgagcaacccaccaaagatggcattgaccacagtaacattggcaacaagatgctgcaggccatgggctggcgggaaggctctggcttgggacgaaagtgtcaaggcattacggctcccattgaggctcaagttcggctaaagggagctggcctaggagccaaaggcagcgcatatggtttgtcgggcgccgattcctacaaagatgctgtccggaaagccatgtttgcccggttcattgagatggagtgagag

SEQ ID NO: 467 - DNA, 368 bp, Homo sapiens
tgcctcgtggaaagagcaaatgccgtaaaatagaaaccaggagttttaatcgccatatattttaatgtgcttgcatgatgggaatgtgacttttagcactgcatggtgtttgggggcaagatattaatgtggaaatcttagcttaagttttactgtgctctcatcctgtgtcagctacccctctaaactgaaaaagaggcatggctcatttctctcctgctttatgtttttgaggttgacttgtaagataaaaataaaaataagaaaaaaatatatctaggcaaatgacatgaaaaaaaagttgaaatatactactggtgttcatttttgtcctgcagtgttgctttctcaaagaaataaacatgtgg

SEQ ID NO: 468 - DNA, 529 bp, Homo sapiens
aagtgcggctcttggagagctgttggatggaggtgttaatgatggggctgatgtggcgctcaattgaccaccccggcaagctcatctttgctccagatcttgttctggacagggatgaggggaaatgcgtagaaggaattctggaaatctttgacatgctcctggcaactacttcaaggtttcgagagttaaaactccaacacaaagaatatctctgtgtcaaggccatgatcctgctcaattccagtatgtaccctctggtcacagcgacccaggatgctgacagcagccggaagctggctcacttgctgaacgccgtgaccgatgctttggtttgggtgattgccaagagcggcatctcctcccagcagcaatccatgcgcctggctaacctcctgatgctcctgtcccacgtcaggcatgcgagtaacaagggcatggaacatctgctcaacatgaagtgcaaaaatgtggtcccagtgtatgacctgctgctggagatgctgaatgcccacgtgcttcgcgggtg

SEQ ID NO: 469 - DNA, 571 bp, Homo sapiens
  misc_feature (52)..(52): n includes a, c, g, or t, or contains no nucleotide
  misc_feature (128)..(128): n includes a, c, g, or t, or contains no nucleotide
  misc_feature (130)..(131): n includes a, c, g, or t, or contains no nucleotide
  misc_feature (135)..(135): n includes a, c, g, or t, or contains no nucleotide
  misc_feature (137)..(137): n includes a, c, g, or t, or contains no nucleotide
  misc_feature (153)..(153): n includes a, c, g, or t, or contains no nucleotide
  misc_feature (159)..(159): n includes a, c, g, or t, or contains no nucleotide
  misc_feature (162)..(162): n includes a, c, g, or t, or contains no nucleotide
  misc_feature (164)..(179): n includes a, c, g, or t, or contains no nucleotide
  misc_feature (181)..(181): n includes a, c, g, or t, or contains no nucleotide
  misc_feature (184)..(184): n includes a, c, g, or t, or contains no nucleotide
  misc_feature (336)..(336): n includes a, c, g, or t, or contains no nucleotide
  misc_feature (370)..(370): n includes a, c, g, or t, or contains no nucleotide
  misc_feature (394)..(425): n includes a, c, g, or t, or contains no nucleotide
catccaagtgtgtgccctggtcaggtgtgggggtcttggcttcgacacctgnggacaggaaatcacagaggccacggggatatttgagtttcacctgtggggcaacttcagtacttcctatatctttncnntgtntntgacctcagggatganccctanaantnnnnnnnnnnnnnnnntnggnagaatgaccactatttcctgaggaaaagtaggctgtcctctgggctggtgacggcggctctctatgggcgcttgtatgagagggactaggaaaagtgtgtggtctgtggggcggactctggccatcatgttgacagccttgcacttccacangctacaagccctgggaccatctttctgccttaanggcaggagcccacttctgtggcannnnnnnnnnnnnnnnnnnnnnnnnnnnnnnnaggagaggcagattccctcagtgtcttcctcttaaacctcaatcatcgagacattagggggtattttctgttcacatttatctttttcaagccacatcttcctctaacaaatctctcagtatgcgattggtctcaagctaaaacaa

SEQ ID NO: 470 - DNA, 516 bp, Homo sapiens
ctgctgagcccaaggccaaggaccccttcgctcacctgcccaagagtacctttgtgttggatgaatttaagcgcaagtactccaatgaggacacactctctgtggcactgccatatttctgggagcactttgataaggacggctggtccctgtggtactcagagtatcgcttccctgaagaactcactcagaccttcatgagctgcaatctcatcactggaatgttccagcgactggacaagctgaggaagaatgccttcgccagtgtcatcctttttggaaccaacaatagcagctccatttctggagtctgggtcttccgaggccaggagcttgcctttccgctgagtccagattggcaggtggactacgagtcatacacatggcggaaactggatcctggcagcgaggagacccagacgctggttcgagagtacttttcctgggagggggccttccagcatgtgggcaaagccttcaatcagggcaagatcttcaagtgaacatctcttgcca

SEQ ID NO: 471 - DNA, 574 bp, Homo sapiens
  misc_feature (173)..(173): n includes a, c, g, or t, or contains no nucleotide
  misc_feature (175)..(176): n includes a, c, g, or t, or contains no nucleotide
  misc_feature (178)..(179): n includes a, c, g, or t, or contains no nucleotide
  misc_feature (181)..(183): n includes a, c, g, or t, or contains no nucleotide
  misc_feature (187)..(188): n includes a, c, g, or t, or contains no nucleotide
  misc_feature (191)..(192): n includes a, c, g, or t, or contains no nucleotide
  misc_feature (249)..(267): n includes a, c, g, or t, or contains no nucleotide
  misc_feature (314)..(314): n includes a, c, g, or t, or contains no nucleotide
  misc_feature (428)..(430): n includes a, c, g, or t, or contains no nucleotide
  misc_feature (489)..(489): n includes a, c, g, or t, or contains no nucleotide
  misc_feature (491)..(493): n includes a, c, g, or t, or contains no nucleotide
  misc_feature (495)..(499): n includes a, c, g, or t, or contains no nucleotide
  misc_feature (501)..(501): n includes a, c, g, or t, or contains no nucleotide
tcagaagatacaaccgaaggaagtactcagagatcatggctgaaaaagcagcaaatgcagcaggaaaaaagttccgaaagaagaagaaatttcgcaattaagatttaccaagcaaactgcaacattttacattgctcctttatttacttattaaagacgtttggaaaactaanannannannnaaannaanntaccatagactggccctgttcatacaggaatttgtatttggaaaaagttgatttgannnnnnnnnnnnnnnnnnnagaaaataggggtgtctaaaagacccaccctggtgtagactctttangggaaaaaaggaaaaaaaatctcaaccattttaagataactgatggtttgtaaagttttcaatgcttagttatttaaagaaaatttaattaaaagataggaagtataaagtttnnnaacatgttcaaagaactttaaaaaatgatcaaagatatataaacattattgtaattaanannnannnnnangtgtgtatgtgtgtgtgtgtctgtgtaggggacgggagatggtagagaggcaatgccctatagttagctataa

SEQ ID NO: 472 - DNA, 301 bp, Homo sapiens
gcgtgaccgccttctctgagttccgcacctacagcttcccctgctacctcccgcagccgctcatcaaccacgcgcccaggttggatacggatggcatccacctcctgagcagcctgctcgtgtatgaatccaagagtcgcatgtcagcagaggctgccctgagtcactcctacttccggtctctgggagagcgtgtgcaccagcttgaagacactgcctccatcttctccctgaaggagatccagctccagaaggacccaggctaccgaggcttggccttccagcagccaggacgagggaa

SEQ ID NO: 473 - DNA, 60 bp, Homo sapiens
gaaacagtcttgagttatcattttctttcttctccctctatgtatgtacatagagtgtac

SEQ ID NO: 474 - DNA, 271 bp, Homo sapiens
tccagatcatccaagcctagaaaacatggaactgatagagaaatttcaggaaaaggcttatgtggaattccaagattatataaccaaaacatatccagatgacacctacaggttatccagactactactcagattgccagctttaagactgatgaatgctaccatcactgaagaattgtttttcaaaggtctcattggcaatatacgaattgacagtgttatcccacatattttgaaaatggagcctgcagattataactctcaaataatt

SEQ ID NO: 475 - DNA, 516 bp, Homo sapiens
  misc_feature (35)..(35): n includes a, c, g, or t, or contains no nucleotide
  misc_feature (53)..(53): n includes a, c, g, or t, or contains no nucleotide
  misc_feature (75)..(75): n includes a, c, g, or t, or contains no nucleotide
  misc_feature (83)..(83): n includes a, c, g, or t, or contains no nucleotide
  misc_feature (104)..(122): n includes a, c, g, or t, or contains no nucleotide
  misc_feature (124)..(124): n includes a, c, g, or t, or contains no nucleotide
  misc_feature (126)..(128): n includes a, c, g, or t, or contains no nucleotide
  misc_feature (258)..(271): n includes a, c, g, or t, or contains no nucleotide
  misc_feature (314)..(314): n includes a, c, g, or t, or contains no nucleotide
  misc_feature (491)..(491): n includes a, c, g, or t, or contains no nucleotide
aagtctggctcatgggcggcttcattggcgggggnctaatggtactgtgtccngggattgcagccgttcgggcanggggcaanggctgctgtggtgctgggtgnnnnnnnnnnnnnnnnnnngnannntgcgctcggtcttctcctcggcgttcggggtgcttggtgccatctactgcctctcggtgtctggagctgggctccgaaatggacccagatgcttaatgaacggcgagtggggctaccacttcgaagacannnnnnnnnnnnnnccgcgggagcttacttgctcaaccgcactctatgggatcggtncgaggcgccccctcgcgtggtcccctggaatgtgacgctcttctcgctgctggtggccgcctcctgcctggagatagtactgtgtgggatccagctggtgaacgcgaccattggtgtcttctgcggcgattgcaggaaaaaacaggacacacctcactgaggctccactgaccgccnggttacacctgctccttcctggacg

SEQ ID NO: 476 - DNA, 133 bp, Homo sapiens
agacccggattgtggccctgaatgcccacaccttcctgcgtaatggaggacactttgtgatttccattaaggccaactgcattgactccacagcctcagccgaggccgtgtttgcctccgaagtgaaaaagat

SEQ ID NO: 477 - DNA, 199 bp, Homo sapiens
  misc_feature (145)..(147): n includes a, c, g, or t, or contains no nucleotide
  misc_feature (156)..(156): n includes a, c, g, or t, or contains no nucleotide
  misc_feature (158)..(158): n includes a, c, g, or t, or contains no nucleotide
  misc_feature (160)..(162): n includes a, c, g, or t, or contains no nucleotide
  misc_feature (164)..(168): n includes a, c, g, or t, or contains no nucleotide
ataatactggctttgactttgttactccatgttcagctaatttaggtttgtgagattaactttaggattttttgttgtgtaagacaatgataactattatttgtgcaacattactctttgaaataaaaattggcatgtagccaannnttcctgccnanannnannnnnttctatagaccattaacataatttgacttgg

SEQ ID NO: 478 - DNA, 430 bp, Homo sapiens
  misc_feature (33)..(47): n includes a, c, g, or t, or contains no nucleotide
  misc_feature (119)..(161): n includes a, c, g, or t, or contains no nucleotide
acaggaccggcaagcgcttgacccgagcccagnnnnnnnnnnnnnnncccgggtccacgtcctcggtcacctctattaactcgcgggttcccgacgtgcccagcgaatccggatctccnnnnnnnnnnnnnnnnnnnnnnnnnnnnnnnnnnnnnnnnnnnctggaaaagaagaaactcatggccgctagggagcgcaaagccaccaagaccctagggatcattttgggagcctttattgtgtgttggctacccttcttcatcatctccctagtgatgcctatctgcaaagatgcctgctggttccacctagccatctttgacttcttcacatggctgggctatctcaactccctcatcaaccccataatctataccatgtccaatgaggactttaaacaagcattccataaactgatacgttttaagtg

SEQ ID NO: 479 - DNA, 361 bp, Homo sapiens
caaagattggagtcctgtgtctcctgaccttggctgggcccaggcagggccacattcaccattgggtgcctctggggtgagggtctgcagaggccttgctggctgacccccaagtgtctgctgcagggctgaggctgcaggcgggccatcgtggatagcctggggcacagagggtcaccgcagtcgtcacgtgggacccagagctgtcctgggaagctgacttagctgtccttttaccaagcccttcacaaggccactggtgacagccccccagggcagtggggtgggtgagatcagggtggggctgcccgggagcattctcagaaaaattggggacactcacaggtgtaagtcaggtccc

SEQ ID NO: 480 - DNA, 596 bp, Homo sapiens
  misc_feature (512)..(571): n includes a, c, g, or t, or contains no nucleotide
tgatttgaccactgacagcctccaccttgagcactattctaaggagcaaataccttagctcccttgagctggttttctctgatggcacttttgagctcctaagctgccagccttcccttcttttcctgggtgctcagggcatgcttattagcagctgggttggtatggagttggcagacaggatgttcaacttaatgaagaaatacagctaaggccttgccagcaacacctgccgtaagttactggctgagtgagggcatagaagttaaaggttactgtttttatcctctatccttttttcctttcctgatcaaggtgctcttctcattttttcctgagaaccttagccatcagatgaggctccttagtttattgtggttggttgttttttctttataatggctctgggctatatgcccatatttataaaccagcagcaggggaaagattatattttataagagggaacaaattttcacaatttgaaaagcccacataagttttctcttttnnnnnnnnnnnnnnnnnnnnnnnnnnnnnnnnnnnnnnnnnnnnnnnnnnnnnnnnnnnnctttttaggctctgagactaaatga

SEQ ID NO: 481 - DNA, 418 bp, Homo sapiens
  misc_feature (377)..(377): n includes a, c, g, or t, or contains no nucleotide
gcccattcttcactctgtttgaagaaaatagtcagtgttcttagtagtgggtttctattttgttggatgacttggagatttatctctgtttccttttacaattgttgaaatgttccttttaatggatggttgaattaacttcagcatccaagtttatgaatcgtagttaacgtatattgctgttaatatagtttaggagtaagagtcttgttttttattcagattgggaaatccgttctattttgtgaatttgggacataataacagcagtggagtaagtatttagaagtgtgaattcaccgtgaaataggtgagataaattaaaagatacttaattcccgccttatgcctcagtctattctgtaaaatttaaaaantatatatgcatacctggatttccttggcttcgtgaatgtaa

SEQ ID NO: 482 - DNA, 512 bp, Homo sapiens
  misc_feature (50)..(52): n includes a, c, g, or t, or contains no nucleotide
  misc_feature (460)..(479): n includes a, c, g, or t, or contains no nucleotide
acgagatactccagccaaaaatgcacaaaagtcaaatcagaatggaaaannntcaaaaccatcatcaacaccaagatcaaaaggacaagaatccttcaagaaacaggaaaaaactcctaaaacaccaaaaggacctagttctgtagaagacattaaagcaaaaatgcaagcaagtatagaaaaaggtggttctcttcccaaagtggaagccaaattcatcaattatgtgaagaattgcttccggatgactgaccaagaggctattcaagatctctggcagtggaggaagtctctttaagaaaatagtttaaacaatttgttaaaaaattttccgtcttatttcatttctgtaacagttgatatctggctgtcctttttataatgcagagtgagaactttccctaccgtgtttgataaatgttgtccaggttctattgccaagaatgtgttgtccaaaatnnnnnnnnnnnnnnnnnnnntggaactccaccctttgcttggttttaagtatg

SEQ ID NO: 483 - DNA, 239 bp, Homo sapiens
tcaagatcacggtccaagtcccagcccaagaaagaaatgaaggctaaatcacgttctaggtctgcatctcacaccaaaactagaggcacctctaaaacagattccaaaacacattataagtctggctcaagatatgaaaaggaatcaaggaaaaaagaaccacctagatccaaatctcagtcaagatcacagtctaggtctaggtcaaaatctagatcaaggtcttggactagtcctaa

SEQ ID NO: 484 - DNA, 341 bp, Homo sapiens
  misc_feature (67)..(67): n includes a, c, g, or t, or contains no nucleotide
  misc_feature (73)..(94): n includes a, c, g, or t, or contains no nucleotide
atttaaataacaaaatattgtattgtaaaagaactgtacaattttaaaacaataaagatttgaaccngtaaannnnnnnnnnnnnnnnnnnnnngatacatttttaatatatttgagtgattgctgggaagtgtgaaaatattgttatgtatcatatcaaagagaaacatgtttattacaaaaatgttctttaactatatactatgtaacagggtaaacagtgttatgtagaatagaattgtgtaaactagatctttagagaagttgccattgagcaaagttatttaaatgagttagttgagttggatgagaattgtttgaggtttgttgctagagaacaa

SEQ ID NO: 485 - DNA, 500 bp, Homo sapiens
  misc_feature (171)..(186): n includes a, c, g, or t, or contains no nucleotide
  misc_feature (268)..(284): n includes a, c, g, or t, or contains no nucleotide
aacatatgcctgagaacctttgcatgaatttaaaatttcaattatccattcttataagaaggaagatgattgtaaagaaatatctccgaagttaaaatctgtaataggaattgattcattctctaatgaaaacaaaacataaaaacatcacactaatcttggaggaataannnnnnnnnnnnnnnnattaaatgtacaattgattgcaacatcttgattgttttaaccattaacttgtcaaattacaatcacagttaagaaaatgatnnnnnnnnnnnnnnnnnggatctctttcctagattagcttctgaaatcattattagctatatcatttgaggttttctacaatttggtataactaagaatttaaaaatgttttatcatatatatttgtataattaattactggcatggttaaagtggttttcactttttaaatggagaaaatttcagttaaattaataggataaaccaggttgcgaactggtgacctgtaggcc

SEQ ID NO: 486 - DNA, 439 bp, Homo sapiens
catgagcgactgtgcctctccagtccctgtgtttttttttgtttttggaggttttatttgtttgtttttggaggcactttcactgtgttgcccaggcctgtctgttggcctcaagtgatcctcctgccttggatctcccagggtgctgggattacaggtgtgaaccactgtgctcagcccattttttatttgtttcttgaaggaaggtagcagtattaattaattttggactttgctcactaaagtttgaatgttaagaatagatgtatacagtctggatgcagtggtgcatgcttgtaattttagcactttggggggctgaagcgggaggatcgcttgggctcaagagtttgagaccagcctgggcaacatggtgaaaccttgtctctacaaaaaaattttaaaaaattagccagacatgatggcatgcacctataat

SEQ ID NO: 487 - DNA, 512 bp, Homo sapiens
  misc_feature (164)..(187): n includes a, c, g, or t, or contains no nucleotide
  misc_feature (288)..(288): n includes a, c, g, or t, or contains no nucleotide
tgctttgcaaaccatctgccttgcccccagcagtacagtccttcctaataacggggatgctctgtcatgtttctctgtaaattgttgtgtgttgggaagttctgttgaggcttagtttgatcttccatggtggacatgtctgttctgtatataaaaagcattannnnnnnnnnnnnnnnnnnnnnnnttgaagcttttccacagtccttgtgctctgagatggctgttgagctctgctcagctgtcacagctgaattctttttttgtgctgaacactgggcagcctcnccttgttgccaacgtgcttctggggcccctgtgactgctgccggatgctgtgcacacaggcagagtgccttggcaggtttgtgcaccccttggcgagccagaactgggaaccccgcggagtgaccccaccttctcatggggggtcagggaggggagtgcctatttttaatcttgtttgttgcgcaatggaaatcactgtgatttgtacatatgccctaggaaaa

SEQ ID NO: 488 - DNA, 594 bp, Homo sapiens
  misc_feature (73)..(99): n includes a, c, g, or t, or contains no nucleotide
  misc_feature (224)..(224): n includes a, c, g, or t, or contains no nucleotide
  misc_feature (276)..(276): n includes a, c, g, or t, or contains no nucleotide
  misc_feature (279)..(279): n includes a, c, g, or t, or contains no nucleotide
  misc_feature (285)..(285): n includes a, c, g, or t, or contains no nucleotide
  misc_feature (308)..(310): n includes a, c, g, or t, or contains no nucleotide
  misc_feature (312)..(312): n includes a, c, g, or t, or contains no nucleotide
  misc_feature (314)..(319): n includes a, c, g, or t, or contains no nucleotide
  misc_feature (321)..(322): n includes a, c, g, or t, or contains no nucleotide
  misc_feature (326)..(326): n includes a, c, g, or t, or contains no nucleotide
  misc_feature (328)..(328): n includes a, c, g, or t, or contains no nucleotide
  misc_feature (333)..(334): n includes a, c, g, or t, or contains no nucleotide
  misc_feature (336)..(336): n includes a, c, g, or t, or contains no nucleotide
  misc_feature (338)..(339): n includes a, c, g, or t, or contains no nucleotide
  misc_feature (341)..(345): n includes a, c, g, or t, or contains no nucleotide
  misc_feature (347)..(347): n includes a, c, g, or t, or contains no nucleotide
  misc_feature (349)..(350): n includes a, c, g, or t, or contains no nucleotide
  misc_feature (352)..(359): n includes a, c, g, or t, or contains no nucleotide
  misc_feature (362)..(366): n includes a, c, g, or t, or contains no nucleotide
  misc_feature (371)..(394): n includes a, c, g, or t, or contains no nucleotide
  misc_feature (567)..(567): n includes a, c, g, or t, or contains no nucleotide
cacaggcagtaccagtggcaccagcagcccaccagccccctgccgccctgtaccttgtatctccctttccccnnnnnnnnnnnnnnnnnnnnnnnnnnngcacacccccacactcatgaccacaccctccctaactcctttcacccccagcctggtcttcacctaccccagcactcctgagccttgtgcctcagctcatcgcaagagtagcagcagcagcggangacccatcctctgacccccttggctctccaaccctcctcgctttgtgaggcnccngagccntactccctgcagatgccaccctnnncnannnnnncnncccntnccccnncngnncnnnnngncnngnnnnnnnnccnnnnncaacnnnnnnnnnnnnnnnnnnnnnnnnctaatgagactaaccatattgtgcttcacagtagagccagcttggggccaccaaagctgcccattgtttctctaggagctgggcctctctaggcacaatttggcactaaatcaggaggacaaaatattttcccatttctggccggaggaattccgggggaggcccaggaggantttgttaggattccttaggagggtcct

SEQ ID NO: 489 - DNA, 490 bp, Homo sapiens
  misc_feature (68)..(68): n includes a, c, g, or t, or contains no nucleotide
cctaattgtgcaactgaggaaataatttatttttcacatgaggaaatgcgtagcttgtagagacggcntgattcaagttacatgtacagcctccaaagggctgtctccattctgtccccttcccataaaagaagtgggggtgttcgagaagaccagggaagggacccttgcctcacccctccccctggcctcaccttgctcccagccatcgtgcccagtgttaacctcggctggccttcactaaggggactagacctccctctccccaggagccccagccccagagtggtttgcaataatcaagatatgtgtcgagtcatttttctttcaactccctcatttttcattgaacaaatctctgcttttcaagagttgggggtttctgctattttttgctttctctccctccccctgcaaagatgagaaccaatgagttttagggatgtttgtgcgggtagactccatcatccatatgtaacttgttttgaag

SEQ ID NO: 490 - DNA, 541 bp, Homo sapiens
  misc_feature (502)..(504): n includes a, c, g, or t, or contains no nucleotide
caacattgcttaaacaggatagtagttggcaagatgaaatgccagaattaaaaccaatcataagtagaacccacttcaaaataaaaaaacagcattactatttctaatcccaaggaatcactttattgtaaacactagcagaactcttctccctatacaaggtggatggctgattttaacctgaaattttaaatccacagattgagagctagtgtagaattgtctgtgtttattgtttttatgagtaaatacatgcattgtcataataaaatgcatttcagagaatatgcattttacctttgggaatatgttaatttcaggcagcattccctatgggaaaggtgataccagctctgatatgcaaagcatatgataatttatcattctaacttcaacgtataatagggattgtgacctgatatttggagatgtaaatattgctcagcatattaatcccgatggaatatagcattgtagttgactttttaaaaaaaaaaaaaannnaaaaaaaatctacaaattgtgttttgctaaggaagcc

SEQ ID NO: 491 - DNA, 452 bp, Homo sapiens
gtgttcctcatgctactttctgttacacctctattatattagttttgaatataaacatctttttcagaccaaaaaaaactttattgtatgagagcttatcttatcctgtttatttttccaatgcttttctgtaatacattatgtaatttaaaaaatattcctttttaaacagcaacagaaatgcactataaaatatagtatgtgattaaccaatcctgcttccatatttaagcactgggaatggaaacttaatctctgtgactacaaagggaagtttttgtgccttggtgttccagtcactgattgtggttttagaatcttctgtggctgacttcttgtattcaactctggtttattatcttaatcttcaacttcagacatacatttgtgtgtttatatgctcacaggtggactgagaaatcagttacatcttaagtgacctacagggtata

SEQ ID NO: 492 - DNA, 366 bp, Homo sapiens
  misc_feature (103)..(103): n includes a, c, g, or t, or contains no nucleotide
  misc_feature (156)..(159): n includes a, c, g, or t, or contains no nucleotide
  misc_feature (211)..(211): n includes a, c, g, or t, or contains no nucleotide
  misc_feature (252)..(269): n includes a, c, g, or t, or contains no nucleotide
ctttctgctactgaaatgccggcccccttgagtatgcatcacccccacagatggttttgcctttctctatgctaacactttttgagccactgacgtgcagatnggtggttagtttcttgggcttttattttgcaattttatatatatacacatatnnnntatatatatatatatatttatgggttggttttgtatagttttctgtttgaanctctgagcaccaaagctgccctttgattttcacgagaactnnnnnnnnnnnnnnnnnnagccctcctgctgctttggtgtctgacggtgatgctgcggtggcatctctgcccgtgaatttctgtatgtgtgtgctgttacctcacctgcagacat

SEQ ID NO: 493 - DNA, 144 bp, Homo sapiens
tatcctcaccaaggaagatcaggtttctgtagttctctaacatcacatccctatatagattccgctgtgcagcgtccaggcaatgccactcctccagagagaattctatggccacatctctaaattgcaatggtccctgaaaaa

SEQ ID NO: 494 - DNA, 76 bp, Homo sapiens
gagcagcaaaaccagggcccgccggctctgaactctaccattcagctgccattcataatcatcaatacaagcagaa

SEQ ID NO: 495 - DNA, 377 bp, Homo sapiens
  misc_feature (38)..(38): n includes a, c, g, or t, or contains no nucleotide
  misc_feature (49)..(68): n includes a, c, g, or t, or contains no nucleotide
  misc_feature (87)..(127): n includes a, c, g, or t, or contains no nucleotide
  misc_feature (225)..(225): n includes a, c, g, or t, or contains no nucleotide
ggtgcccacaactacactctgtacttcatgagtgacgncttacatgggnnnnnnnnnnnnnnnnnnnnttcagcgtggatgtgaaannnnnnnnnnnnnnnnnnnnnnnnnnnnnnnnnnnnnnnnntttacttttgggtaaaggagagttgagcctgaattaggaatgtgtacattgtaggaatcctggttgtggggaccaggtctgtgggcctcaggtctggncagccagggctggtgctgtccccgcctacctccacttcctttcccttgctcactctggatccagtgacagcaggtgtcatgggtcaagcataaatcatatatagcattttcaggcatgttcctggtagttcttttgagtctgacattctaat

SEQ ID NO: 496 - DNA, 264 bp, Homo sapiens
  misc_feature (182)..(182): n includes a, c, g, or t, or contains no nucleotide
  misc_feature (184)..(184): n includes a, c, g, or t, or contains no nucleotide
gattaaactgtcaaatctgtcattgcatatgccatcgttttctagcaaaatcccatgattggctataaacgttttgtaagaagtcactctccttgaaaatactgaacatagctgtataggtttgtgattattagagaatatgttaataaaacttcttgtaacggctaactgccacctaaaanangctgggttttctgttgtttgagtgtgttagagaaatttgaatgtttttgtcagttacgagtcagccgtaaattagattag

SEQ ID NO: 497 - DNA, 450 bp, Homo sapiens
  misc_feature (150)..(164): n includes a, c, g, or t, or contains no nucleotide
  misc_feature (258)..(272): n includes a, c, g, or t, or contains no nucleotide
gcttcattatcttcggccagtggtggttcttgaaagatctaagttttccacaccaattttagacttatttccaacaaaaaagacagatgagctttgtgtaggaagttcataagtagcaattttgttttagtaacagactggctccaacannnnnnnnnnnnnnnatttgccaactcgaacaaaggctgagaagcagccacaccgttgtttagggtagaataggctgtgtatttacatgaatgtataatatctatgtcnnnnnnnnnnnnnnngtccattagctctccagttggtttaatgattgggtttatttttgtttgtttgtttattaaaaaaatggaactgtacacttgtttggtgctaattaatacatcaaaatatactggggcttcctttttcaaattaagtgtgcatgattgtatatggaacaaatactaaggtcccagggtg

SEQ ID NO: 498 - DNA, 297 bp, Homo sapiens
  misc_feature (155)..(183): n includes a, c, g, or t, or contains no nucleotide
  misc_feature (186)..(210): n includes a, c, g, or t, or contains no nucleotide
ctggagtcgatcaactctaggctccaactcgttatgaaaagtgggaagtacgtcctggggtacaagcagactctgaagatgatcagacaaggcaaagcgaaattggtcattctcgctaacaactgcccagctttgaggaaatctgaaatagagtnnnnnnnnnnnnnnnnnnnnnnnnnnnnncannnnnnnnnnnnnnnnnnnnnnnnnctgggcacagcatgcggaaaatactacagagtgtgcacactggctatcattgatccaggtgactctgacatcattagaagcatgcca

SEQ ID NO: 499 - DNA, 487 bp, Homo sapiens
  misc_feature (91)..(91): n includes a, c, g, or t, or contains no nucleotide
  misc_feature (107)..(108): n includes a, c, g, or t, or contains no nucleotide
  misc_feature (118)..(118): n includes a, c, g, or t, or contains no nucleotide
  misc_feature (147)..(147): n includes a, c, g, or t, or contains no nucleotide
  misc_feature (149)..(149): n includes a, c, g, or t, or contains no nucleotide
  misc_feature (154)..(154): n includes a, c, g, or t, or contains no nucleotide
  misc_feature (163)..(163): n includes a, c, g, or t, or contains no nucleotide
  misc_feature (179)..(179): n includes a, c, g, or t, or contains no nucleotide
  misc_feature (338)..(353): n includes a, c, g, or t, or contains no nucleotide
  misc_feature (403)..(419): n includes a, c, g, or t, or contains no nucleotide
  misc_feature (421)..(421): n includes a, c, g, or t, or contains no nucleotide
  misc_feature (425)..(425): n includes a, c, g, or t, or contains no nucleotide
  misc_feature (427)..(427): n includes a, c, g, or t, or contains no nucleotide
  misc_feature (440)..(442): n includes a, c, g, or t, or contains no nucleotide
  misc_feature (457)..(457): n includes a, c, g, or t, or contains no nucleotide
gtgttccaaatttgctttacatatgattgtatttgtgtataggggaaaatattatttttatgcctggtaagtggctttttgtactgtagtncagatagagatatttnnggtatatttncaagatacatgttgtatttatggaagaangngttgntcctgatgntttttctgtgttactnatattagagtcagagatcttggtatgggctgttctgtttcctgtgtctccaagcctctgtcttttctgggatgtggtattggtgctttgtgtctagggcagagtatgttcttgaagaaaggcaaatctgactttttctgtgcgccttaaacaattcttnnnnnnnnnnnnnnnnagcattttaatgatattggaggaatacttctgataatttattgtctttannnnnnnnnnnnnnnnnanaaangnttaccttgttgannnaaaaaaaaaaaaaanaaaaaaaactcggtcaccttgtcagcaaca

SEQ ID NO: 500 - DNA, 494 bp, Homo sapiens
  misc_feature (120)..(141): n includes a, c, g, or t, or contains no nucleotide
  misc_feature (153)..(153): n includes a, c, g, or t, or contains no nucleotide
  misc_feature (272)..(286): n includes a, c, g, or t, or contains no nucleotide
  misc_feature (331)..(332): n includes a, c, g, or t, or contains no nucleotide
  misc_feature (336)..(340): n includes a, c, g, or t, or contains no nucleotide
  misc_feature (342)..(343): n includes a, c, g, or t, or contains no nucleotide
  misc_feature (345)..(346): n includes a, c, g, or t, or contains no nucleotide
  misc_feature (349)..(353): n includes a, c, g, or t, or contains no nucleotide
  misc_feature (355)..(355): n includes a, c, g, or t, or contains no nucleotide
agaaccccaatgttatgttatgctttgtaaatttttttttttgcttttacctagataaacttctagctaatcaaataaggaaagaaactgtctttttaaagcttcttttgtgttagatannnnnnnnnnnnnnnnnnnnnntcatgagttccntttttttttttaactttatttttgggaaagtaacacatgaagtagttcagtcatgtcaggtttgtctggggtggaatggaacagtcaggtagttgaaagtttttttttagagatgaaannnnnnnnnnnnnnngtaaaacatgctgtatttgaaatacatctgttaaaacttaaaaannaaannnnnanntnnttnnnnntngttaagtttattgaagtttattcccttaatcagtgaaggacaacccttatttattacctagagcagttgtataattcgctgttagaaattttggtattgggacagtggataagcaggttatcacatagcatagaattct

SEQ ID NO: 501 - DNA, 508 bp, Homo sapiens
  misc_feature (106)..(128): n includes a, c, g, or t, or contains no nucleotide
  misc_feature (159)..(159): n includes a, c, g, or t, or contains no nucleotide
  misc_feature (162)..(163): n includes a, c, g, or t, or contains no nucleotide
  misc_feature (166)..(166): n includes a, c, g, or t, or contains no nucleotide
  misc_feature (169)..(169): n includes a, c, g, or t, or contains no nucleotide
  misc_feature (171)..(171): n includes a, c, g, or t, or contains no nucleotide
  misc_feature (173)..(192): n includes a, c, g, or t, or contains no nucleotide
  misc_feature (284)..(298): n includes a, c, g, or t, or contains no nucleotide
  misc_feature (456)..(457): n includes a, c, g, or t, or contains no nucleotide
gggactcatcagcagcatcgaggcccagctgagcgagctccgcagtgagatggagtgccagaaccaagagtacaagatgctgctggacatcaagacacgtctggannnnnnnnnnnnnnnnnnnnnnngcctgctcgagggccaggacgccaagatgantgnnttnccntncnnnnnnnnnnnnnnnnnnnnccgtagcacctctgttaccacgacttctagtgcctctgttaccaccacctctaatgcctctggtcgccgcacttctgatgtccgtaggcctnnnnnnnnnnnnnnntcccctccctctgtcttcagcacccagaggaggagagagccggcagttccctgcaggagagaggaggggctgctggacccaaggctcagtccctctgctctcaggaccccctgtcctgactctctcctgatggtgggccctctgtgctcttctcttcnngtcggatctctctcctctctgacctggatacgctttggtttctcaacttct

SEQ ID NO: 502 - DNA, 442 bp, Homo sapiens
  misc_feature (68)..(68): n includes a, c, g, or t, or contains no nucleotide
  misc_feature (82)..(101): n includes a, c, g, or t, or contains no nucleotide
cctaatgacctggaattgttagaatatttgactttttatatgcaaagtttttcaaccaagtggtttgnctaatatttaaacnnnnnnnnnnnnnnnnnnnnatgaaaatattagcacatttgcaataatgtttctccataacagagaatgttaatggataccagaattttatttttgtatttatgttcatagtacttttcctcttgtctactccagacagttattccataaagcatttgtataattaaaaggaaaacagaaaaaggaaaagtaggcaaatgtgaaaatagtttcaatatatcttatgatttcttaatgtaaaatgttttgttgaagtatatggctatcatgactaagtgctagaatttatagttacaggcggtgtccttttaaatgtggaaaggcttttaaaatattttaaaactggacctgtattatcctg

SEQ ID NO: 503 - DNA, 545 bp, Homo sapiens
  misc_feature (104)..(104): n includes a, c, g, or t, or contains no nucleotide
  misc_feature (165)..(165): n includes a, c, g, or t, or contains no nucleotide
  misc_feature (168)..(172): n includes a, c, g, or t, or contains no nucleotide
  misc_feature (175)..(175): n includes a, c, g, or t, or contains no nucleotide
  misc_feature (179)..(182): n includes a, c, g, or t, or contains no nucleotide
  misc_feature (184)..(187): n includes a, c, g, or t, or contains no nucleotide
  misc_feature (189)..(189): n includes a, c, g, or t, or contains no nucleotide
  misc_feature (192)..(194): n includes a, c, g, or t, or contains no nucleotide
  misc_feature (196)..(197): n includes a, c, g, or t, or contains no nucleotide
  misc_feature (199)..(200): n includes a, c, g, or t, or contains no nucleotide
  misc_feature (202)..(203): n includes a, c, g, or t, or contains no nucleotide
  misc_feature (206)..(207): n includes a, c, g, or t, or contains no nucleotide
  misc_feature (209)..(209): n includes a, c, g, or t, or contains no nucleotide
  misc_feature (217)..(235): n includes a, c, g, or t, or contains no nucleotide
  misc_feature (259)..(288): n includes a, c, g, or t, or contains no nucleotide
  misc_feature (520)..(520): n includes a, c, g, or t, or contains no nucleotide
atgctgtcctggtgcccattctacaaagtcttattgcttgtacagacagccatctactctgtcgtgggctatgcctcctacctggtgtggaaggacctgggagngggcttggggtggcccctggccctgcctcttggcctctatgctgttcagctcaccatcagntgnnnnntcntggnnnncnnnntnacnnncnncnncnntgnncnggccctgnnnnnnnnnnnnnnnnnnnatgggctggtggtgagcacagcannnnnnnnnnnnnnnnnnnnnnnnnnnnnngccctgttactgctgccctacctagcctggctcaccgtgacttcagccctcacctaccacctgtggagggacagcctttgtccagtgcaccagcctcagcccacggagaagagtgactgaggccctagggcatgggagaggagggacgcccagggtggggaggaagagtctgcaagcagggctgtggagttagggttcaccccaatgggaccaccctcctgggtcccctggngccgtttttccttagaaatcagaga

SEQ ID NO: 504 - DNA, 151 bp, Homo sapiens
tctttaggccactgtgctttgcggtccattagtaaacttgtgttgctaagtgctaaacagaatactgctattttgagagagtcaagactctttcttaagggccaagaaagcaacttgagccttgggctaatctggctgagtagtcagttat

SEQ ID NO: 505 - DNA, 425 bp, Homo sapiens
  misc_feature (26)..(53): n includes a, c, g, or t, or contains no nucleotide
  misc_feature (86)..(112): n includes a, c, g, or t, or contains no nucleotide
  misc_feature (137)..(206): n includes a, c, g, or t, or contains no nucleotide
gcagaaaccaacgagctgagggaagnnnnnnnnnnnnnnnnnnnnnnnnnnnngcaaagactgaaaatagaccagatcttggtggnnnnnnnnnnnnnnnnnnnnnnnnnnncgctttctgccatggtgttggattnnnnnnnnnnnnnnnnnnnnnnnnnnnnnnnnnnnnnnnnnnnnnnnnnnnnnnnnnnnnnnnnnnnnnnatgggaatgaacataatgtgaagaaacttatttcccagtgtaaacgcagttgtacagaaaaaaaatgttttgggtataaatctgggttttcaaaaccagcttttttctatatataaattatgctgctattacagatttaacattttctgttaaaggaaagtctacattttctgcctgttcagaactgtttaatagcagttactcttgagtgtatttacc

SEQ ID NO: 506 - DNA, 270 bp, Homo sapiens
gggctccctcttgtgggataatgggagacagtggtagagaggtttttcttgggaaagagacagagtgctgaggggcactctcccctgaatcctcagagagttgtctgtccaggcccttagggaagttgtctccttccattcagatgttaatggggaccctccaaaggaaggggttttcccatgactcttggagcctctttttccttcttcagcaggaagggtgggaagggataatttatcatactgagacttgttcttggttcctgtttg

SEQ ID NO: 507 - DNA, 270 bp, Homo sapiens
  misc_feature (140)..(164): n includes a, c, g, or t, or contains no nucleotide
agaacccataaacatagcccagagaagagaggctctgaaagaaaggaggggagcagcagaagccacggcagggaggaaaggagccggagaagccggagcagaagtcctggtagttacaagcaaagggagacaaggaaacnnnnnnnnnnnnnnnnnnnnnnnnngagcaaagcagaagaaatgacagcagaagccatggcacagacttgtatagaggagaaaaaatgtacagagagcacccaggaggtacacatactaaagtgacacaaa

SEQ ID NO: 508 - DNA, 477 bp, Homo sapiens
  misc_feature (170)..(233): n includes a, c, g, or t, or contains no nucleotide
  misc_feature (251)..(268): n includes a, c, g, or t, or contains no nucleotide
  misc_feature (408)..(427): n includes a, c, g, or t, or contains no nucleotide
actacgtggacagtgaagggaaccggatttcaggggccaccttctctgtaggttctggctctgtgtatgcatatggggtcatggatcggggctattcctatgacctggaagtggagcaggcctatgatctggcccgtcgagccatctaccaagccacctacagagatgcnnnnnnnnnnnnnnnnnnnnnnnnnnnnnnnnnnnnnnnnnnnnnnnnnnnnnnnnnnnnnnnnctccagtgacaatgtggnnnnnnnnnnnnnnnnnnatagtggctctaccccctgaaagagggtggatgcagctgcttgtgtttcttggggtgactgtcattggtaatacggacacagtgacccatcctccatcctatttatagtggaagggccttcaattgtatcagtacttttnnnnnnnnnnnnnnnnnnnnacctctatgtgttaccagtcattaatgagctgctgcagaggtgactattt

SEQ ID NO: 509 - DNA, 221 bp, Homo sapiens
ctatcatcatgttgtgtatatgtgcaaacctgtacttccatgatgtgggaaggtgaggctgccaaggagaagtacttaccaggactcttcaaaatgatacattaggacagtgagtaatttttggataaggtatgctgaagaatctcctgcagaagtctgatacatgattttcatgttaattgtaaatgttaattccctcttgcaagggagacatatcctag

SEQ ID NO: 510 - DNA, 536 bp, Homo sapiens
  misc_feature (26)..(29): n includes a, c, g, or t, or contains no nucleotide
  misc_feature (31)..(41): n includes a, c, g, or t, or contains no nucleotide
  misc_feature (44)..(45): n includes a, c, g, or t, or contains no nucleotide
  misc_feature (47)..(49): n includes a, c, g, or t, or contains no nucleotide
  misc_feature (51)..(63): n includes a, c, g, or t, or contains no nucleotide
  misc_feature (68)..(68): n includes a, c, g, or t, or contains no nucleotide
  misc_feature (71)..(72): n includes a, c, g, or t, or contains no nucleotide
  misc_feature (75)..(80): n includes a, c, g, or t, or contains no nucleotide
  misc_feature (83)..(85): n includes a, c, g, or t, or contains no nucleotide
  misc_feature (101)..(147): n includes a, c, g, or t, or contains no nucleotide
gacgacactgaggttagagccatctnnnnannnnnnnnnnnggnnannncnnnnnnnnnnnnntttanttnnccnnnnnnggnnnccagaatgttctgtgnnnnnnnnnnnnnnnnnnnnnnnnnnnnnnnnnnnnnnnnnnnnnnncctcggagaagctgaaacatcatatcctttatggtttcagtgggcactccaggctctggaactttatccaagtaagtggtcaagtcttgatcgacatgttcaaacactaaagttagtttggtttctctgtctgttcgtgacactgtgcacacatcaaacaacctgaccacgttggggtgctcgaaggtctccaggtgcctcagcaccgccacctcgcggatggtggagagcggcatgccctcctcgccggtctgcacccgcacgcgcttcaacgccacgaaacggcctccgttcttcaagtcgcgggccttgaacaccttcccataggcgccctccccgatctccgccacgcattcgtactgctggtcagcgcggcacaggccgtcctt

SEQ ID NO: 511 - DNA, 367 bp, Homo sapiens
ttctgagtaccagactattccacttaataaaatagaagattttggtgtacactgcaaacaatattatgccttagaagtctcatatttcaaatcctctttggatcgcaaattgcttgagctgttgtggaataaatactgggtgaatacgttgagttcttctagcttgcttactaatgcagactataccactggtcaggtctttgatttgtctgaaaagttagagcagtcagaagcccagctgggacgagggagtttcatgttgggtttagaaacgcatgaccgaaaatcagaagacaaacttgccaaagctacaagagacagctgtaaaactaccatagaagctatccatggattgatgtctcaggtt

SEQ ID NO: 512 - DNA, 319 bp, Homo sapiens
gtcccacaacactgccaaaaatctgtgtatgtgccattgggtggggcagccccaagcctcctggggaggcagggcaaaaacaggtgccctcatcgtggtctgtgccatgtcccgtctctatggtggttgaggagaaaggcggggaagcttcctcagccttgcagatatgtgtggcatttactagccagagctctgaaaggcagtgctgtctgtttcttgtactgggaccaaagtaaaaatccaagcacattccccttgcagttaggggaggccctactgccttctcaaagcagagaggcagcttatcaaactcagccca

SEQ ID NO: 513 - DNA, 409 bp, Homo sapiens
  misc_feature (150)..(150): n includes a, c, g, or t, or contains no nucleotide
  misc_feature (159)..(159): n includes a, c, g, or t, or contains no nucleotide
  misc_feature (161)..(163): n includes a, c, g, or t, or contains no nucleotide
  misc_feature (173)..(173): n includes a, c, g, or t, or contains no nucleotide
  misc_feature (181)..(181): n includes a, c, g, or t, or contains no nucleotide
gttgctgtcatttgaaatgactccctcaaaacctagttttattagccagctgcctctgctgtagtacatggccaacttcaacataccctggaccaaaacatttttgaggtgcatacccccaacataagttacacagtcccacatccaggngcacagagngnnngtgcactccngcgagtgnggggggaggggcggccccctctggtgctcccagcccttcctcctgcagagctgcaggcaagagcagagcaataggcttctcccctgagcagagaccgcagcacagaaatgcaaggtctaaagttgctttttgcctaagaatcagcgagcgatttggcctacttcctcattggcttctattctgatatcagggatgctttttgtagtggtattgtttgctccctcttcg

SEQ ID NO: 514 - DNA, 463 bp, Homo sapiens
  misc_feature (26)..(41): n includes a, c, g, or t, or contains no nucleotide
  misc_feature (165)..(181): n includes a, c, g, or t, or contains no nucleotide
cagagctcgatgtcaggcatcagatnnnnnnnnnnnnnnnntaagagaaatggaaattggaaactagactgaagtgcaaatcttccctctcaccctggctctttccacttctcacaggcctcctctttcaaataaggcatggtgggcagcaaagaaagggtgtannnnnnnnnnnnnnnnntggtgttaagtgatggggctttttcttctgtttttattgagggtgggggttgggtgtgtaatttgtaagtacttttgtgcatgatctgtccctccctcttcccacccctgcagtcctctgaagagaggccaacagccttcccctgccttggattctgaagtgttcctgtttgtcttatcctggccctggccagacgttttctttgatttttaattttttttttttattaaaagataccagtatgagatgaaaacttccaataatttgtcctataatgtgctg

SEQ ID NO: 515 - DNA, 352 bp, Homo sapiens
  misc_feature (42)..(42): n includes a, c, g, or t, or contains no nucleotide
  misc_feature (46)..(47): n includes a, c, g, or t, or contains no nucleotide
  misc_feature (52)..(52): n includes a, c, g, or t, or contains no nucleotide
  misc_feature (56)..(56): n includes a, c, g, or t, or contains no nucleotide
  misc_feature (59)..(60): n includes a, c, g, or t, or contains no nucleotide
  misc_feature (65)..(65): n includes a, c, g, or t, or contains no nucleotide
  misc_feature (71)..(73): n includes a, c, g, or t, or contains no nucleotide
  misc_feature (79)..(79): n includes a, c, g, or t, or contains no nucleotide
  misc_feature (83)..(83): n includes a, c, g, or t, or contains no nucleotide
  misc_feature (108)..(108): n includes a, c, g, or t, or contains no nucleotide
  misc_feature (113)..(113): n includes a, c, g, or t, or contains no nucleotide
  misc_feature (115)..(115): n includes a, c, g, or t, or contains no nucleotide
  misc_feature (125)..(125): n includes a, c, g, or t, or contains no nucleotide
  misc_feature (131)..(131): n includes a, c, g, or t, or contains no nucleotide
  misc_feature (140)..(140): n includes a, c, g, or t, or contains no nucleotide
  misc_feature (152)..(152): n includes a, c, g, or t, or contains no nucleotide
  misc_feature (158)..(158): n includes a, c, g, or t, or contains no nucleotide
  misc_feature (171)..(173): n includes a, c, g, or t, or contains no nucleotide
  misc_feature (189)..(189): n includes a, c, g, or t, or contains no nucleotide
  misc_feature (207)..(207): n includes a, c, g, or t, or contains no nucleotide
  misc_feature (210)..(210): n includes a, c, g, or t, or contains no nucleotide
  misc_feature (242)..(242): n includes a, c, g, or t, or contains no nucleotide
  misc_feature (254)..(254): n includes a, c, g, or t, or contains no nucleotide
  misc_feature (256)..(263): n includes a, c, g, or t, or contains no nucleotide
  misc_feature (266)..(267): n includes a, c, g, or t, or contains no nucleotide
  misc_feature (269)..(271): n includes a, c, g, or t, or contains no nucleotide
  misc_feature (274)..(276): n includes a, c, g, or t, or contains no nucleotide
  misc_feature (278)..(280): n includes a, c, g, or t, or contains no nucleotide
  misc_feature (282)..(284): n includes a, c, g, or t, or contains no nucleotide
  misc_feature (286)..(286): n includes a, c, g, or t, or contains no nucleotide
ccttagaaccttccatggttgtcttttcccagcagatgaagnatannctccntggnaannggcantgggannncctggnctgnatctggcctctgcccaccctttgangctgnancctgccccanccccangctcatccnatgtgcttgtancctggnccccacggggagnnntgcccttccctgaatntgccttcttgtggctttnagnatgtgccatgctgtccccctgcagactgccantctccttgcagncnnnnnnnnganntnnnctnnncnnngnnntnagcctgagctcccctggccccaggtgcctccatcagagcatttaccccattgtgttgtggctgttc

SEQ ID NO: 516 - DNA, 356 bp, Homo sapiens
  misc_feature (230)..(252): n includes a, c, g, or t, or contains no nucleotide
tactaggatgtcttccagcctcctgcagtcaaggagtaccactgtattgattagcctgtatgtagcagggctcccttcattgcatctgaggacttgttttctttttctttatttttaatcctcttagttttaaatatattgcctagagactcagttactacccagtttgtggttttttgggagaaatgtaactggacagttagcttttcaattaaaaagacacttaaccnnnnnnnnnnnnnnnnnnnnnnnaattagtgttcccatgtggagaaaattattcacactacttgcatgtaaagaataatttaacttttaacattaaaatatgtggtaaaacccagaaagcatccatc

SEQ ID NO: 517 - DNA, 579 bp, Homo sapiens
  misc_feature (84)..(125): n includes a, c, g, or t, or contains no nucleotide
  misc_feature (403)..(403): n includes a, c, g, or t, or contains no nucleotide
  misc_feature (452)..(468): n includes a, c, g, or t, or contains no nucleotide
ggcagtattaatacccttcttactgacatatgtacttttagttttagaaaacttttatatttatgtgtcttatttttatatttnnnnnnnnnnnnnnnnnnnnnnnnnnnnnnnnnnnnnnnnnnattaatacaataatatattttagtatgaaaatttggaaagttgataagatttaaagtagagatgcaattggttctcctgcattgagatttgatttaacagtgttatgttaacatttatacttgccttggactgtagaacagaacttaaatgggaatgtattagttttacaactacaatcaagtcattttacctttacccagtttttaatataaaacttaaattttgaaattcactgtgtgactaatagcatgatgctctgcagttttattaagaaatnagcctaaccatacaactctcatttccttagtaagccaaattaggattannnnnnnnnnnnnnnnntgggaacaatgtttaacattttgtgccaatttgttcctgtattcatgtatgtaagttacagatctgactcttcatttttaagttccttgttacatcatggtcattttctag

SEQ ID NO: 518 - DNA, 261 bp, Homo sapiens
  misc_feature (74)..(74): n includes a, c, g, or t, or contains no nucleotide
cagctattaatcacagtgtattagtatttgttacatttttgtatttcactatctttatactatataatatggtnacttgggtaccgggggaactttaaaatttcatctcaaaaataatttttaaaaagcctgaggtatgatatagcataaaagattgagatgaaaatatatttccctgtaagctgaattactcatttaaaaattttaacttctatatgggacccgaattagacactgctgaatcctgtacagccttactca

SEQ ID NO: 519 - DNA, 400 bp, Homo sapiens
  misc_feature (180)..(180): n includes a, c, g, or t, or contains no nucleotide
ctgtaattaggaccttttgctatttgagttatattcctttctaacttcaaacgtctgcattcatgtataatagccattttatgcacagatgaggtgattcccacacttcttttcgcagatgtttcattatctggatgagtgtattacataataaatttgaataatggtagtcttccaaangacaaaaagcaagctagttgatttgtcaattttgagtttaaatgttttgactgcttatcagcaaaaaaaatcaaagaatagcatactaatattaatggaaatgcagagtatatttaattggcatgattttttcatggatgtgtgcttcatttgatctattgtatgtagctcgtgatcacattttctgttggttaacattgttcctagcttatatgatgga

SEQ ID NO: 520 - DNA, 588 bp, Homo sapiens
  misc_feature (254)..(269): n includes a, c, g, or t, or contains no nucleotide
  misc_feature (373)..(373): n includes a, c, g, or t, or contains no nucleotide
  misc_feature (375)..(375): n includes a, c, g, or t, or contains no nucleotide
  misc_feature (377)..(381): n includes a, c, g, or t, or contains no nucleotide
  misc_feature (383)..(390): n includes a, c, g, or t, or contains no nucleotide
  misc_feature (393)..(396): n includes a, c, g, or t, or contains no nucleotide
  misc_feature (398)..(398): n includes a, c, g, or t, or contains no nucleotide
  misc_feature (401)..(415): n includes a, c, g, or t, or contains no nucleotide
ctgcgatgctgtttgaactctttttcacttcaaggcaaggggcgggatctccactgggggcttacgggagtgagcggttttcccaaaacaagcccttcctggctcccacccagacatggaccagccatgcacccgcccagtcaccacgtcccccgcatgaatgtactgtacactttcaatcctccccttgtttggtttttgggggttggggaggggtttttgtttgtttgtttgttttcttaggcgggaactgnnnnnnnnnnnnnnnntgagactatttatccaatccactggtctgtgagtttttgaaacgcttgcacagcatggtctcagttgtatagattaatttaataactttttgaaattgcagagntnannnnncnnnnnnnnttnnnncnaannnnnnnnnnnnnnntcatagacactcacaaggttatatccatttctttgtatctatatcaacgtatacttttccgagactgtatacgtccatatagataggtagatatatatatatatatataaatatatatacatggatatataaagtttctttgccggcatgttgccttgtttccgcttaaattg

SEQ ID NO: 521 - DNA, 236 bp, Homo sapiens
  misc_feature (26)..(26): n includes a, c, g, or t, or contains no nucleotide
  misc_feature (98)..(98): n includes a, c, g, or t, or contains no nucleotide
  misc_feature (153)..(170): n includes a, c, g, or t, or contains no nucleotide
tgtttcctcagtcacatttgattganccaagtcactgtaattataagatatttgtttctgaatgtatttgggggactctgttaattcgtctttgacangttccccagttgtgagatccgctacctccacgtttgtcctcgtgcttcaggccannnnnnnnnnnnnnnnnngatctatcacttccactatgcctatcaaattcacgtttgccacgagaatcaaatccatctcctcgg

SEQ ID NO: 522 - DNA, 602 bp, Homo sapiens
  misc_feature (26)..(42): n includes a, c, g, or t, or contains no nucleotide
  misc_feature (54)..(80): n includes a, c, g, or t, or contains no nucleotide
  misc_feature (409)..(427): n includes a, c, g, or t, or contains no nucleotide
  misc_feature (576)..(576): n includes a, c, g, or t, or contains no nucleotide
cccaccatcaacagactggaagtggnnnnnnnnnnnnnnnnnacccatgtgcannnnnnnnnnnnnnnnnnnnnnnnnnnccgggggctggggtgtggggcagtctgggtcctctcatcatccccacttcccaggcccagcctttccaaccctgcctgggatctgggctttaatgcagaggccatgtccttgtctggtcctgcttctggctacagccaccctggaacggagaaggcagctgacggggattgccttcctcagccgcagcagcacctggggctccagctgctggaatcctaccatcccaggaggcaggcacagccagggagaggggaggagtgggcagtgaagatgaagccccatgctcagtcccctcccatcccccacgcagctccaccccagtcccaannnnnnnnnnnnnnnnnnntggtgggaggtggcctcctcagcccctcctctctgacctttaacctcactctcaccttgcaccgtgcaccaacccttcacccctcctggaaagcaggcctgatggcttcccactggcctccaccacctgaccagagtgttctcttcagnggactggctcctttcccagtgtcctt

SEQ ID NO: 523 - DNA, 376 bp, Homo sapiens
cctttcagaaatgctgtgtgcattttcatgttcttttttttagcattactgtcactctccctaatgaaatgtacttcagagaagcagtattttgttaaataaatacataacctcattctgaataatgtccctcattttgactataactgtgcttggtttcaaaagcaaaattaaacaaaaatctcagtcccctccgaagtgaactttgtgttaccctgcgtcagaaatgccaagttgtgtttacttttcattcagattttgtgaatatgaacatgctgttataggatctacagatgaatatttaactcaatagaaaaattattttagaacacattgtattggtattacaaccagattatattcttgacgttgactt

SEQ ID NO: 524 - DNA, 234 bp, Homo sapiens
  misc_feature (64)..(87): n includes a, c, g, or t, or contains no nucleotide
cagtggtcggtcacaagaaaccatctgaacaatttcagtcatttgaagcctccgtcccttcttnnnnnnnnnnnnnnnnnnnnnnnnagaaaagaaagatttaagaggattcacactcaacaggttttaggataatttaaatatcaaaaattgattgttatacttacacattaggtataatttatcatttatctgaaatcacatgtagcagattgcatagtctgtaatcctctc

SEQ ID NO: 525 - DNA, 510 bp, Homo sapiens
  misc_feature (99)..(255): n includes a, c, g, or t, or contains no nucleotide
  misc_feature (258)..(260): n includes a, c, g, or t, or contains no nucleotide
  misc_feature (262)..(265): n includes a, c, g, or t, or contains no nucleotide
  misc_feature (267)..(269): n includes a, c, g, or t, or contains no nucleotide
  misc_feature (271)..(271): n includes a, c, g, or t, or contains no nucleotide
  misc_feature (273)..(274): n includes a, c, g, or t, or contains no nucleotide
  misc_feature (276)..(276): n includes a, c, g, or t, or contains no nucleotide
  misc_feature (278)..(278): n includes a, c, g, or t, or contains no nucleotide
  misc_feature (280)..(282): n includes a, c, g, or t, or contains no nucleotide
  misc_feature (284)..(286): n includes a, c, g, or t, or contains no nucleotide
  misc_feature (288)..(365): n includes a, c, g, or t, or contains no nucleotide
  misc_feature (381)..(381): n includes a, c, g, or t, or contains no nucleotide
  misc_feature (395)..(410): n includes a, c, g, or t, or contains no nucleotide
  misc_feature (432)..(432): n includes a, c, g, or t, or contains no nucleotide
  misc_feature (438)..(438): n includes a, c, g, or t, or contains no nucleotide
  misc_feature (466)..(466): n includes a, c, g, or t, or contains no nucleotide
ctaaggttctctacctcggggctgcctcgggcaccacggtctcccatgtctctgacatcgttggtccggatggtctagtctatgcagtcgagtttcccnnnnnnnnnnnnnnnnnnnnnnnnnnnnnnnnnnnnnnnnnnnnnnnnnnnnnnnnnnnnnnnnnnnnnnnnnnnnnnnnnnnnnnnnnnnnnnnnnnnnnnnnnnnnnnnnnnnnnnnnnnnnnnnnnnnnnnnnnnnnnnnnnnnnnnnnnnnnntgnnncnnnnannncncnncntncnnngnnnannnnnnnnnnnnnnnnnnnnnnnnnnnnnnnnnnnnnnnnnnnnnnnnnnnnnnnnnnnnnnnnnnnnnnnnnnnnnnaagtgaaaaagatgcnacaggagaacatgnnnnnnnnnnnnnnnntgacccttgagccatatgaaanagaccntgccgtggtcgtgggagtgtacaggccnccccccaaggtgaagaactgaagttcagcgctgtcaggattgcg

SEQ ID NO: 526 - DNA, 494 bp, Homo sapiens
  misc_feature (214)..(214): n includes a, c, g, or t, or contains no nucleotide
  misc_feature (226)..(226): n includes a, c, g, or t, or contains no nucleotide
  misc_feature (262)..(262): n includes a, c, g, or t, or contains no nucleotide
  misc_feature (289)..(289): n includes a, c, g, or t, or contains no nucleotide
  misc_feature (358)..(387): n includes a, c, g, or t, or contains no nucleotide
gtgcatgatctttgataagaattcctcatgtacttgtgcctagtttttcaaggtattggctgttctatagatgcagtgattgtcccagctagctctgttaccagccttttggtgtgtctttatgttcatttggagagtcagggcgaaagacaggtgatgtagcacttctgtttttaataattattgcttaaaatacctattaatagttttgggncatttaaagggncttgaggaagctacccaggattacagaagagtgtcnacctaacaagatggtctggcagtttcntagttttgtatctggttcaatagaaatatgtgaaagtggtaatgtcatcatttgatgcagagtccgggnnnnnnnnnnnnnnnnnnnnnnnnnnnnnncatgagttgcagacttgctactggcaagagtgaagcaagtgggtgagtaaaactattttgacgtgggagcgttttcagataggagtttagtcttgacgaaagtgtcc

SEQ ID NO: 527 - DNA, 170 bp, Homo sapiens
  misc_feature (59)..(59): n includes a, c, g, or t, or contains no nucleotide
ttgagtcataacacagatagcaaaggacaaagtaaaaacaaagaaaactaattggcagntatatacagttggacacaatggtgtcttgtacactagaaagtcttttacaaaataatcatcttagatcaacagaagaccaatcttcaatgtcgtcctgcaagatgggttac

SEQ ID NO: 528 - DNA, 491 bp, Homo sapiens
  misc_feature (58)..(58): n includes a, c, g, or t, or contains no nucleotide
  misc_feature (92)..(92): n includes a, c, g, or t, or contains no nucleotide
  misc_feature (99)..(99): n includes a, c, g, or t, or contains no nucleotide
  misc_feature (106)..(106): n includes a, c, g, or t, or contains no nucleotide
  misc_feature (108)..(108): n includes a, c, g, or t, or contains no nucleotide
  misc_feature (110)..(110): n includes a, c, g, or t, or contains no nucleotide
  misc_feature (112)..(113): n includes a, c, g, or t, or contains no nucleotide
  misc_feature (115)..(123): n includes a, c, g, or t, or contains no nucleotide
  misc_feature (125)..(125): n includes a, c, g, or t, or contains no nucleotide
  misc_feature (146)..(146): n includes a, c, g, or t, or contains no nucleotide
  misc_feature (151)..(212): n includes a, c, g, or t, or contains no nucleotide
  misc_feature (388)..(402): n includes a, c, g, or t, or contains no nucleotide
ctagcaatcttattggagagacaagaattggtctccagctgcctttgatcaagattcngggtgcaagtggagcaggagccatatacctggangggaatngtgcttngncncnncnnnnnnnnncnaaagaggatttttttttcttncaaannnnnnnnnnnnnnnnnnnnnnnnnnnnnnnnnnnnnnnnnnnnnnnnnnnnnnnnnnnnnntttcattaactggaattctgtaggagatactggtgacctaagctaagttgcactcagcatactcagtgtcaagctaatgaggttctattataaaggttctacttttaatctgagggaaaacatgttcagggcttctagaacactaaaaaatttggcttaaaccagtgttcagtctnnnnnnnnnnnnnnnatggaatacaaattcacataatctgaactttgttcacaggttatcctaatagagtaattcttcactttgctctattgaactgtcttaag

SEQ ID NO: 529 - DNA, 199 bp, Homo sapiens
  misc_feature (73)..(97): n includes a, c, g, or t, or contains no nucleotide
  misc_feature (121)..(121): n includes a, c, g, or t, or contains no nucleotide
catagctgcttttggcgcgaaagatgccgggtctggttgactcaaaccctgccccgcctgagtctcaggagannnnnnnnnnnnnnnnnnnnnnnnnttgcccggagaccaagaaggcgcncgatgcgtgtatcatcgagaaaggagaagaacactgtggacatctaattgaggcccacaaggaatgcatgagagccct

SEQ ID NO: 530 - DNA, 520 bp, Homo sapiens
atattacatacatgctttgaagtttctggaaagtagatcttttcttgacctagtatatcagtgacagttgcagcccttgtgatgtgattagtgtctcatgtggaaccatggcatggttattgatgagtttcttaaccctttccagagtcctcctttgcctgatcctccaacagctgtcacagcttgtgttgagcaagcagtagcatttgcttcctcccaacaagcagctgggttaggaaaaccatgggtaaggacggactcacttctctttttagttgaggccttctagttaccacattactctgcctctgtatataggtggttttctttaagtggggtgggaaggggagcacaatttcccttcatactccttttaagcagtgagttatggtggtggtctcatgaagaaaagaccttttggcccaatctctgccatatcagtgaacctttagaaactcaaaaactgagaaatttactacagtagttagaattatatcacttcactgttctctacttgcaa

SEQ ID NO: 531 - DNA, 514 bp, Homo sapiens
  misc_feature (208)..(228): n includes a, c, g, or t, or contains no nucleotide
  misc_feature (331)..(334): n includes a, c, g, or t, or contains no nucleotide
  misc_feature (416)..(446): n includes a, c, g, or t, or contains no nucleotide
actggcttacactgctgaaatattttgggtttcattattttgcactggatccaccctgtaaatactcttaagtatacatttcaaccactgttttttctactctttttgctgctcattaaaatctttcatgtaggtgccagaaccatatgtaaacagctttttaaaaaattgaagctggtattttgtttaaacaaaaagccatagaacnnnnnnnnnnnnnnnnnnnnnaaatgatttactgaaacaaagtaatactaataaaaacccacaggcaccaaacaggctgcttaaaatggtctgttaaagacattttttggttatggaatataannnngaaaagttttgcacatctgtaagggggaaaaacagtatatcaccattgggtagagtggacgggactcatgtaaggactcaannnnnnnnnnnnnnnnnnnnnnnnnnnnnnnagaggactagtgtccgagaatctcctcacagtatcatgttgcaggaattccccattgctctgcaactt

SEQ ID NO: 532 - DNA, 601 bp, Homo sapiens
gaaaggcacgtccactcacaagggacgctttgggagaatgtcagttcatgtatgttcagaagaaattctgtcatagaaagtgccagaaagtgtttaacttgtcaaaaaacaaaaacccagcaacagaaaaatggagtttggaaaacaggacttaaaatgacattcagtatataaaatatgtacataatattggatgactaactatcaaatagatggatttgtatcaataccaaatagcttctgttttgttttgctgaaggctaaattcacagcgctatgcaattcttaattttcattaagttgttatttcagttttaaatgtaccttcagaataagcttccccaccccagtttttgttgcttgaaaatattgttgtcccggatttttgttaatattcatttttgttatccttttttaaaaataaatgtacaggatgccagtaaaaaaaaaaatggcttcagaattaaaactatgaaatattttacagtttttcttgtacagagtacttgctgttagcccaaggttaaaaagttcataacagattttttttggactgttttgttgggcagtgcctgataagcttcaaagctgctttattcaa

SEQ ID NO: 533 - DNA, 278 bp, Homo sapiens
ctgccccacgtaattcctagctgtcgtgggatggagggaagggcggctgggagcagagcaggggacctggggtggggcaggtgctgctggttcaggaataggaagaggggatagggaggagggagccttggccctgtgatgggtgggccccacttcaggcaaacttagatggcaaaagagcaatctggatccgccttagccagatacataagggtatttgccttcactttcagccagcattccccccagcgatcctagccagatattacagatggtaa

SEQ ID NO: 534 - DNA, 69 bp, Homo sapiens
acttgaggtttgtccttgccctcaaatttaaacagaaatccatgttgttcctgaatacgggcctccttt

SEQ ID NO: 535 - DNA, 543 bp, Homo sapiens
  misc_feature (192)..(220): n includes a, c, g, or t, or contains no nucleotide
  misc_feature (252)..(287): n includes a, c, g, or t, or contains no nucleotide
gcccagattgcagatggatttcgtattagagttgatctcgcatctgagacctcatctagagacaagagatcggtttttgtggggaatctcccttataaagttgaagaatctgccattgagaagcactttctggactgtggaagtatcatggccgtgaggattgtgagagacaaaatgacaggcatcggcaannnnnnnnnnnnnnnnnnnnnnnnnnnnncagattctgttcatcttgctctgaaattaaannnnnnnnnnnnnnnnnnnnnnnnnnnnnnnnnnnngcgttctgttaataaagaaaaatttaaacaacaaaattcaaatccacgattgaagaatgtcagtaaacctaagcagggacttaattttacttccaaaactgcagaaggacatcctaaaagcttatttattggagaaaaagctgttctccttaaaacgaagaagaaaggacagaagaaaagtggacgccctaagaaacagagaaaacagaaataacaaccaggaactgctttttcttttcctgctgagtactgctaa

SEQ ID NO: 536 - DNA, 555 bp, Homo sapiens
  misc_feature (303)..(325): n includes a, c, g, or t, or contains no nucleotide
gcctttgcatacacctttatgagatagtgtaaaattgactatttatagtactatggatttaatgaaattatatgtcatttcacattgtatgccagaaattaggctaccaattatgaattaaagtcagtagttaaattaatactagatagaattagaaattttgattagagagattatgctatattatggaaaaacttgttaatgtagaattatactgcttcatattattttacctattagtacactcatagttagctttgtaataaatttatgttttctttaataattttagttcttcaaagnnnnnnnnnnnnnnnnnnnnnnnttttctttcaaggatgataatttgtgtgttgtttgatttgtttatattttacatctctgtagttttatttttagaagttgtgagatattggatgtgtggctatttttcctttctctgtattctttatgaaacataacttttgaaaaacctatgtattattcatacagctttggtttgtatattctgtatagcctaactacacacatcaaaatgtatgtcaaccaagtgtt

SEQ ID NO: 537 - DNA, 577 bp, Homo sapiens
  misc_feature (91)..(105): n includes a, c, g, or t, or contains no nucleotide
  misc_feature (197)..(211): n includes a, c, g, or t, or contains no nucleotide
  misc_feature (243)..(243): n includes a, c, g, or t, or contains no nucleotide
  misc_feature (428)..(443): n includes a, c, g, or t, or contains no nucleotide
cagaattcactttagacggggctgaaggagtgtccctcctctatgtgaaaagaaaattgttttattcttcattctgactttttaactgttnnnnnnnnnnnnnnntagtttgaatgaaaataataattttctacttggagttgaagagggcagaatccgcagctctcatcattgtgatgtgtagcatgtctgccctnnnnnnnnnnnnnnntgccattaactttcttctgggcatcacggcantgtcacgatgcccagacttggagcaaggcaaccttggagtcagtccactcataaaatatggtaacacccattttaaaatttaagttttgtccttaaagacaacttcagtggttaattataaaagttgtgttacttcgtcctaaattaaattgatagaaagatttaaaaatgtgttttgtttctannnnnnnnnnnnnnnnaactagggaaaggttggtatgaaaaaatgtctttccttttttcaatgtacatagttcaactctttctttgttacatttaaactatatccatggatatcagtctgctttggactcctctgctagtgttacagatg

SEQ ID NO: 538 - DNA, 363 bp, Homo sapiens
  misc_feature (26)..(26): n includes a, c, g, or t, or contains no nucleotide
  misc_feature (30)..(30): n includes a, c, g, or t, or contains no nucleotide
  misc_feature (44)..(44): n includes a, c, g, or t, or contains no nucleotide
  misc_feature (47)..(47): n includes a, c, g, or t, or contains no nucleotide
  misc_feature (59)..(59): n includes a, c, g, or t, or contains no nucleotide
  misc_feature (64)..(64): n includes a, c, g, or t, or contains no nucleotide
  misc_feature (117)..(148): n includes a, c, g, or t, or contains no nucleotide
ccctgctcgaggatgtcaaccgcatntcancctggggcgctggncanttatcttcgcancctgnctcctgcgctgccctgacaactcggacccgctgaccagcatgaaggacgtccnnnnnnnnnnnnnnnnnnnnnnnnnnnnnnnnaaggagcagatgaggaaatacaaagtgaagatggaggagatcagccaactggaggctgcagagagtatcgccttccgcaggctttcgctcctgcgacaaaatgctaacaagagccccaagacccgagagcctgctggaggagcgggccggctcttgacgacctccagggtctccccgagccccagcacgcgaaacctggccctcggaagctggcg

SEQ ID NO: 539 - DNA, 578 bp, Homo sapiens
tgattagaagtgccagcgtaactcctaaaatcaatcagctttgctcacaaactaaaggaagttttgtgaatggggtgtttgaggtacataagaaaaatgtaaggggtgaattcacttattatgaaatacaagataatacagggaagatggaagtggtggtgcatggacgactgaacacaatcaactgtgaggaaggagataaactgaaactcaccagctttgaattggcaccgaaaagtgggaataccggggagttgagatctgtaattcatagtcacatcaaggtcatcaagaccaggaaaaacaagaaagacatactcaatcctgattcaagtatggaaacttcaccagactttttcttctaaaatctggatgtcattgacgataatgtttatggagataaggtctaagtccctaaaaaaatgtacatatacctggttgaaatacaacactatacatacacaccaccatatatactagctgttaatcctatggaatgggggtattgggagtgcttttttaatttttcatagtttttttttaataaaatggcatattttgcatctacaacttctata

SEQ ID NO: 540 - DNA, 496 bp, Homo sapiens
  misc_feature (38)..(38): n includes a, c, g, or t, or contains no nucleotide
  misc_feature (47)..(47): n includes a, c, g, or t, or contains no nucleotide
  misc_feature (55)..(74): n includes a, c, g, or t, or contains no nucleotide
  misc_feature (87)..(87): n includes a, c, g, or t, or contains no nucleotide
  misc_feature (94)..(94): n includes a, c, g, or t, or contains no nucleotide
  misc_feature (101)..(101): n includes a, c, g, or t, or contains no nucleotide
  misc_feature (113)..(113): n includes a, c, g, or t, or contains no nucleotide
  misc_feature (121)..(121): n includes a, c, g, or t, or contains no nucleotide
  misc_feature (127)..(127): n includes a, c, g, or t, or contains no nucleotide
  misc_feature (132)..(132): n includes a, c, g, or t, or contains no nucleotide
  misc_feature (143)..(144): n includes a, c, g, or t, or contains no nucleotide
  misc_feature (153)..(154): n includes a, c, g, or t, or contains no nucleotide
  misc_feature (158)..(158): n includes a, c, g, or t, or contains no nucleotide
  misc_feature (166)..(166): n includes a, c, g, or t, or contains no nucleotide
  misc_feature (170)..(170): n includes a, c, g, or t, or contains no nucleotide
  misc_feature (174)..(174): n includes a, c, g, or t, or contains no nucleotide
  misc_feature (179)..(179): n includes a, c, g, or t, or contains no nucleotide
  misc_feature (182)..(183): n includes a, c, g, or t, or contains no nucleotide
  misc_feature (188)..(188): n includes a, c, g, or t, or contains no nucleotide
  misc_feature (195)..(197): n includes a, c, g, or t, or contains no nucleotide
  misc_feature (206)..(206): n includes a, c, g, or t, or contains no nucleotide
  misc_feature (209)..(209): n includes a, c, g, or t, or contains no nucleotide
  misc_feature (212)..(213): n includes a, c, g, or t, or contains no nucleotide
  misc_feature (216)..(216): n includes a, c, g, or t, or contains no nucleotide
  misc_feature (219)..(219): n includes a, c, g, or t, or contains no nucleotide
  misc_feature (224)..(225): n includes a, c, g, or t, or contains no nucleotide
  misc_feature (230)..(231): n includes a, c, g, or t, or contains no nucleotide
  misc_feature (235)..(236): n includes a, c, g, or t, or contains no nucleotide
  misc_feature (242)..(242): n includes a, c, g, or t, or contains no nucleotide
  misc_feature (246)..(246): n includes a, c, g, or t, or contains no nucleotide
  misc_feature (250)..(250): n includes a, c, g, or t, or contains no nucleotide
  misc_feature (253)..(253): n includes a, c, g, or t, or contains no nucleotide
  misc_feature (257)..(257): n includes a, c, g, or t, or contains no nucleotide
  misc_feature (261)..(261): n includes a, c, g, or t, or contains no nucleotide
  misc_feature (274)..(274): n includes a, c, g, or t, or contains no nucleotide
  misc_feature (278)..(278): n includes a, c, g, or t, or contains no nucleotide
  misc_feature (290)..(290): n includes a, c, g, or t, or contains no nucleotide
  misc_feature (298)..(298): n includes a, c, g, or t, or contains no nucleotide
  misc_feature (304)..(304): n includes a, c, g, or t, or contains no nucleotide
  misc_feature (339)..(363): n includes a, c, g, or t, or contains no nucleotide
  misc_feature (370)..(370): n includes a, c, g, or t, or contains no nucleotide
  misc_feature (412)..(429): n includes a, c, g, or t, or contains no nucleotide
tggggagcagtttgggggcggccggcagcaggagcctngggaaaganggccctcnnnnnnnnnnnnnnnnnnnnccagggtggcctnggggcancccagcnggaatgtgcttnagtatttnggtcanccagnccgtcatcctnngggcttttnncctnactgtgtncttngttnacaanggnncctcnagcaatnnnccacagaanctnctnnctnctnccttnnccttnnccanncctgtncagncttnctnctgncttnctgagataagaanccantttgtgtaacanccaacacnttaacnttcagaaagacatgcattatgtggtgtaatcaaannnnnnnnnnnnnnnnnnnnnnnnnttacatncttcaatgtggataagataaagaacaaaacacatgcatctannnnnnnnnnnnnnnnnnttgacttttaaatgtaagaatggaattccaaacacttaacacattcagctatatgacagaaagtaaa

SEQ ID NO: 541 - DNA, 472 bp, Homo sapiens
  misc_feature (75)..(97): n includes a, c, g, or t, or contains no nucleotide
gaccactgcttttccttttagtgagtgatgtgccatttcctttctctgcccagtctggggctggggtgccaggcnnnnnnnnnnnnnnnnnnnnnnnggtctgtgttctggttgcgctggccattgtctatctcattgccttggtgagtgcagtccctggccctgatcagagccccccggtagaaggcactccatggcctgccataacctcctatctccccaggctgtctgtcagtgccgccgaaagaactacgggcagctggacatctttccagcccgggatacctaccatcctatgagcgagtaccccacctaccacacccatgggcgctatgtgccccctagcagtaccgatcgtagcccctatgagaaggtgagattggccccacaggccaggggaagcagagggtttggctgggcaaggattctgaagggggtacttggaaaacccaaagagcttggaagaggtgag

SEQ ID NO: 542 - DNA, 417 bp, Homo sapiens
  misc_feature (68)..(91): n includes a, c, g, or t, or contains no nucleotide
  misc_feature (103)..(103): n includes a, c, g, or t, or contains no nucleotide
  misc_feature (175)..(203): n includes a, c, g, or t, or contains no nucleotide
  misc_feature (267)..(284): n includes a, c, g, or t, or contains no nucleotide
ggccctcagattagatgaaaaacttgctcctggtggatcccaagggaccctcaaggacctcgaggttnnnnnnnnnnnnnnnnnnnnnnnncccctgtggggnccaaagtttttatgtgggcagatgctgtggtcaggaactaggcatgctttctggcaatgcactcaccagacnnnnnnnnnnnnnnnnnnnnnnnnnnnnnatttattaaatttcagtcagaaggtcagcatttacatgacagaatgtatgtagagagttggggnnnnnnnnnnnnnnnnnncaaggcagttgagatagttggattaagaggctagacgagacatagaatactattggtatgtgtgcaatttcatgaatattaaattatgtttcgaagtccagttgtcattcccgcattcagatttcatttgctg

SEQ ID NO: 543 - DNA, 408 bp, Homo sapiens
  misc_feature (89)..(120): n includes a, c, g, or t, or contains no nucleotide
ctcattggcaggataggagcaaagattatgcctccagccctagcgctgcagctcaggctgttgctgcgaatcccactctactccttcannnnnnnnnnnnnnnnnnnnnnnnnnnnnnnnaaagagcgctatgtctccctggtgatgcctgtggccctgttcaacctgattgacacttttcccttgagaaaagaagagatggtcctacaagccgaaatgagccagacctgtaacacctgacatgatggttcctctcttggcaattcctcttcattgtctacatagtgacatgcacacgggaaagccttaaaaatatccttgatgtacagattttatttgtaattttaaaagtctattttattatgagctttctttgcacttaaaaattagcatgctgctttttgtact

SEQ ID NO: 544 - DNA, 606 bp, Homo sapiens
  misc_feature (30)..(44): n includes a, c, g, or t, or contains no nucleotide
  misc_feature (64)..(122): n includes a, c, g, or t, or contains no nucleotide
cagccaacctgatggccaagaaaagggtgnnnnnnnnnnnnnnngtcatcgtggtcctcttctnnnnnnnnnnnnnnnnnnnnnnnnnnnnnnnnnnnnnnnnnnnnnnnnnnnnnnnnnnngcagagcgccgcctctcaggaacccccatttccttcatcctcctcctgtcctacacctcctcctgcgtcaaccccatcatctactgcttcatgaacaaacgcttccgcctcggcttcatggccaccttcccctgctgccccaatcctggtcccccaggggcgaggggagaggtgggggaggaggaggaaggcgggaccacaggagcctctctgtccaggttctcgtacagccatatgagtgcctcggtgccaccccagtgagatgtcccctgaccctccaccgcagaaggaaggcagggaggaggcagagaagaaagaacggaagaagagatcaggaagagaaggagcagagcagagctgatggagaaggaaggctccatctccagtgggaactcttcaaggtctcttttcatccttcatctgattccagagcactgctccagtggggccatgattggtttctaggcagttcaaagcaggatat

SEQ ID NO: 545 - DNA, 615 bp, Homo sapiens
  misc_feature (88)..(89): n includes a, c, g, or t, or contains no nucleotide
  misc_feature (95)..(122): n includes a, c, g, or t, or contains no nucleotide
  misc_feature (134)..(135): n includes a, c, g, or t, or contains no nucleotide
  misc_feature (157)..(157): n includes a, c, g, or t, or contains no nucleotide
  misc_feature (426)..(442): n includes a, c, g, or t, or contains no nucleotide
  misc_feature (469)..(503): n includes a, c, g, or t, or contains no nucleotide
  misc_feature (517)..(517): n includes a, c, g, or t, or contains no nucleotide
  misc_feature (549)..(549): n includes a, c, g, or t, or contains no nucleotide
ggactgaagctgtcccgcaggtccccaccctccaacacgtgctcacctgtccccctcctcgcagcagcctcgggacaaaacaatgacnnaaggannnnnnnnnnnnnnnnnnnnnnnnnnnngcccagaatggnnggcacggaagcccctcccgggnaggactcccgcgttgatggaccgttcttggtgcagactcctgactgcgtgcatgaaacctgagacaagtgcaattccttccatgtcgccccagagtgcccaggaggcaggcagtgcggggtgcccaggcagacgggttcagcctgcagaactggaggcgacctgtgaaacccacccgggcaccccaacaggaacagaagcgtggtcctgcggctgcgtccccagcgagtttcactttccccttgctcgtttctcccttgttgtaagtgnnnnnnnnnnnnnnnnncttttaaacgtcaggtaagaggggaannnnnnnnnnnnnnnnnnnnnnnnnnnnnnnnnnngacagaagcctggncgaggcctcggagggcagcagctggacagggnctactgggtttggcctggacagcactgatttgtggatgtggatgggggcacgttgtccgtgataaa

SEQ ID NO: 546 - DNA, 249 bp, Homo sapiens
  misc_feature (38)..(65): n includes a, c, g, or t, or contains no nucleotide
gtgacaagcattttctatgcctaaatcttcattggttnnnnnnnnnnnnnnnnnnnnnnnnnnnntttccatattcaaagtaaaaggaaagatttcttgctttctaattgtcttttggacacatgcctattttctttgaggtataaacctttagatgtgaaaaatgtaatttcattctgctattgtgtgtgcttgtgtgtgtgtaattgaaaaaactgggaaatcctgctttgttggtaataaatcaat

SEQ ID NO: 547 - DNA, 293 bp, Homo sapiens
  misc_feature (199)..(199): n includes a, c, g, or t, or contains no nucleotide
  misc_feature (207)..(207): n includes a, c, g, or t, or contains no nucleotide
  misc_feature (222)..(222): n includes a, c, g, or t, or contains no nucleotide
  misc_feature (238)..(238): n includes a, c, g, or t, or contains no nucleotide
ctaaagctcttgatgtaggatctggaagtggaatccttactgcatgttttgcacgtatggttggatgtactggaaaagtcataggaattgatcacattaaagagctagtagatgactcagtaaataatgtcaggaaggacgatccaacacttctgtcttcagggagagtacagcttgttgtgggggatggaagaatggnatatgctnaagaagccccttatnatgccattcatgtggnagctgcagcccctgttgtaccccaggcgctaatagatcagttaaagcccggagga

SEQ ID NO: 548 - DNA, 409 bp, Homo sapiens
gacatcttttgatcaggattcagatgtggacatcttcccctcagacttccctactgagccaccttctctgccacgaaccggtcgggctaggaaagaagtaaaatattttgcagagtctgatgaagaagaagatgatgttgattttgcaatgtttaattaagtgcccaaagagcacaaacatttttcaacaaatatcttgtgttgtccttttgtcttctctgtctcagacttttgtacatctggcttattttaatgtgatgatgtaattgacggttttttattattgtggtaggccttttaacattttgttcttacacatacagttttatgctcttttttactcattgaaatgtcacgtactgtctgattggcttgtagaattgttatagactgccgtgcattagcacag

SEQ ID NO: 549 - DNA, 535 bp, Homo sapiens
gaatggtatcacagtctattgacctcagcgatttgtgcttgtttgtgctagaagaacatcccaaataggagaacctctcacaagctggggcaggtcaccttatctttgtaagatgaggatatcatctagatcagaaatctgactagattggattctgaggagaagaacctactacaaggcaaggagccgttttttggctttgaaaagtcttgctgtcttgggtctacattttagggaagagcaggtacatggatccaggcttctgccaaaaaaaaaaagagaagaagatgacgagtatgaccagtcgtactatcttactgagccacagtgatgcatgcttttcggggaaaacttcattcacaagtattccagacaccaggcttcaggcatggccatgagcaagaccagcaaataacagctttttcccttgcagccctgaccccaatgtctgctgtttccaacactggtgatttctaactacggcccacagcagatgctgttgaataacaccatggcttcatcagaggatgtgggg

SEQ ID NO: 550 - DNA, 399 bp, Homo sapiens
  misc_feature (89)..(89): n includes a, c, g, or t, or contains no nucleotide
  misc_feature (101)..(101): n includes a, c, g, or t, or contains no nucleotide
  misc_feature (104)..(104): n includes a, c, g, or t, or contains no nucleotide
  misc_feature (107)..(122): n includes a, c, g, or t, or contains no nucleotide
  misc_feature (125)..(168): n includes a, c, g, or t, or contains no nucleotide
  misc_feature (186)..(186): n includes a, c, g, or t, or contains no nucleotide
  misc_feature (200)..(200): n includes a, c, g, or t, or contains no nucleotide
  misc_feature (209)..(229): n includes a, c, g, or t, or contains no nucleotide
  misc_feature (238)..(238): n includes a, c, g, or t, or contains no nucleotide
  misc_feature (243)..(243): n includes a, c, g, or t, or contains no nucleotide
  misc_feature (265)..(265): n includes a, c, g, or t, or contains no nucleotide
  misc_feature (343)..(343): n includes a, c, g, or t, or contains no nucleotide
  misc_feature (347)..(347): n includes a, c, g, or t, or contains no nucleotide
  misc_feature (358)..(372): n includes a, c, g, or t, or contains no nucleotide
ccagtacgcgctgctgtacagccagggcagcaagggccctggcgaggacttccgcatggccaccctctacagccgaacccagacccccnagggctgagttnaanagnnnnnnnnnnnnnnnnttnnnnnnnnnnnnnnnnnnnnnnnnnnnnnnnnnnnnnnnnnnnntcctgccccaaaccgatnaagtgcatgacggnaacaatagnnnnnnnnnnnnnnnnnnnnngactccccnagggnctgaagctgggatcccggccangccaggtgacccccacgctctggatgtctctgctctgttccttccccgagcccctgccccggctccccgccaaagcancccntgcccactcgnnnnnnnnnnnnnnnaataaactccggaagcaagtcagtaaa

SEQ ID NO: 551 - DNA, 363 bp, Homo sapiens
  misc_feature (130)..(158): n includes a, c, g, or t, or contains no nucleotide
  misc_feature (284)..(313): n includes a, c, g, or t, or contains no nucleotide
ttccttgaggaagagtgagggttccaacttttctgcttatctgggaggtgttgggcgcggacagtcgagatgtcagagaaaaagcagccggtagacttaggtctgttagaggaagacgacgagtttgaannnnnnnnnnnnnnnnnnnnnnnnnnnnnagatgaagatgaagatgcacatgtctgggaggataattgggatgatgacaatgtagaggatgacttctctaatcagttacgagctgaactagagaaacatggttataagatggagacttcatagcnnnnnnnnnnnnnnnnnnnnnnnnnnnnnncttgacctgcttaatacattctagggcagagaacccaggatgggacacta

SEQ ID NO: 552 - DNA, 535 bp, Homo sapiens
tacaacaatcccaataaatcttcagcttcaatatttataatgatgccttgccactctactccttattacagccatgttcactgcccacttcccatgagatttctccagtgcccgccagacctgactggaaaaagtcattatcttgatgaagcagatgtattttacctaaatcccttaaactggttacatagagagtttcatgatgatgcatcattgcctactcacttgatcaccttcagcattttggaagaggaaataagcgctttcctaatttcaagcaattataaaagaactgctgttttcttccacactcacttgccagagggtcgaattggaagtcacatatatgtctatgaacggaagttaaaagggaaattcaacatgaagatgaaattctgaactttcctagataaattaacattgctgggtggaaatattcagatgctgcttaaatacttcggtaaacactgggtaagattcatggaacttagaaaaaagctgtatgaactgctttaccaaatatcactactgagga

SEQ ID NO: 553 - DNA, 295 bp, Homo sapiens
tcatgtccaggttctgttccaacctttgtcttcctaaacaagtacagatggcagctacacatatagcccgtaaagctgtggaattggacttggttcctgggaggagccccatctctgtggcagcggcagctatttacatggcctcacaggcatcagctgaaaagaggacccaaaaagaaattggagatattgctggtgttgctgatgttacaatcagacagtcctatagactgatctatcctcgagccccagatctgtttcctacagacttcaaatttgacaccccagtggacaa

SEQ ID NO: 554 - DNA, 93 bp, Homo sapiens
tgagattgtgcaaatgctgggcacgcttggcatgagataatctgtttttatttttaccaaattgtaatataactatgcaagtgtgtttattaa

SEQ ID NO: 555 - DNA, 554 bp, Homo sapiens
  misc_feature (26)..(26): n includes a, c, g, or t, or contains no nucleotide
  misc_feature (124)..(125): n includes a, c, g, or t, or contains no nucleotide
  misc_feature (170)..(170): n includes a, c, g, or t, or contains no nucleotide
  misc_feature (195)..(197): n includes a, c, g, or t, or contains no nucleotide
  misc_feature (203)..(203): n includes a, c, g, or t, or contains no nucleotide
  misc_feature (472)..(510): n includes a, c, g, or t, or contains no nucleotide
cttctgtctccaggaagggcagcggncctcccatcactggaagtctgcagtgggggtcgctgggggtggagagaacactaagaggtgaacatgtatgagtgtgtgcacgcgtgtgagtgtgcanntgtgtgtgtgtgcaaaggtccagccaccccgtcctccagcctgcnaaggggtgtctggcgccttgcctgnnnacccangccccctctccccctgagccattgtgggggtcgatcatgaatgtccgaagagtggccttttcccgtagccctgcgccccctttctgtggctggatggggagacaggtcagggccccccaccctctccagcccctgcagcaaatgactactgcacctggacagcctcctcttttctagaagtctatttatattgtcattttataacactctagcccctgcccttattgggggacagatggtccctgtcctgcggggtggccctggcagannnnnnnnnnnnnnnnnnnnnnnnnnnnnnnnnnnnnnnagccccagcccgcccacccctgcctcgagttagttttacaatta

SEQ ID NO: 556 - DNA, 482 bp, Homo sapiens
  misc_feature (308)..(337): n includes a, c, g, or t, or contains no nucleotide
  misc_feature (429)..(446): n includes a, c, g, or t, or contains no nucleotide
gaacaaacttgtatcggttcttaattaaattatccaaaacggaggcatttaaacacttggatttacaccagtcttttgtgtttgctttttaaaataaagtgctcgtatttgtattctccatattttggagtaattatctacatgatgtttatagttcctgtggtttttcacccaagaagcagaatctcattcagtacatttagttttataagagtcatgaagctaaatccttgggctatgtcagaggcacaaagtctagaatgtgtgtattcacaatggtgtatgtacattttgtgccttgattcacnnnnnnnnnnnnnnnnnnnnnnnnnnnnnncgcttctacacaagaattttatatgtatttatgaagatgattctgtaccctagtatatctttttgggcatggactaatttgtatctgtttannnnnnnnnnnnnnnnnnctgtatatagtacatcaaacttagaggtgtgacctt

SEQ ID NO: 557 - DNA, 315 bp, Homo sapiens
  misc_feature (196)..(200): n includes a, c, g, or t, or contains no nucleotide
cctcaataattgcaagcctgaagagaagtgatcttagagaaagcagagaacagaatggactggatagacatcttgactctattcagcccgtagtctgtgatctggagagtccagttaaggtaacccagatttttgacaaccgccttcctgctgagccaaagttttctcattacccctccactggggaagcagctgnnnnncccagggccttgctccctgggaaattctcttctctccatctttcggtgcattggccatgttactgtgccaaagtgtcttaattcttgtcccatctattctcagctggccttggaa

SEQ ID NO: 558 - DNA, 510 bp, Homo sapiens
  misc_feature (169)..(190): n includes a, c, g, or t, or contains no nucleotide
  misc_feature (201)..(201): n includes a, c, g, or t, or contains no nucleotide
ccatggcacagttgaaaatttctcaaggtaatatttctaaagcatgtttaatattgagaagcatagaggagttaaagcataaaccaggcatggtatctgcattagttaccatgtatagccatgaagaagatattgatagtgccattgaggtcttcacacaagctatccnnnnnnnnnnnnnnnnnnnnnnaaaatctcctnctcatttgtccttgataagagaagctgcaaacttcaaactcaaatatgggcggaagaaggaggcaattagtgacctacaacagctgtggaaacaaaatccaaaagatattcacaccctggcacagcttatttctgcttactcacttgtagatccagagaaagccaaagctcttagtaaacacttgccatcgtcagatagtatgtcactaaaagtagatgttgaggctcttgaaaattctgctggtgctacatacattcggaagaagggtggaaaagttactggagatagtcaaccaaaggaacaaggac

SEQ ID NO: 559 - DNA, 520 bp, Homo sapiens
  misc_feature (33)..(47): n includes a, c, g, or t, or contains no nucleotide
  misc_feature (89)..(89): n includes a, c, g, or t, or contains no nucleotide
  misc_feature (145)..(173): n includes a, c, g, or t, or contains no nucleotide
  misc_feature (389)..(389): n includes a, c, g, or t, or contains no nucleotide
tcatggaggctgcagatgaggccttggatgctnnnnnnnnnnnnnnngctgaggccgaagcccgggctgaagcaagaacccgcatgggnaattggagatgaggctgtgtctgggccctggagctgggatgacattgagtttgagnnnnnnnnnnnnnnnnnnnnnnnnnnnnntggagatccctggtccagaattccatttaccttctgggccagataccaccagaatgcccgctccagattccctcagacctttgccggtcccattattggtcctggtggtacagccagtgccaacttcgctgccaactttggtgccattggtttcttctgggttgagtgagatgttggatattgctatcaatcgcagtagtctttcccctgtgtgangctgaagcctcagattccttctaaacacagctatctagagagccacatcctgttgactgaaagtggcatgcaagataaatttatttgctgttccttgtctactgctttttttccccttgtgtgctgtcaag

SEQ ID NO: 560 - DNA, 517 bp, Homo sapiens
  misc_feature (96)..(96): n includes a, c, g, or t, or contains no nucleotide
  misc_feature (111)..(111): n includes a, c, g, or t, or contains no nucleotide
  misc_feature (114)..(127): n includes a, c, g, or t, or contains no nucleotide
  misc_feature (337)..(355): n includes a, c, g, or t, or contains no nucleotide
  misc_feature (370)..(375): n includes a, c, g, or t, or contains no nucleotide
  misc_feature (377)..(394): n includes a, c, g, or t, or contains no nucleotide
cgcaagggcctgaaagaaggcatccctgccctggacaacttcctggacaaattgtaggcggcccttcctgcagcgcctgccgccccggggactcgnagcacccacagcacnacnnnnnnnnnnnnnngtcctcgaattctcagacgacacctggagactgtcccgacacagcgacgctcccctgagaggtttctggggcccgctgcgtgccatcactcaaccataacacttgatgccgtttctttcaatatttatttccagagtccggaggcagcagacacgccctcttagtagggacttaatgggccggtcggggagggggaggcgggatgggacnnnnnnnnnnnnnnnnnnnttcttcagagggaannnnnnannnnnnnnnnnnnnnnnncaaactaattttaacaaacgcattaagaggtttatttgggtacatggcccgcagtggcttttgccccagaaaggggaaaggaacacgcgggtagatgatttctagcaggcaggaagtcctgtg

SEQ ID NO: 561 - DNA, 506 bp, Homo sapiens
  misc_feature (154)..(168): n includes a, c, g, or t, or contains no nucleotide
  misc_feature (283)..(283): n includes a, c, g, or t, or contains no nucleotide
  misc_feature (364)..(378): n includes a, c, g, or t, or contains no nucleotide
  misc_feature (470)..(470): n includes a, c, g, or t, or contains no nucleotide
  misc_feature (481)..(481): n includes a, c, g, or t, or contains no nucleotide
tgtttcctgggctagtcttggaccccacgagagagaatcgttcctcagcctcatggtgaactcgcgccctccagcctgatcccccgctccctcctccctgccttctctgctggtacccagtcctaaaatattgctgcttcctcttcctttgaannnnnnnnnnnnnnnacaccctcacagctggcctgccctcttgccaggatatttatttgtgctattcactcccttccctttggatgtaacttctccgttcagttccctccttttcttgcatgtaagttgntcccccatcccaaagtattccatctacttttctatcgccgtccccttttgcagccctctctggggatggactgggtaaatnnnnnnnnnnnnnnngccccgttcacagatcctggccctgagccagccctgtgctcctccctcccccaacactccctaccaaccccctaatcccctactccctccanccccccctccnactgtaggccactggatggtcattt

SEQ ID NO: 562 - DNA, 574 bp, Homo sapiens
  misc_feature (101)..(101): n includes a, c, g, or t, or contains no nucleotide
  misc_feature (109)..(109): n includes a, c, g, or t, or contains no nucleotide
  misc_feature (111)..(112): n includes a, c, g, or t, or contains no nucleotide
  misc_feature (117)..(117): n includes a, c, g, or t, or contains no nucleotide
  misc_feature (123)..(123): n includes a, c, g, or t, or contains no nucleotide
  misc_feature (126)..(126): n includes a, c, g, or t, or contains no nucleotide
  misc_feature (153)..(153): n includes a, c, g, or t, or contains no nucleotide
  misc_feature (155)..(155): n includes a, c, g, or t, or contains no nucleotide
  misc_feature (157)..(157): n includes a, c, g, or t, or contains no nucleotide
  misc_feature (159)..(162): n includes a, c, g, or t, or contains no nucleotide
  misc_feature (164)..(164): n includes a, c, g, or t, or contains no nucleotide
  misc_feature (172)..(172): n includes a, c, g, or t, or contains no nucleotide
  misc_feature (243)..(243): n includes a, c, g, or t, or contains no nucleotide
  misc_feature (249)..(249): n includes a, c, g, or t, or contains no nucleotide
  misc_feature (354)..(354): n includes a, c, g, or t, or contains no nucleotide
  misc_feature (363)..(363): n includes a, c, g, or t, or contains no nucleotide
  misc_feature (371)..(371): n includes a, c, g, or t, or contains no nucleotide
tttcttatccatttccctggaggcgggcccccctggcagcagtattggaggggctacaggcagctggagaaaggggcccagccgctgacccactcactcangacctcantnnctagncccgcnttnggccccctcctgtgacctcagggtttngncnannnngncctcccangcccctgccccaactgattctgcccagataatcgtgtctcctgcctccactcagctgcttctcagtcatgnaatgtngccatggccccggggtccccttgctgctgtgggctccctgtccctgggcaggagtgctggtgaggaggtggagccttttgaggggggccttccctcagctgtttncccacactngggggctnggccctgcctccccgttaccctccttccctgcaggcctggagcctgtagggctggactgaggttcaggtctccccccagctgtctcacccccactttgtccccactctagagcagggaggcagtgggggaggagttgtgtctcgtcttctgtctccatgtggtttttgggtgtttttcttgttgtgtcctggattccgataaa

SEQ ID NO: 563 - DNA, 578 bp, Homo sapiens
  misc_feature (136)..(151): n includes a, c, g, or t, or contains no nucleotide
  misc_feature (154)..(155): n includes a, c, g, or t, or contains no nucleotide
  misc_feature (158)..(158): n includes a, c, g, or t, or contains no nucleotide
  misc_feature (160)..(160): n includes a, c, g, or t, or contains no nucleotide
  misc_feature (247)..(247): n includes a, c, g, or t, or contains no nucleotide
  misc_feature (298)..(298): n includes a, c, g, or t, or contains no nucleotide
  misc_feature (457)..(457): n includes a, c, g, or t, or contains no nucleotide
  misc_feature (468)..(468): n includes a, c, g, or t, or contains no nucleotide
  misc_feature (474)..(474): n includes a, c, g, or t, or contains no nucleotide
  misc_feature (478)..(518): n includes a, c, g, or t, or contains no nucleotide
  misc_feature (520)..(522): n includes a, c, g, or t, or contains no nucleotide
  misc_feature (524)..(527): n includes a, c, g, or t, or contains no nucleotide
  misc_feature (531)..(532): n includes a, c, g, or t, or contains no nucleotide
gtgccacaccagctgtccagagtcggaggaccccagctcctcagcttgcatggactctgccttcccagcgcttgtcccccgaggaaggcggctgggcgggcggggagctgggcctggaggatcctggagtctcatnnnnnnnnnnnnnnnnaannatntncaccagtatctggggtgggcacgtggtcggggaccctcagcagcaggggctctgtctcccttcccaaagggcgagaaccacattggnacggtcccggctcagaccgtctgtactcagagcgacggatgccccctgggnaccctcactgcctccgtctgttcatcacctgcccaccggagccgcatgctcttcctggaactgcccacgtctgcacagaacagaccaccagacgccagggctgattggtgggggcctgagacccccggttgcccattcatggctgcaccccaccatgtncaaacccaagnaccagncccnnnnnnnnnnnnnnnnnnnnnnnnnnnnnnnnnnnnnnnnngnnncnnnnggcnnttgggcgggacattctttgtttggggatttcccaaggaggacagtt

SEQ ID NO: 564 - DNA, 453 bp, Homo sapiens
  misc_feature (46)..(47): n includes a, c, g, or t, or contains no nucleotide
  misc_feature (49)..(75): n includes a, c, g, or t, or contains no nucleotide
gaagtgggcctctcatacttaatgaaagaagaaattcaggatgaannannnnnnnnnnnnnnnnnnnnnnnnnnnggaagaagaggaagaagaggaagaaggaggtcttcgaggggagaagaggaaacgagatgctgaagacgatggagaggaagaagatgactagatcattctaagaccagattctctaatgtttctgggtgtgcaatagagtgatcacatctttgtttcttcatgtacgatagctatccctacagaagataatgtgtaactttttataggaaaagtgtggttttactatttttgccttatcattccaaataagaactagtctgttaatgatcatattgtatgtagagaaaaattttcattgactcccattgtggaattccctagcaatttatttagacttaattttttaaattcaagcttactgtattagtcatttttagc

SEQ ID NO: 565 - DNA, 471 bp, Homo sapiens
  misc_feature (99)..(115): n includes a, c, g, or t, or contains no nucleotide
  misc_feature (324)..(324): n includes a, c, g, or t, or contains no nucleotide
  misc_feature (376)..(391): n includes a, c, g, or t, or contains no nucleotide
gactattttcaagcaacctggtccacccaggattagtgaccaggttttcaggaaaggatttgcttctctctagaaaatgtctgaaaggattttattttnnnnnnnnnnnnnnnnngaaaataccctcctcaaataacttgcttaactacatatagattcaagtgtgtcaatattctattttgtatattaaatgctatataatggggacaaatctatattatactgtgtatggcattattaagaagctttttcattattttttatcacagtaattttaaaatgtgtaaaaattaaaaccagtgactcctgtttaaaaataaaagntgtagttttttattcatgctgaataataatctgtagttaaaaaaaaagtgtnnnnnnnnnnnnnnnntgaaatgtcagactgtaaaaccttgtgtggaaatgtttaacttttattttttcatttaaatttgctgttctggtattacc

SEQ ID NO: 566 - DNA, 467 bp, Homo sapiens
  misc_feature (30)..(30): n includes a, c, g, or t, or contains no nucleotide
  misc_feature (40)..(40): n includes a, c, g, or t, or contains no nucleotide
  misc_feature (100)..(100): n includes a, c, g, or t, or contains no nucleotide
  misc_feature (147)..(147): n includes a, c, g, or t, or contains no nucleotide
  misc_feature (180)..(180): n includes a, c, g, or t, or contains no nucleotide
  misc_feature (194)..(194): n includes a, c, g, or t, or contains no nucleotide
  misc_feature (225)..(225): n includes a, c, g, or t, or contains no nucleotide
taaggattattctactcataggctttaccnagttttgganggagagaataagaaaaaagaattgtttctaactcatggaaaccttgaggaagtggctganaaattgaaacagaatatttctttagtacaagatcagttggcagtatntgctcaagaacattctttctttctgtccaaacnggaataaggatgtnggacatgctttgtgatactttgtatcaaggnggaaatcagcttttgcttagtgatcaggagttaacagagcagtttcataaagttgaatctcaactgaataagctaaatcatctcctcactgatattcttgctgatgtgaagacaaaaagaaaaactttggcaaataataaattacatcaaatggaaagagaattctatgtatattttttaaaagatgaagattatctgaaagatattgtggagaatttagaaactcaatcaaagattaaggc

SEQ ID NO: 567 - DNA, 202 bp, Homo sapiens
  misc_feature (73)..(103): n includes a, c, g, or t, or contains no nucleotide
ggcacctacatttgtatcaaagtatgtcctgatccccttaggatagctcattgtttttattcagatttccctnnnnnnnnnnnnnnnnnnnnnnnnnnnnnnnattggctatttgggttttttcttctgtgcattgactgttcatgtcctctgctcattgttttcaaatgggctgttcatctcttgctttttggttcacatg

SEQ ID NO: 568 - DNA, 521 bp, Homo sapiens
  misc_feature (39)..(39): n includes a, c, g, or t, or contains no nucleotide
  misc_feature (299)..(299): n includes a, c, g, or t, or contains no nucleotide
  misc_feature (304)..(304): n includes a, c, g, or t, or contains no nucleotide
  misc_feature (306)..(307): n includes a, c, g, or t, or contains no nucleotide
  misc_feature (342)..(357): n includes a, c, g, or t, or contains no nucleotide
  misc_feature (456)..(496): n includes a, c, g, or t, or contains no nucleotide
ccgcagatacttggagaatgggaaggagacgctacagcncgcagatcctccaaaggcacacgttgcccaccaccccatctctgaccatgaggccaccctgaggtgctgggccctgggcttctaccctgcggagatcacgctgacctggcagcgggatggggaggaacagacccaggacacagagcttgtggagaccaggcctgcaggggatggaaccttccagaagtgggccgctgtggtggtgccttctggagaggaacagagatacacatgccatgtgcagcacgaggggctgcccnagccncnnatcctgagatgggagcagtctccccagcccaccannnnnnnnnnnnnnnntcgttgctggccttgttgtccttggagctgtggtcactggagctgtggtcgctgctgtgatgtggaggaagaagagctcagatagaaacagagggagcnnnnnnnnnnnnnnnnnnnnnnnnnnnnnnnnnnnnnnnnnggtgtctctcacagctaataaagtg

SEQ ID NO: 569 - DNA, 465 bp, Homo sapiens
  misc_feature (89)..(124): n includes a, c, g, or t, or contains no nucleotide
  misc_feature (275)..(304): n includes a, c, g, or t, or contains no nucleotide
  misc_feature (308)..(308): n includes a, c, g, or t, or contains no nucleotide
  misc_feature (311)..(311): n includes a, c, g, or t, or contains no nucleotide
  misc_feature (321)..(321): n includes a, c, g, or t, or contains no nucleotide
  misc_feature (348)..(348): n includes a, c, g, or t, or contains no nucleotide
tctctcagcgcctgggctctcaaaagttcttctttggagatgcccctgcctccttggacgccttcgtcttcagctacttggccctgctnnnnnnnnnnnnnnnnnnnnnnnnnnnnnnnnnnnnccacctgcgtgggctgcacaacctctgtgcctattgtacccacattctcagtctctacttcccctgggatggagctgaggtaccaccgcaacgccagacaccagcaggcccagagactgaggaggagccataccggcgccggaaccagatnnnnnnnnnnnnnnnnnnnnnnnnnnnnnnggtnggntacgccttgntcagcggcattgtctccatccagcggncaacgcctgctcgggccccaggcacccggaccctgggcatggctgaggaggatgaagaggaatgatttgtcctcacgctcccaagactggtttttctactctcatgcattccagagg

SEQ ID NO: 570 - DNA, 461 bp, Homo sapiens
  misc_feature (26)..(26): n includes a, c, g, or t, or contains no nucleotide
  misc_feature (29)..(30): n includes a, c, g, or t, or contains no nucleotide
  misc_feature (37)..(38): n includes a, c, g, or t, or contains no nucleotide
  misc_feature (131)..(131): n includes a, c, g, or t, or contains no nucleotide
gtattgctgagctcaaagccaagcanagnncggcagnngaggctgagcagggactctccaggcttctctgcccataaacacccgggtcccaggccctccttcctttccctttggtgctccctcctccccangtaccattgcgcgtgcagctggagcagaataccctcatttttaggaatctagtgatgcctcttgcctcagggaaacgtttctttgatggggagtttgagatttcttttccttgtttatgctttatttgtggtaatgaaagagcgaatgactgaacagccatggcaaggcagacctacaggcgaggccgcagcagagggtggggcagagcagcctcggggtctgggggctgcaggggtttccctggcgcagcgaaagtctctgagcacttaccgggcgtgaccgtttcttaggtgtgagaggggctgtggcttttgtgcagcgactatgtt

SEQ ID NO: 571 - DNA, 575 bp, Homo sapiens
  misc_feature (68)..(99): n includes a, c, g, or t, or contains no nucleotide
  misc_feature (214)..(214): n includes a, c, g, or t, or contains no nucleotide
  misc_feature (236)..(236): n includes a, c, g, or t, or contains no nucleotide
  misc_feature (401)..(416): n includes a, c, g, or t, or contains no nucleotide
tccaatgtcttttgacaggtgcctgtccttgaaaaacaaagtttctatttttatttttaattggtttnnnnnnnnnnnnnnnnnnnnnnnnnnnnnnnncagcaaatcatcgggccattggattttttccattatgttcatcacccttatatcatgtacctcagatctctctctctctcctctctctcagttatatagtttcttgtcttggacntttttttttcttttctttttcnttttttttttgctttaaaacaagtgtgatgccatatcaagtccatgttattctctcacagtgtactctataagaggtgtgggtgtctgtttggtcaggatgttagaaagtgctgataagtagcatgatcagtgtatgcgaaaaggtttttaggaagtatggcaannnnnnnnnnnnnnnnatgatggtgacatgatatagtcagctgccttttaagaggtcttatctgttcagtgttaagtgatttaaaaaaataataacctgttttctgactagtttaaagatggatttgaaaatggttttgaatgcaattaggttatgctatttggacaataaactc

SEQ ID NO: 572 - DNA, 422 bp, Homo sapiens
  misc_feature (59)..(59): n includes a, c, g, or t, or contains no nucleotide
  misc_feature (61)..(79): n includes a, c, g, or t, or contains no nucleotide
  misc_feature (342)..(359): n includes a, c, g, or t, or contains no nucleotide
actgtgtcaccctaaagaagcatataatcatagcattaaaaatgcacacattactccangnnnnnnnnnnnnnnnnnnnttctgatatcagctcgtttgatttagtgcaaaaatgttttcaagactatttaatggatgtaaaaaagcctatttctacattataccaactgagaaaaaaatggtcggtaaagtgttctttcataataaataatcagacatggtcccatttgcaggaaaagtgcagactctgagtgttccagggaaacacatgctggacatcccttgtaacccggtatgggcgcccctgcattgctgggatgtttctgcccacggttttgtttnnnnnnnnnnnnnnnnnnatttctaatgaggattcacattaatataatataaaataaataggtcagttactggtctctttc

SEQ ID NO: 573 - DNA, 196 bp, Homo sapiens
  misc_feature (71)..(122): n includes a, c, g, or t, or contains no nucleotide
aaagtcacgcgctttctgcttgaacatcaaaatatcaaaaaccaaggtacccaaaagatacaagtcagagnnnnnnnnnnnnnnnnnnnnnnnnnnnnnnnnnnnnnnnnnnnnnnnnnnnntttctcatacatttatagagtttggtttgctttgctagttgtgtgaatcattgggctgtttttagagccactgt

SEQ ID NO: 574 - DNA, 410 bp, Homo sapiens
  misc_feature (274)..(288): n includes a, c, g, or t, or contains no nucleotide
cacatcatgtattgtgatgtttcaatgtgagacacaaaaacaatggcttgaaacttgtgtatcatatgtgattttgaaatgaacaccttgaatagcactaatttttatttgtggtatttttctataacaaaacaagtagctctaggaaaagaggttttattttgtaaacgatcatttgtgacctcagacactctctggctaatattttaataagctcacagcagataattctgagatcatgggtgaggggtggtgcatgttgagatttaaattnnnnnnnnnnnnnnnactttttgtctagctgtttgatttcattttttaatatagtatgccaattttgtgactgttaccatgtgaaagtcctgttgaaatgaacaattgtctgccccacaatcaagaatgtatgtgta

SEQ ID NO: 575 - DNA, 462 bp, Homo sapiens
  misc_feature (26)..(82): n includes a, c, g, or t, or contains no nucleotide
gaatattgttttgtctcagcctaaannnnnnnnnnnnnnnnnnnnnnnnnnnnnnnnnnnnnnnnnnnnnnnnnnnnnnnnngaaatgcataaagcagttcaaaaagcagtctgtattccatcatcttcctttttcattccagtccttatttttgtaagtattacttttcctcctccggctacctggactcaaaatctcagttgtctttgacagtttttttcttgtccctgaccaaaaaagaatgatcatacccagaattcaatgtttgatattttaagaatgtatgttctagtgtttttcagagtgagtctaccatctgtataaaaacaccttgggggcaggcaggggcatttaaaaatgtaggacctatcgtccagactcacagagtggggctccagaatctccatttttaacaaactctcttaagtaattctgatgtgtaccaaaatcagtgccattgg

SEQ ID NO: 576 - DNA, 613 bp, Homo sapiens
caacattctttatgtggatgaatctggtaatccggaatctattcgaatttgtgattttggctttgcaaaacagctgagagcggaaaatggtcttctcatgactccttgttacactgcaaattttgttgcaccagaggttttaaaaagacaaggctatgatgctgcttgtgatatatggagtcttggtgtcctactctatacaatgcttaccggttacactccatttgcaaatggtcctgatgatacaccagaggaaatattggcacgaataggtagcggaaaattctcactcagtggtggttactggaattctgtttcagacacagcaaaggacctggtgtcaaagatgcttcatgtagaccctcatcagagactgactgctgctcttgtgctcagacatccttggatcgtccactgggaccaactgccacaataccaactaaacagacaggatgcaccacatctagtaaagggtgccatggcagctacatattctgctttgaaccgtaatcagtcaccagttttggaaccagtaggccgctctactcttgctcagcggagaggtattaaaaaaatcacctcaacagccctgtgaagtgacctcagtgagata

SEQ ID NO: 577 - DNA, 594 bp, Homo sapiens
  misc_feature (141)..(141): n includes a, c, g, or t, or contains no nucleotide
  misc_feature (156)..(156): n includes a, c, g, or t, or contains no nucleotide
  misc_feature (158)..(158): n includes a, c, g, or t, or contains no nucleotide
  misc_feature (284)..(285): n includes a, c, g, or t, or contains no nucleotide
  misc_feature (292)..(292): n includes a, c, g, or t, or contains no nucleotide
  misc_feature (297)..(297): n includes a, c, g, or t, or contains no nucleotide
  misc_feature (339)..(339): n includes a, c, g, or t, or contains no nucleotide
  misc_feature (492)..(492): n includes a, c, g, or t, or contains no nucleotide
  misc_feature (548)..(548): n includes a, c, g, or t, or contains no nucleotide
ccttgtcattggaggaatgttgaacttcatgatgcatgaccagcgcaccggcccggcatggaacgtgctgatgtggaccatgctgtttctaggccagggaatccaggtcagcctgtactgccaggagtggtacgcacggcngcactgccccttacncnaggcaactttctgggggctggtgacacctcgatcttggtcctgccatacctagaggtcgggacagacgacgctacctgcccagacaccaccaagttctctgcctgcaaaacctggggaccaggacnncctgtcntgcantcccaaatttggctctgagtcgaggcaacctgcacacaaganccccacccaaggaatgtgcaaggactgagatctgcagacttgtgggtaactgatcacagacctcagcatgggggtgaccagggtgactcttcaatccctatccccatgggctgggtacaggatatcctcctaccccatgactgtcttaggganacttggggtaccttatggatttgatgaatgtgggggaactcagaggaactggggcnaccaaggttggaaaagggtttggttcttgactttgtattccttcca

SEQ ID NO: 578 - DNA, 581 bp, Homo sapiens
  misc_feature (88)..(88): n includes a, c, g, or t, or contains no nucleotide
  misc_feature (93)..(108): n includes a, c, g, or t, or contains no nucleotide
  misc_feature (250)..(250): n includes a, c, g, or t, or contains no nucleotide
  misc_feature (305)..(305): n includes a, c, g, or t, or contains no nucleotide
  misc_feature (327)..(360): n includes a, c, g, or t, or contains no nucleotide
ctctgcaaaggctatccctccgaattctcaacatacctcaacttctgccgctccctgcggtttgacgacaagcccgactactcttacntacgnnnnnnnnnnnnnnnncctcttccaccggcagggcttctcctatgactacgtctttgactggaacatgctgaaattcggtgcagcccggaatcccgaggatgtggaccgggagcggcgagaacacgaacgcgaggagaggatggggcagctacggggntccgcgacccgagccctgccccctggcccacccacgggggccactgccaaccggntccgcagtgccgccgagcccgnnnnnnnnnnnnnnnnnnnnnnnnnnnnnnnnnnctggcaatacttctcccagagcgatctcgcgggtcgaccgggagaggaaggtgagtatgaggctgcacaggggtgcgcccgccaacgtctcctcctcagacctcactgggcggcaagaggtctcccggatcccagcctcacagacaagtgtgccatttgaccatctcgggaagtgaggagagcccccattggaccagtgtttgcttagtgtcttcactgta

SEQ ID NO: 579 - DNA, 475 bp, Homo sapiens
  misc_feature (322)..(383): n includes a, c, g, or t, or contains no nucleotide
tggtcgatggaccttgcactcaagtgaggagacaggccatgcctttcaagtgcatgcagctcactgatttcatcctcaagtttctgcacagtgcccaccagaagtatgtccgacaagcctggcagaaggcagacatcaatacaaaatgggcagccacacgatgggccaagaagattgaagccagagaaaggaaagccaagatgacagattttgatcgttttaaagttatgaaggcaaagaaaatgaggaacagaataatcaagaatgaagttaagaagcttcaaaaggcagctctcctgaaagcttctcccaaaaaagcacnnnnnnnnnnnnnnnnnnnnnnnnnnnnnnnnnnnnnnnnnnnnnnnnnnnnnnnnnnnnnnaaagttccagcaaaaaagatcaccgccgcgagtaaaaaggctccagcccagaaggttcctgcccagaaagccacaggccagaaagcagcgcc

SEQ ID NO: 580 - DNA, 345 bp, Homo sapiens
  misc_feature (174)..(192): n includes a, c, g, or t, or contains no nucleotide
  misc_feature (261)..(284): n includes a, c, g, or t, or contains no nucleotide
agcagggataccaaggcaggcctgttacactctccccaacctccttggactgcaaacaatctaggacacctccaccaaacctcctcttgcactttccctctggcttccctcccagccttccttggtttggatgttttgtcccctccttaatttatgttgaaactctacataaannnnnnnnnnnnnnnnnnntgtaagtattaggaggtgggacctttgggaagtgattaagtcaagtcacgaagatagagctttgcgaannnnnnnnnnnnnnnnnnnnnnnnggcttgatagagggagtttgtcctgtggcccttctattttctgctctgtgaggacacaatg

SEQ ID NO: 581 - DNA, 385 bp, Homo sapiens
acttcatttatgagagcatgcggtaccagcctgtcgtggacttggtcatgcgcaaagccttagaagatgatgtaatcgatggctacccagtgaaaaaggggacaaacattatcctgaatattggaaggatgcacagactcgagtttttccccaaacccaatgaatttactcttgaaaattttgcaaagaatgttccttataggtactttcagccatttggctttgggccccgtggctgtgcaggaaagtacatcgccatggtgatgatgaaagccatcctcgttacacttctgagacgattccacgtgaagacattgcaaggacagtgtgttgagagcatacagaagatacacgacttgtccttgcacccagatgagactaaaaa

SEQ ID NO: 582 - DNA, 316 bp, Homo sapiens
  misc_feature (39)..(39): n includes a, c, g, or t, or contains no nucleotide
tgtgaaaacaataccccaaggtaataggaaaagtttganttaagtgtttttaattcagtcagtgaattcagaataagtacattcatgtataacatagggacagttctgctgctgttatttatatgcaattcttctggtaaatagcaatagaataaaacatatttcaatgtttgtgtataggttttatattattattccactaggaatggcataagaatttatagataaattcttgtaacattaaaggattaaaatgtttttacattgtttttgggtgtctccttcttgtgcccatatctgataagctttatggatt

SEQ ID NO: 583 - DNA, 555 bp, Homo sapiens
  misc_feature (384)..(384): n includes a, c, g, or t, or contains no nucleotide
  misc_feature (408)..(414): n includes a, c, g, or t, or contains no nucleotide
  misc_feature (428)..(428): n includes a, c, g, or t, or contains no nucleotide
  misc_feature (433)..(433): n includes a, c, g, or t, or contains no nucleotide
  misc_feature (486)..(486): n includes a, c, g, or t, or contains no nucleotide
  misc_feature (521)..(521): n includes a, c, g, or t, or contains no nucleotide
tatctgactccatgcccctgcaagtgtaaaaccaagagacagaaaaatatgctacaccaaagcaatgcccattcatcgattctcagtcctggccccgctagtgatgcctccgctgatgaacggaaggcaggtgcaggtaaaagagtggtgtttttggaacccctgaaggatactgcagcagggcagaacgggaaagtcaggctctttcccagcgaggcagtgatagctgagggcatcctaaagtccacgagggggaaatctgactcagattcagtcaattcagtgttttctgacacaccttttgtggcgtccacttaatttgtgcctatatttgtatgatgtcataatttaatctgttcatatttaactttgtgtgtggtctgncaaaataaacagcaggacagaaannnnnnngttttgttctttgnaatanaaccaaattctcttaaaatgattggtaggaaatgaggtaaagtacttcagttncctcaatgtgccagaggaaagatggggttgttttnccaaagtttaagttctagatcacaatatcttagg

SEQ ID NO: 584 - DNA, 601 bp, Homo sapiens
  misc_feature (84)..(205): n includes a, c, g, or t, or contains no nucleotide
  misc_feature (261)..(261): n includes a, c, g, or t, or contains no nucleotide
  misc_feature (263)..(268): n includes a, c, g, or t, or contains no nucleotide
  misc_feature (278)..(281): n includes a, c, g, or t, or contains no nucleotide
  misc_feature (283)..(283): n includes a, c, g, or t, or contains no nucleotide
  misc_feature (285)..(287): n includes a, c, g, or t, or contains no nucleotide
  misc_feature (289)..(290): n includes a, c, g, or t, or contains no nucleotide
  misc_feature (294)..(294): n includes a, c, g, or t, or contains no nucleotide
  misc_feature (329)..(329): n includes a, c, g, or t, or contains no nucleotide
  misc_feature (335)..(335): n includes a, c, g, or t, or contains no nucleotide
  misc_feature (347)..(347): n includes a, c, g, or t, or contains no nucleotide
  misc_feature (384)..(384): n includes a, c, g, or t, or contains no nucleotide
  misc_feature (386)..(390): n includes a, c, g, or t, or contains no nucleotide
  misc_feature (392)..(393): n includes a, c, g, or t, or contains no nucleotide
  misc_feature (395)..(395): n includes a, c, g, or t, or contains no nucleotide
  misc_feature (418)..(418): n includes a, c, g, or t, or contains no nucleotide
  misc_feature (434)..(434): n includes a, c, g, or t, or contains no nucleotide
  misc_feature (437)..(437): n includes a, c, g, or t, or contains no nucleotide
  misc_feature (476)..(476): n includes a, c, g, or t, or contains no nucleotide
  misc_feature (487)..(487): n includes a, c, g, or t, or contains no nucleotide
  misc_feature (524)..(524): n includes a, c, g, or t, or contains no nucleotide
cctttcggagcctggctagtctaggacatcaccttgctgtgtcttctcaagcttttaaaattgaccctgaacgtgtgacagggnnnnnnnnnnnnnnnnnnnnnnnnnnnnnnnnnnnnnnnnnnnnnnnnnnnnnnnnnnnnnnnnnnnnnnnnnnnnnnnnnnnnnnnnnnnnnnnnnnnnnnnnnnnnnnnnnnnnnnnnnnattttggactgtgaccatgtaccttcctttttaagaaaaataaactgctttatggnannnnnnaaaaaaaaannnnanannnannagantcatttcctgccacacagcggaaggtggaagaacnttttcngatctcccaganagcggatggtgaccaggcatggaggaacagggtaggngnnnnncnngntggcctgcgagtgctgtggcatntacatcaggacaccanttntgccagagcccctgggcccccagtgtggcctgggtgtgntcaaggggccntgcaagtcctcgtcatcaacagcagccagccctcttntgttcattagactgctgggaggcctctttggggaaagaatccctcaggtgtaaaactgccaggtttttaggcacata

SEQ ID NO: 585 - DNA, 552 bp, Homo sapiens
  misc_feature (28)..(30): n includes a, c, g, or t, or contains no nucleotide
  misc_feature (35)..(35): n includes a, c, g, or t, or contains no nucleotide
  misc_feature (48)..(90): n includes a, c, g, or t, or contains no nucleotide
  misc_feature (93)..(97): n includes a, c, g, or t, or contains no nucleotide
  misc_feature (101)..(151): n includes a, c, g, or t, or contains no nucleotide
  misc_feature (154)..(154): n includes a, c, g, or t, or contains no nucleotide
  misc_feature (159)..(159): n includes a, c, g, or t, or contains no nucleotide
  misc_feature (264)..(299): n includes a, c, g, or t, or contains no nucleotide
cagaaattccgaccacaatgagcaccannngctgngccgaagcagcannnnnnnnnnnnnnnnnnnnnnnnnnnnnnnnnnnnnnnnnnnctnnnnncaannnnnnnnnnnnnnnnnnnnnnnnnnnnnnnnnnnnnnnnnnnnnnnnnnntgntcctnagcctgaagttacttccattgttgctactgttgtagataatgagaatacagtaactatttcaactgaggaacaagcacaacttactagtacccctgctattcagnnnnnnnnnnnnnnnnnnnnnnnnnnnnnnnnnnnngaaacatctaagcaagaaactgtagctgattttactcccaaaaaagaagaggaggagagccaaccagcaaagaaaacatacacttggaatacaaaggaagaggcaaagcaagcttttaaagaattattgaaagaaaagcgggtaccatcgaatgcttcatgggagcaggctatgaaaatgattattaatgatccacgatacagtgctttggcaaagttaagtgaaaaaaagcaagcctttaatgcctataaag

SEQ ID NO: 586 - DNA, 469 bp, Homo sapiens
gcactatttcatggaaagtttatcgatactggtttctctttaccattctacaagcgtatgttaagtaaaaaacttactattaaggatttggaatctattgatactgaattttataactcccttatctggataagagataacaacattgaagaatgtggcttagaaatgtacttttctgttgacatggagattttgggaaaagttacttcacatgacctgaagttgggaggttccaatattctggtgactgaggagaacaaagatgaatatattggtttaatgacagaatggcgtttttctcgaggagtacaagaacagaccaaagctttccttgatggttttaatgaagttgttcctcttcagtggctacagtacttcgatgaaaaagaattagaggttatgttgtgtggcatgcaggaggttgacttggcagattggcagagaaatactgtttatcgacattatacaa

SEQ ID NO: 587 - DNA, 507 bp, Homo sapiens
  misc_feature (467)..(482): n includes a, c, g, or t, or contains no nucleotide
aggttcaacaagagaacggagctgggaatgtgactgctggagcctgagaggtggaggagttctgatcccccgttacttcctagcattttctcctcttgccttaaaagttccctgtatgtgaaacgggaagtcctgagagtgtgtgttggtggctgtgcgcacgcacacaagacgggagtcaccctgtgcttcctgcccaagatactgacccattgaacccccaaagcatctttctctccacaaagtccgtggtgccttcctggtgggctgcagacactaatggtgttggggggtcttggaacagcttctctatgtgtggattcgtgtaaatgcgaagagttcacatataaagaagtgactttgattctgtgattatattgatttggtacacagtaaatgggagtttaaaaaatccaaagactctaatgacttgtaaagactctaatgatttgtatcatgtaatgaannnnnnnnnnnnnnnntttgtaccgtatgtgtctttccatc

SEQ ID NO: 588 - DNA, 488 bp, Homo sapiens
cccttgaagacagaattttggtgttggtgcttgtaagcattttcattaataatatgagaaatgatacctggagagagagattatgagcaaatgtattgcttcttttagaggaggaagcatacaacctcttttgtgtgaattttgttattatggtcaaagaatgcattcctaagttttcatttgagtacccaaatacacaaaaggtgtccctttaaggaaaataaagaattaagttttaaataacattacattttacaatctgacatctggagtatattgaacataggctatttcttgatataacactcatttaattgtggccatccaaatgaatattattgcagaatttatcttgttcataatgatttgtaaatggtgttatagctgaatacctgtgcatgaaaatgggcaatattttcatctgtttacttgtagtgccatagaggccaatatgcacaatattaactaatgccaagacatggctgttt

SEQ ID NO: 589 - DNA, 454 bp, Homo sapiens
  misc_feature (97)..(97): n includes a, c, g, or t, or contains no nucleotide
  misc_feature (148)..(149): n includes a, c, g, or t, or contains no nucleotide
catacttgctaaaaattctggtaagtatgtgcttttctgtgggggtgggatttggaaggggggttgggttgggctggatatctttgtagatgtgganccaccaaggggttgttgaaaactaattgtattaaatgtcttttgataagcnntctgctcacatttttgtgaatgtctgaagtatatagtttgtgtatattgacagagctcttttataactaaagcaaatttaatttttttgtactagaaaaaaatttgaacattttagttcttggttataaaaatgttaattcagaattagtttaatgccttaattaaactaattaatagctttggacacttaaaagagctctaaatttgcttgtacataaaggcttaatttgttttccttgttagggtcaagggtgtcctccactctttaacagctgctggacagacacattagagcagctgtttg

SEQ ID NO: 590 - DNA, 561 bp, Homo sapiens
  misc_feature (220)..(220): n includes a, c, g, or t, or contains no nucleotide
  misc_feature (229)..(454): n includes a, c, g, or t, or contains no nucleotide
aaactggagtattcttcctgaagaggagcgaaatatccagtgggactaagcagttgtcactctgttcttcactcctaccaaatactttccacgttggactttcccccttattgggtctcgaagtttacttattgtcacactgtgtatgttttcagcattttaaggctagagattgtaatgggctcctacttgtaatttccattaaattcgtaacaggtanaacactaannnnnnnnnnnnnnnnnnnnnnnnnnnnnnnnnnnnnnnnnnnnnnnnnnnnnnnnnnnnnnnnnnnnnnnnnnnnnnnnnnnnnnnnnnnnnnnnnnnnnnnnnnnnnnnnnnnnnnnnnnnnnnnnnnnnnnnnnnnnnnnnnnnnnnnnnnnnnnnnnnnnnnnnnnnnnnnnnnnnnnnnnnnnnnnnnnnnnnnnnnnnnnnnnnnnnnnnnnnnnnnnnngggctttatttatttatttttaccacaatagtttgaagcagtaagggggaaggagggtgattatattgctttgtaatggtttgtgatacttgaaacatcacggtgca

SEQ ID NO: 591 - DNA, 299 bp, Homo sapiens
  misc_feature (46)..(46): n includes a, c, g, or t, or contains no nucleotide
  misc_feature (112)..(112): n includes a, c, g, or t, or contains no nucleotide
  misc_feature (115)..(134): n includes a, c, g, or t, or contains no nucleotide
ggaagagacactcagaccagagaaggggtgtgcatgcgcctactcngcttgctagaagtagattctggacagtcagctcttcatctgcccaactgtgtagcatctgcattgnccnnnnnnnnnnnnnnnnnnnnggctgatgcaggatttgttctctgtccagcagtcacttcggccagagctgaagagttgccccgtctctgttccatgtctcctttaagagctctggtgataaggacatgatgcttttactgaactttcttatcctagcacatgcttcaatagttcaaggaacttga

SEQ ID NO: 592 - DNA, 197 bp, Homo sapiens
ttttagggagagtcctccatctacatttgcctgtgcttcagggtaattactagtagtgttacatgaacatgtgcatagtggtaggatgccatcagattaaagcattgaagtgtttcattgttacctgtacctaatggttttaaatatatgttaattgattgtttagttaaaatgtcatagttacaatgcaagtaaac

SEQ ID NO: 593 - DNA, 415 bp, Homo sapiens
gctggattacacacagcaagttcctgcttctgggacagctctactgacgggagctgcactgtgcgatgggagaataagaccatgtactgcatcgtcagtgccttcggactgtctatttgacctgcagtccagcctatggcctttctccttttgtctctagttcatcctctaaccaccagccatgaattcagtgaactcttttctcattctctttgttttgtggcactttcacaatgtagaggaaaaaaccaaatgaccgcactgtgatgtgaatggcaccgaagtcagatgagtatccctgtaggtcacctgcagcctgcgttgccacttgtcttaactctgaatatttcatttcaaaggtgctaaaatctgaaatctgctagtgtgaaacttgctctactctctgaaatgattc

SEQ ID NO: 594 - DNA, 405 bp, Homo sapiens
  misc_feature (287)..(287): n includes a, c, g, or t, or contains no nucleotide
caagaactcaagtgtaactgtgataaaataacctttcccaggtatattggcaggtatgtgtgtaatctcagaatacacaggtgacatagatatgatatgacaactggtaatggtggattcatttacattgtttacacttctatgaccaggccttaagggaaggtcagttttttaaaaaaccaagtagtgtcttcctacctatctccagatacatgtcaaaaaaagaaaggtgtttgtgcttccgttttgtttctgctcagtaatatagtcaagcaagtttgttccangtgacccattgagctgtgtatgcatttttgtttatttcaataaaatatatttgtattatttgtccttcatactatccatccataccacactatcttctgtatcaggtagtctaataga

SEQ ID NO: 595 - DNA, 515 bp, Homo sapiens
  misc_feature (26)..(26): n includes a, c, g, or t, or contains no nucleotide
  misc_feature (38)..(38): n includes a, c, g, or t, or contains no nucleotide
  misc_feature (40)..(41): n includes a, c, g, or t, or contains no nucleotide
  misc_feature (43)..(43): n includes a, c, g, or t, or contains no nucleotide
  misc_feature (45)..(46): n includes a, c, g, or t, or contains no nucleotide
  misc_feature (48)..(48): n includes a, c, g, or t, or contains no nucleotide
  misc_feature (50)..(52): n includes a, c, g, or t, or contains no nucleotide
  misc_feature (54)..(55): n includes a, c, g, or t, or contains no nucleotide
  misc_feature (57)..(60): n includes a, c, g, or t, or contains no nucleotide
  misc_feature (62)..(63): n includes a, c, g, or t, or contains no nucleotide
  misc_feature (67)..(91): n includes a, c, g, or t, or contains no nucleotide
aacgactgtgtctttgtcacctctgnttaactttaggngnntncnntncnnngnntnnnnanntttnnnnnnnnnnnnnnnnnnnnnnnnntcattcttttcttgaagggttggtttactagaatattcaaaatcaatcatgaaggcagttactattttgagtctaaaggttttctaaaaattaacctcacatcccttctgttagggtctttcagaatatcttttataaacagaagcatttgaagtcattgcttttgctacatgatttgtgtgtgtgaaggacataccacgtttaaatcattaattgaaaaacatcatataagccccaactttgtttggaggaagagacggaggttgaggtttttccttctgtataagcacctactgacaaaatgtagaggccattcaaccgtcaaacaccatttggttatatcgcagaggagacggatgtgtaaattactgcattgctttttttttcagtttgtataacctctaatctccgtttgcatgatacg

SEQ ID NO: 596 - DNA, 551 bp, Homo sapiens
  misc_feature (26)..(54): n includes a, c, g, or t, or contains no nucleotide
  misc_feature (184)..(220): n includes a, c, g, or t, or contains no nucleotide
  misc_feature (222)..(257): n includes a, c, g, or t, or contains no nucleotide
  misc_feature (264)..(318): n includes a, c, g, or t, or contains no nucleotide
tgtcatgcgctttcttctgagggtcnnnnnnnnnnnnnnnnnnnnnnnnnnnnntctccacagggctccccgccccacccggcctgataaagcgcgccgactgggctacaaggccaagcaaggttacgttatatataggattcgtgttcgccgtggtggccgaaaacgcccagttcctaagggnnnnnnnnnnnnnnnnnnnnnnnnnnnnnnnnnnnnncnnnnnnnnnnnnnnnnnnnnnnnnnnnnnnnnnnnnaggagcnnnnnnnnnnnnnnnnnnnnnnnnnnnnnnnnnnnnnnnnnnnnnnnnnnnnnnnagattccacatacaaagcttttgaggttatcctcattgatccattccataaagctatcagaagaaatcctgacacccagtggatcaccaaaccagaccacaagcacagggagatgcgtgggctgacatctgcaggccgaaagagccgtggccttggaaagggccacaagttccaccacactattggtggctctcgccgggcagcttggagaaggcgcaatactccagctccac

SEQ ID NO: 597 - DNA, 411 bp, Homo sapiens
  misc_feature (373)..(373): n includes a, c, g, or t, or contains no nucleotide
cccaacctccaggagctagtggaggggtgtgtaacagggtcataccccctccctcttgtccaccctacccccagggtaaggggagcctctctccttccccatcagactggatgtgcctttatcctctaatgccccaatctctctctgaacacccccattctccacctgttggtggggggtgctcctcgacccacccagatttgaccgttcagggggcctcccctgctatccctcctcccatcctgtaccccccatttctggggcctcatcactgtggaagacggggatagtaagagataagtgggtgggaggcacggggaaggttttggagtagaaccaggggtgtgtatgaaggggggtgacaaggtccccntggggaggggaccaaccttgtctggtggatgagaaggc

SEQ ID NO: 598 - DNA, 524 bp, Homo sapiens
  misc_feature (181)..(196): n includes a, c, g, or t, or contains no nucleotide
cgatttccggtgtctggagagagtattttttggtccaaggagtcctcttggctttagctggtgggtgggcggggagaggtctgagggctcctactggaggttcccccaaaaaggggcaaaaggagaccctctgcccaccggaggcaggggatcaggcatccaaatacacgatgcaaaaatnnnnnnnnnnnnnnnncacacccacacactcacccacacacacgcaattttaccttcctcttgtagcgaagatgaaactcccgtcggacacccgaagtgcattgcgtgtttctgttcagtttaatgacgattaataaatatttatgtaaatgagatgcaaagccggaccggtttctcacggtggcctcatttcattgaggggggagagaaggtttgagctggggctggggtgatgaaggcagagtgtcaagtgactgtgcagaggccaaacagagggaccctggacattcttgggtagtattctctccctaaccaccccccatacacccactgggctatactag

SEQ ID NO: 599 - DNA, 39 bp, Homo sapiens
gatgaacatgagtcgcctccacctgaagatgccccattg

SEQ ID NO: 600 - DNA, 413 bp, Homo sapiens
  misc_feature (208)..(208): n includes a, c, g, or t, or contains no nucleotide
tcttcagccctgatgcacaggctgccagccccccagtccagccctctcccttccactggtgccttgcttagagccagaagggatgaagccgggggatctatggaacagaggaggagcgatgcagttgggagaggaagctagaagggttatggttggagttctgtacagtgttgagtttccgacagggaaagaggattcctccaatgcncctagagagaaagcctgagcaggagatgatgcagcagaggggaagggccctgtggtgccgccgcccttccttcagcctccgaagggtgatggaaatggagagtggaggaccaggcctccagctgtctggcctcgcccttcacgccttaacactaagcccacctcccctgctctccttcccagcattgagcccttggttgcctggg

SEQ ID NO: 601 - DNA, 418 bp, Homo sapiens
tggtgagctcagttcactcccactgggcccaacaacactggacacccggccactgcagtcttctgccctgctggacagcagcagcagcagcagcagcagcagcagcagcagcagcagcagcagcaacagtaacagcagcagttcgtccggacccaacccttctacctcctttgagcccatcaaggcagaccccacaggtgttttggaactccccaaagagctgtcagaaatctttgatcccacacgagagtgcatgagctcggagctgctggaggagttgatgtcctcagaagtgtttgcccctctgcttcgtctttctccacccccgggagaccacgattatatctacaacctggacgagagtgaaggtgtctgtgacctctttgatgtgcctgttctcaacctctgactgacaggg

SEQ ID NO: 602 - DNA, 378 bp, Homo sapiens
tggctctagaggaggctccagctctggaggaggatatggctctggaggtgggggttctagctctgtaaagggtagctcaggtgaagcttttggttccagcgtgaccttctcttttagataaagatgagcccccaccaccaccgactctcccaacccagactctcccactccagaatgtagaagcctgtctctgtacctctaactggcagcaagttaaatttttgtcatttatctctgatggcactttgagggaaaagaatgtccacatacagtttttgaaagatcttctctccaaaccagttagttagagccagtgacgcctctgtgttctggggcggaatctgtgctgtctaggtttgtgcttctagccatgcccat

SEQ ID NO: 603 - DNA, 458 bp, Homo sapiens
  misc_feature (72)..(72): n includes a, c, g, or t, or contains no nucleotide
  misc_feature (79)..(129): n includes a, c, g, or t, or contains no nucleotide
  misc_feature (131)..(135): n includes a, c, g, or t, or contains no nucleotide
  misc_feature (137)..(138): n includes a, c, g, or t, or contains no nucleotide
  misc_feature (140)..(140): n includes a, c, g, or t, or contains no nucleotide
  misc_feature (142)..(142): n includes a, c, g, or t, or contains no nucleotide
  misc_feature (144)..(146): n includes a, c, g, or t, or contains no nucleotide
  misc_feature (148)..(150): n includes a, c, g, or t, or contains no nucleotide
ctgtctttggcagtgagtaaatagcatattttgaagtagagttgtatactttttcataagatgtttgggaanttttttnnnnnnnnnnnnnnnnnnnnnnnnnnnnnnnnnnnnnnnnnnnnnnnnnnntnnnnngnntntntnnnannnggaaaaaaagaaaaaaaccttatctcttgcccttattttgaattttccactctttcattaatttgttttaagctccgtgttggaaaaaaggggtagtgcattttaaattgaccttcatacgcttttaaaataagacaaatctacttgataatgtacctttatttgatctcaagttgtataaaaccaataaatttgtgttactgcagtagtaatcttatgcacacggtgatttcatgttatatatgcaaagtaggcaactgttttcttagttacagaagtttcaagcttcacttttgtgcagtagaaac

SEQ ID NO: 604 - DNA, 310 bp, Homo sapiens
  misc_feature (140)..(169): n includes a, c, g, or t, or contains no nucleotide
tgacatctgctattgtgacacatcccattgctggcaatgtggtgcacactccgaaacttttaactactgttttgtaagcctccaagggtggcattgcagggtccttaggcaatgttttgtttgcctttatgcagagaggnnnnnnnnnnnnnnnnnnnnnnnnnnnnnntagaggaactgtaatgcttcagaagttgtagcttatacaaaggaaacaggtcctgctggcttaatttaaacagttattgcatgaagtagcgtggaggccctggactgctgctcgttctttaggatggactgttctggtatc

SEQ ID NO: 605 - DNA, 55 bp, Homo sapiens
aatctgggaatacctttctgaatcccacaaaccttaatgtgtgtatgtgaactca

SEQ ID NO: 606 - DNA, 541 bp, Homo sapiens
  misc_feature (125)..(130): n includes a, c, g, or t, or contains no nucleotide
aggagcaactgcatcctgactgtaggactgaacattatgttcactgcactctgattttctgtaggtacagttcaaagccctaaaggagtctggcttttactatctttcttaaaaaaaaaaaaaannnnnnaaaaaaattcaaaaaaggggatgatactagccttaacatgtacctgtcaatgttatggatattgtcataaaaaggtatcttttaaaaatcagaacagagacttaattttttaaatcttaagatttgtagaatgtttctaggataggatattaaaaatgattgaaacccatgcatggtgttagacaatttttctaattattccattgagtcagttttttgtgattagtgattatcagagcaaacatcatgtagatagcacaagtatttggagaaacgttgtttgttttgattagtgattatcagagcaaacatcatgtagatagcacaagtatttggagaaacgttgtttgttttgttaccaaaatgttggaaaaatttatttcaataccttttagatttcataaagtgcag

SEQ ID NO: 607 - DNA, 577 bp, Homo sapiens
  misc_feature (88)..(88): n includes a, c, g, or t, or contains no nucleotide
  misc_feature (90)..(92): n includes a, c, g, or t, or contains no nucleotide
  misc_feature (94)..(98): n includes a, c, g, or t, or contains no nucleotide
  misc_feature (101)..(104): n includes a, c, g, or t, or contains no nucleotide
  misc_feature (108)..(108): n includes a, c, g, or t, or contains no nucleotide
  misc_feature (180)..(180): n includes a, c, g, or t, or contains no nucleotide
  misc_feature (196)..(210): n includes a, c, g, or t, or contains no nucleotide
  misc_feature (340)..(358): n includes a, c, g, or t, or contains no nucleotide
gcagtgtaccttgtgccactgaatttccaaagtgtaccaatttttttttttttactgtgcttcaaataaatagaaaaatagttataanannnannnnnaannnngccnattcatgcttctatgcatattaggctacgtattccacattgaaagcatgagagtgtctaggcctttgaatgncatatgccatttctgnnnnnnnnnnnnnnnggctaagtattgctttctacaaataattgccccctttgttttaaaaagaagaaatgcatattgaagtagtttgatgatttgtttggcatataggaagcacgctggtgctaagtattttttaaatggttannnnnnnnnnnnnnnnnnntaaatcttcaggaatatgtattaagattgtggaatgggtgtaagacaattggtagggggtgaaagtgggtttgattaaatggatcttttatggccctatgatctatcctttacttgaaagcttttgaaaagtggaaaggtcattttgttgcatttccccatttcttgtttttaaaagaccaacaaatctcaagccctataaatggcttgtattgaactt

SEQ ID NO: 608 - DNA, 556 bp, Homo sapiens
  misc_feature (46)..(65): n includes a, c, g, or t, or contains no nucleotide
  misc_feature (337)..(390): n includes a, c, g, or t, or contains no nucleotide
gccgagggcattcacacgggccagtttgtgtattgcggcaagaagnnnnnnnnnnnnnnnnnnnntgtgctccctgtgggcaccatgcctgagggtacaatcgtgtgctgcctggaggagaagcctggagaccgtggcaagctggcccgggcatcagggaactatgccaccgttatctcccacaaccctgagaccaagaagacccgtgtgaagctgccctccggctccaagaaggttatctcctcagccaacagagctgtggttggtgtggtggctggaggtggccgaattgacaaacccatcttgaaggctggccgggcgtaccacaaatataagnnnnnnnnnnnnnnnnnnnnnnnnnnnnnnnnnnnnnnnnnnnnnnnnnnnnnncatccttttggaggtggcaaccaccagcacatcggcaagccctccaccatccgcagagatgcccctgctggccgcaaagtgggtctcattgctgcccgccggactggacgtctccggggaaccaagactgtgcaggagaaagagaactagtgctgagggcctcaat

SEQ ID NO: 609 - DNA, 496 bp, Homo sapiens
  misc_feature (89)..(106): n includes a, c, g, or t, or contains no nucleotide
  misc_feature (175)..(176): n includes a, c, g, or t, or contains no nucleotide
  misc_feature (183)..(183): n includes a, c, g, or t, or contains no nucleotide
  misc_feature (186)..(263): n includes a, c, g, or t, or contains no nucleotide
  misc_feature (321)..(373): n includes a, c, g, or t, or contains no nucleotide
acatcatatttggtgaatgtccatattgtagtaagccaattaccttaaaaatgtctggaaggaaacactgaaataagaatacaacattnnnnnnnnnnnnnnnnnncttaaaaaattatcaaaaggaattttggtatcatcttcagagaaaaaataaagcaagaaatactaacannaaaaggncannnnnnnnnnnnnnnnnnnnnnnnnnnnnnnnnnnnnnnnnnnnnnnnnnnnnnnnnnnnnnnnnnnnnnnnnnnnnnccagttgaactttctaagtctgtgatccccgtgctgactgtggaagtgtatttatacnnnnnnnnnnnnnnnnnnnnnnnnnnnnnnnnnnnnnnnnnnnnnnnnnnnnnaggctcataaaatgagtttgggaattgtgtatagctgattttttgtgggaaactgtttacttcattcaaaggttcttgagactcttgatatttctgtcttctccttgtgctttcctatggaaa

SEQ ID NO: 610 - DNA, 202 bp, Homo sapiens
gcctgcctggggctttaaccatttatagcactcctgagagccggactgcctcctacttgggcccggaagccagtccctccccctaagaccccgcgcctctgaaggggcttggaaccagtccgccgctgcacatccttcttggcttcctggccgcctacgggggtgagcgaagcccccactactaaatggcctctctccacta

SEQ ID NO: 611 - DNA, 87 bp, Homo sapiens
gagtgtcgcttgtatgttatcgtacagctgacatgtatttttgtctattctttattatcttagtttcatgctatgtatgtaccataa

SEQ ID NO: 612 - DNA, 500 bp, Homo sapiens
  misc_feature (99)..(100): n includes a, c, g, or t, or contains no nucleotide
  misc_feature (108)..(108): n includes a, c, g, or t, or contains no nucleotide
  misc_feature (120)..(121): n includes a, c, g, or t, or contains no nucleotide
  misc_feature (289)..(323): n includes a, c, g, or t, or contains no nucleotide
tttgtggcccaaactgttctagaaaatgggacatatattaaagatgatacaatttttattaaagtcatagtggatacttcggatctgcccgatccctgnnaagtagcnggggaggtgganntagcagaaggcaactcctctgggggatttgaaccggtctgtcttcactgaggtcctcgcgctcagaaaaggaccttgtgagacggaggaagcggcagaaggcggacgcgtgccggcgggaggagccacgcgtgagcacacctgacacgttttataatagactagccannnnnnnnnnnnnnnnnnnnnnnnnnnnnnnnnnngataaatattgctgtcagagaaggttttcattttcatttttaaagatctagttaattaaggtggaaaacatatatgctaaacaaaagaaacatgatttttcttccttaaacttgaacaccaaaaaaacacacacacacacacacgtggggatagctggacatgtcagcatgttaagt

SEQ ID NO: 613 - DNA, 392 bp, Homo sapiens
  misc_feature (105)..(105): n includes a, c, g, or t, or contains no nucleotide
  misc_feature (138)..(139): n includes a, c, g, or t, or contains no nucleotide
  misc_feature (141)..(141): n includes a, c, g, or t, or contains no nucleotide
  misc_feature (149)..(149): n includes a, c, g, or t, or contains no nucleotide
  misc_feature (154)..(154): n includes a, c, g, or t, or contains no nucleotide
  misc_feature (160)..(160): n includes a, c, g, or t, or contains no nucleotide
  misc_feature (164)..(164): n includes a, c, g, or t, or contains no nucleotide
  misc_feature (173)..(173): n includes a, c, g, or t, or contains no nucleotide
  misc_feature (176)..(176): n includes a, c, g, or t, or contains no nucleotide
  misc_feature (181)..(181): n includes a, c, g, or t, or contains no nucleotide
  misc_feature (184)..(184): n includes a, c, g, or t, or contains no nucleotide
  misc_feature (186)..(186): n includes a, c, g, or t, or contains no nucleotide
  misc_feature (189)..(189): n includes a, c, g, or t, or contains no nucleotide
  misc_feature (192)..(192): n includes a, c, g, or t, or contains no nucleotide
  misc_feature (196)..(196): n includes a, c, g, or t, or contains no nucleotide
tagacaaatactcatgtgtatgggcaaaaaactcgaggactgtatttgtgactaattgtataacaggttattttagtttctgttctgtggaaagtgtaaagcatnccaacaaagggttttaatgtagatttttttttnngnaccccatnctgtngattgntaantgtaacagnctnatcgngangntgnatnaatntcttttttttaatgtgctgtgtaaagttagtctactcttaagccatcttggtaaatttccccaacagtgtgaagttagaattccttcagggtgatgccaggttctatttggaatttatatacaacctgcttgggtggagaagccattgtcttcggaaaccttggtgtagttgaactgatagttactgttgtgacct

SEQ ID NO: 614 - DNA, 396 bp, Homo sapiens
  misc_feature (50)..(74): n includes a, c, g, or t, or contains no nucleotide
  misc_feature (136)..(136): n includes a, c, g, or t, or contains no nucleotide
  misc_feature (255)..(255): n includes a, c, g, or t, or contains no nucleotide
  misc_feature (286)..(303): n includes a, c, g, or t, or contains no nucleotide
tccagctggagaagccgtgacacccctactcctgccaggctgcccccgcnnnnnnnnnnnnnnnnnnnnnnnnntcagctcacttccctgggacattctcctttcagcccttctgggggcttccttagtcatattnccccagtggggggtgggagggtaacctcactcttctccaggccaggcctccttggactcccctgggggtgtcccactcttcttccctctaaactgccccacctcctaacctaatccccncgccccgctgcctttcccaggctcccctcannnnnnnnnnnnnnnnnnccttaatcgctgcctctaggggagctgattgtagcagcctcgttagtgtcaccccctcctccctgatctgtcagggccacttagtgataataa

SEQ ID NO: 615 - DNA, 457 bp, Homo sapiens
  misc_feature (165)..(188): n includes a, c, g, or t, or contains no nucleotide
  misc_feature (385)..(385): n includes a, c, g, or t, or contains no nucleotide
  misc_feature (398)..(427): n includes a, c, g, or t, or contains no nucleotide
tgagtctggtggatacacttatttctcccacattatttgaggccacacattcataaatggcctcatccctcggagtccgtaagggttgtattctgagaactgatccagacccatcgtcaaactctattacctcaaatctctgattgctgactttctttccttttnnnnnnnnnnnnnnnnnnnnnnnngggtctcccgtagcttggcagatgaaagaggcaactccgccagagacccctgtctgatcaacgggtgttcgtgtaaaccttggaggtgtctcagcatccgtgcggaggaagaaagtgaggagcagcagcagcagcctggctacgtgcaccatcctgcagcttggcagcagcgtgcgcgagcagcttggaatcactgnctccggagccgcnnnnnnnnnnnnnnnnnnnnnnnnnnnnnnggaacactttcagagcctggtcatgttggc

SEQ ID NO: 616 - DNA, 482 bp, Homo sapiens
  misc_feature (53)..(53): n includes a, c, g, or t, or contains no nucleotide
  misc_feature (61)..(61): n includes a, c, g, or t, or contains no nucleotide
  misc_feature (228)..(245): n includes a, c, g, or t, or contains no nucleotide
  misc_feature (379)..(413): n includes a, c, g, or t, or contains no nucleotide
gttcttgcactggatgcagcatgagaagctggctgctaagatgtcactggggntcactaangctgaagcctgaaggaaagcctctcattgctgtagagctctccctgcctctctctctgggggcgatggggaaggtcaggagtccagcccattcccagggtgtgtgggatagcgattgcattttccttttgctctggagtttcactccccttctgggtcccaagggcnnnnnnnnnnnnnnnnnngaattgcttgcaattggtgttttctcttgaatttgggggctgccatttaaagccaggtttccatgagctgaagaccagccattcaagaatctgaaaagtagacaagaggactccagttgcctcaggttggttcnnnnnnnnnnnnnnnnnnnnnnnnnnnnnnnnnnnatgaaaaggagcctggtggggagaccactgcacccaaaacaaatcctttcttcttctgagaatgtgact

SEQ ID NO: 617 - DNA, 523 bp, Homo sapiens
  misc_feature (340)..(357): n includes a, c, g, or t, or contains no nucleotide
ttatgctgcatagctgtattatagccttattagttgtgtggttgacccttggggtatacaaatgtcagtctgagtggtgtcttactcctttgtttataagtgaatgattgtgcatgttttgtatgtcatagtatgtcgtcacataaaagggagggagcgaaaaaccattacattaagataatattggaccaaactacttacttgctctaaacagttacttgtaccccttaacctgtcttcaaaagttgcatatagttacagtagtgtataaattaaatattgtggaaaaacagtcttgtatttttctgtatgtgtgtatatatatataattatgtacttnnnnnnnnnnnnnnnnnntttaaagatgtgacaatcttgacaccaattttaagaatagctgtgagaccgaattaaagataatccctaccaagtgaaaattgatgtgtgttaagagggtacagaattatcaactgatttggtcagttgcttccaatgctggttgatttccctcattgtgtaaaca

SEQ ID NO: 618 - DNA, 515 bp, Homo sapiens
  misc_feature (125)..(125): n includes a, c, g, or t, or contains no nucleotide
  misc_feature (133)..(133): n includes a, c, g, or t, or contains no nucleotide
  misc_feature (170)..(200): n includes a, c, g, or t, or contains no nucleotide
  misc_feature (205)..(205): n includes a, c, g, or t, or contains no nucleotide
  misc_feature (467)..(467): n includes a, c, g, or t, or contains no nucleotide
agctgtccggtgctaccacaccgtgccctcagtggactaaccacagcagcagccagggatgggccctggaggttcccggccggagagtgcctctcccctctgccatccacgtcaggtctttggtnggggggancccaaagccattctgggaagggctccagaagaaggtnnnnnnnnnnnnnnnnnnnnnnnnnnnnnnnccccncccccaccccccaggccgccttgagaagcacagtttaactcactgcgggctcctgagcctgcttctgcctgctttccacctccccagtccctttctctggccctgtccatgtgactttggcccttggttttctttccagattggaggtttccaagaggccccccaccgtggaagtaaccaagggcgcttccttgtgggcagctgcaggccccatgcctctcctccctctctggcagggccccatcctgggcagaggggcctngggctgggcccagagtccagccgtccagctgctcctttcccagtttga

SEQ ID NO: 619 - DNA, 398 bp, Homo sapiens
ccactgttttgttggcccacaactaataggacctcaaaataagccatgctgctttgcacacacactagccttcttttgtacttttcattctggatgggcttggccaaaacaggctcaggccaaagacctcccaagctgtatgtacttccagtatcctgaaacagtgtttggtgacataatgccaagggtaaacaagcctgatttaggcactgctttatccaggggcttcacccatgaaattaataaaacttatctgagtcacttgaaacttggttcccagaaaacacatttctggtttataatctccttttatgctcacctgacattaattatctatccttgatgatgtgtttaaactgagtagcagaaaacagaggccacactttctgggaaatttt

SEQ ID NO: 620 - DNA, 66 bp, Homo sapiens
catatgaattgcttaaactgtgctgcattgttggatgacaactctttttgtcacagttagagaatg

SEQ ID NO: 621 - DNA, 350 bp, Homo sapiens
  misc_feature (47)..(47): n includes a, c, g, or t, or contains no nucleotide
cctggattccttgttatctcaggactctaaatactctaacagctgtnccagtgttggtgattccagtggactgtatctctgtgaaaaacacaattttgcctttttgtaattctatttgagcaagttggaagtttaattagctttccaaccaaccaaatttctgcattcgagtcttaaccatatttaagtgttactgtggcttcaaagaagctattgattctgaagtagtgggttttgattgagttgactgtttttaaaaaactgtttggattttaattgtgatgcagaagttatagtaacaaacatttggttttgtacagacattatttccactctggtggataagttca

SEQ ID NO: 622 - DNA, 537 bp, Homo sapiens
  misc_feature (26)..(26): n includes a, c, g, or t, or contains no nucleotide
  misc_feature (38)..(38): n includes a, c, g, or t, or contains no nucleotide
  misc_feature (101)..(101): n includes a, c, g, or t, or contains no nucleotide
  misc_feature (125)..(125): n includes a, c, g, or t, or contains no nucleotide
  misc_feature (283)..(312): n includes a, c, g, or t, or contains no nucleotide
  misc_feature (326)..(326): n includes a, c, g, or t, or contains no nucleotide
  misc_feature (361)..(361): n includes a, c, g, or t, or contains no nucleotide
  misc_feature (371)..(371): n includes a, c, g, or t, or contains no nucleotide
  misc_feature (373)..(373): n includes a, c, g, or t, or contains no nucleotide
  misc_feature (379)..(380): n includes a, c, g, or t, or contains no nucleotide
  misc_feature (408)..(467): n includes a, c, g, or t, or contains no nucleotide
tcagttgctcgcttctgggtgtgctncccttcgaaggncccagataagacagggaacacttgtgagcacacagagcagcatctgatgccctgtggtgtttnggcatgtgccccctgtctactganccaatcagtgtggcatgaggcccacgccacccaaacctttcactttccaaagagctagccgtcctccacccagtaccatgtcctagcctgtctgcatttgttagtggtaatattctttatgtataataaatttttatacccaaaaaaaaaaaaaaaannnnnnnnnnnnnnnnnnnnnnnnnnnnnnaagccattgatgtncttttccttgtactctcccttgtgggtcccttgtntggcttggcngnaccccnnaatgctttggggttggacagacctggcnnnnnnnnnnnnnnnnnnnnnnnnnnnnnnnnnnnnnnnnnnnnnnnnnnnnnnnnnnnncagatttgccatggcatatacaaggtaactaccatagtgctccttgggtattgccaatatcctattattt

SEQ ID NO: 623 - DNA, 404 bp, Homo sapiens
  misc_feature (245)..(245): n includes a, c, g, or t, or contains no nucleotide
gccatctgctttcaccaagctgtctctccaccgtggcttcccttctccctccaggccaaagtgctgctgattcccactcccttggttttcgcctgcccagcgttgctgtttgcgtggagggtggggggagctcagtggcagggaatcagcggtccgtggggtcgtggggacgggaacatgtgcccgaccgctccatcccctcctcctccttaggatgcataacctaccttgtctttttttttttnaattttctttccaggtagagtagctctttgtacataaagaatacttgaaaaattaattgtatgatgtatgagaagacagagtctcctagttttgtatcttgttgtatgactgccatgagttccaccagaaagccactctattttggtctctgtgacatt

SEQ ID NO: 624 - DNA, 343 bp, Homo sapiens
  misc_feature (252)..(272): n includes a, c, g, or t, or contains no nucleotide
  misc_feature (299)..(313): n includes a, c, g, or t, or contains no nucleotide
tttcattatgaagatccagtacttggcagccatagtttagacaatattgttcagtgctgtttgcttgcatgttaacaacaaaaccttttagaggacccacaaatcatgatattgaacacagttccgaggcattcagagcatcagagcaagtaccatggcaatacatgtgtagactgttggagatgtcccgggccaatttcaagaaagaaaactgtaaatactagttctacttgctctgaaattatgagtttnnnnnnnnnnnnnnnnnnnnnaatcactgactggggcgttttgtgccnnnnnnnnnnnnnnnagcatggcatacctgcagtaccccttacaa

SEQ ID NO: 625 - DNA, 428 bp, Homo sapiens
  misc_feature (47)..(47): n includes a, c, g, or t, or contains no nucleotide
  misc_feature (50)..(50): n includes a, c, g, or t, or contains no nucleotide
  misc_feature (54)..(54): n includes a, c, g, or t, or contains no nucleotide
  misc_feature (57)..(57): n includes a, c, g, or t, or contains no nucleotide
  misc_feature (64)..(65): n includes a, c, g, or t, or contains no nucleotide
  misc_feature (203)..(203): n includes a, c, g, or t, or contains no nucleotide
  misc_feature (205)..(205): n includes a, c, g, or t, or contains no nucleotide
  misc_feature (210)..(210): n includes a, c, g, or t, or contains no nucleotide
  misc_feature (220)..(220): n includes a, c, g, or t, or contains no nucleotide
  misc_feature (269)..(269): n includes a, c, g, or t, or contains no nucleotide
  misc_feature (308)..(308): n includes a, c, g, or t, or contains no nucleotide
agctggaccgtgtgcccctttgggaggaagaagacaagccccactanggncaanggnagcaganncctgccgagtgagaggctgtggggcagcggctctgtcctgtgccttaccagccctggggagggggacatttggctggaagactggaatttaattgccatcgtctttgattttgtgacatttctgcttggaagtgtgancnacccncccccccccngcttcctgctccttagcatgcgtgcagctctctcctgttttgggtgttncccttggacactccagctcggggactgctggcgtgtgantgtgcagattcccctgtgtggtcgaacctaagaactgtggcttggaagtgatgctccatgtgacgacgactttgctttctttcctcttagtgaggaggtgattcgtagatcccaactgcc

SEQ ID NO: 626 - DNA, 414 bp, Homo sapiens
  misc_feature (86)..(86): n includes a, c, g, or t, or contains no nucleotide
  misc_feature (95)..(95): n includes a, c, g, or t, or contains no nucleotide
  misc_feature (97)..(104): n includes a, c, g, or t, or contains no nucleotide
  misc_feature (120)..(137): n includes a, c, g, or t, or contains no nucleotide
  misc_feature (147)..(148): n includes a, c, g, or t, or contains no nucleotide
  misc_feature (164)..(194): n includes a, c, g, or t, or contains no nucleotide
  misc_feature (307)..(350): n includes a, c, g, or t, or contains no nucleotide
gtaacagacattgttttgccaacattgcctatttcagtggcacgtcatctagttttaaaaaaataaaacattttaaatggacaganaaaaaaaanannnnnnnntttaactcgtaagtgnnnnnnnnnnnnnnnnnngacatgtccnnctttctctccagttcnnnnnnnnnnnnnnnnnnnnnnnnnnnnnnnagttgtactctgcttgaggggaagaaggctcctgctctgctgtgtaggtagtcataggaattgtattcttaatgtacaggcactaattgtcatctgtgatgtacattttatgnnnnnnnnnnnnnnnnnnnnnnnnnnnnnnnnnnnnnnnnnnnntatgtgtgtgtatgtgtgtgttttgtaaaatctgtaaatagcacatgaccaaatgaacatattg

SEQ ID NO: 627 - DNA, 524 bp, Homo sapiens
  misc_feature (82)..(99): n includes a, c, g, or t, or contains no nucleotide
  misc_feature (316)..(316): n includes a, c, g, or t, or contains no nucleotide
  misc_feature (364)..(378): n includes a, c, g, or t, or contains no nucleotide
ccccagactccgagtaaagcgggcggtagggccggagtcacctcccctatggcagtggccgccgctgtactccatcctcccnnnnnnnnnnnnnnnnnnaaataaacgctgggctccccagagcacctgtccgcccactgcccttgctgttctgggatcttcgctgcagttcacgggaaacaagcctgagtccgctcgcacccgcggctgctctcccggctcggcccggccgcctctgtctccggccaccgggtggcgctgccgagccagagccgccgcgtcccggcgctttccaggagccccaggcccggaggangcgaagcccgcagagcaaaggtggaaacacgtgcctacgctgtaaagnnnnnnnnnnnnnnngcatacctgttgtacaaacagacactgttcctaacgagaggagtgacgtattttcatcaccgtttttaatttgttttcttacgggtttacgattttgaatttttcttatttggttgaaagaattttgattctatcagcctgagtga

SEQ ID NO: 628 - DNA, 183 bp, Homo sapiens
acgagaactgtatccctttgtggagaggcaggcagttgggaggtggatagcatgggaggtcaagccagcggcttctctcctgggcacccctgggtgggcatggcccaggtggcccgggttgcccgttgattctgttgttgcctccttgacttgaggccctgcagacatggagttcctcgaggt

SEQ ID NO: 629 - DNA, 425 bp, Homo sapiens
  misc_feature (26)..(26): n includes a, c, g, or t, or contains no nucleotide
  misc_feature (36)..(36): n includes a, c, g, or t, or contains no nucleotide
  misc_feature (52)..(52): n includes a, c, g, or t, or contains no nucleotide
  misc_feature (79)..(79): n includes a, c, g, or t, or contains no nucleotide
  misc_feature (84)..(85): n includes a, c, g, or t, or contains no nucleotide
  misc_feature (94)..(94): n includes a, c, g, or t, or contains no nucleotide
  misc_feature (98)..(98): n includes a, c, g, or t, or contains no nucleotide
  misc_feature (105)..(105): n includes a, c, g, or t, or contains no nucleotide
  misc_feature (109)..(109): n includes a, c, g, or t, or contains no nucleotide
  misc_feature (114)..(114): n includes a, c, g, or t, or contains no nucleotide
  misc_feature (117)..(118): n includes a, c, g, or t, or contains no nucleotide
  misc_feature (239)..(239): n includes a, c, g, or t, or contains no nucleotide
  misc_feature (246)..(246): n includes a, c, g, or t, or contains no nucleotide
  misc_feature (284)..(354): n includes a, c, g, or t, or contains no nucleotide
cccttctgtgcagacttttggacccnagctcagcanccagcacccgggcgtncctgagcactttgcaagagagatgggncccanngaattcagnaagnagcttgncagncaagnccnngagaccctgggagctgtggctgtcttctgtggaggaggctccagcattcccaaagctcttaattctccataaaatgggctttcctctgtctgccatcctcagagtctggggtgggagtgtngacttangaaaacaatataaaggacatcctcatcatcacggggtnnnnnnnnnnnnnnnnnnnnnnnnnnnnnnnnnnnnnnnnnnnnnnnnnnnnnnnnnnnnnnnnnnnnnnnagagagacagagtcctccccattgggaacagggtgattgaggaaagtgaaccttgggtgtgagggaccaat

SEQ ID NO: 630 - DNA, 411 bp, Homo sapiens
  misc_feature (64)..(64): n includes a, c, g, or t, or contains no nucleotide
  misc_feature (101)..(101): n includes a, c, g, or t, or contains no nucleotide
  misc_feature (136)..(136): n includes a, c, g, or t, or contains no nucleotide
  misc_feature (145)..(145): n includes a, c, g, or t, or contains no nucleotide
  misc_feature (196)..(196): n includes a, c, g, or t, or contains no nucleotide
gagctttcctgtccattcccagcatccagctcctattctagtgcctcttccctgcagggcaggnaccccttgggaaatcgaggaggtgggacgggctgggncctgtgtcccaggtttcacagggctcagggttatnctcccgctngaatctggacgtgaatctggtaaaaatatcaagtacctgtggaactccctngattctataccctcttccttctttctgcaaggcagaggaataatatttttaaaggttattttgttttagttttaaatagcaaaacacaagctgcatttttatttattttgcataagaaaggtaaatctttttacaaaaaaaagtatagagttggaaactctgggaaaacttacggaaatacacaaatgcttctctgtaatgtgcaatatgctttg

SEQ ID NO: 631 - DNA, 541 bp, Homo sapiens
ctactctgggaaatggtttgtcttcaagatgcaatacttttcttagataaggaaaaacagcataaaaagatacctggtctgccttgtacaagaaaaccgaatattagaggaagaaaatttaaagaaaagctagagaaaaaaaaaattttttaaaaaatacttattagaagcaaactgcccttgcatggaaaactgtttatttttttcagtgaaaaaggaattctgctttcgtgtttttgggaaagcaggaactgagttcattacatctttaatttggcagaaattagcctttctgtgaaccagatgtggtttggggcagatctgtagtaaacaatggtgattttatttatttttactctctggaaaaggagataatacaattccagaaagtgaactcatatttctaaggtaagatcccttttatgcacctagaatatgctatgcacagagcgggtgcttgagttgttgtcgttttttgtttgttttttaaatgtaaactggtaaattttgtgcttatcttcaaggctggcttaagtataaa

SEQ ID NO: 632 - DNA, 47 bp, Homo sapiens
tgtccatcaaggacctcagccagatgaccagtatcacccaaaatgac

SEQ ID NO: 633 - DNA, 447 bp, Homo sapiens
  misc_feature (407)..(421): n includes a, c, g, or t, or contains no nucleotide
gagcgatcacaccatctggcctgaaaccacttccccagcttaggtccctctgttatcctgttggcctcctatgtattggtcaaggcaggcatctctgttctctgaacattcattgcactttcccacctctataccttgcctgtgccttagtgtcctcttttttccagttcacctgtgcgaatccgacccacctcccagagcctggctgaaacgtcactccctgcatccaacatctgatctgctgagatatgtctgatctatctctgctcgctgttctcccgttgtttttgcctctgccatagagctcacctcattttgccttgtatttttgttacctgtgagtgtgtctctccctattagactgtaagcctctcgagggtgaggcctagccttcttgtctttgtaannnnnnnnnnnnnnnactgtgccttgcctattgtaggtgcc

SEQ ID NO: 634 - DNA, 248 bp, Homo sapiens
  misc_feature (183)..(183): n includes a, c, g, or t, or contains no nucleotide
  misc_feature (223)..(223): n includes a, c, g, or t, or contains no nucleotide
gtcagcttggatcattcaccttaacttttcctttagcagccatttccactagtttccattaagtagtgttctataaactttgatccaaagcagaatcaatgtcttttccatctcgtgacttaaagttctgtgactgtgatgcatgtgagtgttccgacttcatctgttcctcttaactacggntgtttcccttaccatggcattcataggatgaaatgaatgnctgcccagaatgagaatttgtccag

SEQ ID NO: 635 - DNA, 532 bp, Homo sapiens
  misc_feature (115)..(115): n includes a, c, g, or t, or contains no nucleotide
  misc_feature (131)..(131): n includes a, c, g, or t, or contains no nucleotide
  misc_feature (149)..(149): n includes a, c, g, or t, or contains no nucleotide
  misc_feature (151)..(151): n includes a, c, g, or t, or contains no nucleotide
  misc_feature (155)..(155): n includes a, c, g, or t, or contains no nucleotide
  misc_feature (159)..(161): n includes a, c, g, or t, or contains no nucleotide
  misc_feature (163)..(168): n includes a, c, g, or t, or contains no nucleotide
  misc_feature (170)..(170): n includes a, c, g, or t, or contains no nucleotide
  misc_feature (172)..(172): n includes a, c, g, or t, or contains no nucleotide
  misc_feature (175)..(176): n includes a, c, g, or t, or contains no nucleotide
  misc_feature (178)..(182): n includes a, c, g, or t, or contains no nucleotide
  misc_feature (184)..(309): n includes a, c, g, or t, or contains no nucleotide
  misc_feature (392)..(392): n includes a, c, g, or t, or contains no nucleotide
gggctgctgctctactcctttgccgccgccgttgtggtgccctgcctgtcctccgtggtcgctggctatggctcaccagggcagaagggcacggtcatgggtacactgcgcagcntaggtgctctggccanggccgcggggcccctggngnccgnttcnnntnnnnnngntngcnngnnnnncnnnnnnnnnnnnnnnnnnnnnnnnnnnnnnnnnnnnnnnnnnnnnnnnnnnnnnnnnnnnnnnnnnnnnnnnnnnnnnnnnnnnnnnnnnnnnnnnnnnnnnnnnnnnnnnnnnnnnnnnnnnnnnccaggcagagtgggagcctaggtcaggcccctgcccactgcctgacccccaccccccgccagtccagggagaccctgtgggtnggggccggcccctaagcaggaagctcaggcagctcctccagacttacttactccttcagtgactccgagctgcagcactccaaggctgtcagggcttctgtttgttttttaaactatgcaccaggtttctgatgatgaaa

SEQ ID NO: 636 - DNA, 514 bp, Homo sapiens
  misc_feature (125)..(125): n includes a, c, g, or t, or contains no nucleotide
  misc_feature (128)..(128): n includes a, c, g, or t, or contains no nucleotide
  misc_feature (212)..(229): n includes a, c, g, or t, or contains no nucleotide
  misc_feature (252)..(252): n includes a, c, g, or t, or contains no nucleotide
  misc_feature (259)..(259): n includes a, c, g, or t, or contains no nucleotide
  misc_feature (262)..(335): n includes a, c, g, or t, or contains no nucleotide
  misc_feature (343)..(343): n includes a, c, g, or t, or contains no nucleotide
actctaggtgataggacttacgcatccccaccttttggggtaaggggagtgctgccctgccataatccccaagcccagcccgggcctgtctgggattccccacttgtgcctggggtccctctggnatnttctttgtcatgtacagactccctgggatcctcatgttttgggtgacaggacctatggaccactatactcggggaggcagggtnnnnnnnnnnnnnnnnnnccaagagcttctctgggattttnttgtganatnnnnnnnnnnnnnnnnnnnnnnnnnnnnnnnnnnnnnnnnnnnnnnnnnnnnnnnnnnnnnnnnnnnnnnnnnnggggcccntgctggcaaccctgagccctgtccaaggttccctcttgtcagatctgagatttcctagttatgtctggggccctctgggagctgttatcatctcagatctcttcgcccatctatggctgtgttgtcacatctgtcccctcatttttgagatcccccaattctctggaacta

SEQ ID NO: 637 - DNA, 441 bp, Homo sapiens
  misc_feature (52)..(52): n includes a, c, g, or t, or contains no nucleotide
  misc_feature (79)..(79): n includes a, c, g, or t, or contains no nucleotide
  misc_feature (173)..(188): n includes a, c, g, or t, or contains no nucleotide
  misc_feature (202)..(202): n includes a, c, g, or t, or contains no nucleotide
  misc_feature (212)..(212): n includes a, c, g, or t, or contains no nucleotide
  misc_feature (239)..(239): n includes a, c, g, or t, or contains no nucleotide
  misc_feature (285)..(285): n includes a, c, g, or t, or contains no nucleotide
  misc_feature (305)..(305): n includes a, c, g, or t, or contains no nucleotide
  misc_feature (348)..(348): n includes a, c, g, or t, or contains no nucleotide
tcggtcgtcccgaatccgggttcatccgacaccagccgcctccaccatgccnccgaagttcgaccccaacgagatcaangtcgtatacctgaggtgcaccggaggtgaagtcggtgccacttctgccctggcccccaagatcggccccctgggtctgtctccaaaaaaagttnnnnnnnnnnnnnnnnaggcaacgggtgantggaagggcntgaggattacagtgaaactgaccattnagaacagacaggcccagattgaggtggtgccttctgcctctgcccngatcatcaaagccctcaagnaaccaccaagagacagaaagaaacagaaaaacattaaacacantgggaatatcacttttgatgagattgtcaacattgctcgacagatgcggcaccgatccttagccagagaactctctggaaccattaaagagat

SEQ ID NO: 638 - DNA, 554 bp, Homo sapiens
  misc_feature (128)..(172): n includes a, c, g, or t, or contains no nucleotide
  misc_feature (466)..(496): n includes a, c, g, or t, or contains no nucleotide
cgcatatggtttgtcgggcgccgattcctacaaagatgctgtccggaaagccatgtttgcccggttcactgagatggagtgagagagagagagagagagagatgacaaggagcacaagaagtggtccnnnnnnnnnnnnnnnnnnnnnnnnnnnnnnnnnnnnnnnnnnnnnccttgtgctgttaatagatcttagggtgaaccacttcattctgcagggttctccctcccaccttaaagaagttccccttatgtgggttgcctggtgaatggccttccttcccgccagagggcttgtgaacagaccggagaggacagtggattgtttatactccagtgtacatagtgtaatgtagcgtgtttacatgtgtagcctatgttgtggtccatcagcccctcacattcctaggggtttgagatgctgtaggtggtatgtgacaccaaagccacctctgtcatttgttgnnnnnnnnnnnnnnnnnnnnnnnnnnnnnnntatttgtatattacacatttgtacagaattttggaagattttcagtctagttgccaaa

SEQ ID NO: 639 - DNA, 236 bp, Homo sapiens
ttagcatgtaactcgcttaaagttgaggtttccccctaaaatctacaagtttccctctttcagtcatgagccctacacatttgcatgaaagatgtacattatatattgtgaaacgaaaaaagcaattttcaaatggtatatattgtatcccatttttgtaaaaaaaatgtatatttatatattaatatgcaaagaaaaagctaaaagtatagacttcaaaggcataacagtggttg

SEQ ID NO: 640 - DNA, 503 bp, Homo sapiens
  misc_feature (28)..(28): n includes a, c, g, or t, or contains no nucleotide
  misc_feature (465)..(469): n includes a, c, g, or t, or contains no nucleotide
  misc_feature (472)..(472): n includes a, c, g, or t, or contains no nucleotide
acattcaaagggacgccagccatccttngtgacaggggccccaacttagcatcccttcccttccgttaggaaggagatgaccggaagcaaccccttcacagacacgagcacatcggcaaaccctatgaaagtggaattttctaacaaaataaacttgcttgtttgatctgttttctgtaacttttgctaaatactttatacatttttcatgttaaagagccgtgtctcccgccagcactcctcaccccggtatgaatgtgtttcctccacattgtatatccttccaccctctggctgcctagatcagtaaataaaattgatgtaatataatttataagtaacactgttgaaaccctgatcccagtggaggctgtaacccacctgcccccgcaccacccccctgacccctgttaccgcatttgtgtgtattaatgctgaagaattaaatgtttaaagagtttaaannnnnaangcgtttgctatatacagttgtcctgcattat

SEQ ID NO: 641 - DNA, 302 bp, Homo sapiens
ggcagcatcctctcttcagcaggcatcattgaagctgttcgaaatggcatacaaaaagatggcatctgagcgagaaggctctggaagttctggcactggggaacaaaaggaagatcaaaaggaggaaaaacagtaataatagcagaaattttgaagccagaaggacaacatatgaagcttaggagtgaagagacttcctgagcagaaatgggcgaacttcagtctttttactgtgtttttgcagtattctatatataatttccttaatttgtaaatttagtgaccattagctagtgatcatt

SEQ ID NO: 642 - DNA, 485 bp, Homo sapiens
cttcccgcgcatgctcatgaagctggtgagcctgcgcacgctgagctctgtgcactcggagcaggtcttcgccttgcggctccaggacaagaagctgccgcctctgctgtcggagatctgggacgtccacgagtgaggggctggccacccagccccacagccttgcctgaccaccctccagcagatagacgccggcaccccttcctcttcctagggtggaaggggccctgggcgagcctgtagacctatcggctctcatcccttgggataagccccagtccaggtccaggaggctccctccctgcccagcgagtcttccagaaggggtgaaagggttgcaggtcccgaccactgacccttcccggctgccctccctccccagcttacacctcaagcccagcacgcagcgtaccttgaacagagggaggggaggacccatggctctccccccctagcccgggagaccaggggccttcctcttcctc

SEQ ID NO: 643 - DNA, 43 bp, Homo sapiens
agcggagcgatcagtcctctgatcaccttgagaaccctggcag

SEQ ID NO: 644 - DNA, 487 bp, Homo sapiens
gctatcccatattggagaatccagagattttgaggaaaacagctgatgactttcttaatagaattgcattgacggatgcttaccttttatacacaccttcccaaattgccctgactgccattttatctagtgcctccagggctggaattactatggaaagttatttatcagagagtctgatgctgaaagagaacagaacttgcctgtcacagttactagatataatgaaaagcatgagaaacttagtaaagaagtatgaaccacccagatctgaagaagttgctgttctgaaacagaagttggagcgatgtcattctgctgagcttgcacttaacgtaatcacgaagaagaggaaaggctatgaagatgatgattacgtctcaaagaaatccaaacatgaggaggaagaatggactgatgacgacctggtagaatctctctaaccatttgaagttgatttctcaatgctaactaatcaagagaagta

SEQ ID NO: 645 - DNA, 581 bp, Homo sapiens
  misc_feature (39)..(76): n includes a, c, g, or t, or contains no nucleotide
  misc_feature (124)..(138): n includes a, c, g, or t, or contains no nucleotide
  misc_feature (153)..(155): n includes a, c, g, or t, or contains no nucleotide
  misc_feature (192)..(208): n includes a, c, g, or t, or contains no nucleotide
  misc_feature (248)..(275): n includes a, c, g, or t, or contains no nucleotide
  misc_feature (282)..(282): n includes a, c, g, or t, or contains no nucleotide
  misc_feature (369)..(394): n includes a, c, g, or t, or contains no nucleotide
tggtggagcagcagacagagaacctggagctgcacaccnnnnnnnnnnnnnnnnnnnnnnnnnnnnnnnnnnnnnngtgcagagacctggcctcctccctgcgcctcctgcgggccgactgccnnnnnnnnnnnnnnnagctgctccggcggnnncaggagaggctgcttgccatcctgcagcattctgccnnnnnnnnnnnnnnnnntcttcagagtccatcagtagaggcctgggaggcaaaaggnnnnnnnnnnnnnnnnnnnnnnnnnnnngcctccntcagggccagaggcagaagaggaggaggaagacgatgaggatgatgtgcccgagtggcagcaggatgagtttgatgaggagctggannnnnnnnnnnnnnnnnnnnnnnnnnctgagaacctggaccaagagactttcttctttggtgatgaggaagaggatgaagatgaggcctatgactgagggggcagatgcaggaaacacctagagcagccccagagtcacggggctgagggggcgggagctgcccctgtcatagggagggggattcccagcgtctgtagtgcttcctgtttgct

SEQ ID NO: 646 - DNA, 437 bp, Homo sapiens
  misc_feature (33)..(48): n includes a, c, g, or t, or contains no nucleotide
gaagccattaaaagccactggttattttatttnnnnnnnnnnnnnnnncgaggtttttatttgttcggtattgtttttttacactgtggtacatataagcaactttaataggtgataaatgtacagtagttagatttcacctgcatatacatttttccattttatgctctatgatctgaacaaaagctttttgaattgtataagatttatgtctactgtaaacattgcttaatttttttgctcttgatttaaaaaaaagttttgttgaaagcgctattgaatattgcaatctatatagtgtattggatggcttcttttgtcaccctgatctcctatgttaccaatgtgtatcgtctccttctccctaaagtgtacttaatctttgctttctttgcacaatgtctttggttgcaagtcataagcctgaggcaaataaa

SEQ ID NO: 647 - DNA, 579 bp, Homo sapiens
  misc_feature (203)..(221): n includes a, c, g, or t, or contains no nucleotide
gaagcaaaactcctttattagaattactgcacatgtgtatggggaaaatagttctgaaaggctagaatgatacaagtgagcaaaagttggtcagcttggctatggagtggtggcaataatctctaaacattccaaaagaccatgagctgaacctaaactcccttggaatctgaacaaaggaatataaaattgccatttgaaannnnnnnnnnnnnnnnnnncctcagagatagatcagccagtggcccaaagccatttcaagtacagaaattatagagactacagctaaataaatttgaacattaaatataattttaccactttttgtctttataagcatatttgtaaactcagaactgagcagaagtgactttactttctcaagtttgatactgagttgactgttcccttatccctcacccttccccttccctttcctaaggcaatagtgcacaacttaggttatttttgcttccgaatttgaatgaaaaacttaatgccatggatttttttcttttgcaagacacctgtttatcatcttgtttaaatgtaaatgtccccttatgcttttgaaataaa

SEQ ID NO: 648 - DNA, 593 bp, Homo sapiens
  misc_feature (47)..(48): n includes a, c, g, or t, or contains no nucleotide
  misc_feature (99)..(116): n includes a, c, g, or t, or contains no nucleotide
  misc_feature (168)..(170): n includes a, c, g, or t, or contains no nucleotide
  misc_feature (174)..(212): n includes a, c, g, or t, or contains no nucleotide
  misc_feature (242)..(242): n includes a, c, g, or t, or contains no nucleotide
  misc_feature (433)..(453): n includes a, c, g, or t, or contains no nucleotide
ttgatccctgttacccagagaatatatacattctttatcttgacatnnaaggcatttctatcacatatttgatagttggtgttcaaaaaaacactagtnnnnnnnnnnnnnnnnnnctcaggcttgaaatgcattattttgaatgtgaagtaaatactgtacctttannngacnnnnnnnnnnnnnnnnnnnnnnnnnnnnnnnnnnnnnnntaagctaaaacacctgcttttaacaatggntaccatacaaccactactccattaactccacccacctcctgcacccctccccacacacacaaaatgaaccacgttctttgtatgggcccaatgagctgtcaagctgccctgtgttcatttcatttggaattgccccctctggttcctctgtatactactgcttcatctctaaagacagctcatcctcctcnnnnnnnnnnnnnnnnnnnnngcacttcatctgctccttcatcacaagtccagttttctgccactagtctgaatttcatgagaagatgccgatttggttcctgtgggtcctcagcactattcagtacagtgcttgatgcacagcaggcactcagaaaatac

SEQ ID NO: 649 - DNA, 329 bp, Homo sapiens
  misc_feature (224)..(224): n includes a, c, g, or t, or contains no nucleotide
  misc_feature (263)..(263): n includes a, c, g, or t, or contains no nucleotide
aagacctcttaatggcatagcaccaataaaaaaatgactcctagttgtgtttggaaagggagagaagagatgtctgaggaaggtcatgttctttcagcttatggcatttcctagagttttgttgaagcaagaagaaaaactcagagaatataaaatcaacttttaaaattgtgtgctctcttcttcacgtaggctcctgttaaaaacaaagtgcagtcagattntaagccctgttcagagacttcgtggatcacagctgcagntcaccgccacatcacaggatccgttaacgttaatacccaatactctgtcagccactgtaggctcta

SEQ ID NO: 650 - DNA, 496 bp, Homo sapiens
  misc_feature (74)..(79): n includes a, c, g, or t, or contains no nucleotide
  misc_feature (82)..(83): n includes a, c, g, or t, or contains no nucleotide
  misc_feature (85)..(86): n includes a, c, g, or t, or contains no nucleotide
  misc_feature (89)..(89): n includes a, c, g, or t, or contains no nucleotide
  misc_feature (114)..(114): n includes a, c, g, or t, or contains no nucleotide
  misc_feature (117)..(118): n includes a, c, g, or t, or contains no nucleotide
  misc_feature (146)..(146): n includes a, c, g, or t, or contains no nucleotide
  misc_feature (468)..(469): n includes a, c, g, or t, or contains no nucleotide
gctccactcacctataggagattatttttaagtggaatccatttaaactcaaaacagttatgaaaagcaaggtnnnnnngannannaanctgtgtctgtattcattttattccnganngagctacgtcttaggtgaaagttatganccaaccagattaaactctacccacatcctgcattttaaggtctaagtttaactggtcaacatttaaatggattggagctattagtacatcaagtgtgatgggctttgttcccaactcttttacatctccctaccccttcaacctttggcctttcagcccttctttctctcttccatattctttggtttgtatgtggtttctcagttaatacatagctaatagctcttatttttcttatgtttttaaccgcttaggtctatttggatgtaagggtgaaaattcatttgatggaaatacttgtgtatatttaaagacccaattnntcctctggagcttgtactttcaagaat

SEQ ID NO: 651 - DNA, 549 bp, Homo sapiens
  misc_feature (26)..(49): n includes a, c, g, or t, or contains no nucleotide
  misc_feature (432)..(449): n includes a, c, g, or t, or contains no nucleotide
cacatatgacatcagtcagttgtttnnnnnnnnnnnnnnnnnnnnnnnncctcagctgcctggtttaccgagctgatacccagacataccagccttataacaaagactggattaaagagaagatctacgtgctccttcgtcggcaggcccaacaggctgggaaataattgtgttggaagcactgggggggttggggtgggcttggaacacaggtgtgtacagcgtgctgtagtggaagttttgtatcatagtaatcctgtttccactttgttatactctagccaagattgactgtattagatgaaatgtgaggatcttgttcaatcggaaacccccgttacctcctctttttctttctctttctttttttttttttacttaaacatttttatgatgatttagatggaagttgttcttcgtcacttaatgttnnnnnnnnnnnnnnnnnngttcatatctactttataacattcacatactaacccttcttcaagatggggtggggggtggaaatgcagtttagccatgtcctcaagataaagtcttggt

SEQ ID NO: 652 - DNA, 438 bp, Homo sapiens
  misc_feature (322)..(322): n includes a, c, g, or t, or contains no nucleotide
ccagggatgctctttgtaaatatcggatgggtgtgggagtgaggggttacctccctcgccccaaggttccagaggccctaggcgggatgggctcgctgaacctcgaggaactccaggacgaggaggacatgggacttgcgtggacagtcagggttcacttgggctctctctagctccccaattctgcctgcctcctccctcccagctgcactttaaccctagaaggtggggacctggggggagggacagggcaggcgggcccatgaagaaagcccctcgttgcccagcactgtctgcgtctgctcttctgtgcccagggtgnctgccagcccactgcctcctgcctggggtggcctggccctcctggctgttgcgacgcgggcttctggagcttgtcaccattggacagtctccctgatggaccctcagtcttctcat

SEQ ID NO: 653 - DNA, 453 bp, Homo sapiens
aactgcttattcttccaactgtggaacacaaggggagtctcagcatctggtccttgatttggttttttcattgtttccttggcccctgtatccagatattggacttactgctatacttgtgatactgggtagcccagactttgaaggtgctttgtgaggtttggactcatgctgagaaacccacaggaaagcactgtccaggtaggattagaggcttcccacttaaaactatttctgagaaatcttaggttttatcactgctatggtttcccatatttacttgggactgttctgactttctttttccagcccttagcttgggttagaaaagtggacatgtaagtgaacaatgcattacttctaccttaggtttaggagtaatatacccggaaatctaagctcatggaaacatgttttccatttttgcttggagtccgtttttctagttgtaca

SEQ ID NO: 654 - DNA, 342 bp, Homo sapiens
  misc_feature (193)..(194): n includes a, c, g, or t, or contains no nucleotide
  misc_feature (196)..(196): n includes a, c, g, or t, or contains no nucleotide
tgtttcccagcctttccacattggctttcccatgtagtccttagtgtgtctgctcctcctctctctcctcatcacagttcccagcccccaccttcaactgaactcaacaaaatcttcaacttcatacagtagtcacattgttagtaataacactggcatttttattttgataaaatagaccgtttaaattttnnanattctaccttatattttttgaattatatactaaagcaaataagtagtgatgtaatgtcattggggaccaagatttttagtgtaaatgaaaaaagataacaaatataaactcaagtaaacaccctgtagtctttcacatgaattgga

SEQ ID NO: 655 - DNA, 177 bp, Homo sapiens
atctttgtggatggtgtctcctttactaaataagaaaataacaaagcccttattctctttttttcttgtcctcattcttgccttgagttccagttcctctttggtgtacagacttcttggtacccagtcacctctgtcttcagcaccctcataagtcgtcactaatacacagttttg

SEQ ID NO: 656 - DNA, 433 bp, Homo sapiens
  misc_feature (42)..(56): n includes a, c, g, or t, or contains no nucleotide
  misc_feature (119)..(119): n includes a, c, g, or t, or contains no nucleotide
  misc_feature (130)..(130): n includes a, c, g, or t, or contains no nucleotide
  misc_feature (154)..(154): n includes a, c, g, or t, or contains no nucleotide
gtctattatcccaacagaagagaaaatatttttatatttaannnnnnnnnnnnnnngtactacaaaattgtagtacttttttttgttttcttttttaaagaaatggaaaatgtttactnattacagggancctcaacactgccctcccatacanggctggataaaactgtttttaagtcagtgattttagactgacctccatttaaattatgtttatatatgaactttactctgacctgtgatcatgtttcaggaaggaatgaaagagagttctttcttaataaagaaaaacactcaaggactttgttcatttccaaagctacttgtttacattgtacactgcgaccaccttgccgcttttcatcacaagcttgaatatttaaattctgtacttatatctgtaaaatagccaggaatttcctgtttgtgatct

SEQ ID NO: 657 - DNA, 380 bp, Homo sapiens
  misc_feature (49)..(72): n includes a, c, g, or t, or contains no nucleotide
  misc_feature (119)..(135): n includes a, c, g, or t, or contains no nucleotide
  misc_feature (160)..(160): n includes a, c, g, or t, or contains no nucleotide
  misc_feature (163)..(163): n includes a, c, g, or t, or contains no nucleotide
  misc_feature (208)..(310): n includes a, c, g, or t, or contains no nucleotide
cttctttcgccctatcattggagatgttgacatcgctggccttcttggnnnnnnnnnnnnnnnnnnnnnnnntgttccagcccaggcagagatcaggtgggcagaggctggcagtgctnnnnnnnnnnnnnnnnnccccagaggtgacccaatgctcctnganggggcaagcctgtatagacagcacttggctccttaggaacagctnnnnnnnnnnnnnnnnnnnnnnnnnnnnnnnnnnnnnnnnnnnnnnnnnnnnnnnnnnnnnnnnnnnnnnnnnnnnnnnnnnnnnnnnnnnnnnnnnnnnnnncctgtcccttcttgggatgagaatgaaagcttaggctgcttattggaccagaagtcctatcgactttata

SEQ ID NO: 658 - DNA, 538 bp, Homo sapiens
  misc_feature (122)..(133): n includes a, c, g, or t, or contains no nucleotide
  misc_feature (142)..(142): n includes a, c, g, or t, or contains no nucleotide
  misc_feature (347)..(370): n includes a, c, g, or t, or contains no nucleotide
ctagttccttttcagtattggattggatttgagatttgattaacctagtactcaggttcagatgctcgcctctttgcaattttaacactcattcgacaataaagtcagtaaaaaacacaaannnnnnnnnnnnactctcttnttactttagtgtctctccactgcactcagaataaagtacaattttattatttgtgatctggcttgctcttcccctctcagttcattactcaccattttctagtcctcagctttagtagcattgagatcctctatcctccatcctccctagcatttctcctattttaattggtctaacacctatctctgaagaatcaaattttaannnnnnnnnnnnnnnnnnnnnnnncacggctgtgtcagacacccctatccactccccacccccattgtcttctttagctcctttagcataacacttttgaatacactatattgtaattgcctaatttctttgtttcttgcagtagtcctatacatttcttggaaggcagggattttggctgccctggtcctt

SEQ ID NO: 659 - DNA, 416 bp, Homo sapiens
  misc_feature (26)..(26): n includes a, c, g, or t, or contains no nucleotide
  misc_feature (34)..(34): n includes a, c, g, or t, or contains no nucleotide
  misc_feature (45)..(45): n includes a, c, g, or t, or contains no nucleotide
  misc_feature (103)..(126): n includes a, c, g, or t, or contains no nucleotide
  misc_feature (152)..(169): n includes a, c, g, or t, or contains no nucleotide
  misc_feature (192)..(192): n includes a, c, g, or t, or contains no nucleotide
  misc_feature (246)..(246): n includes a, c, g, or t, or contains no nucleotide
aaatttgtggactccacgttctatcntcttttgnacttgatcacnttttttgacgagtatcatagtggtcatattgatagagcttttgatatcattgagcgcnnnnnnnnnnnnnnnnnnnnnnnnggaaagtgtggaagagagagtggctnnnnnnnnnnnnnnnnnngatgaaatcaggcacaacctctncagaagtgcttcttgccaccatgaacatcttgttcacacagtttaagaggctcnaaggggacaagtccatcctcgtcatccaggccccagcgagtcatcgaggaccgcgactctcaactccgaagtcaagcccgcactctgattacctttgctggaatgataccataccgaacgtctggggacaccaatgcgaggctggtgcagatggaggtcctcatgaatta

SEQ ID NO: 660 - DNA, 450 bp, Homo sapiens
  misc_feature (26)..(26): n includes a, c, g, or t, or contains no nucleotide
  misc_feature (86)..(86): n includes a, c, g, or t, or contains no nucleotide
  misc_feature (109)..(109): n includes a, c, g, or t, or contains no nucleotide
  misc_feature (168)..(190): n includes a, c, g, or t, or contains no nucleotide
cgtggccgggctctactacccgaagnatagtgcccgaagttgctgcttggcatagatgagcctcagcttccagggcactgtgggcntgttggtctactagggccctgangtccacctggccttcctgttcttcactcccttcagccacacgcttcatggccttgagtnnnnnnnnnnnnnnnnnnnnnnnccaatcaccagtgaccagctagactgtgattttgatagcgtcattcagaagaaggcgtccaaggagctgaaggtggtgaaatttgtcctgcaggtccctcgggagatcctggagctggagcatgagtgtctgacaatcagaagcatcatgtccaatgtccagatggccagaatgaatgtgatagttcagaccaatgccttccactgctcctttatgactgcacttctagccagtagctctgcacaagttagctctgtaga

SEQ ID NO: 661 - DNA, 95 bp, Homo sapiens
aggagtctgctactagtcttatcagctcttaaaaacagaaactcatctgtccaagttcgtggcagaaaggaacgtccttgtgaagacctttatct

SEQ ID NO: 662 - DNA, 492 bp, Homo sapiens
aaacgtattaagagccagagactaaacagagctgtgacatgtatgctaaggaaagagaaagaagcagcagccagcgaaatagaagcagtttctgttgccatggagaaagaatttgagctacttgataaggcaaaacgaaaaacccagaagagaggcataacaaataccttagaagagtcatcaagcctgaaaagaaagaggctttcagattctaaacgaaagaatacatgcggtggatttttgggggagacctgcctctcagaatcatctgatggatcttcaagtgaagatgctgaaagttcatctttaatgaatgtacaaaggagaacagctgcgaaagagccaaaaaccagtgcttcagattcgcagaactcagtgaaggaagctcccgtgaagaatggaggtgcgaccaccagcagctctagtgatagtgatgacgatggagggaaagagaagatggtcctcgtgaccgccagatctgtgtttgggaag

SEQ ID NO: 663 - DNA, 347 bp, Homo sapiens
  misc_feature (133)..(149): n includes a, c, g, or t, or contains no nucleotide
gctctatattacttgcttgagccttaatcaatgtggttttattcaatggtttgttctttgaatggttgcaaaaactgtagataatcttactgaggactgtacaaacatgaaggtgtggtatcaaacttcaggnnnnnnnnnnnnnnnnnattataaacattcatttcacaactagattgtataaggatattagctgtgatgagactcactgcattattttttttagtgaattttatgaaatccccgttccattcaacaggcacatgtttaaaagagctttgtcgttggtgttaatgggggaatgtgttccttcattgtatttgggccttttgtattgcactcttgat

SEQ ID NO: 664 - DNA, 472 bp, Homo sapiens
  misc_feature (31)..(31): n includes a, c, g, or t, or contains no nucleotide
  misc_feature (49)..(49): n includes a, c, g, or t, or contains no nucleotide
  misc_feature (59)..(59): n includes a, c, g, or t, or contains no nucleotide
  misc_feature (61)..(63): n includes a, c, g, or t, or contains no nucleotide
  misc_feature (68)..(75): n includes a, c, g, or t, or contains no nucleotide
  misc_feature (77)..(77): n includes a, c, g, or t, or contains no nucleotide
  misc_feature (80)..(81): n includes a, c, g, or t, or contains no nucleotide
  misc_feature (83)..(87): n includes a, c, g, or t, or contains no nucleotide
  misc_feature (89)..(180): n includes a, c, g, or t, or contains no nucleotide
  misc_feature (257)..(276): n includes a, c, g, or t, or contains no nucleotide
  misc_feature (362)..(362): n includes a, c, g, or t, or contains no nucleotide
  misc_feature (414)..(415): n includes a, c, g, or t, or contains no nucleotide
gaattctaccagtcccgaggtttggaccggntcacccagcccactgggnaagagccagnannnagcannnnnnnncntcnncnnnnncnnnnnnnnnnnnnnnnnnnnnnnnnnnnnnnnnnnnnnnnnnnnnnnnnnnnnnnnnnnnnnnnnnnnnnnnnnnnnnnnnnnnnnnnnnnngaataaaagcgtcctgcagaacaagtatgtccgatgttctgttagagctgaggtacgccatctccggagggtcctgnnnnnnnnnnnnnnnnnnnnccctcagcatgtgcagctcctttttgacaatgaagttctccctgatcacatgacaatgaagcagatatggctctcccgctggttcngcaagccatcccctttgcttttacaatacagtgtgaaagagaagaggaggtnngccaagcccccaccccatcccactccccttccctccccagatatttatgtgaaatga

SEQ ID NO: 665 - DNA, 185 bp, Homo sapiens
  misc_feature (35)..(35): n includes a, c, g, or t, or contains no nucleotide
  misc_feature (41)..(41): n includes a, c, g, or t, or contains no nucleotide
  misc_feature (46)..(46): n includes a, c, g, or t, or contains no nucleotide
  misc_feature (59)..(59): n includes a, c, g, or t, or contains no nucleotide
  misc_feature (87)..(87): n includes a, c, g, or t, or contains no nucleotide
  misc_feature (98)..(98): n includes a, c, g, or t, or contains no nucleotide
  misc_feature (147)..(147): n includes a, c, g, or t, or contains no nucleotide
ccctggcactgaaccagacgcaacactgcaagcanctgganggtcnggtgtctgcacangtgcagctgtgccgcagcaacctggagntcatgcacacngtggtgcacgccgcccgcgaagtcatgaaggcctgtcgccgggcctttnccgacatgcgctggaactgctcctccattgagctcgcc

SEQ ID NO: 666 - DNA, 437 bp, Homo sapiens
gcaatccaagagacttgaataataataattcaacaacagctttatttttatgtggagaagggtcttgcatacaatagtttaaaaaagacaaaaaaaacctttgcttaaattcatgctgttctaaaaactagatcgattgtacatcttcacaaattctagttaacaattttattttgtattcttgcagttttaagtggatgctaattttaggggcataagccttttatggccctcttgcagatcttctgaactatgcacatttgtgctttttttgtaagtttggaccaacttttatgtaacaaacagcccctccccacctccagttttacaacaatcagaaagggcactgatttatttggtatttttctttttacaaagctacctttagtcaaaggtcactgtcagtctttgcacctgctttcagtgttattgtgaaa

SEQ ID NO: 667 - DNA, 305 bp, Homo sapiens
  misc_feature (213)..(213): n includes a, c, g, or t, or contains no nucleotide
accataacagctaaggggacctgggagatgatggctcatttccacccagccccaggatttccagagcgcacatccacaggcctggacctgggatgaagatgaatgaagaacatggatgcacgtggatgtagtttggctcaggtgtccctgcagttggcaaggagtcagtactcagtccctgagtgtggctgaaatttgaggtcctggctgagnccaaggagtaatggaccagatctacctcagtattcaagttcagtggggacaccagtggcttcaaacttcctggtttcatgatatcttgagac

SEQ ID NO: 668 - DNA, 542 bp, Homo sapiens
  misc_feature (35)..(35): n includes a, c, g, or t, or contains no nucleotide
  misc_feature (59)..(60): n includes a, c, g, or t, or contains no nucleotide
  misc_feature (95)..(95): n includes a, c, g, or t, or contains no nucleotide
  misc_feature (115)..(144): n includes a, c, g, or t, or contains no nucleotide
  misc_feature (334)..(358): n includes a, c, g, or t, or contains no nucleotide
tcccctgaaggaaagtttgcactggattttattgnagccccatctccccagcgggcagnngggcggagcctgtatatatgtatatactcagtgcntcagttcagcttcctccacnnnnnnnnnnnnnnnnnnnnnnnnnnnnnngaaaggccaagccaaagtgggccccaccctgcccccgtcgtgctccatccttccctgccggggcctgctggcccctgtaaggtcccgcccccaaagaccctggggccagcggggccgaaagcggagttgggtttgccttattttgctcattggattcaagttcttttgcatagttttcttctaacccctnnnnnnnnnnnnnnnnnnnnnnnnnggacagatttatgcagctattttcatacattccctgttcagagtggggtaggggttctccgccgttacccgatccactccatcccccaccctctgaggggtgagtgtgtctttgcatgtttcctttgctgtggtgggagatagtttgactgaacccccaccttgaccttggtctccaggggtgt

SEQ ID NO: 669 - DNA, 441 bp, Homo sapiens
  misc_feature (354)..(355): n includes a, c, g, or t, or contains no nucleotide
  misc_feature (364)..(370): n includes a, c, g, or t, or contains no nucleotide
  misc_feature (372)..(372): n includes a, c, g, or t, or contains no nucleotide
  misc_feature (383)..(383): n includes a, c, g, or t, or contains no nucleotide
agcaacccctgaatttgacagtctcaccaatttcagaaaatcattaaaaagaaaatattgaaaggaaaatgttttctttttgaagacttctggcttcattttatactactttggcatggactgtatttattttcaaatggctttttcgtttttgtttttcttggcaagttttattgtgagtttttctaattatgaagcaaaatttcttttctccaccatgctttatgtgatagtatttaaaattgatgtgagttattatgtcaaaaaaactgatctattaaagaagtaattggcctttctgagctgatttttccatcttttgtaattatctttattaaaaaattgtacttggannaaaaaaaannnnnnnantactacaatangaagtcttgtttcagtggctaatgacatcatttctgtagacttacaatacactctagg

SEQ ID NO: 670 - DNA, 414 bp, Homo sapiens
  misc_feature (92)..(139): n includes a, c, g, or t, or contains no nucleotide
  misc_feature (188)..(188): n includes a, c, g, or t, or contains no nucleotide
  misc_feature (192)..(193): n includes a, c, g, or t, or contains no nucleotide
  misc_feature (196)..(333): n includes a, c, g, or t, or contains no nucleotide
tccctggcatgtgacaacccagggctgcctgaaaatggataccaaatcctgtacaagcgactctacctgccaggagagtccctcaccttcannnnnnnnnnnnnnnnnnnnnnnnnnnnnnnnnnnnnnnnnnnnnnnntcctgggacagccatcccactggaacgggcccctgcccgtgtgtaaagntaannaannnnnnnnnnnnnnnnnnnnnnnnnnnnnnnnnnnnnnnnnnnnnnnnnnnnnnnnnnnnnnnnnnnnnnnnnnnnnnnnnnnnnnnnnnnnnnnnnnnnnnnnnnnnnnnnnnnnnnnnnnnnnnnnnnnnnnnnnntgtcgctactattccaacctccgcctgcctctgatgtactcccacccctacagccagatcaccgtggaaaccgagtttgac

SEQ ID NO: 671 - DNA, 508 bp, Homo sapiens
  misc_feature (26)..(26): n includes a, c, g, or t, or contains no nucleotide
  misc_feature (40)..(40): n includes a, c, g, or t, or contains no nucleotide
  misc_feature (43)..(43): n includes a, c, g, or t, or contains no nucleotide
  misc_feature (63)..(63): n includes a, c, g, or t, or contains no nucleotide
  misc_feature (65)..(65): n includes a, c, g, or t, or contains no nucleotide
  misc_feature (71)..(71): n includes a, c, g, or t, or contains no nucleotide
  misc_feature (141)..(145): n includes a, c, g, or t, or contains no nucleotide
  misc_feature (147)..(151): n includes a, c, g, or t, or contains no nucleotide
  misc_feature (153)..(153): n includes a, c, g, or t, or contains no nucleotide
  misc_feature (155)..(160): n includes a, c, g, or t, or contains no nucleotide
  misc_feature (162)..(167): n includes a, c, g, or t, or contains no nucleotide
  misc_feature (169)..(169): n includes a, c, g, or t, or contains no nucleotide
  misc_feature (171)..(171): n includes a, c, g, or t, or contains no nucleotide
  misc_feature (173)..(173): n includes a, c, g, or t, or contains no nucleotide
  misc_feature (177)..(245): n includes a, c, g, or t, or contains no nucleotide
  misc_feature (247)..(247): n includes a, c, g, or t, or contains no nucleotide
  misc_feature (249)..(249): n includes a, c, g, or t, or contains no nucleotide
  misc_feature (253)..(254): n includes a, c, g, or t, or contains no nucleotide
  misc_feature (256)..(262): n includes a, c, g, or t, or contains no nucleotide
  misc_feature (265)..(287): n includes a, c, g, or t, or contains no nucleotide
  misc_feature (289)..(292): n includes a, c, g, or t, or contains no nucleotide
  misc_feature (294)..(295): n includes a, c, g, or t, or contains no nucleotide
  misc_feature (298)..(298): n includes a, c, g, or t, or contains no nucleotide
  misc_feature (300)..(301): n includes a, c, g, or t, or contains no nucleotide
  misc_feature (308)..(310): n includes a, c, g, or t, or contains no nucleotide
  misc_feature (312)..(313): n includes a, c, g, or t, or contains no nucleotide
  misc_feature (346)..(346): n includes a, c, g, or t, or contains no nucleotide
  misc_feature (362)..(362): n includes a, c, g, or t, or contains no nucleotide
  misc_feature (366)..(366): n includes a, c, g, or t, or contains no nucleotide
  misc_feature (369)..(370): n includes a, c, g, or t, or contains no nucleotide
  misc_feature (379)..(379): n includes a, c, g, or t, or contains no nucleotide
  misc_feature (381)..(381): n includes a, c, g, or t, or contains no nucleotide
  misc_feature (386)..(386): n includes a, c, g, or t, or contains no nucleotide
  misc_feature (392)..(392): n includes a, c, g, or t, or contains no nucleotide
  misc_feature (403)..(403): n includes a, c, g, or t, or contains no nucleotide
  misc_feature (451)..(451): n includes a, c, g, or t, or contains no nucleotide
  misc_feature (477)..(478): n includes a, c, g, or t, or contains no nucleotide
  misc_feature (483)..(483): n includes a, c, g, or t, or contains no nucleotide
tatttttaagcctcatacttgctcantctacagctttttncantcattattgtataattatancngaagcnctcgttcattaattttagtcctgtgtagcagaattcaattacgggaactaccataatttatctgttctcnnnnngnnnnnangnnnnnntnnnnnntntntntatnnnnnnnnnnnnnnnnnnnnnnnnnnnnnnnnnnnnnnnnnnnnnnnnnnnnnnnnnnnnnnnnnnnnnananacanntnnnnnnntannnnnnnnnnnnnnnnnnnnnnnannnnanntgngnntttttgnnnannacatgagtatggaatggtgttttattatgactntagtttgcattttccncaantcnngttaaatcntncattntaatgnacattttattntgaagaacctgttcatatcctgtgctcaactttgtattgaattatttntctctgaataatttttaggagttctnntattntagacatcaatcatttgtcagtttt

SEQ ID NO: 672 - DNA, 438 bp, Homo sapiens
  misc_feature (394)..(394): n includes a, c, g, or t, or contains no nucleotide
ctcctgcaaaaaaggcatcttgtccctacatcttctcttctgactttggctacatctcatagtaagttcagagtagttcatgataaattgaaaatataatggtcattgcagaaaatgattgatgttgtaactgtccacccaagtaagaagtgtatctgcctttccatcttttggttttcatttgggcatgtgctattaccagaaacaacaaacttatatttaaaatacccttcatttgacacagtttttaatgagtgatttaatttcctctgtatttgtatgtttagaagactgcctaaaacatgagcactgtacttcataaaggaaactgcgtatgcagattcagtattgtgtatctttggacaattagatggacatttaaaatggaacttcntttatctgacaggatcagctacaatgccctgtgttaaattgttt

SEQ ID NO: 673 - DNA, 372 bp, Homo sapiens
  misc_feature (26)..(26): n includes a, c, g, or t, or contains no nucleotide
  misc_feature (245)..(260): n includes a, c, g, or t, or contains no nucleotide
ccttctatgcaatcatgcctgtctgntaatcttgcattgctttcctctgagctttagtgggtcctagttgcacactggcctttctgtgctgtttttcaatttgcctaataatagcagttaccctgattgtaatttatgtaactttaaacaggatcacactgtaccccctgcctgccttatttgcttactgagcacaggacagaggcaatatacaactctgggttcacacacaagctgagatgagnnnnnnnnnnnnnnnnatattggggaaaatcatagtttgtaggtataattatatagtgcttttctccctcaaagtatttttctagccttgaattcattttatcttcattatccctgtgaagtaggtgg

SEQ ID NO: 674 - DNA, 563 bp, Homo sapiens
  misc_feature (29)..(29): n includes a, c, g, or t, or contains no nucleotide
  misc_feature (36)..(36): n includes a, c, g, or t, or contains no nucleotide
  misc_feature (92)..(92): n includes a, c, g, or t, or contains no nucleotide
  misc_feature (128)..(129): n includes a, c, g, or t, or contains no nucleotide
  misc_feature (278)..(298): n includes a, c, g, or t, or contains no nucleotide
  misc_feature (300)..(300): n includes a, c, g, or t, or contains no nucleotide
  misc_feature (303)..(311): n includes a, c, g, or t, or contains no nucleotide
  misc_feature (314)..(316): n includes a, c, g, or t, or contains no nucleotide
  misc_feature (318)..(322): n includes a, c, g, or t, or contains no nucleotide
  misc_feature (327)..(331): n includes a, c, g, or t, or contains no nucleotide
  misc_feature (333)..(337): n includes a, c, g, or t, or contains no nucleotide
  misc_feature (339)..(343): n includes a, c, g, or t, or contains no nucleotide
  misc_feature (345)..(348): n includes a, c, g, or t, or contains no nucleotide
  misc_feature (350)..(350): n includes a, c, g, or t, or contains no nucleotide
  misc_feature (352)..(357): n includes a, c, g, or t, or contains no nucleotide
gctgtccactaatgggacccatgagatcntagatcntgacttggttgtatcagatttggttgatacggatcctttgcaagacacgttgtctnagtaccaaggaatctgaagaaggtcagttgaagtcnnctttggaagctggccaggtctcatctgcactgacttgccactcctttggggatggatccggggctgcaggcttggagttgaactgcccatcaatgggagaaaacacgatgaaaacagaaccgacttctccccttgtggaattacaagannnnnnnnnnnnnnnnnnnnnanatnnnnnnnnnaannnannnnnttttnnnnnannnnntnnnnnannnntngnnnnnnaccataagttagatgcaagttgtggactgttaattttccgcaactgtgcactatcacatgaggtatttcatggaatgagagtcactggagcagagagagcccgggaaagaggcatgtccaaaccaggggcccttcagcttcagacaagcccagccaggaagacccctgacccaggaaaggcggggtctctgccagttccccggcta

SEQ ID NO: 675 - DNA, 420 bp, Homo sapiens
  misc_feature (36)..(36): n includes a, c, g, or t, or contains no nucleotide
  misc_feature (97)..(97): n includes a, c, g, or t, or contains no nucleotide
  misc_feature (113)..(113): n includes a, c, g, or t, or contains no nucleotide
  misc_feature (117)..(117): n includes a, c, g, or t, or contains no nucleotide
  misc_feature (120)..(120): n includes a, c, g, or t, or contains no nucleotide
  misc_feature (123)..(136): n includes a, c, g, or t, or contains no nucleotide
  misc_feature (139)..(139): n includes a, c, g, or t, or contains no nucleotide
  misc_feature (141)..(143): n includes a, c, g, or t, or contains no nucleotide
  misc_feature (146)..(150): n includes a, c, g, or t, or contains no nucleotide
  misc_feature (152)..(152): n includes a, c, g, or t, or contains no nucleotide
  misc_feature (154)..(160): n includes a, c, g, or t, or contains no nucleotide
  misc_feature (162)..(166): n includes a, c, g, or t, or contains no nucleotide
  misc_feature (168)..(170): n includes a, c, g, or t, or contains no nucleotide
  misc_feature (172)..(174): n includes a, c, g, or t, or contains no nucleotide
  misc_feature (176)..(180): n includes a, c, g, or t, or contains no nucleotide
  misc_feature (185)..(253): n includes a, c, g, or t, or contains no nucleotide
ctgtctcccactgaagcttctactgccctggcagcntcgcctgggcccaactcagaaacaggagccagcagagcactctctcacgctgatccagccnggcaccctgcttaagncagnagnagnnnnnnnnnnnnnngcncnnnccnnnnntncnnnnnnnannnnntnnntnnntnnnnngtaannnnnnnnnnnnnnnnnnnnnnnnnnnnnnnnnnnnnnnnnnnnnnnnnnnnnnnnnnnnnnnnnnnnnactgggtttctggactgtagtattggaagccttagttatagtatattaagcctataattatactctgatttgatgggatttttgacatttacacttgtcaaaatgcagggggttttttttggtgcagatgattaaacagtcttccctatttggtgcaatgaagtata

SEQ ID NO: 676 - DNA, 85 bp, Homo sapiens
gagaaccgtgattaccgggatgcacaggagtttgctgctgatgtacggcttatgtctccaactgctataagtacatgccccagat

SEQ ID NO: 677 - DNA, 466 bp, Homo sapiens
  misc_feature (286)..(302): n includes a, c, g, or t, or contains no nucleotide
cccttaagggtgcttaattctgttgaaaccaaaaagatttgtctacaaatgctatcttttttagaaactattagaaatgactccctttcaaagtcaatctttggaaaatattgaggaggtcactaattagttggtgcagttaatataattcaagatgatttggatgatgggaagtttgagaccgctgcattttgtttttaaattatgcaccttctgataacccccaaatacagaaatgttctacatctctgaatgacctctgactttaaaaaagtttttatttgcnnnnnnnnnnnnnnnnnaacactgacattttcttctactcttctcccttctttcatcttggggttgggtagagaaacacaaaggaaactgaagcatgtgccattctatactgtcattccaaattctcatggactattgcctgttgtgaaaatgtttgaaactgcactgaaagctgcatctg

SEQ ID NO: 678 - DNA, 460 bp, Homo sapiens
  misc_feature (82)..(82): n includes a, c, g, or t, or contains no nucleotide
  misc_feature (105)..(119): n includes a, c, g, or t, or contains no nucleotide
  misc_feature (123)..(123): n includes a, c, g, or t, or contains no nucleotide
  misc_feature (277)..(277): n includes a, c, g, or t, or contains no nucleotide
  misc_feature (279)..(279): n includes a, c, g, or t, or contains no nucleotide
  misc_feature (362)..(362): n includes a, c, g, or t, or contains no nucleotide
ttatagcaggatgtctggctgcacctggcatgactgtttgtttctccaagcctgctttgtgcttctcacctttgggtgggantgccttgccagtgtgtcttactnnnnnnnnnnnnnnnttgnccacctccgagtgctttgtctccactcagtaccttggatcagagctgctgagttcaggatgcctgcgtgtggtttaggtgttagccttcttacatggatgtcaggagagctgctgccctcttggcgtgagttgcgtattcaggctgcttttgcntncctttggccagagagctggttgaagatgtttgtaatcgttttcagtctcctgcaggtttctgtgcccctgtggtggaagaggncacgacagtgccagcgcagcgttctgggctcctcagtcgcaggggtgggatgtgagtcatgcggattatccactcgccacagttatcagctgccattg

SEQ ID NO: 679 - DNA, 528 bp, Homo sapiens
  misc_feature (72)..(85): n includes a, c, g, or t, or contains no nucleotide
  misc_feature (325)..(325): n includes a, c, g, or t, or contains no nucleotide
  misc_feature (414)..(446): n includes a, c, g, or t, or contains no nucleotide
  misc_feature (462)..(484): n includes a, c, g, or t, or contains no nucleotide
ctgtgttacaatcgttctgtgtttgatatttgtgtaaagtatgcatgcagtcttgtactgtgacctaagaannnnnnnnnnnnnnattagaaaccatgaaaaaattagatattgttttgtgacttttagacagtggtaaatatagaaccatgaattctggtcacattccatttctctccaacatgaaggatcaaaaaatgtttttcaatgtgttctttgttccactggaaacttagagtcatgagtttatgagctgatttggtcaccttcctctgcctttgttcactgtgagttctgatgtcttagtgacttagttcttagaagntcacgccttagtttgaaacagattctccacggtggtccccaaaacactgtctgcatatccataagaattgagcgctatgggtgttaacnnnnnnnnnnnnnnnnnnnnnnnnnnnnnnnnnaaaggagaagaggaannnnnnnnnnnnnnnnnnnnnnngtacataacttcagatacttgtgaacatgccttatatttgtcca

SEQ ID NO: 680 - DNA, 464 bp, Homo sapiens
  misc_feature (27)..(27): n includes a, c, g, or t, or contains no nucleotide
  misc_feature (30)..(30): n includes a, c, g, or t, or contains no nucleotide
  misc_feature (131)..(131): n includes a, c, g, or t, or contains no nucleotide
  misc_feature (179)..(179): n includes a, c, g, or t, or contains no nucleotide
  misc_feature (240)..(240): n includes a, c, g, or t, or contains no nucleotide
  misc_feature (258)..(258): n includes a, c, g, or t, or contains no nucleotide
  misc_feature (360)..(360): n includes a, c, g, or t, or contains no nucleotide
ctttgtcctctgtgaagaattataaanggnaggggggaaaggattcgcctctcctacagaaattctgaattcatttaagttctaagcatttgatttatgttatttatacagttgggatctaattaggaaantgtgttttgtagttctggataaactatttcatccgctgtttcctcccnaaaacacacacacagagcaaactccctttcataaaagccctcatatccactggcagtcccngttcgcatcatggtctcnatgtgtaccgccaaagtcaattatgtttgaaagcctttggtggatgttatggggcaaagttatgatttacacagaagcaactgccaaatctgtggtgcaacnactatctccagtgaaatattgtataacaccatttggaactactgaaaagacagtggcttttctacagtactcttccttattgcaccatttttgtattaacgtag

SEQ ID NO: 681 - DNA, 539 bp, Homo sapiens
  misc_feature (422)..(445): n includes a, c, g, or t, or contains no nucleotide
caatgtccactcaagttgcaatgcaaaactctggctcatattcaatttctcagtttcaatccagaatgatcaggtggaccaaactacgaattaacatgcttcctgctacaataatttgtgagccaatttcagaatgctttgttgccagtttaattattggatgggcagcccaccatgtgttcagatgggatattatggtatttttcatgtgtcattgcctggcatggtttatatttgactacattcaactcaggggtgtccagggtggcacactgtgtttttcaaaacttgattatgcagtcgcctggttcatccgcgaatccatgacaatatacatttttttgtctgcattatgggacccaactataagctggagaactggtcgctacagattacgctgtgggggtacagcagaggaaatnnnnnnnnnnnnnnnnnnnnnnnntgactgtatataaaggaaaaaagagaagtattataaattatgtttatataaatgcttttaaaaatctaccttctgtagttttatcacatgtatg

SEQ ID NO: 682 - DNA, 438 bp, Homo sapiens
  misc_feature (106)..(106): n includes a, c, g, or t, or contains no nucleotide
  misc_feature (131)..(131): n includes a, c, g, or t, or contains no nucleotide
  misc_feature (140)..(140): n includes a, c, g, or t, or contains no nucleotide
  misc_feature (144)..(144): n includes a, c, g, or t, or contains no nucleotide
  misc_feature (148)..(148): n includes a, c, g, or t, or contains no nucleotide
  misc_feature (389)..(389): n includes a, c, g, or t, or contains no nucleotide
gaacaaatggctgagctttgatacctggggtcgtcgagaggctgcgggctggcggcagtcccaggggagagacaccacagaaggagacccagacatcccgaggaangttcccagcagagcaaactgctttnccagcctgnaagncctngcttaaactgtgtgatgtgcaataactgagcttagagttaggaattgtgttcaagtgcttggatttccgtctgtagatttaactgctgaaattgtatctctcagtaattttagatgtcttttaaaaaattgaaaaacaaagtgttagactgtgtgcgtgtgcgttgatgggcactcaagagtcccgtgagtcatccagccctgcctttcccctgcgcccccatcctctcacgtcccgcccngcctccacttggggaccctgcctcgtgtcgtctttatctgcctattact

SEQ ID NO: 683 - DNA, 528 bp, Homo sapiens
  misc_feature (32)..(46): n includes a, c, g, or t, or contains no nucleotide
  misc_feature (59)..(109): n includes a, c, g, or t, or contains no nucleotide
  misc_feature (246)..(260): n includes a, c, g, or t, or contains no nucleotide
  misc_feature (464)..(483): n includes a, c, g, or t, or contains no nucleotide
aagaggtttggctttccagagggcagtgtagnnnnnnnnnnnnnnnaggtggccactannnnnnnnnnnnnnnnnnnnnnnnnnnnnnnnnnnnnnnnnnnnnnnnnnngagggcttgctgtgcggagggcctgctatggtgtgctgcggttcatcatggagagtggggccaaaggctgcgaggttgtggtgtctgggaaactccgaggacagagggctaaatccatgaagtttgtggatggcctnnnnnnnnnnnnnnnagaccctgttaactactacgttgacactgctgtgcgccacgtgttgctcagacagggtgtgctgggcatcaaggtgaagatcatgctgccctgggacccaactggtaagattggccctaagaagcccctgcctgaccacgtgagcattgtggaacccaaagatgagatactgcccaccacccccatctcagaacagaagggtgnnnnnnnnnnnnnnnnnnnnatgccccagccagtccccacagcataacagggtctccttggcagc

SEQ ID NO: 684 - DNA, 256 bp, Homo sapiens
atctcgaagttttcagcatgctacgtgatgaagatggaaaaccttattctcctagtgaatactccctgcagcaaacaagagatggcaatgttttccttgttcccaaaagtaagaagccagatgttaagaaaaactagatttaggaggatttgaccttttctgagctagtttttttgtactattatactaaaagctcctactgtgatgtgaaatgctcatactttataagtaattctatgcaaaatcatagccaaaa

SEQ ID NO: 685 - DNA, 463 bp, Homo sapiens
  misc_feature (182)..(182): n includes a, c, g, or t, or contains no nucleotide
ttctctagttagatgtcagtcctaaataggttttcctcacttcaggcctcacccctcaccttgtttttttgggggctccagggaccaatctggggctggaaatgttaggaggttgccttggtgctgccccagatctgtccagcagggggcagtaagtgatcttggtagtatccctggctgcntaagcccttggcaggggtggtcctttctacattcccattcacttaacagctcttttgggattgggtgtttcattccatttctgcccactccctctcctctcctctctggtaggtttaattttatgctttccctgattccagctttctgcttcctgaggactcccgctccccccaccccaaagtttgtctgtggtgttatagtggtaactgcagttcctcctctggaatgtagactgtatatgtttaataactcaccttctctatccttgctcaaaatgtgg

SEQ ID NO: 686 - DNA, 359 bp, Homo sapiens
  misc_feature (115)..(141): n includes a, c, g, or t, or contains no nucleotide
tactgtagatcaacctgatgatttgtttgtttgaaattggcaggaaaaatgcagctttcaaatcattggggggagaaaaaggatgtctttcaggattattttaattaattttttnnnnnnnnnnnnnnnnnnnnnnnnnnntgtaccataatgctaaataaaactgtggcacttttcaccataatttaatttagtggaaaaagaagacaatgctttccatattgtgataaggtaacatggggtttttctgggccagcctttagaacactgttagggtacatacgctaccttgatgaaagggaccttcgtgcaactgtagtcatcttaaaggcttctcatccactgtgcttcttaatgtg

SEQ ID NO: 687 - DNA, 484 bp, Homo sapiens
attatgggaggctctgactgtctcgggtgtcagcttaacattccacagatggggggttagtttttatatcctataatacaaagcatattaaatggcaatatggagtcagtcctgcatttaatgtcttgaacattttaaattacttctattaccatgttgttttttagtagaattgtttcctaaagaaaaccactctttgatcatggctctctctgccagaattgtgtgcactctgtaacatctttggttgtggtagtcctgttttcctaataactttgttactgtgctgtgaaagattacagatttgaacatgtagtgtacgtgctattgagttgtgaactggtgggccgtatgtaacagctgaccaacgtgaagatactggtacttgatagcctcttaaggaaaatttgcttccaaattttaagctggaaagtcactggaataactttaaaaaagaattacaatacatggctttttagaattt

SEQ ID NO: 688 - DNA, 466 bp, Homo sapiens
  misc_feature (158)..(195): n includes a, c, g, or t, or contains no nucleotide
gggttcagcttaattccataattcccttccagattattaactcttcatacttacagcaatgaatctgacaatgtttttcaaaaatgtatgctcagggttatttgtttcaagtcataggccagaacttctaaccatgtttattgtgtctaaaagagttnnnnnnnnnnnnnnnnnnnnnnnnnnnnnnnnnnnnnnaaaagctcaaagtagaagaggagtcactaagccctaacagcttgtccaaagatttaaattcttatttcaaatttgatttgtcctttaaggtttagggctattttatattcagagttctgaataattactttgaaactgtagtatcataaaattgaaataaaatacatctactaggctgttagccaaagcatcaccattacaagtccatgaatgttaaaatgtacaggtgggattgtgaagatttactgacatcaaaagttcttctggaaac

SEQ ID NO: 689 - DNA, 280 bp, Homo sapiens
  misc_feature (96)..(111): n includes a, c, g, or t, or contains no nucleotide
acatccttcaactgggctctcttgttaataggacatcatatggtaatagactggtttgactatattgttagctgccacagtaagcaggtcattgtnnnnnnnnnnnnnnnnacccataattttctagtaatagccacgaccaatttattaacagtcagggcctatccttgcctgtagttctcagtcactggatgcacaaaatcactgtgtaacattggctcacttggtgagcatagggttgactgataaaatgtttaattcccttgctagcttgtgagaa

SEQ ID NO: 690 - DNA, 505 bp, Homo sapiens
  misc_feature (92)..(92): n includes a, c, g, or t, or contains no nucleotide
  misc_feature (189)..(189): n includes a, c, g, or t, or contains no nucleotide
  misc_feature (200)..(200): n includes a, c, g, or t, or contains no nucleotide
  misc_feature (208)..(208): n includes a, c, g, or t, or contains no nucleotide
ttcttcattgatggaaagcagttacatattgaaatatgttgtttctaatgacatttctgtggtttttaactttttaatgaatttcacagagnacaattggtaatttgtatataaagaacttggcaagagaatttgcttaatgtaaatataaacagtcacaattagtatagacccatcgatatatttttngataatttttncatgtatnggtaaagttaaaatgacaaattgatattctgatataaaactcaaagttttgaagtcagtgggaaaaaaggaggtttttagactttcttaaaagacgttaaaattttaggacagaattttcttgatgttgtttgatctaactttgcactctttgataataatgttttagataatgtgcgtaatccaaattggtattgtagcctctgttaacacagacagtatatgttttaaactttgatgtaaacctttttagacccaaacttgtggaagtatcatgtgttaagttctctgtctctgt

SEQ ID NO: 691 - DNA, 267 bp, Homo sapiens
tggagtatttgctgcctgtcagagtggctcttttgacaaactagaagctgtggtcaaggatttaatagatgagggtcatgcagcaactcagctcgtcaatcaactccatgatgtggttgtagaaaataacttatctgataaacagaagtctattatcacagaaaaacttgccgaagttgacaaatgcctagcagatggtgctgatgaacatttgcaactcatcagcctttgtgcaactgtgatgcagcagttatctcagaattgtta

SEQ ID NO: 692 - DNA, 579 bp, Homo sapiens
  misc_feature (186)..(186): n includes a, c, g, or t, or contains no nucleotide
  misc_feature (200)..(200): n includes a, c, g, or t, or contains no nucleotide
  misc_feature (202)..(202): n includes a, c, g, or t, or contains no nucleotide
  misc_feature (204)..(204): n includes a, c, g, or t, or contains no nucleotide
  misc_feature (206)..(206): n includes a, c, g, or t, or contains no nucleotide
  misc_feature (208)..(209): n includes a, c, g, or t, or contains no nucleotide
  misc_feature (212)..(213): n includes a, c, g, or t, or contains no nucleotide
  misc_feature (215)..(215): n includes a, c, g, or t, or contains no nucleotide
  misc_feature (217)..(222): n includes a, c, g, or t, or contains no nucleotide
  misc_feature (528)..(528): n includes a, c, g, or t, or contains no nucleotide
  misc_feature (545)..(545): n includes a, c, g, or t, or contains no nucleotide
  misc_feature (551)..(551): n includes a, c, g, or t, or contains no nucleotide
aactcacagagatctactcagacaggaccttcgcacctttgccagagtttgagcaggaagaggatgatggtgaggtaactgaggactctgatgaagactttatacagccccgcagaaaacgcctaaagtcagatgagagaccagtacatataaagtaaaatgacatggatttaaatcaattgtttnaaaaaaaaaaaaangnananannaannanannnnnnaacagtcagggctcagcagccttgttaatggaaagtccccaattcgaagcctcatgcacaggtcggcaaggattggaggagatggcaacaataaagatgatgacccaaatgaagactggtgtgctgtctgccaaaacggaggagatctcttgtgctgcgaaaaatgtccaaaggtctttcatctaacttgtcatgttccaacactacttagctttccaaggtaccagtgaaataattgatttttggtgttgattttcataagctaaaaataaataacagaagaatgttcagggcagatggccttcntaaccagtgcatagtanttctantaaaacagggagcctgttattcttttgg

SEQ ID NO: 693 - DNA, 440 bp, Homo sapiens
  misc_feature (53)..(54): n includes a, c, g, or t, or contains no nucleotide
  misc_feature (61)..(61): n includes a, c, g, or t, or contains no nucleotide
  misc_feature (92)..(96): n includes a, c, g, or t, or contains no nucleotide
  misc_feature (154)..(154): n includes a, c, g, or t, or contains no nucleotide
  misc_feature (174)..(174): n includes a, c, g, or t, or contains no nucleotide
  misc_feature (201)..(215): n includes a, c, g, or t, or contains no nucleotide
  misc_feature (306)..(306): n includes a, c, g, or t, or contains no nucleotide
  misc_feature (311)..(311): n includes a, c, g, or t, or contains no nucleotide
  misc_feature (326)..(365): n includes a, c, g, or t, or contains no nucleotide
  misc_feature (382)..(384): n includes a, c, g, or t, or contains no nucleotide
gggagtgccgccttcctgtgccaaattcagtggggactcagtgcccaggcccnnggccacngagctttggccttggtctacctgccaggccnnnnncaaagcgcctttacacaggcctcggaaaacaatggagtgagcacaagatgccctgtgnagctgcccgagggtctccgncccaccccggccggactttgatccccnnnnnnnnnnnnnnngcactgcatcgggttgtctggcgcccttttcctccagcctaaactgacatcatcctatggactgagccggccactctctggccgaagtggncgcangctgtgcccccgagnnnnnnnnnnnnnnnnnnnnnnnnnnnnnnnnnnnnnnnncccaggctgaggtgaannngcctgggggccctgccttccgggcgctcctggaccctggggcaaacctgtgaccct

SEQ ID NO: 694 - DNA, 311 bp, Homo sapiens
  misc_feature (65)..(79): n includes a, c, g, or t, or contains no nucleotide
tccttttcaaaaatgacaggttggaaaatgtttgtcagacttattaactggtcatattataatannnnnnnnnnnnnnnaactgctcattctgaaagccaaacataaaagctaggagaagtggcatctgaacatttttgctttgctgccagagtaaccctgactaataatacaataacagcaatttttttaaaaaactgagatttcctactggcttgaagtttttctatttagcaaaataattagtaataagttttgactaggtctaaagaatgaacacattgtaaacagttgccacagtagtttctaata

SEQ ID NO: 695 - DNA, 565 bp, Homo sapiens
  misc_feature (131)..(131): n includes a, c, g, or t, or contains no nucleotide
  misc_feature (212)..(212): n includes a, c, g, or t, or contains no nucleotide
  misc_feature (215)..(215): n includes a, c, g, or t, or contains no nucleotide
  misc_feature (219)..(219): n includes a, c, g, or t, or contains no nucleotide
  misc_feature (269)..(269): n includes a, c, g, or t, or contains no nucleotide
  misc_feature (325)..(325): n includes a, c, g, or t, or contains no nucleotide
  misc_feature (345)..(345): n includes a, c, g, or t, or contains no nucleotide
gaacaggagtgactctggctgccaagataccttcatggtgttcatgacaagtggaatcattattttcaaccattgaagggggatgcaggcaagacaccttcccagctgctcctagaggggacaagccaggnccctctctgcagtcctcggcagctccggaaggacacagtcaggggccgggcaaacactttggccacagccccaaacaagcnccnaccngtgggagaggagaggctgctgtcactggtaccggatgcagaccccacccntgtctgcaggccacccccacctccctgcagctttgaggctggcggggtctgctccntgggaatggggtgggagccnacagggacgacccggggcgggctgatgtcttcttgggggcagaccagagagctcaagtttcagagtcagaattaggcacttggagcgtttttgctggcttgcactttcttattttcttattttagagcgcttaaaaaatccggaaaaatggggtttaaaagaactgtctctttcagtctacatttttgtttaatacgcttgagcaataaacgctgacttg

SEQ ID NO: 696 - DNA, 278 bp, Homo sapiens
  misc_feature (32)..(32): n includes a, c, g, or t, or contains no nucleotide
  misc_feature (139)..(156): n includes a, c, g, or t, or contains no nucleotide
  misc_feature (222)..(236): n includes a, c, g, or t, or contains no nucleotide
gtcagaagtctctaacctccaagccagatgangtcctccccttcctatctcattatagtcattctccacatactctttgagcatgaatagttcaggatgcctttttcccaattcagttttaaaatagtaattccgtttnnnnnnnnnnnnnnnnnngaggcttgtaattgtttacctgagatcttagtacccttccttcctctccccgtttccctactatannnnnnnnnnnnnnnagatgtggttaactgattccaattcctgaagctgtgacattc

SEQ ID NO: 697 - DNA, 465 bp, Homo sapiens
  misc_feature (65)..(79): n includes a, c, g, or t, or contains no nucleotide
  misc_feature (121)..(140): n includes a, c, g, or t, or contains no nucleotide
  misc_feature (163)..(234): n includes a, c, g, or t, or contains no nucleotide
  misc_feature (277)..(294): n includes a, c, g, or t, or contains no nucleotide
  misc_feature (320)..(325): n includes a, c, g, or t, or contains no nucleotide
  misc_feature (327)..(335): n includes a, c, g, or t, or contains no nucleotide
aggcctatgctctgtgtcactgtctcccggtgctcagcacagacaagttcaagacagatttttannnnnnnnnnnnnnncgtggggctcatggcctacctcggcaccatcaccaaaacgtnnnnnnnnnnnnnnnnnnnngtgaacaagttcaatgtcctctnnnnnnnnnnnnnnnnnnnnnnnnnnnnnnnnnnnnnnnnnnnnnnnnnnnnnnnnnnnnnnnnnnnnnnnncaggggtcaggcaactatcccaaaggggagggcactacacttnnnnnnnnnnnnnnnnnntcattaataaaaggggagcagccccnnnnnncnnnnnnnnnggtggctctgtcctctgttaggcaccacactggttggtcaacttggatgttcatcgaggctcattctggccttgctcagaagcccttctgatgctcttcagtgagggaggcactaccatttgaagtgacc

SEQ ID NO: 698 - DNA, 163 bp, Homo sapiens
gaataacattctgtagttcctaaaaatactgacttttttcactactatacataaagggaaagttttattcttttatggaacacttcagctgtactcatgtattaaaataggaatgtgaatgctatatactctttttatatcaaaagtctcaagcacttatttt

SEQ ID NO: 699 - DNA, 521 bp, Homo sapiens
  misc_feature (425)..(425): n includes a, c, g, or t, or contains no nucleotide
ttatcctaggagtgacctttatatgtgtggaagattaatggtatatgctccttatgtcactgtttttgagtaaaatccatttcctttctctgtttcagcctatgacaaaattgatgtttacaggcctgctttttgcttataattgacaacatgtgcaaaaataccaaatttgtgtcctgtgcagtatgaagaattcagtgaatattcattaatgtattagcttgttttgctctctgttcatatatggctctattcttagaaatataatttgaatgtgatctttcaatagtctgaatattttacaaattatagctatgtcttgtgaaaataacctcaaaaagaaaaatacgactctgttgtcttacttgatatttcttgccctagtaatgtacttgacatttatgttcctaagcagtgtaagtacnagtagaatttctctgtcaaactcaatgatcatttagtacttttgtcttctcccatgtgcttgaaggaaaaataaagtgtcactaccgtatttcttg

SEQ ID NO: 700 - DNA, 566 bp, Homo sapiens
  misc_feature (47)..(47): n includes a, c, g, or t, or contains no nucleotide
  misc_feature (169)..(169): n includes a, c, g, or t, or contains no nucleotide
  misc_feature (345)..(345): n includes a, c, g, or t, or contains no nucleotide
  misc_feature (439)..(439): n includes a, c, g, or t, or contains no nucleotide
caagatcagctcatggaaggagtaaagaaaatatctcaaaatgaganaaactgaagttttgttttttttttaatgacttaagtttttgtgctcttgcaagactatacaaaactattttaagaaagcagtgatatcacttgaacttcagtgccctcactgtagaatttanaagccttactgttgattgcccatgttggacttgatggagaaattaaatatctttcattatgctttacaaaatactgtatatgtttcagcaagtttggggaatgggagaggacaaaaaaaagttacatttaatctatgcatttttgccaagccatattgagttattttactactagngacattaggaaactaactgtacaaaagaaccaagtttaaaagcattttgtggggtacatcatttctataattgtataatgtatttctttgtggnttttaaatgataaagacattaagttaacaaacatataagaaatgtatgcactgtttgaaatgtaaattattcttagaacactttcaatgggggttgcattgtccttttagtgccttaatttgagata

SEQ ID NO: 701 - DNA, 594 bp, Homo sapiens
  misc_feature (342)..(343): n includes a, c, g, or t, or contains no nucleotide
  misc_feature (416)..(416): n includes a, c, g, or t, or contains no nucleotide
  misc_feature (487)..(487): n includes a, c, g, or t, or contains no nucleotide
  misc_feature (492)..(509): n includes a, c, g, or t, or contains no nucleotide
tgcccatgtgaaaagatccgctaagacagatgtctgccagcggaaacttctcgagctcccccctctaccccgccccaccttgccccactactttagggggcagctaaatgtgatcctgccttgctgtgaaatttctgtaccttcaacctggtgttaggtgtgcaaagtccgtgtcctacctccgtcttcgccaaggccccgcccgagcctagttgttctccccctgaatgtgtagaaccttcctttgaaatttcttaatcggtgcattgaggtttccacatctttttccaaagcagtgcccacttcatggatttatagctatagtctatgcagtcgttaccnntttttttttttttttaagaaaattgaagattggggtggtggaggcagtagggagatgggattgggcacctccnccgtgctggggcctggatttttgtaaataaatttcccaagcgtttctttccacctggagggaaaggggggnacgcnnnnnnnnnnnnnnnnnncacgcatctctactcctctgcgtgagtgcgtgtgtacatgtgcactccccaccctgctcccttcccagagggattgctgtgaaat

SEQ ID NO: 702 - DNA, 52 bp, Homo sapiens
gagggaacctaccactgtacggaatgtgaggattccttcgacaacctggggg

SEQ ID NO: 703 - DNA, 408 bp, Homo sapiens
  misc_feature (26)..(26): n includes a, c, g, or t, or contains no nucleotide
  misc_feature (73)..(73): n includes a, c, g, or t, or contains no nucleotide
  misc_feature (90)..(90): n includes a, c, g, or t, or contains no nucleotide
  misc_feature (101)..(101): n includes a, c, g, or t, or contains no nucleotide
  misc_feature (129)..(129): n includes a, c, g, or t, or contains no nucleotide
  misc_feature (171)..(171): n includes a, c, g, or t, or contains no nucleotide
  misc_feature (206)..(206): n includes a, c, g, or t, or contains no nucleotide
  misc_feature (219)..(219): n includes a, c, g, or t, or contains no nucleotide
  misc_feature (229)..(229): n includes a, c, g, or t, or contains no nucleotide
  misc_feature (259)..(259): n includes a, c, g, or t, or contains no nucleotide
  misc_feature (272)..(272): n includes a, c, g, or t, or contains no nucleotide
  misc_feature (332)..(332): n includes a, c, g, or t, or contains no nucleotide
ggttccccatgcagaggaacttggtnggtgatccccaagtctgtgacaccagaacgcattgctgagaactttnaaggtctttgactttgnaactgagcagnccaggatatgaccaccttactcagctancaacaggaactggagggtctgtgccttgttgagctgtacctncccacaaggattaccccttccatgaagagttttgnaagctgtggttgncctgctcgtnccccaagtgacctatacctgtgtttcttgncctcatttttttnccttgcaaatgtagtatggcctgtgtcactcagcagtgggacagcaacctgtagagtggnccagcgagggcgtgtctagcttgatgttggatctcaagagccctgtcagtagagtagaagtctcttccagtttgct

SEQ ID NO: 704 - DNA, 584 bp, Homo sapiens
  misc_feature (91)..(105): n includes a, c, g, or t, or contains no nucleotide
  misc_feature (126)..(127): n includes a, c, g, or t, or contains no nucleotide
  misc_feature (129)..(131): n includes a, c, g, or t, or contains no nucleotide
  misc_feature (133)..(134): n includes a, c, g, or t, or contains no nucleotide
  misc_feature (136)..(139): n includes a, c, g, or t, or contains no nucleotide
  misc_feature (142)..(147): n includes a, c, g, or t, or contains no nucleotide
  misc_feature (150)..(150): n includes a, c, g, or t, or contains no nucleotide
  misc_feature (153)..(155): n includes a, c, g, or t, or contains no nucleotide
  misc_feature (158)..(162): n includes a, c, g, or t, or contains no nucleotide
  misc_feature (166)..(166): n includes a, c, g, or t, or contains no nucleotide
  misc_feature (169)..(169): n includes a, c, g, or t, or contains no nucleotide
  misc_feature (172)..(172): n includes a, c, g, or t, or contains no nucleotide
  misc_feature (196)..(196): n includes a, c, g, or t, or contains no nucleotide
  misc_feature (203)..(203): n includes a, c, g, or t, or contains no nucleotide
  misc_feature (211)..(211): n includes a, c, g, or t, or contains no nucleotide
  misc_feature (219)..(223): n includes a, c, g, or t, or contains no nucleotide
  misc_feature (226)..(227): n includes a, c, g, or t, or contains no nucleotide
  misc_feature (241)..(241): n includes a, c, g, or t, or contains no nucleotide
  misc_feature (245)..(245): n includes a, c, g, or t, or contains no nucleotide
  misc_feature (332)..(332): n includes a, c, g, or t, or contains no nucleotide
aggtgtctactgaaaagggaacctgcttctttactccagaacgctgttctttaaagaccaagattactgcattctcaattagaaaactgcnnnnnnnnnnnnnnncattctgactactacagtatnntnnncnntnnnnttnnnnnnccnccnnncannnnntttnatnatnacatgaagtaactggtatgtgtancacaagncatattgncttttttnnnnnaannccaaacagcccaanggtntgttttgattgacatcaagtggagacaggatgggaaaaaatactgattctgtgaaaataccccctttatcccattagtggcatgttncattcaggtcttatctttatattctagtaagttattttgctctcactgttttaacaacaacaaaaaaaaattctcacataccttgttcaattggaggattttcatgtttttcatttatcattgtaaaaccaaggacaattttataacttttgtgtacatagctgttacatgtagggcaatctgtctttaagtagggataaattactctaaaaaaaaaagaaagaatcctagaaagtttttccttcaagtcag

SEQ ID NO: 705 - DNA, 204 bp, Homo sapiens
  misc_feature (51)..(51): n includes a, c, g, or t, or contains no nucleotide
  misc_feature (112)..(112): n includes a, c, g, or t, or contains no nucleotide
  misc_feature (137)..(137): n includes a, c, g, or t, or contains no nucleotide
  misc_feature (167)..(167): n includes a, c, g, or t, or contains no nucleotide
tcccgtagagattggtatgacaagaactgaggtagacaaaacctagctttngggtgccaacagcagtggcaccctctgtttcccggggagctgtcctgtcagtggggtgggnctcgggactggcgtcacatgctttnggggaggtggccattggaaacaagcaagtnctgggcttccgcgcgctcttggattgcctgaaggtta

SEQ ID NO: 706 - DNA, 266 bp, Homo sapiens
  misc_feature (124)..(160): n includes a, c, g, or t, or contains no nucleotide
  misc_feature (162)..(185): n includes a, c, g, or t, or contains no nucleotide
  misc_feature (193)..(219): n includes a, c, g, or t, or contains no nucleotide
aagtgcaccgactgggctacaaacaaggccaagcaaggttacgttatatataggattcgtgttcgccgttatatataggattcatgttcgccgtggtggctgaaaacgcccagttcctaagggnnnnnnnnnnnnnnnnnnnnnnnnnnnnnnnnnnnnncnnnnnnnnnnnnnnnnnnnnnnnnagtccgtnnnnnnnnnnnnnnnnnnnnnnnnnnntggggctctgagcgtcctgaattcttacagggttggtgaagattcca

SEQ ID NO: 707 - DNA, 583 bp, Homo sapiens
ttcgtactgtgactaaaacagtttccaatgactctttctttaacttttttgcccctcctgaagttcctgagagtggagatctggatgatgatgctgaagctatccttgctgcagacttcgaaattggtcactttttacgtgagcgtataatcccaagatcagtgttatattttactggagaagctattgaagatgatgatgatgattatgatgaagaaggtgaagaagcggatgaggaaggggaagaagaaggagatgaggaaaatgatccagactatgacccaaagaaggatcaaaacccagcagagtgcaagcagcagtgaagcaggatgtatgtggccttgaggataacctgcactggtctaccttctgcttccctggaaaggatgaatttacatcatttgacaagcctattttcaagttatttgttgtttgtttgcttgtttttgtttttgcagctaaaataaaaatttcaaatacaattttagttcttacaagataatgtcttaattttgtaccaattcaggtagaagtagaggcctaccttgaattaagggttatactcagtttttaacacattgtt

SEQ ID NO: 708 - DNA, 200 bp, Homo sapiens
  misc_feature (59)..(59): n includes a, c, g, or t, or contains no nucleotide
  misc_feature (82)..(82): n includes a, c, g, or t, or contains no nucleotide
  misc_feature (92)..(92): n includes a, c, g, or t, or contains no nucleotide
  misc_feature (104)..(104): n includes a, c, g, or t, or contains no nucleotide
  misc_feature (111)..(118): n includes a, c, g, or t, or contains no nucleotide
tctccccgagcctggagacttgggccacatggctgtcctttgccagcgctgtctgccanccccctgatctatggactctggnacaagacagnttcgcaaagaantactggnnnnnnnntttggggaccggtattatcgggaaccatttgtgcaacgacagaggacttccaggctcttcagcatttccaacaggatcacag

SEQ ID NO: 709 - DNA, 553 bp, Homo sapiens
atgaacctgggctaatgggagactgtagagaaaatgaaaaaagatccaccagaggacatcttggggagggggagggagctgggggggagggaaatgactaatgaagctaattaaaagaagcattcaaatctgctttctaccctcattaacaattagcagggcactggccagagtttgtaccctgtgttttaccttaacaacattctatttgctctttgtatatttaagtgttgtaaggaaacgtgtttcaatcaaaactgaccatgagataaaggaaagagatgtggcttttgtgatattctatcacaaacacttattgtatctctgtaaaatacaatgtatgtatgcatgtaagtgtttttgtcctaatgttgctactcccatggcaaagaaaaaaaaaagaatgaaaaaaagaaaaaaaatttggaaaaaaaaatcaggctcatagcagctactgtgtagaaaattccccctacttctaatttgctgaatgaagaaaaaaaaaaatcttttatttgtgatattttcagagacatttgctctagtatggtgt

SEQ ID NO: 710 - DNA, 541 bp, Homo sapiens
attctgaatacattgctacagtctgtggcagtttcagaagaggtgcagagtccagtggtgacatggatgttctcctgacccatcccagcttcacttcagaatcaaccaaacagccaaaactgttacatcaggttgtggagcagttacaaaaggttcattttatcacagataccctgtcaaagggtgagacaaagttcatgggtgtttgccagcttcccagtaaaaatgatgaaaaagaatatccacacagaagaattgatatcaggttgatacccaaagatcagtattactgtggtgttctctatttcactgggagtgatattttcaataagaatatgagggctcatgccctagaaaagggtttcacaatcaatgagtacaccatccgtcccttgggagtcactggagttgcaggagaacccctgccagtggatagtgaaaaagacatctttgattacatccagtggaaataccgggaacccaaggaccggagcgaatgaggcctgtatcctccctggcagacacaacccaataggagtct

SEQ ID NO: 711 - DNA, 374 bp, Homo sapiens
  misc_feature (107)..(107): n includes a, c, g, or t, or contains no nucleotide
attagaagccatcctaaggtgcttacctcacacgccacccatgaggcttgtggccacagtggcacttgggtgtggctcctctgttatttgtcctcatgtgagaaagncagatcatctccaaatcttgccatttgtatacttttggtggagacttggatgtcatatcttctttgttttgggttttcttccctagcttattttgtggcttttaaagaagtggattgtattgtgagatcctgtgattcctggtggccagtatcctggattcctctaagatcttgcctctttcctcctcatgaaagcagcacacattgtgttaacttatgtctcttgttaaatgagcttaatgtctttgtgttttgtccaaaactgta

SEQ ID NO: 712 - DNA, 234 bp, Homo sapiens
  misc_feature (69)..(102): n includes a, c, g, or t, or contains no nucleotide
tgttcagccttatcccttggcacgtaaacagactactagacttattgtaggttcgtttgagctttgtgnnnnnnnnnnnnnnnnnnnnnnnnnnnnnnnnnnaggtagggagtgattttattattgtgtatatctaatatattaagtatgtgtgatactaaggtttgactgctataattatttgtactgttgatcacatgtacttaaaacatctgatactgtattctaagacag

SEQ ID NO: 713 - DNA, 557 bp, Homo sapiens
  misc_feature (170)..(184): n includes a, c, g, or t, or contains no nucleotide
  misc_feature (310)..(403): n includes a, c, g, or t, or contains no nucleotide
gatgactgcctcatcttcctcagtttcatccccatccccaggtcttcctagacgctcagcacccccttctcccctgtgccgtagtttgtctcctgggactgggggaggagtccgaggtggggttggttacctgtcccgaggggaccctgtccgggtccttgctcggagannnnnnnnnnnnnnntctgtgcagtacctggttgagtggggaggagggggcatcttctgaacagcctgcctctgcccagctccccattcacacacaccggcactttcataccctgacctctgacctcacctacagctgggnnnnnnnnnnnnnnnnnnnnnnnnnnnnnnnnnnnnnnnnnnnnnnnnnnnnnnnnnnnnnnnnnnnnnnnnnnnnnnnnnnnnnnnnnnnnnnttcatgattcctgacccctcccatccttcccatttcctttgatgttattttgttacagctttttaaatattttttaaaattatttaacccctgggggcagagactgaggagggaggatgataagggatcccggactctgtatgattgaaataaa

SEQ ID NO: 714 - DNA, 297 bp, Homo sapiens
  misc_feature (34)..(51): n includes a, c, g, or t, or contains no nucleotide
  misc_feature (99)..(99): n includes a, c, g, or t, or contains no nucleotide
  misc_feature (117)..(137): n includes a, c, g, or t, or contains no nucleotide
aatattgtgccatatgacaacaaagtctttcctnnnnnnnnnnnnnnnnnntagtactgtattgtggaatatttgagttctatttccatacttgaaaancatggaggattttagagnnnnnnnnnnnnnnnnnnnnntaagtagtatgtgaccgagctataaatttttgtttttgttctaagtagatttaatttgggaactgacaggacaatgtttttaggtttagcattttgtttaaaaacctttaaagaaacctttagaaggacttagacctcacatattaatgttgagaagttc

SEQ ID NO: 715 - DNA, 108 bp, Homo sapiens
atatggactggtaggagtcaaggcctccttattgctgtcacatgatcccaaaccagtcagaccagctcccaggatggagcccggggcaggcctctcattcctgggctt

SEQ ID NO: 716 - DNA, 367 bp, Homo sapiens
gcctctccagcagcagtagccagggcttggacttatcgatgacaggctggtcctgaggatacagctgtcccgtgactgactgtcttaactgagcattttctcaactcgactctcatttcttccctgctggtaaaatagaaacagggatttaaacctggctttggcaagagcctgcagcctccatcaccccaagtccttgggcccagttgggagctcatatctaacacagagacacattgcatcaacttcaagaaagggacaatttgtgcagctccaggatgggaaggtggagtgggtgagcatcttgtgcagggacatggtgagtgccctgatgccccagctagcaggagctactgtgctcatctaa

SEQ ID NO: 717 - DNA, 493 bp, Homo sapiens
cgtcaagtcagtgcagcgctgcatggccctggcccagctcctcgtggagcagaacttcccggccatcgccatccaccggggcatggcccaggaggagcgcctgtcacgctatcagcagttcaaggatttccagcggcggatcctggtggccaccaatctgtttggccgggggatggacatcgagcgagtcaacatcgtctttaactacgacatgcctgaggactcggacacctacctgcaccgggtggcccgggggggtcgctttggcaccaaaggcctagccatcacttttgtgtctgacgagaatgatgccaaaatcctcaatcacgtccaggaccggtgtgaagttaatgtggcagaacttccagaggaaatcgacatctccacatacatcgagcagagccggtaaccaccacgtgccagagccgcccacccggagccgcccgcatgcagcttcacctcccctttccaggcgccactgttgagaagctag

SEQ ID NO: 718 - DNA, 254 bp, Homo sapiens
  misc_feature (187)..(187): n includes a, c, g, or t, or contains no nucleotide
cgtggggacccagctgtacatatgtggataagctgattaatggttttgcaactgtaatagtagctgtatcgttctaatgcagacattggatttggtgactgtctcattgtgccatgaggtaaatgtaatgtttcaggcattctgcttgcaaaaaaatctatcatgtgcttttctagatgtctctggntctatagtgcaaatgcttttattagccaataggaattttaaaataacatggaacttacacaaaaggc

SEQ ID NO: 719 - DNA, 380 bp, Homo sapiens
  misc_feature (284)..(285): n includes a, c, g, or t, or contains no nucleotide
gaagccaaagcgaaggctttaaaggccaagaaggcagtgttgaaaggtgtccacagccacaaaaagaagaagatccgcacgtcacccaccttccggcggccgaagacactgcgactccggagacagcccaaatatcctcggaagagcgctcccaggagaaacaagcttgaccactatgctatcatcaagtttccgctgaccactgagtctgccatgaagaagatagaagacaacaacacacttgtgttcattgtggatgttaaagccaacaagcaccagattanncaggctgtgaagaagctgtatgacattgatgtggccaaggtcaacaccctgattcggcctgatggagagaagaaggcatatgttcgactggctcc

SEQ ID NO: 720 - DNA, 483 bp, Homo sapiens
ggtggatgctttctagatgtcgatgctgggggcagtgctttccataaccaccactgtgtagttgcagaaagccctagatgtaatgatagtgtaatcattttgaattgtatgcattattatatcaaggagttagatatcttgcatgaatgctctcttctgtgtttaggtattctctgccactcttgctgtgaaattgaagtggatgtagaaaaaaccttttactatatgaaactttacaacacttgtgaaagcaactcaatttggtttatgcacagtgtaatatttctccaagtatcatccaaaattccccacagacaaggctttcgtcctcattaggtgttggcctcagcctaaccctctaggactgttctattaaattgctgccagaattttacatccagttacctccactttctagaacatattctttactaatgttattgaaaccaatttctacttcatactgatgtttttggaaacagc

SEQ ID NO: 721 - DNA, 387 bp, Homo sapiens
gatgccaagacttggcctgcagaatgtcaggaatgtgaattaaaagctgctgtttccagacgctttttattctgagcaccttcactaccttgtatccagttcatctgggaactcctttttgcattttagaaaatggaaagaggcaggaaattatgataaactcatgtttaacagaaagagtttcactgactaaatgtatgtaattatattttgttgttgtagaagaaataaatagcaaatttgtggtattcttttttttaaacctgctctcattcctattaacactaagatcttagatttttatagtgataaatgggttgacatcattgtcatttgtaattgtaaagcctcaaaagacaactgttcctactatgtaattatagacag

SEQ ID NO: 722 - DNA, 607 bp, Homo sapiens
  misc_feature (26)..(26): n includes a, c, g, or t, or contains no nucleotide
  misc_feature (32)..(32): n includes a, c, g, or t, or contains no nucleotide
  misc_feature (38)..(40): n includes a, c, g, or t, or contains no nucleotide
  misc_feature (131)..(147): n includes a, c, g, or t, or contains no nucleotide
  misc_feature (266)..(299): n includes a, c, g, or t, or contains no nucleotide
  misc_feature (375)..(397): n includes a, c, g, or t, or contains no nucleotide
  misc_feature (531)..(540): n includes a, c, g, or t, or contains no nucleotide
  misc_feature (555)..(555): n includes a, c, g, or t, or contains no nucleotide
  misc_feature (557)..(557): n includes a, c, g, or t, or contains no nucleotide
  misc_feature (563)..(563): n includes a, c, g, or t, or contains no nucleotide
  misc_feature (577)..(577): n includes a, c, g, or t, or contains no nucleotide
aaataatgatgacctctgctggattnctgttnacatcnnnaaaacaatgttaaggatgtatttattcccctaccctgaagaaagtgtaggatagaattgtttttagcattctaaatttaaatgcttaaaannnnnnnnnnnnnnnnnttgttttaaatattgtaattgtggagaaaagtaaacttataagcagaacttttacaattttttcatctaaaagtattttaagatatttttaaaatccaagagcttctctatacttttcnnnnnnnnnnnnnnnnnnnnnnnnnnnnnnnnnnaaccagtctcaaacatgcttatcccattatcaaccctgaaagtttgcttgtcctttaagataaaaatgtaatgttnnnnnnnnnnnnnnnnnnnnnnnactgtattttgtctccaaataaaagaagcttattgtagtatgtttgcagaaaaattctaaacaaaaattatacagcttattagagtgtgggaatagggatctaaattttaaataaaattatatatatatataannnnnnnnnnattttataattgcgncnagtttngtttagttttttcntacttttaaattccaacttaaaattatgag

SEQ ID NO: 723 - DNA, 363 bp, Homo sapiens
cggagaaccctggatgcagacgccctgtacaatcaagatcacccacaagaaccagatgcccatgctcatgggcccacccccccgctccaccaatttctttggcttcttgagctaagggggacacccttggcctccaagccagccttgaacccacctccctgtccctggactctactcccgaggctctgtacattgctgccacatactcctgccagcttgggggagtgttccttcaccctcacagtatttattatcctgcaccacctcactgttccccatgcgcacacacatacacacaccccaaaacacatacattgaaagtgcctcatctgaataaaatgacttgtgtttcccctttgggat

SEQ ID NO: 724 - DNA, 204 bp, Homo sapiens
  misc_feature (153)..(167): n includes a, c, g, or t, or contains no nucleotide
cagtatactagcttgtcttttaagaaaggggatattaaaaaaaaaaaaagacaaaagtgtttttaaaaaaaagcaacacccacacctgtgtctgtatatagtcagcttatctcgtgttcaatcgtctgatctctacagagagaagtggaaaannnnnnnnnnnnnnngggcttagctgtgcctttccaataaagatgtgagaag

SEQ ID NO: 725 - DNA, 397 bp, Homo sapiens
  misc_feature (229)..(254): n includes a, c, g, or t, or contains no nucleotide
cattattaagctttcttgggtactattttgctggggctcttgcgtgaaggtggtacctgtctcatgatccttaaaagagagaggcttttttcatccaaagctgtagtgttgggaactggggtgggagaggcactttttggaattctgaaagaatcatatctgtgtatatacatactgagtggggaaggatgggggttggcaggggttgagggaggtgggaacaaacagnnnnnnnnnnnnnnnnnnnnnnnnnngagtgtgggaggtcacctgggtccgtcgtcttccttctgtatggtgttgggtttatgtacacactataacacttcctgtgtgagttcatgtacctgtctgtgagtgctttggtgtattgagcctcagtacactccaagggcat

SEQ ID NO: 726 - DNA, 333 bp, Homo sapiens
tgttacactaggtgttagagttccagaatgttcttttgtttgctaaaccttgaagaaacatgtgcctcagcctagatgttttgtcttctcttttctgcacttaatacctgacagtatgaccgatctctgcgcctttctgggggcgggcaagctggcggtagatttgtgatgtcacagtgcaaactgcagtgactgtaaattggcctggcgtgtataaacgttttcagggaatgcagaaggtattaatgaagagacaaaacctttattccatgtgctttgcttcattctgtacatagctctttggctcgtgaacctaattgtaaactttcaggt

SEQ ID NO: 727 - DNA, 350 bp, Homo sapiens
  misc_feature (93)..(119): n includes a, c, g, or t, or contains no nucleotide
ttggaaccaggatactaatgatttctcatctttacttttttttaatcctaatataaagtgaatttgattgaaaaggcaaatagctattagggnnnnnnnnnnnnnnnnnnnnnnnnnnntctgtactttgtttaactgaaaaaaatgtagaaatatatgtaaagaatttaagacaagagtactgaatggatgatttgtcataggctttcccctttctttctgttctagcagcaggaaaagtttctctatatcctctccctctacctgtaacaattttgttttctactgttaattacattgtgtatttatagttctatgcttactgttgtgcatatactggcaataaaact

SEQ ID NO: 728 - DNA, 513 bp, Homo sapiens
tcaagggatcctcctatgtgtgcctcctagagtgcagggattacaggtgtgagccactgctcgtggccaaaagttttctttttttttttttttctttttgaaacagtcttactctgtctcccaggctgctggagtgcagtggcacaatctcggcccgctgcagcctctgcctcttgggttcaagtgattcttccacctcagcctcccaggtagctgggattacaggcacccaccaccacgcctggctaatttttgtatttttaatagagacggggtttcaccatgttggccaggctggtctcgaactcctgacctcaagtgatccacccacctcggcctcccaaagtgctaggattacaggcccgtgcccagccctaaagttttaaactctaggggaattaacagtatttctttacagaatggatttgttaaactagcacagtaaaagtaaagactattctgtttctaggctgttgaatcaaagtgattttagcaattaaactttgtattaat

SEQ ID NO: 729 - DNA, 517 bp, Homo sapiens
  misc_feature (333)..(353): n includes a, c, g, or t, or contains no nucleotide
  misc_feature (472)..(472): n includes a, c, g, or t, or contains no nucleotide
ccaatgtgtagttggctggtggtcttcgggcatgtgagacctgctcttcactgtttccaccccacttggtggcctccaggatggtagtggcaccctcagagccccatcttcagcatgttctgaagcctcagagtggaaattcctgctaaggctctgtgtggacgcctttctcccgtgatctaaaggggacactgtactcaagcttttgacctcatgccttgtgtagtaaaaaaggatttgggggttttgtttggttcctgagagggttgtgttttgtttttgtttccttttgtttatgttttggcctttcctctttgtctttccatgtagacnnnnnnnnnnnnnnnnnnnnngatggctagaggtgtaatgtgcagcttgtttatacggtattttgggaaacttaccttggatgggaaatcgaatcgtggattcaccaggccggtgctggcacactcaccctcgccctttncctccggttcagtacctattgtttctcctttcaaatatgtgattg

SEQ ID NO: 730 - DNA, 525 bp, Homo sapiens
  misc_feature (93)..(431): n includes a, c, g, or t, or contains no nucleotide
  misc_feature (437)..(437): n includes a, c, g, or t, or contains no nucleotide
gaaagcattcattggttttatcacattcagatacttgaaagaaataaatcctgtgaatgtaaacgtggtaaagccttaagaagtttccaggcnnnnnnnnnnnnnnnnnnnnnnnnnnnnnnnnnnnnnnnnnnnnnnnnnnnnnnnnnnnnnnnnnnnnnnnnnnnnnnnnnnnnnnnnnnnnnnnnnnnnnnnnnnnnnnnnnnnnnnnnnnnnnnnnnnnnnnnnnnnnnnnnnnnnnnnnnnnnnnnnnnnnnnnnnnnnnnnnnnnnnnnnnnnnnnnnnnnnnnnnnnnnnnnnnnnnnnnnnnnnnnnnnnnnnnnnnnnnnnnnnnnnnnnnnnnnnnnnnnnnnnnnnnnnnnnnnnnnnnnnnnnnnnnnnnnnnnnnnnnnnnnnnnnnnnnnnnnnnnnnnnnnnnnnnnnnnnnnnnntgcaanaagattggttccagtacaccctgagtatacctaaatccacagatgccagctcttttataaaatggaatattcgcatgtacctacccac

SEQ ID NO: 731 - DNA, 481 bp, Homo sapiens
  misc_feature (27)..(42): n includes a, c, g, or t, or contains no nucleotide
  misc_feature (91)..(91): n includes a, c, g, or t, or contains no nucleotide
  misc_feature (108)..(108): n includes a, c, g, or t, or contains no nucleotide
  misc_feature (125)..(126): n includes a, c, g, or t, or contains no nucleotide
  misc_feature (138)..(138): n includes a, c, g, or t, or contains no nucleotide
  misc_feature (149)..(150): n includes a, c, g, or t, or contains no nucleotide
  misc_feature (155)..(157): n includes a, c, g, or t, or contains no nucleotide
  misc_feature (377)..(380): n includes a, c, g, or t, or contains no nucleotide
  misc_feature (403)..(406): n includes a, c, g, or t, or contains no nucleotide
cgtccaggagagacgcatggcccgaannnnnnnnnnnnnnnnttttccaaaacagcctgttctctcctctctcctccccagagcacccccntgccatcaggggggttngaaatccctctcccccnnaggagccctgcntgctttgcttnntggtnnnagggcaggagagcaaacaaacagtcatggtctaaaacccacatagcactttgctcttagttacatgtaaaattttagatttctaaaacaggtgggcaatcattttgaatactgttctgtgaccctgactgctagttctgaggacactggtggctgtgctatgtgtggccatcctccatgtcccgtccctgtagctgctctgtttagacagcggacagacnnnncacgcccaggggatgtcctcacnnnngtcgccgcgcggtttcccttcgcagatgtgtatactcatgataggtcagaaagtgtatccgctacaataaagttc

SEQ ID NO: 732 - DNA, 456 bp, Homo sapiens
  misc_feature (35)..(35): n includes a, c, g, or t, or contains no nucleotide
gggttgtcttcctcgccaaaaggagggagggactnttgaatttgatatgaatctttaaaaccagaattggctggatatttcccatgattgggaaaagagtgaaatgaggacattctgtaaactgtccctccctaattccaaggatcagaaactccccgttttgctgactcattccataactggagaaagaagctccattgaccgaagccacagggcagcatggaagtttaaattttctctaaaattaaaatgccaaggataaagctggctgcttccaggagggggaagaggagtggggagtgggcggtgaaacttttccagatgaacggaccataaatgtgttactggctttgtgcctgtagctcattttattatgacctatatgctcctgatttaaagagatctgtgtactgtttacttcccacttcccagaatcccttgtatctcctttctcgg

SEQ ID NO: 733 - DNA, 241 bp, Homo sapiens
  misc_feature (94)..(111): n includes a, c, g, or t, or contains no nucleotide
acgacacacagtagggacctgccctgtacatgctagttcaacagaaaggaatggcctttcaccttctcctggtggcaggcaagcagatgtcctnnnnnnnnnnnnnnnnnnctccccaggacgcagactgactcctgtttgctcgctggaccaaccccaggcagaaggtggaaggtgggaacagaggtttagctgcaggacatgtattcccattgcaccgagacctaactgccgctcagag

SEQ ID NO: 734 - DNA, 523 bp, Homo sapiens
  misc_feature (65)..(95): n includes a, c, g, or t, or contains no nucleotide
  misc_feature (250)..(264): n includes a, c, g, or t, or contains no nucleotide
gcagatccggaagctcatcaaagatgggctgatcatccgcaagcctgtgacggtccattcccggnnnnnnnnnnnnnnnnnnnnnnnnnnnnnnnggaagggcaggcacatgggcataggtaagcggaagggtacagccaatgcccgaatgccagagaaggtcacatggatgaggagaatgaggattttgcgccggctgctcagaagataccgtgaatctaagaagatcgatcgccacatgtatcacagnnnnnnnnnnnnnnngaaggggaatgtgttcaaaaacaagcggattctcatggaacacatccacaagctgaaggcagacaaggcccgcaagaagctcctggctgaccaggctgaggcccgcaggtctaagaccaaggaagcacgcaagcgccgtgaagagcgcctccaggccaagaaggaggagatcatcaagactttatccaaggaggaagagaccaagaaataaaacctcccactttgtctgtacatactggcctctgtgattacatagatc

SEQ ID NO: 735 - DNA, 544 bp, Homo sapiens
  misc_feature (148)..(162): n includes a, c, g, or t, or contains no nucleotide
  misc_feature (360)..(360): n includes a, c, g, or t, or contains no nucleotide
ctggcacactccaggggtctaaaacataaaacagttgtgtttagggaaccttaagtcatgcagacatgactgttctctttgtacaagtgtgaatcaaaatatgtatctctttttcagagtctggttaagctatgtcattgtctactgnnnnnnnnnnnnnnnctgtttgtaaagtgcttatggctaacagttcagttctgtatttgttgacaggtaaataagtggagttgagtgccatctttgaaaaaattaccctctagctctaacactgaaaataataataaattgtagatctctgcaactaagtttaaagcagtgtgactgtgttgcttaaatatcaagtattgtttataaccaccnaaaaaaaaaaagccctggtagttttttggcaccttatgtttaaatcagattcttagatttggagtagacctgaccttgttatttattagataacattttgaatgtatccattggatttctaaaatgtattgtgaatttctcagacaaacaggatttatgctggagctctgttttgcttagaaat

SEQ ID NO: 736 - DNA, 323 bp, Homo sapiens
  misc_feature (162)..(215): n includes a, c, g, or t, or contains no nucleotide
tcagactgagcgtgcctaccaaaagcagccgaccatctttcaaaacaagaagagggtcctgctgggagaaactggcaaggagaagctcccgcggtactacaagaacatcggtctgggcttcaagacacccaaggaggctattgagggcacctacattgacannnnnnnnnnnnnnnnnnnnnnnnnnnnnnnnnnnnnnnnnnnnnnnnnnnnnntggtgaccaagatgaagatgcagaggaccattgtcatccgccgagactatctgcactacatccgcaagtacaaccgcttcgagaagcgccacaagaacatgtctgtac

SEQ ID NO: 737 - DNA, 530 bp, Homo sapiens
  misc_feature (109)..(109): n includes a, c, g, or t, or contains no nucleotide
  misc_feature (119)..(119): n includes a, c, g, or t, or contains no nucleotide
  misc_feature (129)..(129): n includes a, c, g, or t, or contains no nucleotide
caacttactttctgttggtatgggaaatgttattaatttctattactaaagttcatatcacaaaatgatatttaataataaccttggggtaaatcatgaattttttttnctacgtgtgngtataaaagncaaaagttgaacagcatggaatctcattgccaaattattagtgaatgtatagttcaggtattctttgagacacacagtatcattaatttccgaattgtatttcagtgttattttttgtttgtgaccactaagcttctgtcttaatacaaagctgttaccttctacagaatttaagtctgaagatgtaaagagagaacaggccttgtgtaacagaagatactcttttttatgctccttactgtgatcacagaaaaattaaaaatccaagtgctctctagatttgttgataaacattttatgcttgcatttaaacttgaaatgtatgagcagaatgagacaatcagttaaatcagaaatgagaagtattataatgtaaaggccttgttttgctgtagcaataa

SEQ ID NO: 738 - DNA, 483 bp, Homo sapiens
  misc_feature (34)..(34): n includes a, c, g, or t, or contains no nucleotide
  misc_feature (38)..(38): n includes a, c, g, or t, or contains no nucleotide
  misc_feature (72)..(93): n includes a, c, g, or t, or contains no nucleotide
  misc_feature (95)..(95): n includes a, c, g, or t, or contains no nucleotide
  misc_feature (98)..(99): n includes a, c, g, or t, or contains no nucleotide
  misc_feature (101)..(103): n includes a, c, g, or t, or contains no nucleotide
  misc_feature (107)..(107): n includes a, c, g, or t, or contains no nucleotide
  misc_feature (119)..(119): n includes a, c, g, or t, or contains no nucleotide
  misc_feature (132)..(132): n includes a, c, g, or t, or contains no nucleotide
  misc_feature (142)..(142): n includes a, c, g, or t, or contains no nucleotide
  misc_feature (149)..(149): n includes a, c, g, or t, or contains no nucleotide
  misc_feature (157)..(157): n includes a, c, g, or t, or contains no nucleotide
  misc_feature (167)..(167): n includes a, c, g, or t, or contains no nucleotide
  misc_feature (172)..(172): n includes a, c, g, or t, or contains no nucleotide
  misc_feature (176)..(176): n includes a, c, g, or t, or contains no nucleotide
  misc_feature (182)..(182): n includes a, c, g, or t, or contains no nucleotide
  misc_feature (192)..(194): n includes a, c, g, or t, or contains no nucleotide
  misc_feature (199)..(200): n includes a, c, g, or t, or contains no nucleotide
  misc_feature (212)..(212): n includes a, c, g, or t, or contains no nucleotide
  misc_feature (226)..(227): n includes a, c, g, or t, or contains no nucleotide
  misc_feature (233)..(233): n includes a, c, g, or t, or contains no nucleotide
  misc_feature (244)..(244): n includes a, c, g, or t, or contains no nucleotide
  misc_feature (247)..(251): n includes a, c, g, or t, or contains no nucleotide
  misc_feature (259)..(259): n includes a, c, g, or t, or contains no nucleotide
  misc_feature (261)..(262): n includes a, c, g, or t, or contains no nucleotide
  misc_feature (268)..(268): n includes a, c, g, or t, or contains no nucleotide
  misc_feature (303)..(303): n includes a, c, g, or t, or contains no nucleotide
gaagccttaacatgcattgctttaattttgcccngggnacaaattttaataatcagcaagactggtttgtgnnnnnnnnnnnnnnnnnnnnnntnttnngnnncctngccagctacccngtatccatgctgnccatatcccntcattgntaaaaagntacctaaacnattcngtgnaaatgnattttttttnnngctgnnaaaaatgctggncaagaagaattttnnaaagcnttaaaataggnggnnnnnaaatttgnanngtatgngtgtgttcacgagaaacataggcttttcaaaaaantttttattcaaggcaaagcaaggaacatcttgagatatgtctcaagaatataaagatgtattattttaagccaaggagctgaaatatatctcagtttataaattcaggtatatccttttggtccccatggcaaccataacttttgaaccaaaaaaaattggttttacatcttatgccgga

SEQ ID NO: 739 - DNA, 563 bp, Homo sapiens
  misc_feature (414)..(414): n includes a, c, g, or t, or contains no nucleotide
ggaactctctaggtgaggaaaacaggacgctgggatgagcccaggaaaggggacctcaacataggtccacaccattcatcccccctgcccagtgcccccacctcaccaggcacattcttctctgtgaagccctcagtggggcctggcccagcccctgccacactccctggttgagcaggccctgcagagcctgaggtcagtggttgcagggcccctggggcagatgggcccccgtgctttgaaggagacctctggctggctgtggttgggcggctagatgagtagaaagaactcagcgtctgtggcttatgtgtctggctctctcggtccaagagtttgtctaagatctggaagacagaagcagtgacctccagagaagcagtgacaggatgccctttagctcctgacttctanttaccttcctttctccttgaaacagccaattgctacatcctcagggagccttccccacttacaaccacaggatgacctcctggtttacatgtctttttgtaacttatttaaccccaacatatcttggtatcctccattaacaccacagg

SEQ ID NO: 740 - DNA, 559 bp, Homo sapiens
  misc_feature (189)..(237): n includes a, c, g, or t, or contains no nucleotide
accatgtctgggaaagagaagaccaaatttgatgaaatggcaaaggtggataaagtacactatgatcaggaaatgaaggataatggaccagttgagggaggcaagaagaaggaccctaatgccctcaaaaggccactgtctggattcttcctgttctgttcagaattccaccccaagatcaaatccacnnnnnnnnnnnnnnnnnnnnnnnnnnnnnnnnnnnnnnnnnnnnnnnnntggattaactatagtgacagggaaaagcagccttacatcactaaggcagcagacctgaaggagaagtatgagaaggatgttgctgactataagtctaaaggaaagtttgatagtgcaaagggtcccactaaaattgcctggaaaaaggtgaaagagaaagacaaagaagatgaggaggaagaagaggaggaggaagagaagaaggaggagggggaataaaaaaactgtttatctgtcatcttatgaatgccttagagtaggggagtgtcataattgacatatctcttatttgagaagtgtctgttgccctcattaagtttaa

SEQ ID NO: 741 - DNA, 557 bp, Homo sapiens
taaggtatccaaggttcttatctacagaagccatttctataatgagaaggctgttaagaagaaatcctgaacggcgccttggggctagcgagaaagatgcagaggatgtaaaaaagcacccatttttccggctaattgattggagcgctctgatggacaaaaaagtaaagccaccatttatacctaccataagaggacgagaagatgttagtaattttgatgatgaatttacctcagaagcacctattctgactccacctcgagaaccaaggatactttcggaagaggagcaggaaatgttcagagattttgactacattgctgattggtgttaagttgctagacactgcgaaaccaagctgactcacaagaagacctcttaaaaatagcaacccttcatttgctctctgtgccaccaatagcttctgagttttttgttgttgttgtttttattgaaacacgtgaagatttgtttaaaagtaccattctaatacttcttcaaaagtggctcctcattgtacttcagcgtaaatatgagcactggaaacagtttcatg

SEQ ID NO: 742 - DNA, 523 bp, Homo sapiens
tatagcctgccttcaattttgatcctttattctttctatttgtcaggtgcacaagattaccttcctgttttagccttctgtcttgtcaccaaccattcttacttggtggccatgtacttggaaaaaggccgcatgatctttctggctccactcagtgtctaaggcaccctgcttcctttgcttgcatcccacagactatttccctcatcctatttactgcagcaaatctctccttagttgatgagactgtgtttatctccctttaaaaccctacctatcctgaatggtctgtcattgtctgcctttaaaatccttcctctttcttcctcctctattctctaaataatgatggggctaagttatacccaaagctcactttacaaaatatttcctcagtactttgcagaaaacaccaaacaaaaatgccattttaaaaaaggtgtattttttcttttagaatgtaagctcctcaagagcagggacaatgttttctgtatgttctattgtgcctagtacactgtaa

SEQ ID NO: 743 - DNA, 471 bp, Homo sapiens
  misc_feature (196)..(196): n includes a, c, g, or t, or contains no nucleotide
  misc_feature (230)..(230): n includes a, c, g, or t, or contains no nucleotide
  misc_feature (256)..(256): n includes a, c, g, or t, or contains no nucleotide
  misc_feature (382)..(428): n includes a, c, g, or t, or contains no nucleotide
ggcacaggaagctctgggccctcctctcaacatccattatctcaagctcatcgacagggaaaacttcgtggacattgttgatgccaagttgaagattcctgtctctggatccaaatcagagggccttctctacgtccactcatccagaggtggcccctttcagaggtggcaccttgacgaggtctttttagagctncaaggatggtcagcagattcctgtgttcaagctncagtggggaaaacggtgatgaagtgnaaaaaggagtagagacgacccagaagacccagcttgcttctagtccatccttccctcatctctaccatatggccactggggtggtggcccatctcagtgacagacactcctgcaacccagttttcnnnnnnnnnnnnnnnnnnnnnnnnnnnnnnnnnnnnnnnnnnnnnnnggtgtaattctaacttgggcacaacgaatgctatttgtcattt

SEQ ID NO: 744 - DNA, 95 bp, Homo sapiens
gatcaaagccagagaggagcctatggaatgtggatcaaatgccagttgtgacgaaatgaggaatgtatatgttggctgtttttccccaacatctc

SEQ ID NO: 745 - DNA, 505 bp, Homo sapiens
aaattagcacttttggggccaatggagaaatgcagcattcactctccctgtcttttccccttccctcagcagaaacgtgtttatcagcaagtcgtgagtcaaactgctgccttttaaaaaacccacaaaatgctgattcagttcaaaattaatgcaaatgtttcaaaactgggtttctgatatttgtaaatgtgtttctttattagataagagtgtattaccattaaagtcattagtataatattgctttcaaaaagaaatggtagacaaaactataatccagcatcttttattgcattggaaagactggcaaagtcttttggatgggttgggagatgtggctggaaagtactttggaaaatatacaatcaagatatctcatggcatattaaaagaaaaatcttaatagcagtgttggcttttatttggattttttcatctcagttttttctgtggaatctccttcattggcattgttatttaatcataaacggggcagatgtct

SEQ ID NO: 746 - DNA, 457 bp, Homo sapiens
  misc_feature (109)..(109): n includes a, c, g, or t, or contains no nucleotide
  misc_feature (244)..(258): n includes a, c, g, or t, or contains no nucleotide
  misc_feature (391)..(400): n includes a, c, g, or t, or contains no nucleotide
  misc_feature (402)..(404): n includes a, c, g, or t, or contains no nucleotide
  misc_feature (406)..(406): n includes a, c, g, or t, or contains no nucleotide
  misc_feature (408)..(410): n includes a, c, g, or t, or contains no nucleotide
  misc_feature (412)..(414): n includes a, c, g, or t, or contains no nucleotide
  misc_feature (416)..(420): n includes a, c, g, or t, or contains no nucleotide
acagggtgctcagctcttccaccgtcattttgaattgttcacatgggtaattggtcatggaaatgatcagattgaccttgattgactgtcaggcatggctttgtttctngtttcaatctgttctcgttccttgtaccggattattctactcctgcaatgaaccctgttgacaccggatttagctcttgtcggccttcgtggggagctgtttgtgttaatatgagctactgcatgtaattcttannnnnnnnnnnnnnnattgtattgtatttttgtgatctgtaatgaaaagaatctgtactgcaagtaaaacctactccccaaaaatgtgtggctttgggtctgcattaaacgctgtagtccatgttcatgccaaaaaaaaaaaaaaaannnnnnnnnnannnanannnannnannnnngctttcagatcacactttatccacacaggaaagccag

SEQ ID NO: 747 - DNA, 505 bp, Homo sapiens
cacctgaagatatgccacaaacaagttctagtcactctgatcttggccagcttgcttctcaaggaggtttaggaatgtatgaaacacccctgttcctagctcatgaagaagagtcaggtggccgaagtgttcccactactccactacaagtagcagccccagtgactgtatttactgagagcaccacctctgatgcttcggaacatgcctctcaatctgttccaatggtgactacatccactggcactttatctacaacaaatgaaacagcaacaggtgatgatggagatgaagtatttgtggaggcagaatctgaaggtattagttcagaagcaggcctagaaattgatagccagcaggaagaagagccggttcaagcatctgatgagtcagatctcccctccaccagccaggatcctccttctagctcatctgtagatactagtagtagtcaaccaaagcctttcagacgagtaagacttcagacaacattgagacaaggtgt

SEQ ID NO: 748 - DNA, 394 bp, Homo sapiens
gcgaaatgcgagtcggctttcctttccaagaggaatcctcggcagataaactggactgtcctctacagaaggaagcacaaaaagggacagtcggaagaaattcaaaagaaaagaacccgccgagcagtcaaattccagagggccattactggtgcatctcttgctgatataatggccaagaggaatcagaaacctgaagttagaaaggctcaacgagaacaagctatcagggctgctaaggaagcaaaaaaggctaagcaagcatctaaaaagactgcaatggctgctgctaaggcacctacaaaggcagcacctaagcaaaagattgtgaagcctgtgaaagtttcagctccccgagttggtggaaaacgctaaactggcagattagattttt

SEQ ID NO: 749 - DNA, 530 bp, Homo sapiens
  misc_feature (82)..(82): n includes a, c, g, or t, or contains no nucleotide
  misc_feature (91)..(91): n includes a, c, g, or t, or contains no nucleotide
  misc_feature (94)..(94): n includes a, c, g, or t, or contains no nucleotide
  misc_feature (96)..(105): n includes a, c, g, or t, or contains no nucleotide
  misc_feature (107)..(112): n includes a, c, g, or t, or contains no nucleotide
  misc_feature (114)..(190): n includes a, c, g, or t, or contains no nucleotide
  misc_feature (193)..(212): n includes a, c, g, or t, or contains no nucleotide
  misc_feature (214)..(215): n includes a, c, g, or t, or contains no nucleotide
  misc_feature (262)..(262): n includes a, c, g, or t, or contains no nucleotide
  misc_feature (376)..(468): n includes a, c, g, or t, or contains no nucleotide
tctggtaactcatgggtttttggcctcataagatggtccactctgtacacaggcattcctcctgcaataatgttgtatcttngagaccgtngtnannnnnnnnnncnnnnnncnnnnnnnnnnnnnnnnnnnnnnnnnnnnnnnnnnnnnnnnnnnnnnnnnnnnnnnnnnnnnnnnnnnnnnnnnnnnnacnnnnnnnnnnnnnnnnnnnnannccagtaccttgcacatagaagtagcaacccatcccttgcctattttncatcttgctgttttcttttttttaaaaaaatggatgtgacttgttttgaatgttttgtattatacttgtttttgtgtgtgcataaattcattctgtaggatcttaagaaaaagnnnnnnnnnnnnnnnnnnnnnnnnnnnnnnnnnnnnnnnnnnnnnnnnnnnnnnnnnnnnnnnnnnnnnnnnnnnnnnnnnnnnnnnnnnnnnaaaagtactatcggaataactctgcagtgacagaatttgaagtttggctagcatccatactt

SEQ ID NO: 750 - DNA, 602 bp, Homo sapiens
cgcttctgccgaggtgtccctgatgccaagattcgcatttttgacctggggcggaaaaaggcaaaagtggatgagtttccgctttgtggccacatggtgtcagatgaatatgagcagctgtcctctgaagccctggaggctgcccgaatttgtgccaataagtacatggtaaaaagttgtggcaaagatggcttccatatccgggtgcggctccaccccttccacgtcatccgcatcaacaagatgttgtcctgtgctggggctgacaggctccaaacaggcatgcgaggtgcctttggaaagccccagggcactgtggccagggttcacattggccaagttatcatgtccatccgcaccaagctgcagaacaaggagcatgtgattgaggccctgcgcagggccaagttcaagtttcctggccgccagaagatccacatctcaaagaagtggggcttcaccaagttcaatgctgatgaatttgaagacatggtggctgaaaagcggctcatcccagatggctgtggggtcaagtacatccccagtcgtggccctctggacaagtggcgggccctgcactcatgagggcttccaatgtgctg

SEQ ID NO: 751 - DNA, 516 bp, Homo sapiens
  misc_feature (41)..(58): n includes a, c, g, or t, or contains no nucleotide
acttgcctgtaatcagtgaagggctgtgcaccttgtactannnnnnnnnnnnnnnnnngctggacagataatgggccagtgttattgaggtgatcaagatctgttccacagggctaatgccaccatctcccctcaaaattttgtagaggttctaaaaagaaagtggtatgttgtgtgatgatcagcactaagtcctgcattcctgttaaagccacttgggtcataagaagggagtaaaaaatgaagtctgactagaattctattgcagaggccaagtacatttagtatggcattgagttgtgatatagttttactttgatgtgcattttgaatttcagctacacctagatagacgtaaaatgataattaaaatgctgtaaccaacttatctaataaaattggcaaccagccactattttgttgactatgagaaagttaaaagtttatgttaatttttagggtctgatagaatatttcatgtgtattacagtggtattcatatgctatgtctctaaa

SEQ ID NO: 752 - DNA, 583 bp, Homo sapiens
  misc_feature (31)..(31): n includes a, c, g, or t, or contains no nucleotide
  misc_feature (106)..(121): n includes a, c, g, or t, or contains no nucleotide
  misc_feature (134)..(134): n includes a, c, g, or t, or contains no nucleotide
  misc_feature (333)..(333): n includes a, c, g, or t, or contains no nucleotide
  misc_feature (335)..(351): n includes a, c, g, or t, or contains no nucleotide
  misc_feature (357)..(402): n includes a, c, g, or t, or contains no nucleotide
  misc_feature (505)..(526): n includes a, c, g, or t, or contains no nucleotide
ggctagttaaactcatattgaaacttcatcntagtctcttaattttttaacactaaattcaagtcatttgttttaagtctctaaaaaagaagattgcagtcatccnnnnnnnnnnnnnnnntctgatcgcaaantacactaaatgtggagtgtaggaaccaaaatgaaacctgctgtatggaaactactttcacttatggttcattggtttttgtaccaatattttttatgcacttcagtgcaagtcttgtcagttaaccttactttatgagtaagctaaataacccaaattacatttctttaaacctgttttactactatggcactttgatnannnnnnnnnnnnnnnnnctttannnnnnnnnnnnnnnnnnnnnnnnnnnnnnnnnnnnnnnnnnnnnnacatgtggatatctatgaatggtaatgttttccttcatgtaagtgcctattcagagtttcagaattttaaaatgccaaatattttcatggtcatttgcatgtnnnnnnnnnnnnnnnnnnnnnnagagattttgaaaaccaattgtatttaaccagcctcaaattgtgcaaccatgatgta

SEQ ID NO: 753 - DNA, 263 bp, Homo sapiens
  misc_feature (171)..(175): n includes a, c, g, or t, or contains no nucleotide
gattccgtgtcttgatcacggggtgggagggaaccgtggcgtccctgcgtggggcccatgggtgagacactccagtactgagacctagagtccagatgcttgtaggagccaagtcgtgttctaagtatttatttaaaacaaaagaatcacgttttcccatttgtacttcannnnnagcccctgttttgcacagccgagtactggcgagtatgttctatgttgggcctcctgctgcaaaacaataaacagaggacgcagaggtc

SEQ ID NO: 754 - DNA, 487 bp, Homo sapiens
  misc_feature (90)..(90): n includes a, c, g, or t, or contains no nucleotide
  misc_feature (93)..(107): n includes a, c, g, or t, or contains no nucleotide
  misc_feature (250)..(250): n includes a, c, g, or t, or contains no nucleotide
accagccgaggctgtgcgggcaactgggtcagcctcccgtcaggagagaagccgcgtctgtgggacgaagaccgggcacccgccagaganggnnnnnnnnnnnnnnngcgtcctttcaggccccgcgttgttacaggacactcgctgggggccctgtgcccttgccggcggcaggttgcagccaccgcggcccaatgtcaccttcactcacagtctgagttcttgtccgcctgtcacgccctcaccaccntccccttccagccaccaccctttccgttccgctcgggccttcccagaagcgtcctgtgactctgggagaggtgacacctcactaaggggccgaccccatggagtaacgcgcccggccccgatgcgaatcaggcctcccctacatctgggggcgttggccgcgagattcccattgacacctttgtttcgtgtgcttttaaattcaggttaaatgttgcaataatctgatgcagaagac

SEQ ID NO: 755 - DNA, 454 bp, Homo sapiens
accagccaatcctgctgtctcaagggtatccgtacctcaatgtcagttacattcagcagaaaaagtgacatttaatggaaagcaaaacaaatcaggtcctgatttaaaattttaacacgtttagatagcttatttaaattctaagactgtttttacagactgtattatttgtatataaatatgaactatagtttttactagtatcaccaaattgagtgatacaaatttcatctattttattaccctatttttaagggaattttatgttttgtttaaccttgatgaattgtataaagagagaatttaaaaaattacattctttattttctattagctgtattcatactttggttgcttcagactttatatattgttcttaaaagttaggaaagaatttcatgtgttttaaattgtcacttctattctttacagaaccttgtagtgccaaaaactt

SEQ ID NO: 756 - DNA, 554 bp, Homo sapiens
  misc_feature (106)..(119): n includes a, c, g, or t, or contains no nucleotide
  misc_feature (280)..(280): n includes a, c, g, or t, or contains no nucleotide
  misc_feature (367)..(381): n includes a, c, g, or t, or contains no nucleotide
  misc_feature (458)..(458): n includes a, c, g, or t, or contains no nucleotide
gcccttagttcagttattttagttgtataagttgatattttttttctggaatgtagccatttgctgttatctgggaaacaagattctaacaggaaaccagcctaannnnnnnnnnnnnnagcgctgcctcggagtctgtgcccgtcgcgtcccctgcttgagttttgcacttggaagaaccctgcaccggctggcgtgtgcgacggcccagtcccatccagagcatggagcccgaccccagccagcgccttccactccatcatttcatttcacacccccngaagggaggggaggccaggaggggagctgctcctgccagaagctggtgggtgaccgttgggaatcggccacacctggtgtccatggnnnnnnnnnnnnnnntccattcatttgtacagaaacatttttgaaaaattcttttcaataagatgcaaaatcttccaacttttcaacccaangtgatgaatatttgattttgttctagatttcctgtagctgtgaattgttaaaatgtatgattcaggataaaacgtaaacacgtgctgttagtaatt

SEQ ID NO: 757 - DNA, 236 bp, Homo sapiens
gtattagccatttgttgtaaatgccaataaaatattcaccaggggcaagaatgtacattttctttttagaaaaccaaatgtactttagacatgaatgcaactatttaaagaatagcttcatttatgttattccttacatgtcataagattcttacttaaacttggtcttctttcaagttgtttgtatgaagatgctgtacccacttgaacagtcctcaggtgtttacataaatact

SEQ ID NO: 758 - DNA, 368 bp, Homo sapiens
  misc_feature (114)..(130): n includes a, c, g, or t, or contains no nucleotide
  misc_feature (284)..(298): n includes a, c, g, or t, or contains no nucleotide
gacacaccatcctgagaagccactttttcctaccacaggaagcccaagagaacactatagctagcagtctgacagccaaactgaaccctggccttttgtatcctgccaggtttnnnnnnnnnnnnnnnnnccctaaaagtgcccagaagatcaagccggtgcttgagcggtggatggctgaggctgaggcccgccatcgagcaggtatgcagaacctgaccgagtttatcgggagtgaaccatccaaaaagcgcaagcggcgcacctccttcacaccccaggcnnnnnnnnnnnnnnntgcccactttgagaagaacacacacccttctgggcaggaaatgaccgaaattgctgagaagctgaactat

SEQ ID NO: 759 - DNA, 526 bp, Homo sapiens
  misc_feature (33)..(33): n includes a, c, g, or t, or contains no nucleotide
  misc_feature (49)..(49): n includes a, c, g, or t, or contains no nucleotide
  misc_feature (56)..(56): n includes a, c, g, or t, or contains no nucleotide
  misc_feature (76)..(76): n includes a, c, g, or t, or contains no nucleotide
  misc_feature (82)..(82): n includes a, c, g, or t, or contains no nucleotide
  misc_feature (104)..(104): n includes a, c, g, or t, or contains no nucleotide
  misc_feature (111)..(111): n includes a, c, g, or t, or contains no nucleotide
  misc_feature (145)..(145): n includes a, c, g, or t, or contains no nucleotide
  misc_feature (149)..(149): n includes a, c, g, or t, or contains no nucleotide
  misc_feature (166)..(166): n includes a, c, g, or t, or contains no nucleotide
  misc_feature (172)..(172): n includes a, c, g, or t, or contains no nucleotide
  misc_feature (177)..(177): n includes a, c, g, or t, or contains no nucleotide
  misc_feature (185)..(185): n includes a, c, g, or t, or contains no nucleotide
  misc_feature (188)..(189): n includes a, c, g, or t, or contains no nucleotide
  misc_feature (200)..(200): n includes a, c, g, or t, or contains no nucleotide
  misc_feature (213)..(213): n includes a, c, g, or t, or contains no nucleotide
  misc_feature (220)..(220): n includes a, c, g, or t, or contains no nucleotide
  misc_feature (231)..(231): n includes a, c, g, or t, or contains no nucleotide
  misc_feature (258)..(258): n includes a, c, g, or t, or contains no nucleotide
  misc_feature (271)..(271): n includes a, c, g, or t, or contains no nucleotide
  misc_feature (273)..(273): n includes a, c, g, or t, or contains no nucleotide
  misc_feature (285)..(286): n includes a, c, g, or t, or contains no nucleotide
catttcttaatacactagaaaggggaaataaanttaaagtacacaagtnccaagtnctaaaactttagtacttttnccatgncagatttgtgcacatgtgagangggtgtnccagtttgtctagtgattgttatttagagagttngganccactattgtgtgttgnctaatncattngactgtangtnncccaaaaaagnccttgtgaaaatngttatgnccctatgtaancagcagagtaacataaaataaaagtancattttataaacncnatttactatggnnctttgtaacaattgcatacccatattttaagggacaggtgaatttactactttctaaagtttattgatacttcccttttatgtaaaatgtagtagtgatacctatatttccacattgtgcattgtgacacacttgtctagggatgcctggaagtgtataaaattggactgcatttcttagagtgttttactatagatcagtctcatgggccatctcttcctcagatgtaaatgatatctg

SEQ ID NO: 760 - DNA, 527 bp, Homo sapiens
  misc_feature (56)..(56): n includes a, c, g, or t, or contains no nucleotide
  misc_feature (164)..(164): n includes a, c, g, or t, or contains no nucleotide
  misc_feature (167)..(168): n includes a, c, g, or t, or contains no nucleotide
  misc_feature (172)..(172): n includes a, c, g, or t, or contains no nucleotide
  misc_feature (175)..(175): n includes a, c, g, or t, or contains no nucleotide
  misc_feature (180)..(180): n includes a, c, g, or t, or contains no nucleotide
  misc_feature (184)..(184): n includes a, c, g, or t, or contains no nucleotide
  misc_feature (189)..(189): n includes a, c, g, or t, or contains no nucleotide
  misc_feature (249)..(249): n includes a, c, g, or t, or contains no nucleotide
  misc_feature (344)..(379): n includes a, c, g, or t, or contains no nucleotide
  misc_feature (454)..(454): n includes a, c, g, or t, or contains no nucleotide
gatgttattcaactccttccagttgtcttgaacagcctgactcctgccagccctanggaagttccttttatgcattggaggaaaaacatgttggcttttctcttgacgtgggagaaattgaaaagaaggggaaggggaagaaaagaaggggaagaagatcaaanaannaaanaanaaggngaanaaaanaaggggaagaagatcaaaacccaccatgccccaggctcagcagggagctgctggatgagnaagggcctgaagtcttgcaggactcactggatagatgttattcaactccttcaggttgtcttgaactgactgactcatgccagccctacagaagnnnnnnnnnnnnnnnnnnnnnnnnnnnnnnnnnnnngctgttgacatggatgaaattgaaaagtaccaagaagtggaagaagaccaagacccatcatgccccaggctcagnggggagctgttggatgagaaagagcctgaagtcttgcaggagtcactggatagatgctattcaactccttcag

SEQ ID NO: 761 - DNA, 511 bp, Homo sapiens
ccacagccgatgacatcatcgactccctgtttgtcctctccctgcttggctccatcttcagcctgtctgtgattgctgcggaccgctacatcaccatcttccacgcactgcggtaccacagcatcgtgaccatgcgccgcactgtggtggtgcttacggtcatctggacgttctgcacggggactggcatcaccatggtgatcttctcccatcatgtgcccacagtgatcaccttcacgtcgctgttcccgctgatgctggtcttcatcctgtgcctctatgtgcacatgttcctgctggctcgatcccacaccaggaagatctccaccctccccagagccaacatgaaaggggccatcacactgaccatcctgctcggggtcttcatcttctgctgggccccctttgtgcttcatgtcctcttgatgacattctgcccaagtaacccctactgcgcctgctacatgtctctcttccaggtgaacggcatgttgatcatgtgcaatgccgt

SEQ ID NO: 762 - DNA, 204 bp, Homo sapiens
  misc_feature (51)..(65): n includes a, c, g, or t, or contains no nucleotide
tatgcgaacagaccaacctggcattacagttggcctctccttgaggtgggnnnnnnnnnnnnnnntggccaggggtggccatgtaagtcccatcaggacgtagtcatgcctcctgcatttcgctacccgagtttagtaacagtgcagattccacgttcttgttccgatactctgagaagtgcctgatgttgatgtacttacaga

SEQ ID NO: 763 - DNA, 512 bp, Homo sapiens
  misc_feature (32)..(58): n includes a, c, g, or t, or contains no nucleotide
  misc_feature (347)..(362): n includes a, c, g, or t, or contains no nucleotide
  misc_feature (369)..(394): n includes a, c, g, or t, or contains no nucleotide
aagcatgctttatatgagtgtcttctgggaannnnnnnnnnnnnnnnnnnnnnnnnnngattttcaaaatgctaaagactcacactgcagcaatcatcccagatgattaaattcaaagaaataggttcacaacaggaatatactgaagaactagagtgtcactgctggtgaactgtggcacggttgctcaacacatcacctcggacaaattcaggaagcatttctttagcccacaagtccagacccaggtgctctgtatgtttgtttttaatattcatcatatccaagttcactctgtcttcctgagcagtggaagatcatattgctgtaacttcttttaagtagtnnnnnnnnnnnnnnnnttaaagnnnnnnnnnnnnnnnnnnnnnnnnnngttttatccaacttttgtgcatatatataaagtatgtcatggcatggtttgcttaggagttcagagttccttcatcatcgaaatagtgattaagtgatcccagaacaaggaatactag

SEQ ID NO: 764 - DNA, 516 bp, Homo sapiens
  misc_feature (44)..(91): n includes a, c, g, or t, or contains no nucleotide
  misc_feature (188)..(213): n includes a, c, g, or t, or contains no nucleotide
  misc_feature (355)..(376): n includes a, c, g, or t, or contains no nucleotide
gctccctctgagtcccatgctggtgcccagcctaggccccgagnnnnnnnnnnnnnnnnnnnnnnnnnnnnnnnnnnnnnnnnnnnnnnnngtggcccccatgacgcagaactcctggaggtagcagcagctcctgccccagagtggtgtcctctggcagcccagccccaggctctgtgacagcctannnnnnnnnnnnnnnnnnnnnnnnnnggaccacagaaggagagttggcggtcacagagggctcctctgccaggcagtgggaagccctgggtttggcctcaggagctgggggtgcagtgggggactgccctagtccttgccaggtcgccagcaccctggagaagcatgnnnnnnnnnnnnnnnnnnnnnngccaggccccaaaggccacgactgcctgttggggacaggagatgcatggacagtgtgctcaagctgtgggcatgtgcttgcctgcgggagaggtccttcactgtgtgtacacagcaagagcatgtgtgtgccacttcccc

SEQ ID NO: 765 - DNA, 562 bp, Homo sapiens
  misc_feature (98)..(98): n includes a, c, g, or t, or contains no nucleotide
  misc_feature (211)..(211): n includes a, c, g, or t, or contains no nucleotide
  misc_feature (341)..(357): n includes a, c, g, or t, or contains no nucleotide
  misc_feature (509)..(510): n includes a, c, g, or t, or contains no nucleotide
gtctatttgtggtcactagcactgtctcctaaacttgtaagaggtctgaagctattctttgatttttgctagtgctattaacttatgtagacctgttnaaaagcagagcaacacaattatagttatcctactgagccatggattctgagttttgttttaaaagtgaaagccaagttggtgtatgtaaaggatttccatgtagctgtggtgnctagttattactggctacattatatgctaagtgtatttgtgttccccaagtgtacaagccttctatcaaaagtatgttctataactcatatattcaaggtgtagggtatgaaaatgcaaagtttaggagnnnnnnnnnnnnnnnnngtgtcctccaaactgaaattgtttgtaacgatagtcttttacaggttttcctttaaagatgtttgtgtgcttttaattgacaactaacttcttgctgctgtatagtaaaatattaatatatttttatcattaaactgctgcatgactatcanntttgagtgaagagaaaatgttataaaaaagatgccttaaacagtacattttg

SEQ ID NO: 766 - DNA, 454 bp, Homo sapiens
  misc_feature (287)..(301): n includes a, c, g, or t, or contains no nucleotide
tgtgcggacggtgacaatgtttacaagcaccacatttacacatccacacacgcacacgggcactcgcgaggcgacttctcaagcttttgaatgggtgagtggtcgggtatctagtttttgcactgtcttactattcaaggtaagaggatacaaacaagaggaccacttgtctctaatttatgaatggtgtccatcctttccccatccctgcctcctgcccctgacgcccatttccccccttagagcagcgaaactgccccctcctgcccgcccttgcctgtcggtgnnnnnnnnnnnnnnngtgaggtgaacgtggacctgtttctgtttccagtctgtggtgatgctgtctgtctgtctgagtctcgtggccgcccctggaccagtgatgactgatgaatcttatgagcttctgattgatctcggggtccatctgtgatatttctttgtgcca

SEQ ID NO: 767 - DNA, 432 bp, Homo sapiens
  misc_feature (46)..(46): n includes a, c, g, or t, or contains no nucleotide
  misc_feature (51)..(51): n includes a, c, g, or t, or contains no nucleotide
  misc_feature (57)..(57): n includes a, c, g, or t, or contains no nucleotide
  misc_feature (84)..(84): n includes a, c, g, or t, or contains no nucleotide
  misc_feature (132)..(133): n includes a, c, g, or t, or contains no nucleotide
  misc_feature (148)..(148): n includes a, c, g, or t, or contains no nucleotide
  misc_feature (178)..(178): n includes a, c, g, or t, or contains no nucleotide
  misc_feature (201)..(201): n includes a, c, g, or t, or contains no nucleotide
  misc_feature (203)..(203): n includes a, c, g, or t, or contains no nucleotide
  misc_feature (206)..(266): n includes a, c, g, or t, or contains no nucleotide
  misc_feature (354)..(370): n includes a, c, g, or t, or contains no nucleotide
tcttcttgcaggaaagctgacttggaaacacggggaggtggcaggnagggncaaaanggactctggcaagcagatccacttgtntgggtccctgcagtgaagaacccaagatccaggtacctcagcctggannaaaccgtgcactgcnggtcttcccttctatcaaaactaaaagcanggaacagaagtcaattgaaaccncnggnnnnnnnnnnnnnnnnnnnnnnnnnnnnnnnnnnnnnnnnnnnnnnnnnnnnnnnnnnnnntaattagaggataatttggagaatttatactatttacacggaccaccctgcaaagatcagggaaggctggatttcttcctccttgatnnnnnnnnnnnnnnnnnaaggagaaaacccttctccaaacaggagtttctcctctttccctggtcctgcagaagaaaga

SEQ ID NO: 768 - DNA, 468 bp, Homo sapiens
  misc_feature (26)..(26): n includes a, c, g, or t, or contains no nucleotide
  misc_feature (37)..(37): n includes a, c, g, or t, or contains no nucleotide
  misc_feature (59)..(59): n includes a, c, g, or t, or contains no nucleotide
  misc_feature (134)..(153): n includes a, c, g, or t, or contains no nucleotide
  misc_feature (157)..(157): n includes a, c, g, or t, or contains no nucleotide
  misc_feature (255)..(256): n includes a, c, g, or t, or contains no nucleotide
cttggtgacgttcttcctagcagtgntaatacatgcnagaagtaagagcatttgtggcntgaacttgccagatgcaaataccacagactccaagaaaacccgagttggggtttgttttgttttgattttttttnnnnnnnnnnnnnnnnnnnnaaancactgaaaattgaattcttatcttccagaggctacaattattataatggacaatacttttacctttgtctctaaagatcagattagttttatttgttnncttacgtgctttgattatcccctctgaattatagaccgagtcttgttgtttagcctaagagaagatttatgtagtaatttcttctcaggtatggaaccacggtcataactaacatgttggccagaatagaaccactggttaaacatattttattcaccattaagtgatctttatcaatattctggattagacaacaaattacctttctgggt

SEQ ID NO: 769 - DNA, 569 bp, Homo sapiens
  misc_feature (31)..(32): n includes a, c, g, or t, or contains no nucleotide
  misc_feature (86)..(86): n includes a, c, g, or t, or contains no nucleotide
  misc_feature (98)..(98): n includes a, c, g, or t, or contains no nucleotide
  misc_feature (123)..(123): n includes a, c, g, or t, or contains no nucleotide
  misc_feature (146)..(146): n includes a, c, g, or t, or contains no nucleotide
  misc_feature (537)..(537): n includes a, c, g, or t, or contains no nucleotide
ctggcctctctctgccaaaaagcattttttnntttaaatatgttttttaagaacagggaaaattaaacaaaaccccaggttatttnttccctgcccanagccagcctgggattgtcagccttnaatcccctttccttcctcttttngggttttcttctttctcctttaagcacttacatggttgggggtaagactaggctggggcattctgggggcccggaggtctccgttgcttcttggttggggtttgctgctgctgtgcccccctcccccttccccatctcggcactagaattcgccactctcccaccccccagcccccacctctgcctccaggtctcatcttccaccccaaaaatgtctgtctctctctttttgttttgtttgttgttggttttttatttctttttggtttgctttctgtttttgttttgtttttcttttttttctttctttttttttttttttacaattttgaggtcttcgtgttcaaggagaagctattatattttgttaagaaagtggggagaaaaaaanccaagaggccaccgtgcctttgtaaagaaaca

SEQ ID NO: 770 - DNA, 480 bp, Homo sapiens
  misc_feature (205)..(205): n includes a, c, g, or t, or contains no nucleotide
  misc_feature (220)..(220): n includes a, c, g, or t, or contains no nucleotide
  misc_feature (226)..(229): n includes a, c, g, or t, or contains no nucleotide
  misc_feature (233)..(249): n includes a, c, g, or t, or contains no nucleotide
ggatgggcacctcatgcctgtctcgccacctcctgtgccaatgtcccaccctccacctgggggtggggtgcagcttccacttactgattagaagacaccactgccctcccttcccccctccctgtctggtgtcctgtgcccccatctgtctgtctatatttgtctgtactcccctaggagaagtattttgccatatataaaaccnctgtcctgtcctttnaaaaannnncccnnnnnnnnnnnnnnnnnctcgccacatagtcgtcagcgtaggcacctgggagctgctgatatgcacggggagttgaaagggtgggtgcctgaagatgttgtgccctgagtcattgactcaaaagaaaagatgatcctttgattttggccctctgatgtattgctagagccaggagtgccttgggcagtcccagctccacactgccctgagccccttcacttacctgtctctccacaagtagagccaaa

SEQ ID NO: 771 - DNA, 448 bp, Homo sapiens
  misc_feature (43)..(133): n includes a, c, g, or t, or contains no nucleotide
  misc_feature (315)..(315): n includes a, c, g, or t, or contains no nucleotide
  misc_feature (390)..(390): n includes a, c, g, or t, or contains no nucleotide
gcagccagtgattgggatcagccagcgggtgcggatgaactcnnnnnnnnnnnnnnnnnnnnnnnnnnnnnnnnnnnnnnnnnnnnnnnnnnnnnnnnnnnnnnnnnnnnnnnnnnnnnnnnnnnnnnnnnnnggctactcctacaagagggggaaggatttgaaagaacagcatgatcagaaagtatgtgagagggagatgcagcgaatcactctgcccttgtctgccttcaccaaccccacctgtgagattgtggatgagaagactgtcgtggtccacaccagccagactccagttgaccctcaggagggcancaccccccttatgggccaggccgggactcctggggcctgagcccccccagtgggcaggagcccatgcagacactngtgcaggacagcccaccctcctacagctaggaggaactaccactttgtgttctggtta

SEQ ID NO: 772 - DNA, 505 bp, Homo sapiens
  misc_feature (57)..(57): n includes a, c, g, or t, or contains no nucleotide
  misc_feature (67)..(67): n includes a, c, g, or t, or contains no nucleotide
  misc_feature (85)..(85): n includes a, c, g, or t, or contains no nucleotide
  misc_feature (124)..(124): n includes a, c, g, or t, or contains no nucleotide
  misc_feature (130)..(130): n includes a, c, g, or t, or contains no nucleotide
  misc_feature (140)..(140): n includes a, c, g, or t, or contains no nucleotide
  misc_feature (167)..(167): n includes a, c, g, or t, or contains no nucleotide
  misc_feature (182)..(199): n includes a, c, g, or t, or contains no nucleotide
  misc_feature (211)..(211): n includes a, c, g, or t, or contains no nucleotide
  misc_feature (238)..(238): n includes a, c, g, or t, or contains no nucleotide
  misc_feature (349)..(349): n includes a, c, g, or t, or contains no nucleotide
tcctctccttgtgtgtgtctcttccccccacccctaattcttctgctctgtttgggnaagacgtggnaggaaaaggtgacttctngcccccaccgctcttacccccactgtagtggcctttggnagatgncccccacctncccccccaccaactctcgcgtgttggnagagaaggggccctnnnnnnnnnnnnnnnnnnttcctccccccntaatttattctaatttattaactttgnacccaccctttctgagcctgcagccttcccgtgtggcctgagggctgtcgagtgagctgccccagcccctcccagcccttgcccagcctgggggagtggggaaggcttggncatggccccgttggaggttgatttgctgttttgtttcttgtctttgtgttctgtggtacttgctgagagaaaagaaaagtgagccaagcagaaggaggtgggaaaacggacccaaaccccagtgtgccctgccccatgcctttcctttagtggtgg

SEQ ID NO: 773 - DNA, 529 bp, Homo sapiens
  misc_feature (114)..(115): n includes a, c, g, or t, or contains no nucleotide
  misc_feature (117)..(119): n includes a, c, g, or t, or contains no nucleotide
  misc_feature (123)..(124): n includes a, c, g, or t, or contains no nucleotide
  misc_feature (126)..(126): n includes a, c, g, or t, or contains no nucleotide
  misc_feature (129)..(143): n includes a, c, g, or t, or contains no nucleotide
  misc_feature (327)..(342): n includes a, c, g, or t, or contains no nucleotide
  misc_feature (408)..(422): n includes a, c, g, or t, or contains no nucleotide
ctgtgtctgtctacaaaaagtgaaaaatacagtgtttacttgaaattttaactttgtaactgcaagaattccagttcagccgggcgaggattagtattatttttaactctccgnnannntttnngnacnnnnnnnnnnnnnnngattttttttctttcctcttcacataccagggttattaaaagtgtgctttctttttacattatattacagttacaaggtaaaattcctcaactgctatttatttattccagcccagtactataaagaacgtttcaccataatgaccctccagagctgggaaacctaccacaagatctaaagttnnnnnnnnnnnnnnnnctccaactatggtctttatttcttgtggtaatatgatgtgcctttccttgcctaaatcccttcctnnnnnnnnnnnnnnntatttaatgtcttctaattcagtcatttttttataagtatgtctataaacattgaactttaaaaaacttatttatttattccactactgtagcaattgacagattaa

SEQ ID NO: 774 - DNA, 294 bp, Homo sapiens
cagcgctgccaaaggaggccacggaggagcaggagctcgtacctggcgtctgctgaccttcgtgctggcgctgcccagcgtggccctctgcaccttcaactcctatctccactcgggccaccgcccgcgccccgagttccgtccctaccaacacctccgcatccgcaccaagccctacccctggggggacggcaaccacactctgttccacaatagccacgtgaaccctctgcccacgggctacgaacacccctgaggccccggacgcccccggacacaataaaggtgtgaagc

SEQ ID NO: 775 - DNA, 261 bp, Homo sapiens
tgccgttcctagagctgcacacgaatttccccgccaaccgagtgcccgcggggctggagaaacggctgtgcgccgtcgctgcctccatcttgggcaaacctgcagaccttgtgaacgtgacggtacggccgggcctggccagggcgctgagcgggtccaccgagccctgcgcgcagctgtccatctcctccatcggcgtagtgggcaccgccgaggacaaccgcagccacagtgcccacttctttgagtttctcaccaagg

SEQ ID NO: 776 - DNA, 463 bp, Homo sapiens
  misc_feature (205)..(258): n includes a, c, g, or t, or contains no nucleotide
cacgtaacaggaactcggaaggtagaacttagaattcagaacttgggtttcaattgtagaatttggaatctggaatacagaattgggaagaagaacagagatgacaaaagaccacttgaagagaggttcctaatactagacagatggagagtggcttggctgtttccccctgcatattggggttgaaaacttaaatgtgtagttnnnnnnnnnnnnnnnnnnnnnnnnnnnnnnnnnnnnnnnnnnnnnnnnnnnnnntacaagctagaccctgttccctcaccctgtatcctgtctcccctaattgacattctatcagcccaaccctcattctgcagggccacctggtgtgtggaggtggcgggaggggtcagtgactctgggggtctcctcagtgacccccatacctcatcatgaacccttgggtagcttgattctgcctaccatccaggaaaacttgtgc

SEQ ID NO: 777 - DNA, 523 bp, Homo sapiens
  misc_feature (91)..(113): n includes a, c, g, or t, or contains no nucleotide
ggaggaagctccatccctctactctcagcccgcaccaggcggccagctcagagcaccaggcgtggcgcaagcagggtggtcgtgggcagcnnnnnnnnnnnnnnnnnnnnnnntgtgcccagcgggatgtgggcccgagcaggccagagaggccgagggcctggggtctctgcggcagccacagcccgtggtgagtagcagccttagctgtcctggagataccggggcctcgtggagtctaggcaggctggggcactgtggctgtggccgtggccaggtgagaagccccattcgcgcaggaaagactggccacctgggaacccacgcctccacggagggacttgccggccacaggctgtgggctgcccaagaggactgtgcaggcagggctgcctgctgattggcagctccggatcaggcccggtgcctgcagacctggtgctcccctcgggcagggctgggtgccgcagccgcctgctggcttttctggcagctcctctgtatcagaaccaataaagtgcac

SEQ ID NO: 778 - DNA, 519 bp, Homo sapiens
  misc_feature (166)..(172): n includes a, c, g, or t, or contains no nucleotide
  misc_feature (197)..(197): n includes a, c, g, or t, or contains no nucleotide
  misc_feature (233)..(233): n includes a, c, g, or t, or contains no nucleotide
  misc_feature (235)..(235): n includes a, c, g, or t, or contains no nucleotide
  misc_feature (407)..(424): n includes a, c, g, or t, or contains no nucleotide
cactgctctttcctggcaatttgttttaatggttattgcagaatattaaggtacatgtctctctgttttaagtaatattgcactttataaaaaagtatgaataaagcaaactattttataaagtgcactgtttaaagcatttgcactgtatttttgccatttattnnnnnnntctactttaaatttgtcctcacatncctcttctactttgtatgcaacaagtagaatggggncntgttgtgtcatgtagtcagccacttatgcaccaatgtgaggaaaacctaaagggaaattaaactaaacactgtgcttcatatttgtacactgtgttgtactacagtgaggaatttcctcctgtagtcatatattatgtacataatattttagaatcatacctatgacttgtnnnnnnnnnnnnnnnnnnaattttaaatccagaaagcatattttataaacttatgcagagcacttttattgctcaaaagttctgaattcatacagaaaacaagtactatgtga

SEQ ID NO: 779 - DNA, 445 bp, Homo sapiens
  misc_feature (27)..(41): n includes a, c, g, or t, or contains no nucleotide
  misc_feature (363)..(363): n includes a, c, g, or t, or contains no nucleotide
actttgtgtagatcctacctggagggnnnnnnnnnnnnnnnttttgtgccagagcttgtgagggtgacagaagagggtccaggctggaaacctgaactttctgggtgggagaaccaggtggtgcctgccgaggtctgggcgtgtttgggccggtgctggagcctgtccagctggcccgggccctggcctggttctcaagtgtttcctagacagagaggcacctgggtcagtattagtctatttatcagaggtgtaaataatctatgtatagtttttctccttttagattattttgtatttgtttaaaagaagttttgtcaaaatacaaaaatataaagaaatgactgaaagttgttgacaggntttttaagaaataattattctaattgtttttgtttgtttgtttttgccttgtaaactagcgccaaggaactgcagcaaataa

SEQ ID NO: 780 - DNA, 405 bp, Homo sapiens
  misc_feature (47)..(47): n includes a, c, g, or t, or contains no nucleotide
  misc_feature (60)..(63): n includes a, c, g, or t, or contains no nucleotide
  misc_feature (66)..(66): n includes a, c, g, or t, or contains no nucleotide
  misc_feature (68)..(68): n includes a, c, g, or t, or contains no nucleotide
  misc_feature (71)..(72): n includes a, c, g, or t, or contains no nucleotide
  misc_feature (74)..(74): n includes a, c, g, or t, or contains no nucleotide
  misc_feature (76)..(79): n includes a, c, g, or t, or contains no nucleotide
  misc_feature (83)..(86): n includes a, c, g, or t, or contains no nucleotide
  misc_feature (88)..(108): n includes a, c, g, or t, or contains no nucleotide
  misc_feature (110)..(110): n includes a, c, g, or t, or contains no nucleotide
  misc_feature (112)..(116): n includes a, c, g, or t, or contains no nucleotide
  misc_feature (118)..(254): n includes a, c, g, or t, or contains no nucleotide
agatcaaaacagcatacctgctaagctaagatagatggtgttgattnccactgggttttnnnnaananaannanannnntttnnnntnnnnnnnnnnnnnnnnnnnnntntnnnnngnnnnnnnnnnnnnnnnnnnnnnnnnnnnnnnnnnnnnnnnnnnnnnnnnnnnnnnnnnnnnnnnnnnnnnnnnnnnnnnnnnnnnnnnnnnnnnnnnnnnnnnnnnnnnnnnnnnnnnnnnnnnnnnnnnnnnnnnnataaagcaacatgaaacattagccctccttttattttaaagactaatgttaattgttcttaaaactggattttttttccttaaagcaatttttttcttttcgatttaatgaagtattgctagctgaagccagtttgacatagagagatgtc

SEQ ID NO: 781 - DNA, 548 bp, Homo sapiens
  misc_feature (39)..(39): n includes a, c, g, or t, or contains no nucleotide
  misc_feature (52)..(52): n includes a, c, g, or t, or contains no nucleotide
  misc_feature (75)..(75): n includes a, c, g, or t, or contains no nucleotide
  misc_feature (134)..(134): n includes a, c, g, or t, or contains no nucleotide
  misc_feature (443)..(470): n includes a, c, g, or t, or contains no nucleotide
  misc_feature (484)..(521): n includes a, c, g, or t, or contains no nucleotide
gtcagctacatgaccgatggactttctgaagctaaaganccacacctgaatncagggctgtggtaatcatcttanccatagctgtaaattgtatcaaaacaaaaaattagtagatggatttaggaatatgtaangaaactcaacacataatataaatgcaatgaatgtttttcttctttaaatttaaagttagtatctacagatggaattgtatctacaaccaaatgcctcttatccctgaattcagagtgataattttataagtgtgaaacttaattatgtagggctccccccgtctgaatagaattaattccttaaagtctagttagggtcctgctgtctgtcatgttgccttgtaacggatgtttccacctccttctccaacctctaccccaccattagtgtattttactataaaaacagtggaaccacagccctaaagnnnnnnnnnnnnnnnnnnnnnnnnnnnnaattgtatttaaannnnnnnnnnnnnnnnnnnnnnnnnnnnnnnnnnnnnncgaggtcaaattcaggtatctaagact

SEQ ID NO: 782 - DNA, 589 bp, Homo sapiens
  misc_feature (40)..(40): n includes a, c, g, or t, or contains no nucleotide
  misc_feature (63)..(113): n includes a, c, g, or t, or contains no nucleotide
  misc_feature (223)..(223): n includes a, c, g, or t, or contains no nucleotide
  misc_feature (230)..(275): n includes a, c, g, or t, or contains no nucleotide
  misc_feature (298)..(312): n includes a, c, g, or t, or contains no nucleotide
cacactgagatggtgcaggagtgaatgggcatggcttggnctcgctacctcggggacctgttnnnnnnnnnnnnnnnnnnnnnnnnnnnnnnnnnnnnnnnnnnnnnnnnnnncagaatggtcagaatgaaacagaacagccaactcacccacaggacagcttattttgaggcaaggttttggattttggaggaagcagccagatgaggcggtgagcctccangaaggtnnnnnnnnnnnnnnnnnnnnnnnnnnnnnnnnnnnnnnnnnnnnnngttcacatgggggctttgactcnnnnnnnnnnnnnnncagatcgtaaattgcatttgcctagtcgtgtgacctcaaaagaagtcagacatatttaatccagaaatagtttcgtttgagggagggcttgcaggtctgtaaatagcatttgctttcctggttagagattgggatgcagaaggagttttcagtattttttttaaaacactaatgatcattgaagagtatttatgtaaacatacaacgtataatgggtgggggatccgatcatggtgatgtacggggtgaattctcttgccgtgttgcaaatgtgtaa

SEQ ID NO: 783 - DNA, 548 bp, Homo sapiens
  misc_feature (465)..(465): n includes a, c, g, or t, or contains no nucleotide
  misc_feature (468)..(469): n includes a, c, g, or t, or contains no nucleotide
  misc_feature (471)..(476): n includes a, c, g, or t, or contains no nucleotide
  misc_feature (479)..(479): n includes a, c, g, or t, or contains no nucleotide
tgccagtctttttggctttgaacactgcccatcagctacagtcattactgttccccaacccacaactatcttttaagaagtcttagttcacagtgaaaggaatgatgactttgaaattatggatttatattaatggcactataaaccaatggtaatggtaatttttaaacttgctaaatattgagaaactaaactactaagttaataaattatatatagcagtgtagctgttctctctagatggtgtctcacaatggatttctgttgcttgactattttcttagtgaatatttatactaaggtagtgactgagatttggtgatctggctgagtattttgaaacacattttgaataatatggcttagtgttaacggggacttaaatatgatttttttttcttactcatttcaccttccctgtactgtatgtttggaattgatcataaaacatctccaaaagaaaanaannannnnnnagncttgcttttgtattcatgttgataatcttactaattgtgaagttgattcactactatactaggtaagac

SEQ ID NO: 784 - DNA, 270 bp, Homo sapiens
  misc_feature (86)..(111): n includes a, c, g, or t, or contains no nucleotide
atctgtgtggtgatacagccataagaatggggcttatataaactctgtacatgtaagattttgtacagagaatttttaactttatnnnnnnnnnnnnnnnnnnnnnnnnnnttaaaatgtacataaaatactgtatttttttaccttgtgtgtgatagtctagtcattgcatgtaaatataatttattatgtattctgtagtataaatcatacattgatgacttacatttttactggtaagtcaacatccgttggatgttttctgaagtg

SEQ ID NO: 785 - DNA, 505 bp, Homo sapiens
  misc_feature (70)..(70): n includes a, c, g, or t, or contains no nucleotide
  misc_feature (76)..(76): n includes a, c, g, or t, or contains no nucleotide
  misc_feature (118)..(118): n includes a, c, g, or t, or contains no nucleotide
  misc_feature (179)..(179): n includes a, c, g, or t, or contains no nucleotide
  misc_feature (192)..(192): n includes a, c, g, or t, or contains no nucleotide
  misc_feature (209)..(209): n includes a, c, g, or t, or contains no nucleotide
  misc_feature (218)..(218): n includes a, c, g, or t, or contains no nucleotide
  misc_feature (256)..(256): n includes a, c, g, or t, or contains no nucleotide
  misc_feature (264)..(264): n includes a, c, g, or t, or contains no nucleotide
  misc_feature (269)..(269): n includes a, c, g, or t, or contains no nucleotide
  misc_feature (278)..(278): n includes a, c, g, or t, or contains no nucleotide
  misc_feature (314)..(314): n includes a, c, g, or t, or contains no nucleotide
catttgtacagagcagggaattctggttttagtccattggtagcattgtgtgtatgaggagattcaacanccacangacagctgcaggactcgatatccatggcttctttccatcacnaaaacgggtagaaacacattcactgcttcagggttctaatctgtgtgtctccttatgactnccatttctgtaangctactctgtaactttngatatatgnctgtattttctttctttaaaagatttagatgttttttncagcaagnctagnccatacaanccattgtatctctttctcttcagtatggtttagagncccagatcagttagtaggctttcgttgtcttctctttcaatacatgtacatctttactgtttgaaaagtgttacagctgtcaaagaatcttcatggacctgaagataatttcttgtgaagttgaatgcaagtgtactgtcattcatagtgtttatatcaaaataccaggaatcttcacttttgctaccttg

SEQ ID NO: 786 - DNA, 315 bp, Homo sapiens
  misc_feature (196)..(210): n includes a, c, g, or t, or contains no nucleotide
caaagctcatgagagcttacatgcaagagcctttgtttgtggagtttgcagactgctgtttaggaattgtggagccatcccagaatgaggagtcttaagatggattattgtgctgcttgctcaagcgtgtgcttgactcctggaacctgcctgctccctctcccagaccagctagtttggggctggggagctcagnnnnnnnnnnnnnnnaggatgcagattaggtcatgcaggcctttaccggcattgatgtggctcatgtttcaggcagacttggggtccttaaggtggcaagtcctttatggagagaaaact

SEQ ID NO: 787 - DNA, 136 bp, Homo sapiens
gccctggccgccattttgttgtcctgggcgagtatgaccgatcatcaaacgcagagcccttgcaggttctgtccgtctctcgggccattacacaccctagctggaactctaccaccatgaacaatgacgtgacgct

SEQ ID NO: 788 - DNA, 432 bp, Homo sapiens
  misc_feature (172)..(172): n includes a, c, g, or t, or contains no nucleotide
  misc_feature (174)..(175): n includes a, c, g, or t, or contains no nucleotide
  misc_feature (179)..(179): n includes a, c, g, or t, or contains no nucleotide
  misc_feature (305)..(323): n includes a, c, g, or t, or contains no nucleotide
cacatgtgtgcaaattatggcttcagaggtggaagataaacagtgacgggggaacaaacagacaacaagaaggtttggaagaaatctggtttgagactctgaaccttagcactaaggagattgagtaaggacctccaaagttccccggactcatgaattctgggcccttggncnnttcntgtgcacagccaaggacttcagtagaccatctgggcagctttcccatggtgctgctccaaccatcagataaatgaccctcccaagcaccatgtcagtgtcgtacaatctaccaaccaaccagtgcnnnnnnnnnnnnnnnnnnntgtaacatacaatttttaagagcttatatggcagcttcctttttaccttgttttcctttggggcatgatgttttaacctttgctttagaagcacaagctgtaaatctaa

SEQ ID NO: 789 - DNA, 437 bp, Homo sapiens
  misc_feature (196)..(212): n includes a, c, g, or t, or contains no nucleotide
  misc_feature (253)..(276): n includes a, c, g, or t, or contains no nucleotide
  misc_feature (301)..(319): n includes a, c, g, or t, or contains no nucleotide
aacagctgtgttgagaagaaggtccttggagagaagactgagaatccaaagaagttcaagatcaactatacggtggcgaacgaggccacgctgctcgatactgactacgacaatttcctgtttctctgcctacaggacaccaccacccccatccagagcatgatgtgccagtacctggccagagtcctggtggagnnnnnnnnnnnnnnnnngggattcatcagggctttcaggcccctgcccaggcacctannnnnnnnnnnnnnnnnnnnnnnnatggaagagccgtgccgtttctagnnnnnnnnnnnnnnnnnnnctcacctccgcctccaggaagaccagactcccacccttccacacctccagagcagtgggacttcctcctgccctttcaaagaataaccacagctcagaagacgatgacgtggtcatct

SEQ ID NO: 790 - DNA, 112 bp, Homo sapiens
caatgagctcttccaatccaaaaatgttaaaattagccaggcatagttgtgtgtgcctacagtgctacaggaggctgaggcaagaggattgcttgagttaaggaaggaagtc

SEQ ID NO: 791 - DNA, 509 bp, Homo sapiens
  misc_feature (39)..(53): n includes a, c, g, or t, or contains no nucleotide
  misc_feature (159)..(159): n includes a, c, g, or t, or contains no nucleotide
  misc_feature (440)..(454): n includes a, c, g, or t, or contains no nucleotide
tctgttactgtccttcattcttggctccctactatctannnnnnnnnnnnnnnaagaagaaaagttgaataagagttggcttaaattttaaaaaagaaaaagaaaattgaggttttaggattttcatggtaacaagctctggtataagctaaggctggncaagttcagatactaaaatattatttgatcatatcttggatccttttgaaaaagttaagactatatgaaggtaaattagaaataagtatgaatattaataaaatagcatttatcttatttctctattttatgttgtgacttaacctaattttatttttttaacattttcttatttcttataatatgaatgctgatatttaaaggtagatctatgtggtattctttgtgtttcttaattgtttaactcttaagattatttgtgatctggatttatgtatttnnnnnnnnnnnnnnnattgttaaaatggaatgcaagtttttcaaaagcccaggtctaaatgtaatggttg

SEQ ID NO: 792 - DNA, 44 bp, Homo sapiens
ctttggtgacattgttcttctgtgttccctttatttatgctggt

SEQ ID NO: 793 - DNA, 604 bp, Homo sapiens
  misc_feature (98)..(222): n includes a, c, g, or t, or contains no nucleotide
  misc_feature (224)..(225): n includes a, c, g, or t, or contains no nucleotide
  misc_feature (227)..(228): n includes a, c, g, or t, or contains no nucleotide
  misc_feature (231)..(233): n includes a, c, g, or t, or contains no nucleotide
  misc_feature (235)..(235): n includes a, c, g, or t, or contains no nucleotide
  misc_feature (270)..(285): n includes a, c, g, or t, or contains no nucleotide
  misc_feature (426)..(442): n includes a, c, g, or t, or contains no nucleotide
ttaggacatgggtccagtatcttcctgacttgctggctctccaaataaagatgcttttcttgctctaactttttgtctcgtgaatcattggctgttannnnnnnnnnnnnnnnnnnnnnnnnnnnnnnnnnnnnnnnnnnnnnnnnnnnnnnnnnnnnnnnnnnnnnnnnnnnnnnnnnnnnnnnnnnnnnnnnnnnnnnnnnnnnnnnnnnnnnnnnnnnngnncnngannncntgagattctgcatctccagtaagcaccaaggggannnnnnnnnnnnnnnnccagggaccacaccttggagagcaatgctgagaagctggtggaagagcccaggctcatgaagatctgaacatggtccatagcagggaggttggggaaatgagataaaaatgttaaaaatggcagttaccttcctggagaannnnnnnnnnnnnnnnnccttattaggctcatgtctttggaactagcccccactggtctccttcctgttatatacctgcagttaccatgttcttgttaaggaagaatggcaaatgcaaaaaaaaaaaaaaaaaaagaggaagttgatcatgtttggttgcttttggtcatcacaataaa

SEQ ID NO: 794 - DNA, 231 bp, Homo sapiens
cctttctgtgcatggtgctctcagagtagtagtgtttgtcattttaaagttcagaaagttctcaatgaaaaatgcactcagaggtcagatggcctggacacacaaaaaaagtgtttgaaactgagtctgccatgatattttaaagggagctatgtcaaaatgtggtttattaaagggtatacgagagagagtaagagagagagagaaagacatcatggtaagtaggtttcc

SEQ ID NO: 795 - DNA, 460 bp, Homo sapiens
  misc_feature (33)..(33): n includes a, c, g, or t, or contains no nucleotide
  misc_feature (332)..(332): n includes a, c, g, or t, or contains no nucleotide
  misc_feature (343)..(343): n includes a, c, g, or t, or contains no nucleotide
  misc_feature (349)..(353): n includes a, c, g, or t, or contains no nucleotide
  misc_feature (358)..(358): n includes a, c, g, or t, or contains no nucleotide
  misc_feature (362)..(362): n includes a, c, g, or t, or contains no nucleotide
  misc_feature (373)..(373): n includes a, c, g, or t, or contains no nucleotide
  misc_feature (376)..(376): n includes a, c, g, or t, or contains no nucleotide
  misc_feature (383)..(383): n includes a, c, g, or t, or contains no nucleotide
aatatgtattcttggctgctatgcgtggttttncaggaaatttaattatcttactgagatgtgaaagcaaaactagtaacagaacttacattttatttcatgctttcttaaacccgtgcatattctggtgaaacatgtaaaatactttaagtaaaattgaacatttttatttgaatttttgctgaactgataaaggtgtttatatttttgtttgtttgtttgtttaattcatgtttgttgggactgaggtttaggaagtttgttactggttaaaaacctcaaatgaaatgcgaaagaatttgaatttttcctgcatatgtcaactttggacnagctttcaagnaaaaannnnnaaaantttncaacttctggnggnttaaaantattaatgcagaatttactaagattttattcatttgcattagcaaatattcatgcagcagcagttgactgaaaattt

SEQ ID NO: 796 - DNA, 444 bp, Homo sapiens
  misc_feature (52)..(52): n includes a, c, g, or t, or contains no nucleotide
  misc_feature (82)..(84): n includes a, c, g, or t, or contains no nucleotide
  misc_feature (88)..(88): n includes a, c, g, or t, or contains no nucleotide
  misc_feature (90)..(91): n includes a, c, g, or t, or contains no nucleotide
  misc_feature (93)..(99): n includes a, c, g, or t, or contains no nucleotide
  misc_feature (103)..(105): n includes a, c, g, or t, or contains no nucleotide
  misc_feature (107)..(107): n includes a, c, g, or t, or contains no nucleotide
  misc_feature (110)..(110): n includes a, c, g, or t, or contains no nucleotide
  misc_feature (149)..(152): n includes a, c, g, or t, or contains no nucleotide
  misc_feature (156)..(160): n includes a, c, g, or t, or contains no nucleotide
  misc_feature (162)..(189): n includes a, c, g, or t, or contains no nucleotide
  misc_feature (380)..(395): n includes a, c, g, or t, or contains no nucleotide
gacctcaaaaatgctgcataacagacctcactggggcagggaggatccccangggctcccaccctccacttggcgggccccnnngggncnngnnnnnnngggnnncnctntaccccacccatcactagcttccctctgccctctcccannnngggnnnnncnnnnnnnnnnnnnnnnnnnnnnnnnnnnaaatacctcgaaggggaggggggagggatggggttatagctgttttgtttaattggaactggaagagggatcatgttttgttttatgcccttcccagaaggggggagggacaccgggatcgcactcctgtactggccaccgccgctgtcacttgtcacattgagttcatgtcccttgagagtttgtataannnnnnnnnnnnnnnncagctacacagctgcccagtgtcatagaaaagcaattcaccaacgactg

SEQ ID NO: 797 - DNA, 584 bp, Homo sapiens
aattacctgcaggtggaatatttcatggacaaatttttttttctcccctcccaaatttagttcctcatcacaaaagaacaaagataaaccagcctcaatcccggctgctgcatttaggtggagacttcttcccattcccaccattgttcctccaccgtcccacactttagggggttggtatctcgtgctcttctccagagattacaaaaatgtagcttctcaggggaggcaggaagaaaggaaggaaggaaagaaggaagggaggacccaatctataggagcagtggactgcttgctggtcgcttacatcactttactccataagcgcttcagtggggttatcctagtggctcttgtggaagtgtgtcttagttacatcaagatgttgaaaatctacccaaaatgcagacagatactaaaaacttctgttcagtaagaatcatgtcttactgatctaaccctaaatccaactcatttatacttttatttttagttcagtttaaaatgttgataccttccctcccaggctccttaccttggtcttttccctgttcatctcccaacatgctgtgctccatagctgg

SEQ ID NO: 798 - DNA, 521 bp, Homo sapiens
  misc_feature (97)..(101): n includes a, c, g, or t, or contains no nucleotide
  misc_feature (103)..(103): n includes a, c, g, or t, or contains no nucleotide
  misc_feature (105)..(107): n includes a, c, g, or t, or contains no nucleotide
  misc_feature (110)..(121): n includes a, c, g, or t, or contains no nucleotide
  misc_feature (124)..(124): n includes a, c, g, or t, or contains no nucleotide
  misc_feature (137)..(137): n includes a, c, g, or t, or contains no nucleotide
  misc_feature (149)..(150): n includes a, c, g, or t, or contains no nucleotide
  misc_feature (156)..(156): n includes a, c, g, or t, or contains no nucleotide
gtctggcctcacctgtctttgccaggctctcacccaagtgccctgctgtgtcccacgggagggtgcagcccctgggggacgtgggccagcagctgcnnnnntngnnntcnnnnnnnnnnnnaanctttttccagatnaaaatggatgtnnccacgnggagcgggacctgcttgatggactcggaggatgctggaacaggagagtcgggtgaccgggccacagaaaaggaggtcatctgcccctgggagagcctgtaaggaaagaggcaggctgagctgggggctctggaccaggaagatgctctgacagatgccatggtatgggccacaggacacacttgctcgagaaccaaagtgcatttgggtgacatttgaagattggggagacaagatggggtagattgtggcaaagaatgctctggctggttaccaggggccaactccttctcctcttcctgaccctccctcccctgggcagaagaaacgcatgtggaccagaagactttccctgctgccttaaaa

SEQ ID NO: 799 - DNA, 576 bp, Homo sapiens
  misc_feature (53)..(102): n includes a, c, g, or t, or contains no nucleotide
  misc_feature (113)..(113): n includes a, c, g, or t, or contains no nucleotide
  misc_feature (115)..(115): n includes a, c, g, or t, or contains no nucleotide
  misc_feature (118)..(121): n includes a, c, g, or t, or contains no nucleotide
  misc_feature (123)..(128): n includes a, c, g, or t, or contains no nucleotide
  misc_feature (132)..(134): n includes a, c, g, or t, or contains no nucleotide
  misc_feature (137)..(154): n includes a, c, g, or t, or contains no nucleotide
  misc_feature (156)..(156): n includes a, c, g, or t, or contains no nucleotide
  misc_feature (159)..(159): n includes a, c, g, or t, or contains no nucleotide
  misc_feature (161)..(204): n includes a, c, g, or t, or contains no nucleotide
  misc_feature (206)..(209): n includes a, c, g, or t, or contains no nucleotide
  misc_feature (214)..(214): n includes a, c, g, or t, or contains no nucleotide
  misc_feature (220)..(221): n includes a, c, g, or t, or contains no nucleotide
  misc_feature (226)..(226): n includes a, c, g, or t, or contains no nucleotide
  misc_feature (238)..(238): n includes a, c, g, or t, or contains no nucleotide
  misc_feature (261)..(261): n includes a, c, g, or t, or contains no nucleotide
  misc_feature (277)..(277): n includes a, c, g, or t, or contains no nucleotide
  misc_feature (310)..(324): n includes a, c, g, or t, or contains no nucleotide
  misc_feature (355)..(355): n includes a, c, g, or t, or contains no nucleotide
  misc_feature (364)..(378): n includes a, c, g, or t, or contains no nucleotide
  misc_feature (460)..(460): n includes a, c, g, or t, or contains no nucleotide
  misc_feature (473)..(473): n includes a, c, g, or t, or contains no nucleotide
  misc_feature (481)..(481): n includes a, c, g, or t, or contains no nucleotide
  misc_feature (487)..(487): n includes a, c, g, or t, or contains no nucleotide
  misc_feature (493)..(493): n includes a, c, g, or t, or contains no nucleotide
  misc_feature (502)..(502): n includes a, c, g, or t, or contains no nucleotide
ttaccatcaggtagccgtgcagtttgctgacttgcacgacactccaggccggnnnnnnnnnnnnnnnnnnnnnnnnnnnnnnnnnnnnnnnnnnnnnnnnnntaccttcttcnantgnnnncnnnnnngtcnnntgnnnnnnnnnnnnnnnnnnanganannnnnnnnnnnnnnnnnnnnnnnnnnnnnnnnnnnnnnnnnnnncnnnntaagncgctgnnttgtngaagtggaaggnacagtgaaggcttatgtttgggncaataataaggatctngcggagtggctagagaaacagctgacagaggannnnnnnnnnnnnnnggtaatagaggaaaacatcaaatgcatcagnagagactannnnnnnnnnnnnnnccgcagcttggtccaggccaatccagaggttgccatggattccatcatccatatgacgcagcacatatcacccactcagcgngcagaagtcatanggatcctntccacnatggantccccttcnacgtaggaagagcttcctgcctgtccctgccctgtctctggagaaaagggctagagctgccttttacaactgta

SEQ ID NO: 800 - DNA, 559 bp, Homo sapiens
  misc_feature (37)..(37): n includes a, c, g, or t, or contains no nucleotide
  misc_feature (44)..(106): n includes a, c, g, or t, or contains no nucleotide
  misc_feature (108)..(108): n includes a, c, g, or t, or contains no nucleotide
  misc_feature (111)..(111): n includes a, c, g, or t, or contains no nucleotide
  misc_feature (113)..(113): n includes a, c, g, or t, or contains no nucleotide
  misc_feature (117)..(120): n includes a, c, g, or t, or contains no nucleotide
  misc_feature (122)..(122): n includes a, c, g, or t, or contains no nucleotide
  misc_feature (124)..(124): n includes a, c, g, or t, or contains no nucleotide
  misc_feature (131)..(145): n includes a, c, g, or t, or contains no nucleotide
  misc_feature (153)..(153): n includes a, c, g, or t, or contains no nucleotide
  misc_feature (245)..(310): n includes a, c, g, or t, or contains no nucleotide
  misc_feature (337)..(356): n includes a, c, g, or t, or contains no nucleotide
  misc_feature (492)..(494): n includes a, c, g, or t, or contains no nucleotide
gaggactaattgcttccactttgactggattgatccnttaagcnnnnnnnnnnnnnnnnnnnnnnnnnnnnnnnnnnnnnnnnnnnnnnnnnnnnnnnnnnnnnnngnctnantttnnnncntnatagttnnnnnnnnnnnnnnncaggactngggctaaagaaaaacaacacacacgtctctgaagtgtgaaacagagcacttgcagagcctgggacaacctccttattgaagggaagagggannnnnnnnnnnnnnnnnnnnnnnnnnnnnnnnnnnnnnnnnnnnnnnnnnnnnnnnnnnnnnnnnntaggggccggttttaccctcccacatnnnnnnnnnnnnnnnnnnnntaacatgtgttgtttgtaacatgtaatatatctgaattttaaatgggggtggtgatttatctcagtcttcctctctgcatcagttgctttataaatgattgtcaaaccaataaatacacacaagataaaattttannntaaggcttcatgaaaaaaaaaaaaaaaaaacttttgctttttaccctggaagaaatactcataag

SEQ ID NO: 801 - DNA, 182 bp, Homo sapiens
  misc_feature (142)..(142): n includes a, c, g, or t, or contains no nucleotide
ttggtaagcagctgtttcccctactctctgctcttttcctgctgccttgtgaagaaggtacttgcttctccttcaccttacgccatgattgagtttcctgaggcttccccaatcaatcaggcagaactgtgagttaattaanccttttctcctttataaattacccagtctctggtggtatc

SEQ ID NO: 802 - DNA, 609 bp, Homo sapiens
  misc_feature (270)..(270): n includes a, c, g, or t, or contains no nucleotide
  misc_feature (272)..(277): n includes a, c, g, or t, or contains no nucleotide
  misc_feature (280)..(280): n includes a, c, g, or t, or contains no nucleotide
  misc_feature (584)..(584): n includes a, c, g, or t, or contains no nucleotide
cttgctgttttaacttgacagatgaaggactttagttgaacttcatattgtaagaactgttaataaaagttgtcaagtaaaaagcgctatatctaaaaagactttatgaacagttattctatcaacttttaaaggttttaaacctgcccagaaattaccttggtatctgaagtttccctctgtctcctcctctaattaagcttgttatttgtcatgcaccagcattggagataataaaatttcttgttctgtgtaaaaaaaaaaaaaaanannnnnncanacatactttctctgtatactactttctattgtatgtgttaaccagtattaagggaaaatgatccagcttcagctatctaattcacaaattaatttctggaaattaaactttgtaaattaagtttttgcctataagaatttgctggtctgggaaaacctgccctatcaatgagtatgttgccgtggttaccttactaagatgctgaagttctaggagagtaatgattacatcagaaggctaggttcagcaaaataagtgtatcagcaggttttatcatgatcagtaaaaatgttccaaatgcttntgctccattatagcagtaaagaacg

SEQ ID NO: 803 - DNA, 427 bp, Homo sapiens
tgtgccagaaacattgtgttatcttttatgttgttgttgttgctgttaaactataatatgtgacttctttttttattattttttgtttgaatgctttaaaaatcttttaagtctgtggatctgctgatgtacagtgcctttgctgctatggatcaaaatcaaaagaaccgtgtagatatactttattgtataagtagaaaattacttaatttcatactagaaatggatggatgctgcaagttgaaatggactgtccattgacgttcctaatgtggtagcagaaaaaaatggtgtcttaagtgcttagtgtttgatgtcattaacagtttcgtaaaactctacagtgtagaaagattttgatactaaactgtgcgttgtacatagttctaatgcattgtattgaccaccagtacttctataatggtag

SEQ ID NO: 804 - DNA, 225 bp, Homo sapiens
  misc_feature (31)..(31): n includes a, c, g, or t, or contains no nucleotide
  misc_feature (71)..(71): n includes a, c, g, or t, or contains no nucleotide
  misc_feature (100)..(100): n includes a, c, g, or t, or contains no nucleotide
  misc_feature (158)..(159): n includes a, c, g, or t, or contains no nucleotide
  misc_feature (175)..(175): n includes a, c, g, or t, or contains no nucleotide
catcaaacagtactaatccaaacagtcatgnttttgttcaagatagtcagtattcaggtattggcagtatncaaaatgagcaattgagtgactcctttcnatatgaattttttcaagtataacttgcaagatttaaatccttttaaatcttgataccnnctatatagatgcagcnattttgtatttgtctaactggggatataatactatatttatactgtatat

SEQ ID NO: 805 - DNA, 457 bp, Homo sapiens
  misc_feature (29)..(29): n includes a, c, g, or t, or contains no nucleotide
  misc_feature (31)..(31): n includes a, c, g, or t, or contains no nucleotide
  misc_feature (397)..(412): n includes a, c, g, or t, or contains no nucleotide
ggttcagggccttccacttcctgaaccgntncccctccgtgtacctgcgttgtaaaatggtggtgtgcagagcgtatgacccctcttcccgctgctaccgaggctgtgtgttgaggtcgaagagggatgtgggctcctaccaggaaaaggtggacgtcgtcctgggtcccatccagctgcagacccccccacgccgagaagaggagcctcggtaggtggtcgctctcagaccccactgtccaccggggcgcagacccctgactcggggacttgggatgttcctcttggtgtcatattccaactcagattgagccctacattgtgctgcacctggtcatacggagttgaatcagacctggttcccgcctcccccaaggctcatggtccttggaggacnnnnnnnnnnnnnnnntcaagagagttctgacctggatggcccatagacctgacgtcccag

SEQ ID NO: 806 - DNA, 417 bp, Homo sapiens
  misc_feature (294)..(320): n includes a, c, g, or t, or contains no nucleotide
  misc_feature (341)..(341): n includes a, c, g, or t, or contains no nucleotide
  misc_feature (380)..(380): n includes a, c, g, or t, or contains no nucleotide
gtcctccttaggaaaatctaatgtaaccaaattcccaaatcccattctgaggctctccatgtcaaaagtttcaatctctcgctcttgcctttccaataggttctttattctctcgctgcgttccttctgaagggcagccagctcctcttcaatcttctgctcaaggtgtgctctgcgcagagacactctctgctctagcttctggagctcacgttcatgttgtgcctctgtttgcatcttgattttgctctggtaggcgttgagcagctccatttcctgctggagctgtagccnnnnnnnnnnnnnnnnnnnnnnnnnnngcctcatctagccgtaacgcntgagaggccatcatttcatttatactctgttcatactgnctctgccaaaatggcaagttttcttgtctgctcatct

SEQ ID NO: 807 - DNA, 500 bp, Homo sapiens
  misc_feature (298)..(299): n includes a, c, g, or t, or contains no nucleotide
  misc_feature (305)..(305): n includes a, c, g, or t, or contains no nucleotide
  misc_feature (308)..(309): n includes a, c, g, or t, or contains no nucleotide
  misc_feature (311)..(328): n includes a, c, g, or t, or contains no nucleotide
  misc_feature (414)..(475): n includes a, c, g, or t, or contains no nucleotide
tctcctgaaacttaaaaacagtgggaatataggaaagggaaccaaatctcattaattaattgttctcccccattaccccactgaatgaatggccatacaggctaagctgaataatgacaaagttgaaaggaccaatacagccccttttataaggattttgaatgttttgcaaatgtattggtccctgtgttgtattttgtagccttttcctgggcttcagctcccctacttcttgtatgtgtatgcatactgtagctaaccattaaagtcatgacacacaaaaaaaaaaaaaaaaaannaaaaanaannannnnnnnnnnnnnnnnnnacatgagtccactgtgcctttctcagtagcagcaggcagtgctggtggtgaggaggaaaagtggacaatccagccctgtagacctnnnnnnnnnnnnnnnnnnnnnnnnnnnnnnnnnnnnnnnnnnnnnnnnnnnnnnnnnnnnnncattcctactactaagctggcatgt

SEQ ID NO: 808 - DNA, 516 bp, Homo sapiens
  misc_feature (459)..(473): n includes a, c, g, or t, or contains no nucleotide
tgttctttatacagcctagttaatgtttaaaaagaaaaaaatagcttggttttatttgtcatctagtctcaagtatagcgagattctttctaaatgttattcaagattgagttctcactagtgtttttttaatcctaaaaaagtaatgttttgattttgtgacagtcaaaaggacgtgcaaaagtctagccttgcccgagctttccttacaatcagagcccctctcaccttgtaaagtgtgaatcgcccttcccttttgtacagaagatgaactgtattttgcattttgtctacttgtaagtgaatgtaacatactgtcaattttccttgtttgaatatagaattgtaacactacacggtgtacatttccagagccttgtgtatatttccaatgaacttttttgcaagcacacttgtaaccatatgtgtataattaacaaacctgtgtatgcttatgcnnnnnnnnnnnnnnnttgtaactcttgtgtagattgtctctaaacaatgtgtgatctt

SEQ ID NO: 809 - DNA, 325 bp, Homo sapiens
  misc_feature (287)..(287): n includes a, c, g, or t, or contains no nucleotide
cccaagttggtcacaggtggcttagaagtgtgtgttatggttttacggatttccttgaagcctctctccttctctgcctacaaagaccctatactctcagtctccccaacccacccccaaggagctgtgggaggctttgtgttatctgtgaaactccaaaacaggggtgttgcggagaagggagagttcaaggcaaacgcaaggactggacttagctccctaggtgccacagtcagatgccggacacggatttatatataaatatatatatataaatatattatacncactcatcacggccatctttgttgtaaccatttctgtg

SEQ ID NO: 810 - DNA, 499 bp, Homo sapiens
  misc_feature (92)..(146): n includes a, c, g, or t, or contains no nucleotide
  misc_feature (253)..(271): n includes a, c, g, or t, or contains no nucleotide
cgcttgtgctgcagccatgtctctagtgatccctgaaaagttccagcatattttgcgagtactcaacaccaacatcgatgggcggcggaaannnnnnnnnnnnnnnnnnnnnnnnnnnnnnnnnnnnnnnnnnnnnnnnnnnnnnntgttgaggaaagcagacattgacctcaccaagagggcgggagaactcactgaggatgaggtggaacgtgtgatcaccattatgcagaatccacgccagtacaagatnnnnnnnnnnnnnnnnnnnagacagaaggatgtaaaggatggaaaatacagccaggtcctagccaatggtctggacaacaagctccgtgaagacctggagcgactgaagaagattcgggcccatagagggctgcgtcacttctggggccttcgtgtccgaggccagcacaccaagaccactggccgccgtggccgcaccgtgggtgtgtccaagaagaaataagtctgtaggccttgtctgttaata

SEQ ID NO: 811 - DNA, 423 bp, Homo sapiens
  misc_feature (28)..(28): n includes a, c, g, or t, or contains no nucleotide
  misc_feature (234)..(301): n includes a, c, g, or t, or contains no nucleotide
agtcctgcacagttttctggctggagcntagaacaggcctcccaagttttaggacaaacagctcagttctagtctctctggggccacacagaaactctttttgggctcctttttctccctctggatcaaagtaggcaggaccatgggaccaggtcttggagctgagcctctcacctgtactcttccgaaaaatcctcttcctctgaggctggatcctagccttatcctctgatnnnnnnnnnnnnnnnnnnnnnnnnnnnnnnnnnnnnnnnnnnnnnnnnnnnnnnnnnnnnnnnnnnnntgcttttctgtctctgcctccctcaccctgagccccttccttgctctgcacccccatatggtcatagcccagatcagctcctaacccttatcaccagctgcctcttctgtgggtgacccagg

SEQ ID NO: 812 - DNA, 509 bp, Homo sapiens
  misc_feature (75)..(97): n includes a, c, g, or t, or contains no nucleotide
  misc_feature (99)..(111): n includes a, c, g, or t, or contains no nucleotide
  misc_feature (113)..(153): n includes a, c, g, or t, or contains no nucleotide
  misc_feature (156)..(158): n includes a, c, g, or t, or contains no nucleotide
  misc_feature (160)..(162): n includes a, c, g, or t, or contains no nucleotide
  misc_feature (464)..(484): n includes a, c, g, or t, or contains no nucleotide
gctctgaagtccactgactcatcacacctttcttagcctggctcctctcaagggcattctgggcttgtaaacagnnnnnnnnnnnnnnnnnnnnnnntnnnnnnnnnnnnncnnnnnnnnnnnnnnnnnnnnnnnnnnnnnnnnnnnnnnnnnaannngnnnctcagggtacctgacttgaggggaatcgtttcatgaagctgaacttcaagcatatttccagtacattctttcagagtctgtttttccatccaaatataagccccaggccattccacttagtgtcttttcaatgataggcaagaatgatatctgagttgaacttcggtgcttctgttgtttgagtttactgtgcctggtggtatattgggcattctttggattgagtgttctgaggtgagagagtcttcccgaggcatcctgtctgtgcttccaaccctgaacaagaccttacatgagagatnnnnnnnnnnnnnnnnnnnnncctgggctgtcaagtggatagatag

SEQ ID NO: 813 - DNA, 529 bp, Homo sapiens
  misc_feature (340)..(363): n includes a, c, g, or t, or contains no nucleotide
  misc_feature (424)..(433): n includes a, c, g, or t, or contains no nucleotide
  misc_feature (498)..(498): n includes a, c, g, or t, or contains no nucleotide
ctgtagctcccgagctactctcttgccagcattttcacattttgcctttctcgtggtagaagccagtacagagaaattctgtggtgggaacattcgaggtgtcaccctgcagagctatggtgaggtgtggataaggcttaggtgccaggctgtaagcattctgagctgggcttgttgtttttaagtcctgtatatgtatgtagtagtttgggtgtgtatatatagtagcatttcaaaatggacgtactggtttaacctcctatccttggagagcagctggctctccaccttgttacacattatgttagagaggtagcgagctgctctgctatatgccttnnnnnnnnnnnnnnnnnnnnnnnnattattttttacaatggccatggaataaaccatttttacaaaaataaaaacaaaaaaagcnnnnnnnnnnaaggtgttttggtataataccttttcaggtgtgtgtggatacgtggctgcatgaccgggtgggtnggggggagtgtctcagggtcttctgtgacct

SEQ ID NO: 814 - DNA, 588 bp, Homo sapiens
  misc_feature (26)..(26): n includes a, c, g, or t, or contains no nucleotide
  misc_feature (33)..(33): n includes a, c, g, or t, or contains no nucleotide
  misc_feature (36)..(36): n includes a, c, g, or t, or contains no nucleotide
  misc_feature (76)..(96): n includes a, c, g, or t, or contains no nucleotide
  misc_feature (217)..(239): n includes a, c, g, or t, or contains no nucleotide
actagagctgagcttttcaaagtccngaaatgnagncggagaggtggaccgcgtggactatgacagacagtccggnnnnnnnnnnnnnnnnnnnnnggagattggagtggctgacaagattttgaaaaagaaagaataccctctttatataaatcaaacctgccatagagttactgtttctccatacacagaaatacacttgaaaaagtatcagatnnnnnnnnnnnnnnnnnnnnnnncagtgcttctgacaggaatggaaggcattcaaatggatgaagaaattgtggaggatttaattaacattcactttcaacgggcaaagaatggaggtggagaagtagatgtggtcaagtgttctctaggtcaacctcacatagcatactttgaagaatagacttaacagaatcatgaaaactatagctttttaacccggattactgtaaatgtttgacaaaaatgaatatgcttttccttaaaaaatgaaaactttaatttttaccatccatttatgtttagatacaaaacttatttccatgtttctgaatcttctttgtttcaaatggtgctgcatgttttcaactacaa

SEQ ID NO: 815 - DNA, 360 bp, Homo sapiens
caaaggacatccacatctgttggaagacttttaagtgagtttttgttcttagataacccacattagatgaatgtgttaagtgaaatgatacttgtactccccctacccctttgtcaactgctgtgaatgctgtatggtgtgtgttctcttctgttactgatatgtaagtgtggcaatgtgaactgaagctgatgggctgagaacatggactgagcttgtggtgtgctttgcaggaggacttgaagcagagttcaccagtgagctcaggtgtctcaaagaagggtggaagttctaatgtctgttagctacccataagaatgctgtttgctgcagttctgtgtcctgtgcttggatgctttt

SEQ ID NO: 816 - DNA, 370 bp, Homo sapiens
  misc_feature (46)..(46): n includes a, c, g, or t, or contains no nucleotide
  misc_feature (66)..(66): n includes a, c, g, or t, or contains no nucleotide
  misc_feature (76)..(76): n includes a, c, g, or t, or contains no nucleotide
  misc_feature (85)..(85): n includes a, c, g, or t, or contains no nucleotide
  misc_feature (90)..(122): n includes a, c, g, or t, or contains no nucleotide
ctcgtctatttcagcatgcataagacttttcactagggaaactganaaagcttgagtcaactaaanctgccttcanactttatcnagggnnnnnnnnnnnnnnnnnnnnnnnnnnnnnnnnnggaagactttcctctcctctaatctgtgtacacatctccaagcaaggaagaaaaaacaaactctgctcagacgcctatgaaacacctgaatgaactttgatgaagtacagtctgagttaccatcatgcacaagtagaactgctcttggacttgttttcctgttgtttgtggaacctacgcgtttgaatggcttgaacgttgcatcttttaaagttattttttaaggtttcttggcatttatcctagtt

SEQ ID NO: 817 - DNA, 601 bp, Homo sapiens
acgcttgcccagtggagtcctgtgatcgccgcttctcccgctccgacgagctcacccgccacatccgcatccacacaggccagaagcccttccagtgccgcatctgcatgcgcaacttcagccgcagcgaccacctcaccacccacatccgcacccacacaggcgaaaagcccttcgcctgcgacatctgtggaagaaagtttgccaggagcgatgaacgcaagaggcataccaagatccacttgcggcagaaggacaagaaagcagacaaaagtgttgtggcctcttcggccacctcctctctctcttcctacccgtccccggttgctacctcttacccgtccccggttactacctcttatccatccccggccaccacctcatacccatcccctgtgcccacctccttctcctctcccggctcctcgacctacccatcccctgtgcacagtggcttcccctccccgtcggtggccaccacgtactcctctgttccccctgctttcccggcccaggtcagcagcttcccttcctcagctgtcaccaactccttcagcgcctccacagggctttcggacatgacagcaaccttttctcccag

SEQ ID NO: 818 - DNA, 342 bp, Homo sapiens
  misc_feature (103)..(105): n includes a, c, g, or t, or contains no nucleotide
  misc_feature (107)..(110): n includes a, c, g, or t, or contains no nucleotide
  misc_feature (113)..(115): n includes a, c, g, or t, or contains no nucleotide
  misc_feature (117)..(121): n includes a, c, g, or t, or contains no nucleotide
  misc_feature (123)..(124): n includes a, c, g, or t, or contains no nucleotide
  misc_feature (126)..(128): n includes a, c, g, or t, or contains no nucleotide
  misc_feature (130)..(130): n includes a, c, g, or t, or contains no nucleotide
  misc_feature (135)..(135): n includes a, c, g, or t, or contains no nucleotide
  misc_feature (140)..(140): n includes a, c, g, or t, or contains no nucleotide
  misc_feature (254)..(254): n includes a, c, g, or t, or contains no nucleotide
  misc_feature (271)..(286): n includes a, c, g, or t, or contains no nucleotide
gcttggtaccaagtccaggtataacattcctattggaagccatacttatattttcttgtaaagtgcttttgaattaataaaatattagcataattgtgtatannnannnnaannnannnnnannannntncttancccangggaagcagttggttacacgattcttattttataagaaacagctgagaggcactatggattagtcttctgaagtgaaggaaatatagatgtcacctaagtgatagttaacccanttttttttttttttagnnnnnnnnnnnnnnnnagggtccataatatttagtgaccaacattttaaagtatagcagcaacctggttctt

SEQ ID NO: 819 - DNA, 412 bp, Homo sapiens
  misc_feature (178)..(202): n includes a, c, g, or t, or contains no nucleotide
  misc_feature (293)..(304): n includes a, c, g, or t, or contains no nucleotide
  misc_feature (306)..(307): n includes a, c, g, or t, or contains no nucleotide
  misc_feature (309)..(309): n includes a, c, g, or t, or contains no nucleotide
  misc_feature (312)..(319): n includes a, c, g, or t, or contains no nucleotide
  misc_feature (323)..(327): n includes a, c, g, or t, or contains no nucleotide
  misc_feature (329)..(335): n includes a, c, g, or t, or contains no nucleotide
  misc_feature (337)..(338): n includes a, c, g, or t, or contains no nucleotide
  misc_feature (341)..(342): n includes a, c, g, or t, or contains no nucleotide
  misc_feature (344)..(345): n includes a, c, g, or t, or contains no nucleotide
  misc_feature (347)..(347): n includes a, c, g, or t, or contains no nucleotide
  misc_feature (349)..(349): n includes a, c, g, or t, or contains no nucleotide
  misc_feature (351)..(371): n includes a, c, g, or t, or contains no nucleotide
cctcaggtgtacatggacatcaagattgggaacaagccggctggccgcatccagatgctcctgcgttctgatgtcgtgcccatgacagcagagaatttccgctgcctgtgcactcatgaaaagggctttggctttaagggaagcagcttccaccgcatcatcccccagttcatgtgcnnnnnnnnnnnnnnnnnnnnnnnnnatggcactgggggcaagtccatctatgggaagaagttcgatgatgaaaactttatcctcaagcatacgggaccaggtctactatccatggnnnnnnnnnnnncnnanacnnnnnnnnctcnnnnntnnnnnnnanntgnnannananannnnnnnnnnnnnnnnnnnnngtggtgtttggagaggtcaccgaaggcctagatgtcttgcg

SEQ ID NO: 820 - DNA, 357 bp, Homo sapiens
  misc_feature (72)..(86): n includes a, c, g, or t, or contains no nucleotide
  misc_feature (149)..(168): n includes a, c, g, or t, or contains no nucleotide
  misc_feature (187)..(187): n includes a, c, g, or t, or contains no nucleotide
  misc_feature (190)..(205): n includes a, c, g, or t, or contains no nucleotide
gtaccatgtgctacaggggccagaagatgaacagactgaccttgatgagctgtgcacaaagtggcataaaannnnnnnnnnnnnnncagtgtgaataaagtgctgcggagcaagaggaggccgttgattcacttcacgctttcagcgannnnnnnnnnnnnnnnnnnnaaggcctcgcaggaagacncannnnnnnnnnnnnnnnactgcccagcggacagtggcaggacaggaaaaacccgtcaatgtactaggatactgctgcgtcattacagggcacaggccatggatggaaaacgctctctgctctgctttttttctactgttttaatttatactggcatgctaaagccttcc

SEQ ID NO: 821 - DNA, 547 bp, Homo sapiens
  misc_feature (170)..(170): n includes a, c, g, or t, or contains no nucleotide
  misc_feature (182)..(182): n includes a, c, g, or t, or contains no nucleotide
  misc_feature (197)..(198): n includes a, c, g, or t, or contains no nucleotide
  misc_feature (200)..(203): n includes a, c, g, or t, or contains no nucleotide
  misc_feature (212)..(212): n includes a, c, g, or t, or contains no nucleotide
  misc_feature (225)..(268): n includes a, c, g, or t, or contains no nucleotide
gtcctgaaaccaccacttgcctaggccacggatgcctcaagagacccggtcagcccagactggaggagtgccccaaaccagtccagtgtccacttgccagaatttcagctccttttttctgtggtgaggcaaaggctagaaataaaatggaatccgcgcccaagtgggancccaagcaggcnatctttcggtggagnnannnnccccccagngtccttgacacannnnnnnnnnnnnnnnnnnnnnnnnnnnnnnnnnnnnnnnnnnngaccatttttgccttaaaagttggggaggagggacatgtagattgtgtgcattgtgcatagtcaaggaaatcctagggccacctccagttcatttgtgtgggaacaaggatattttatagatacaaattatttttatgctgtgttgaattaatcaattaggagaggaaggggaaatcacttccttcaaactttttatctgattgtctaaaattctaaccatgcttttaacttattatttttacccagctctgaaggtcattgttcttgcctgtgtttga

SEQ ID NO: 822 - DNA, 500 bp, Homo sapiens
  misc_feature (212)..(212): n includes a, c, g, or t, or contains no nucleotide
  misc_feature (316)..(330): n includes a, c, g, or t, or contains no nucleotide
cttcatctctggaggaaacttttttaatatatgaaagctgtgataaaaatgtttcagatgtttagtcaattgtgaaatttttcttaaggcaattttcttttctatcagtttgtatattactaagccccaagagacatttcctgtgctagagtccaatatttgagtctctcgtgcaaatgagactattctttgtggtacaattccacctatcnatatgtgaaaactgcagtaaaaataaacccagatgctaaatcattcctacaaaggtttgactgaaactgtggcagatgtctcatcttctttatatgttaagcannnnnnnnnnnnnnnttttattgcaatcttttaccaagtggtgcacaaacttggtattgatgtctttattccattttgagtttagattgagaatatttttattttctgaaggcagagatatctactgtataattgcaccaaagtacatttgaaaggaaggttttcaatagtgtaatactgcagcg

SEQ ID NO: 823 - DNA, 222 bp, Homo sapiens
ttcgtggaccagcagcgcttctcacggccccgcaacctgggagagctgtgccagcgcctcgtacgcaacgtggagtactaccagagcaactatgtgttcgtgttcctgggcctcatcctgtactgtgtggtgacgtcccctatgttgctggtggctctggctgtctttttcggcgcctgttacattctctatctgcgcaccttggagtccaagcttgtgctc

SEQ ID NO: 824 - DNA, 412 bp, Homo sapiens
ggtggagcccctgagctgagttctgcagagacccactctgaccccactaaaatgacccctgattcatcaaaagtgaggcctagaattaccctaagaccctgttccacagtcctgtattccatcctagatatctactcaaaataattgagacaagtgttcaaacagaaagacgcttgtgcggaatgttcatggcagccctattcacagtagcccaaacgatgaaaacaccccaagctatatattaccagataaaaggataaacacaatatggtccatccatacactggagtattacacagccataaaaaggaatgaagcagtgatccccactacactgtggatgaaccttgaatgcatgatactgaatgaaagacatcagatgcaaaaggtcacatagtgtactgtcctttta

SEQ ID NO: 825 - DNA, 331 bp, Homo sapiens
ttagctgctaataatcctgaggcatagaaattgaagaatttgtaaaaatagaattgccttaaaggatttgaagtaagaacataattttggggagagttttttagtgattcacagtatccctcttagcattaatttaaggtaaagaggcagattgattttccctctttcctggtaattcctaagtaattaagaataaataagttccaaaagaaattgtagctggaatcttaataacaattgtgagtggctgtttgagttgcccccaccatgtccttagatctaatctgtgctaccttattaactcacagcaggcttactgaatggcttcatt

SEQ ID NO: 826 - DNA, 409 bp, Homo sapiens
  misc_feature (186)..(207): n includes a, c, g, or t, or contains no nucleotide
  misc_feature (331)..(331): n includes a, c, g, or t, or contains no nucleotide
agcctatctggaaaggagagaacgagagggaaagtttaaaggaagaggaaatgatcgcagggaaaagctccagtcttttgactctccagaaaggaaacggattaagtactccagggaaactgacagtgatcgtaaacttgttgataaagaagatatcgacactagcagcaaaggaggctgtgtccnnnnnnnnnnnnnnnnnnnnnnagggacaggcctgggatatggccatcctggattggcttcatcagaggaggctgaaggccggatgaggggccccagtgttggagcctcaggaagaaccagcaaaagacagtccaacgagacttancgagatgctgttcgaagagtcatgtttgctcgatataaagaactcgattaagaaaggagacaagttccatgggataca

SEQ ID NO: 827 - DNA, 277 bp, Homo sapiens
acagaagactcactccatagttcatggccccgtgatccagagtccctgctggcgccttcgagtggggcaggctgagaactcaagctgtaactaatgtctcctccgaagaaaactaaaccgagggctgagctgatgtgaagttttccgtggctgcattcatacaaatggtgaaaatgtagcatacctcccctcaaaagcctgaaagtaaagacatgcccccaatttaatgtgatgaattagagaaataggtttcagacacttcatggtttaaagtctc

SEQ ID NO: 828 - DNA, 215 bp, Homo sapiens
  misc_feature (45)..(48): n includes a, c, g, or t, or contains no nucleotide
  misc_feature (171)..(171): n includes a, c, g, or t, or contains no nucleotide
tcctcttccgggtccgtgggcgagtcttcatctaagggaccaagnnnnatactaacaaaaccagagtaatcaagacaattattgaagaggtggcgcccgacggtagagttctttcatctatggttgaatcagaaaccaagaaacactactattaaactgcatcaagagganagagtctcccttcacacagaccattatttacagatgcatggaaa

SEQ ID NO: 829 - DNA, 562 bp, Homo sapiens
  misc_feature (188)..(189): n includes a, c, g, or t, or contains no nucleotide
  misc_feature (192)..(192): n includes a, c, g, or t, or contains no nucleotide
  misc_feature (194)..(210): n includes a, c, g, or t, or contains no nucleotide
  misc_feature (214)..(214): n includes a, c, g, or t, or contains no nucleotide
  misc_feature (219)..(219): n includes a, c, g, or t, or contains no nucleotide
  misc_feature (229)..(229): n includes a, c, g, or t, or contains no nucleotide
  misc_feature (379)..(380): n includes a, c, g, or t, or contains no nucleotide
gtctggctagtttgatattgagtccttcattgtagtgaagcttccttttcatttcaaattgtcgctttttttctcgttcttcaggtgagaggtcactatcctcctctccactgctttcttgttcctgaatccgatactttggctccaagccttcagctgcagctaatttcctggctaagatgtctggnncgncnnnnnnnnnnnnnnnnncggntgtcnactacaggcnatcttcatcatcccccatcatactatggtaaggagtgcttggttcatctattttcattaaaccatagtctttgtctgctggatgatacgtcgccaagatgttcatttcatcccacttctgggattttttgctcagctcctcgtcgacatnnccgcggggctgttcggccgacgccaccatagaggaagtcgtagaggtcttgttcttcaagatccccttgatgggccggtgcgaggccgtcgaggccgccattgccgggcgctccggctgtcggctcagggtcgctgcttggcgtggggtccgcgaagagaagggtcggcacagcagagactc

SEQ ID NO: 830 - DNA, 534 bp, Homo sapiens
  misc_feature (131)..(131): n includes a, c, g, or t, or contains no nucleotide
  misc_feature (136)..(136): n includes a, c, g, or t, or contains no nucleotide
  misc_feature (139)..(139): n includes a, c, g, or t, or contains no nucleotide
  misc_feature (141)..(141): n includes a, c, g, or t, or contains no nucleotide
  misc_feature (145)..(145): n includes a, c, g, or t, or contains no nucleotide
  misc_feature (147)..(148): n includes a, c, g, or t, or contains no nucleotide
  misc_feature (150)..(150): n includes a, c, g, or t, or contains no nucleotide
  misc_feature (153)..(153): n includes a, c, g, or t, or contains no nucleotide
  misc_feature (155)..(155): n includes a, c, g, or t, or contains no nucleotide
  misc_feature (161)..(162): n includes a, c, g, or t, or contains no nucleotide
  misc_feature (164)..(165): n includes a, c, g, or t, or contains no nucleotide
  misc_feature (169)..(170): n includes a, c, g, or t, or contains no nucleotide
  misc_feature (172)..(172): n includes a, c, g, or t, or contains no nucleotide
  misc_feature (182)..(183): n includes a, c, g, or t, or contains no nucleotide
  misc_feature (198)..(198): n includes a, c, g, or t, or contains no nucleotide
  misc_feature (203)..(203): n includes a, c, g, or t, or contains no nucleotide
  misc_feature (209)..(209): n includes a, c, g, or t, or contains no nucleotide
  misc_feature (214)..(214): n includes a, c, g, or t, or contains no nucleotide
  misc_feature (229)..(229): n includes a, c, g, or t, or contains no nucleotide
  misc_feature (257)..(257): n includes a, c, g, or t, or contains no nucleotide
  misc_feature (348)..(348): n includes a, c, g, or t, or contains no nucleotide
  misc_feature (466)..(466): n includes a, c, g, or t, or contains no nucleotide
cttcgtttctttgttagtctgagggtagcaagtactgttccatggcagaggtagtggtagagaggcttttgattgcccctaggggctccacctccaagaaatgtggagccactgttactgagggtgttcanccacnggnangggncnngnctncnactgcnngnncatnnancttggggttnnctgtttgttggggancaggnagttgnaaggnctcacagggaggaanaggttggtctcctctcccatatggtggnctgtgatgtactctaagtttgaagtgtagcccttaggctctttgtgtcctcccctagtccaagggcaggagggatagcactgttactgtgncagtggccaaggggctgtcgtatgcctttgggagcctcttctcagggaaactctgtgtcactaacagtgggtatgctcagccatggctggggtgactgttctgcattcatgagccatnggccctgcctagtgaagagtaggggtgggggttcctagggaggaggggctgcactcctgtctgtatgg

SEQ ID NO: 831 - DNA, 493 bp, Homo sapiens
tatctgttatacaactgattttacatatctgtttggattatagctaggatttggagaataagtgtgtacagatcacaaaacatgtatatacattatttagaaaagatctcaagtctttaattagaatgtctcacttattttgtaaacattttgtgggtacatagtacatgtatatatttacggggtatgtgagatgttttgacacaggcatgcaatgtgaaatacgtgtatcatggagaatgaggtatccatcccctcaagcatttttcctttgaattacagataatccaattacattctttagatcatttaaaaatatacaagtaagttattattgattatagtcactctattgtgctatcagatagtagatcattctttttatcttatttgtttttgtacccattaaccatccccacctccccctgcaaccgtcagtacccttaccagccactggtaaccattcttctactctgtatgcccatgaggtcaa

SEQ ID NO: 832 - DNA, 123 bp, Homo sapiens
ctgtggtgttagcaccagccagctctctgtacatttgctagcttgtagttttctaagactgagtaaacttcttatttttagaaagtggaggtctggtttgtaactttccttgtacttaattgg

SEQ ID NO: 833 - DNA, 548 bp, Homo sapiens
  misc_feature (125)..(125): n includes a, c, g, or t, or contains no nucleotide
  misc_feature (266)..(266): n includes a, c, g, or t, or contains no nucleotide
  misc_feature (274)..(274): n includes a, c, g, or t, or contains no nucleotide
  misc_feature (285)..(285): n includes a, c, g, or t, or contains no nucleotide
cacagccctagtatgaaagctgggggtggggaggggcctttgctgcccttggtttctgggggctggttggcatttgctggcctggcagggggtgaaggcaggagttgggggcaggtcaggaccanggacccagggagaggctgtgtccctgctggggtctcaggtccagctttactgtggctgtctggatccttcccaaggtacagctgtatataaacgtgtcccgagcttagattctgtatgcggtgacggcggggtgtggtggncctgtgangggcccctggncccaggaggaggattgtgctgatgtagtgaccaagtgcaatatgggcgggcagtcgctgcagggagcaccacggccagaagtaacttattttgtactagtgtccgcataagaaaaagaatcggcagtattttctgtttttatgttttatttggcttgttttattttggattagtgaactaagttattgttaattatgtacaacatttatatattgtctgtaaaaaatgtatgctatcctcttattcctttaaagtgagtactg

SEQ ID NO: 834 - DNA, 535 bp, Homo sapiens
  misc_feature (37)..(51): n includes a, c, g, or t, or contains no nucleotide
  misc_feature (161)..(161): n includes a, c, g, or t, or contains no nucleotide
  misc_feature (174)..(174): n includes a, c, g, or t, or contains no nucleotide
  misc_feature (181)..(181): n includes a, c, g, or t, or contains no nucleotide
  misc_feature (195)..(195): n includes a, c, g, or t, or contains no nucleotide
  misc_feature (199)..(199): n includes a, c, g, or t, or contains no nucleotide
  misc_feature (450)..(464): n includes a, c, g, or t, or contains no nucleotide
aggcaccatggagagttagtcatggaataaagcactnnnnnnnnnnnnnnnaaaagtctccagagcagacttctgacaggaaaggtttagatgctggagagttgaagaggtgtaagaagagatcgtgccctcatttttcacttatttttttggttattcantttataataaaanggttggncattgatatggtancaancctgcaaattacttgcagttctgagtttcagataaaacattataaaacattaaattcaatacatactgctcctttgaaatttgggtaaaaaattgtacaaccgtatatatagtcatttttgtattttttctatgttgtgaaaaccaaaattgtaattttataagtctttgattcactaaaattatataatttaaatgtattttttgtatatttagaaataaggagtccagagactacgcttaactttctannnnnnnnnnnnnnngctgtttttacctgataatgtagtaataagttgtattcataaaatactgatctgtgttgcatttcaaaata

SEQ ID NO: 835 - DNA, 510 bp, Homo sapiens
  misc_feature (47)..(47): n includes a, c, g, or t, or contains no nucleotide
  misc_feature (85)..(85): n includes a, c, g, or t, or contains no nucleotide
  misc_feature (98)..(99): n includes a, c, g, or t, or contains no nucleotide
  misc_feature (104)..(104): n includes a, c, g, or t, or contains no nucleotide
  misc_feature (111)..(111): n includes a, c, g, or t, or contains no nucleotide
  misc_feature (113)..(141): n includes a, c, g, or t, or contains no nucleotide
  misc_feature (217)..(217): n includes a, c, g, or t, or contains no nucleotide
  misc_feature (342)..(372): n includes a, c, g, or t, or contains no nucleotide
gcggcacaataaagccacggaaaacaaggaaaagaagagaatcatanaactacttgtcagcatcacagttacttttgtcttatgntttactccctttnntgtgntgttgcngnnnnnnnnnnnnnnnnnnnnnnnnnnnnncttcgaagaccacagcaattctgggaagcgaacttacacaatgtatagaatcacggttgcattaacaagtttaaantgtgttgctgatccaattctgtactgttttgtaaccgaaacaggaagatatgatatgtggaatatattaaaattctgcactgggaggtgtaatacatcacaaagacaaagaaaacgcatactttnnnnnnnnnnnnnnnnnnnnnnnnnnnnnnnggtccttgagtagaaccaaggatgttttgaagggaagggaagtttaagttatgcattattatatcatcaagattacattttgaaaaggaaatctagcatgtgaggggactaagtgttctcagagtgatgttttaatcc

SEQ ID NO: 836 - DNA, 150 bp, Homo sapiens
  misc_feature (30)..(31): n includes a, c, g, or t, or contains no nucleotide
  misc_feature (33)..(33): n includes a, c, g, or t, or contains no nucleotide
  misc_feature (35)..(36): n includes a, c, g, or t, or contains no nucleotide
tttgccttggaatcatgattacaatttttnncntnncagatgccttcctgggggatactcctccccaccctaaagggtcgcctgcaacttaggcggattgggtctctctgctgtggcgttctctcttgagagaccctctgaattttagca

SEQ ID NO: 837 - DNA, 459 bp, Homo sapiens
  misc_feature (147)..(170): n includes a, c, g, or t, or contains no nucleotide
  misc_feature (284)..(312): n includes a, c, g, or t, or contains no nucleotide
  misc_feature (366)..(366): n includes a, c, g, or t, or contains no nucleotide
  misc_feature (403)..(434): n includes a, c, g, or t, or contains no nucleotide
ggcacccgatatatgttctctaggccttttagaaaacatggagttgttcctttggccacatatatgcgaatctataagaaaggtgatattgtagacatcaagggaatgggtactgttcaaaaaggaatgccccacaagtgttaccannnnnnnnnnnnnnnnnnnnnnnntgttacccagcatgctgttggcattgttgtaaacaaacaagttaagggcaagattcttgccaagagaattaatgtgcgtattgagcacattaagcactctaagagccgagatannnnnnnnnnnnnnnnnnnnnnnnnnnnncagaaaaagaaagaagccaaagagaaaggtacctgggttcaactaaagcgccancctgctccacccagagaagcacactttgtgagaaccnnnnnnnnnnnnnnnnnnnnnnnnnnnnnnnntccctatgaattcatggcataatag

SEQ ID NO: 838 - DNA, 349 bp, Homo sapiens
agattgaagctttgcccctggataccccttcctctgtggagacggacatttcctcttccaggaagcaatcagaggagcccttcaccactgtcttagagaatggagcaggcatggtctcttctacttccttcaatggaggcgtctctcctcacaactggggagattctggtcccccctgcaaaaaatctcggaaggagaagaagcaaacaggatcagggccattaggaaacagctatgtggaaaggcaaaggtcagtgcatgagaagaatgggaaaaagatatgtaccctgcccagcccaccttcccccttggcttccttggccccagttgctgattcctccacgagggt

SEQ ID NO: 839 - DNA, 151 bp, Homo sapiens
  misc_feature (110)..(110): n includes a, c, g, or t, or contains no nucleotide
tagaaaagtactacacgcgcctgggcaacgacttccacacgaacaagcgcgtgtgcgaggagatcgccattatccccagcaaaaagctccgcaacaagatagcaggttangtcacgcatctgatgaagcgaattcagagaggcccagtaag

SEQ ID NO: 840 - DNA, 510 bp, Homo sapiens
  misc_feature (39)..(39): n includes a, c, g, or t, or contains no nucleotide
  misc_feature (86)..(86): n includes a, c, g, or t, or contains no nucleotide
  misc_feature (88)..(91): n includes a, c, g, or t, or contains no nucleotide
  misc_feature (94)..(94): n includes a, c, g, or t, or contains no nucleotide
  misc_feature (96)..(96): n includes a, c, g, or t, or contains no nucleotide
  misc_feature (100)..(103): n includes a, c, g, or t, or contains no nucleotide
  misc_feature (105)..(113): n includes a, c, g, or t, or contains no nucleotide
  misc_feature (116)..(121): n includes a, c, g, or t, or contains no nucleotide
  misc_feature (123)..(125): n includes a, c, g, or t, or contains no nucleotide
  misc_feature (130)..(130): n includes a, c, g, or t, or contains no nucleotide
  misc_feature (132)..(132): n includes a, c, g, or t, or contains no nucleotide
  misc_feature (136)..(139): n includes a, c, g, or t, or contains no nucleotide
  misc_feature (142)..(142): n includes a, c, g, or t, or contains no nucleotide
  misc_feature (144)..(145): n includes a, c, g, or t, or contains no nucleotide
  misc_feature (149)..(152): n includes a, c, g, or t, or contains no nucleotide
  misc_feature (156)..(157): n includes a, c, g, or t, or contains no nucleotide
  misc_feature (165)..(165): n includes a, c, g, or t, or contains no nucleotide
  misc_feature (168)..(168): n includes a, c, g, or t, or contains no nucleotide
  misc_feature (170)..(172): n includes a, c, g, or t, or contains no nucleotide
  misc_feature (174)..(174): n includes a, c, g, or t, or contains no nucleotide
  misc_feature (178)..(180): n includes a, c, g, or t, or contains no nucleotide
  misc_feature (182)..(183): n includes a, c, g, or t, or contains no nucleotide
  misc_feature (189)..(231): n includes a, c, g, or t, or contains no nucleotide
  misc_feature (464)..(464): n includes a, c, g, or t, or contains no nucleotide
  misc_feature (484)..(484): n includes a, c, g, or t, or contains no nucleotide
ccatgtttcaggagcctaagaccctcccagagcccaggngcttcaccgcagaccccaagccattgagcacatcacccaaagcagtngnnnncancncggnnnncnnnnnnnnnttnnnnnngnnnggtgntngtcnnnnggngnngggnnnnctgnngggtcganggngnnngnttcnnncnntttctnnnnnnnnnnnnnnnnnnnnnnnnnnnnnnnnnnnnnnnnnnncatcaagtgctcaaagacatggcaaccgttcagtggtacttaagtattcaaaatatacaactacagattctctgacagaaaccagcacggggtcttcaccttcattcaccccacaggcgacatgcgagggagaacagcatctcagtggtgatttccaaaccaagcctttgttttcggtgtggggttttgggggtttgctttaatgtttttgaaattgtaaatgttgggctttntattttgatgtaaactgagnataatggcattttagggcctgtgacc

SEQ ID NO: 841 - DNA, 573 bp, Homo sapiens
  misc_feature (31)..(62): n includes a, c, g, or t, or contains no nucleotide
  misc_feature (65)..(65): n includes a, c, g, or t, or contains no nucleotide
  misc_feature (105)..(105): n includes a, c, g, or t, or contains no nucleotide
  misc_feature (110)..(110): n includes a, c, g, or t, or contains no nucleotide
  misc_feature (114)..(115): n includes a, c, g, or t, or contains no nucleotide
  misc_feature (152)..(152): n includes a, c, g, or t, or contains no nucleotide
  misc_feature (175)..(175): n includes a, c, g, or t, or contains no nucleotide
  misc_feature (177)..(177): n includes a, c, g, or t, or contains no nucleotide
  misc_feature (429)..(443): n includes a, c, g, or t, or contains no nucleotide
  misc_feature (474)..(474): n includes a, c, g, or t, or contains no nucleotide
  misc_feature (531)..(546): n includes a, c, g, or t, or contains no nucleotide
ctgcaggtcctagaagaagtgctgggtgacnnnnnnnnnnnnnnnnnnnnnnnnnnnnnnnnganggagcagaaccgggagctgtactcagagggcctgggggcntgggngagnntggcacaggctgaaggcagctcccacatcttgacctntgactccacagaacagtcccccnantccctgccctctgaccctgaagagcactcccatctctgccccctgacctcagagagcagcctccgacctcctgacctctgaccctggccagcactctagctcctgacctttgacccgagggccacctcaaccccagcttctgacgtgtccaggacagagcatccctggattctgttcagggtgggaagtagtactgctagtcatggtctcaccccgagctgacccctctgcctgggctttgtgccaccctcnnnnnnnnnnnnnnngaaactctccccccaaatcctccaacctctngggccacagccctgcccctccagttccttggcagttctcccccaaaccaggtctgtnnnnnnnnnnnnnnnnttacatgagggctactttccaaccaaa

SEQ ID NO: 842 - DNA, 45 bp, Homo sapiens
ataaatgaaatactcttcttcatctctgttttgctcttaaaaata

SEQ ID NO: 843 - DNA, 493 bp, Homo sapiens
  misc_feature (66)..(66): n includes a, c, g, or t, or contains no nucleotide
  misc_feature (76)..(76): n includes a, c, g, or t, or contains no nucleotide
  misc_feature (87)..(109): n includes a, c, g, or t, or contains no nucleotide
  misc_feature (134)..(134): n includes a, c, g, or t, or contains no nucleotide
  misc_feature (417)..(417): n includes a, c, g, or t, or contains no nucleotide
gtccgccacaacagcatggaggacgccagggagctggacgaggaggtggtggaagaggcagatgangacccctgangggcctgggcnnnnnnnnnnnnnnnnnnnnnnngaaaggcatcttctggaattttttngtcagctgtggcaaagccagcatttttgctgggaaaaaacatgtctgtgttggaatacgcgacagagctgggcgagaacgcagcggcccgggccggcggagggtgtgacccgtctgcaccttgctctgtcccacctgcctctgggtgcccggcagctccactagatttttggattcattcctttgaagggagtcgggttcacccttccatcgtattctcccaactacacattgtaaagcctgagaaacttctagaacctcaggaagctgcagctggagggctngggcacctgcccccctgctccccacacatcatatcctccccatactcctgcagggcccacggctcctgagcaacag

SEQ ID NO: 844 - DNA, 406 bp, Homo sapiens
  misc_feature (26)..(26): n includes a, c, g, or t, or contains no nucleotide
  misc_feature (44)..(44): n includes a, c, g, or t, or contains no nucleotide
  misc_feature (56)..(56): n includes a, c, g, or t, or contains no nucleotide
  misc_feature (65)..(79): n includes a, c, g, or t, or contains no nucleotide
  misc_feature (90)..(90): n includes a, c, g, or t, or contains no nucleotide
  misc_feature (114)..(114): n includes a, c, g, or t, or contains no nucleotide
  misc_feature (124)..(124): n includes a, c, g, or t, or contains no nucleotide
  misc_feature (212)..(226): n includes a, c, g, or t, or contains no nucleotide
  misc_feature (371)..(371): n includes a, c, g, or t, or contains no nucleotide
aatccaggagaacctgctcagcttgnaggagaccatgaagcagntggaggagttgnaggaggaannnnnnnnnnnnnnncccctcctgtntcagcttggggggaactctgtccnccagcctggntgcacttgaggttcccgcccaggaaggccttttgcaagaaggagaggaatgggggagaggacgtgagggaccacccccacccacacannnnnnnnnnnnnnncacaccccgagggcctgaggagagggagctgtgggccacgcctgggaggggcccagctggggttactggccccgcatgagcctcggccatctctccctcctgccctctgcttgggggactcagggctccattctggagggcaccncggtgacccgggccatctcagtattgcctgtgggg

SEQ ID NO: 845 - DNA, 47 bp, Homo sapiens
cgtcacaccgttatgcattactctgtgtctactattatgtgtgcata

SEQ ID NO: 846 - DNA, 577 bp, Homo sapiens
  misc_feature (26)..(26): n includes a, c, g, or t, or contains no nucleotide
  misc_feature (28)..(50): n includes a, c, g, or t, or contains no nucleotide
  misc_feature (241)..(241): n includes a, c, g, or t, or contains no nucleotide
  misc_feature (275)..(275): n includes a, c, g, or t, or contains no nucleotide
  misc_feature (280)..(280): n includes a, c, g, or t, or contains no nucleotide
  misc_feature (284)..(284): n includes a, c, g, or t, or contains no nucleotide
  misc_feature (292)..(292): n includes a, c, g, or t, or contains no nucleotide
  misc_feature (322)..(437): n includes a, c, g, or t, or contains no nucleotide
  misc_feature (439)..(458): n includes a, c, g, or t, or contains no nucleotide
  misc_feature (524)..(538): n includes a, c, g, or t, or contains no nucleotide
gtgagtgtcactacttggctttgctntnnnnnnnnnnnnnnnnnnnnnnntctttgacctgctgacttgtgacttgcagaaacataggcagtagtcctagcctggtaaagaccctccaccacccctataagtttgattgctatgcaggtttgggagaggaggcctattgggctcttggatggaaccctttcccgtattaaacaaaccagagacagaatcagtgctgactcaggatctcctnggtttggaatcgtaatgtgcctcaatcctctttnccaangcanggcctcanccagtctctttctctttcctgcttcacccnnnnnnnnnnnnnnnnnnnnnnnnnnnnnnnnnnnnnnnnnnnnnnnnnnnnnnnnnnnnnnnnnnnnnnnnnnnnnnnnnnnnnnnnnnnnnnnnnnnnnnnnnnnnnnnnnnnncnnnnnnnnnnnnnnnnnnnntggggcaatggcatctgtcacggtgttttctccagcaggtggagattatggaacctacatatgggnnnnnnnnnnnnnnncactgttgtcaccttgaccattaaaaaccagaatgagga

SEQ ID NO: 847 - DNA, 426 bp, Homo sapiens
  misc_feature (364)..(364): n includes a, c, g, or t, or contains no nucleotide
gtacaactgacttgtatagacattgttcttaatatgaacatggtaggtaaactttttttttatttttttctgataaaatacaaatgttggccccagattcttttaacgtcaaggaaatgaataacagcttgtcagagacttcctatggaagaaagaattttttagatactatcattaggttggatatggtaatagatatatttcagaatagcaagtggtggtatatcttatccatatctttaggctgctgcagaattttaaggttatagataaagctgtgatattttatgcaaagactggctctaggtatttgaggagcacaatacagagattttaaaaagtgattttgtaaaatctacactanggtctctgtttctccaaagtaagtgtttgtgatttgttcctcatactgcagtgagtaaaaaa

SEQ ID NO: 848 - DNA, 559 bp, Homo sapiens
  misc_feature (142)..(181): n includes a, c, g, or t, or contains no nucleotide
  misc_feature (330)..(344): n includes a, c, g, or t, or contains no nucleotide
  misc_feature (392)..(406): n includes a, c, g, or t, or contains no nucleotide
tactgctccatgtccagagtctgggttctcttggtttgtggtgtctgaatccagcattcccatcctggggatggggctgtctttgcagagccctcttctggctgggcgagtccctcgctagtcagtgcttcctttctaaaannnnnnnnnnnnnnnnnnnnnnnnnnnnnnnnnnnnnnnnaaaagggtagaaagagctttgcttcctttcagaaaccactgagggtgtgctgttgggtctttcagctcctcgggtggtagggaggacacaggctggggaggtggcagtgttgggtggagtccagctcagggccccaccctctcccctgnnnnnnnnnnnnnnntaaacctaggggtggggtgaggacacctgagggcctcccgtgtggccnnnnnnnnnnnnnnngacttattgcccaatgagggggctgtgcttaggtaggggctgctatccactctggaaattaagtcagaaagatgagtgtaatctggtacccaggatctatagggtcccagagacggacattccttacctcaaatgctgcctgataaactggct

SEQ ID NO: 849 - DNA, 324 bp, Homo sapiens
  misc_feature (27)..(142): n includes a, c, g, or t, or contains no nucleotide
  misc_feature (149)..(149): n includes a, c, g, or t, or contains no nucleotide
  misc_feature (157)..(157): n includes a, c, g, or t, or contains no nucleotide
  misc_feature (173)..(173): n includes a, c, g, or t, or contains no nucleotide
  misc_feature (181)..(181): n includes a, c, g, or t, or contains no nucleotide
tttcccttgctatggcccgtctatgannnnnnnnnnnnnnnnnnnnnnnnnnnnnnnnnnnnnnnnnnnnnnnnnnnnnnnnnnnnnnnnnnnnnnnnnnnnnnnnnnnnnnnnnnnnnnnnnnnnnnnnnnnnnnnnnnnncacctgnaacagggntcaaaatggtcagctncctgggcnctgagctaaggaaatatgcagggggttttgactttccctgtcctgaggcttgcctccactttgacctggctgcatctttcctcagctcttctgggtaagctgagagctaagcaaataagacctcctgggctacctggtcatga

SEQ ID NO: 850 - DNA, 337 bp, Homo sapiens
  misc_feature (64)..(114): n includes a, c, g, or t, or contains no nucleotide
  misc_feature (154)..(154): n includes a, c, g, or t, or contains no nucleotide
  misc_feature (196)..(210): n includes a, c, g, or t, or contains no nucleotide
gtctgcactcctttatctgtaattgtaattccaaaatccaaaaagctctgaaaacaaggtttcnnnnnnnnnnnnnnnnnnnnnnnnnnnnnnnnnnnnnnnnnnnnnnnnnnnctgaccttgaatctttttatcccatttagtgtgaatattncctttattttgctgcttgatgatgagagggagggctgctgcnnnnnnnnnnnnnnngggctggttaatgtagtatggtatatgcacaaaactacttttctaaaatctaaaatttcataattctgaaacaacttgccccaagggtttcagagaaaggactgtggacctctatcatctgctaagt

SEQ ID NO: 851 - DNA, 211 bp, Homo sapiens
gatgtacccgcgcggcaaccactgggcggtggggcacttaatggggaaaaagagcacaggggagtcttcttctgtttctgagagagggagcctgaagcagcagctgagagagtacatcaggtgggaagaagctgcaaggaatttgctgggtctcatagaagcaaaggagaacagaaaccaccagccacctcaacccaaggccttgggcaat

SEQ ID NO: 852 - DNA, 423 bp, Homo sapiens
  misc_feature (83)..(83): n includes a, c, g, or t, or contains no nucleotide
  misc_feature (156)..(156): n includes a, c, g, or t, or contains no nucleotide
  misc_feature (170)..(170): n includes a, c, g, or t, or contains no nucleotide
  misc_feature (344)..(344): n includes a, c, g, or t, or contains no nucleotide
  misc_feature (347)..(347): n includes a, c, g, or t, or contains no nucleotide
  misc_feature (351)..(369): n includes a, c, g, or t, or contains no nucleotide
  misc_feature (371)..(372): n includes a, c, g, or t, or contains no nucleotide
  misc_feature (390)..(397): n includes a, c, g, or t, or contains no nucleotide
cctgcggagatccagctgcttcgggggcaggatggacaggattggagcccagagcggactgggctgtaacagcttccggtacngaagataacagccagggaggacaagcagggctgggcctagggacagactgcaagaggctcctgtcccctgggntctctgctgcattngtgtcatcttgttgccatggagttgtgatcatcccatctaagctgcagcttcctgtcaacacttctcacatcttatgctaactgtagataaagtggtttgatggtgacttcctcgcctctcccaccccatgcattaaattttaaggtagaacctcacctgttactgaaagtggnttnaaannnnnnnnnnnnnnnnnnnanngacagaagacaaaaaaannnnnnnntgtgctttctttcttcttgggaagag

SEQ ID NO: 853 - DNA, 222 bp, Homo sapiens
ctgtgtgtgtgtactaccatagaatgggccccaagatgcatgattaagtgaggaaaaaagcccatggtatcctaatgtttggaatggagaaagtgtgtagatgtatgtgtgtgcatatgttttcacacagacgtatacacgtgtatatcatatgtccacctgcatatgcctaggatgtctctgggaggatatctagcagcccggcagcctgaattgcctctg

SEQ ID NO: 854 - DNA, 424 bp, Homo sapiens
  misc_feature (277)..(280): n includes a, c, g, or t, or contains no nucleotide
  misc_feature (282)..(282): n includes a, c, g, or t, or contains no nucleotide
  misc_feature (304)..(304): n includes a, c, g, or t, or contains no nucleotide
  misc_feature (310)..(310): n includes a, c, g, or t, or contains no nucleotide
  misc_feature (312)..(313): n includes a, c, g, or t, or contains no nucleotide
  misc_feature (319)..(320): n includes a, c, g, or t, or contains no nucleotide
  misc_feature (325)..(325): n includes a, c, g, or t, or contains no nucleotide
  misc_feature (327)..(327): n includes a, c, g, or t, or contains no nucleotide
  misc_feature (329)..(329): n includes a, c, g, or t, or contains no nucleotide
  misc_feature (338)..(338): n includes a, c, g, or t, or contains no nucleotide
  misc_feature (341)..(341): n includes a, c, g, or t, or contains no nucleotide
  misc_feature (349)..(349): n includes a, c, g, or t, or contains no nucleotide
  misc_feature (352)..(352): n includes a, c, g, or t, or contains no nucleotide
  misc_feature (357)..(358): n includes a, c, g, or t, or contains no nucleotide
tgttgcttgcttaatgattcccaggaaacttcgttgtaggcatatattttataagagtattatacagtgttaactatgcaagtaagttctaaaattacacaattatctgtgtaatgttttagtccaattactgtgatttattcaactctgttctaaagttatctggaattgtcatgctgcctcaatttacagaaatctataatagatttctatagaaatgtataaagacgtagcagtcattttgttgtttctaaatagataacatataaaaataaannnntngttactttagtatttcagtagnaaaaanannagctcnnttctntngnactatactnccnaaaacttngcnggggnnttctggcctttcacttatcctttagttggaattgtctagggatgaaaagctggtggacatgacctg

SEQ ID NO: 855 - DNA, 406 bp, Homo sapiens
  misc_feature (28)..(28): n includes a, c, g, or t, or contains no nucleotide
  misc_feature (41)..(41): n includes a, c, g, or t, or contains no nucleotide
  misc_feature (74)..(74): n includes a, c, g, or t, or contains no nucleotide
  misc_feature (95)..(95): n includes a, c, g, or t, or contains no nucleotide
atgcaggctatgacagtgcagacctggntggcacagctcangggctgctcacagtgaaggcaataccactgctnggattggatatgagggaaggncaccattggagatatggctatcctgggtataacagaaagttttcaagtgaagcgacaggttcttctgagtgcagctgaagcagcagaggtgattctgcgtgtggacaacatcatcaaagcggcacccaggaaacgtgtccctgatcaccacccctgttaagcattcccacgtgctgtcgatctttggaccagtttctagcaaagttgtgtttgaaagatactctattaaagaagactgtggaatctgtttatcggtgcccattatatccttaagtttggatatttagctgaccttcgctttaacataggtc

SEQ ID NO: 856 - DNA, 539 bp, Homo sapiens
  misc_feature (96)..(96): n includes a, c, g, or t, or contains no nucleotide
  misc_feature (119)..(120): n includes a, c, g, or t, or contains no nucleotide
  misc_feature (341)..(343): n includes a, c, g, or t, or contains no nucleotide
  misc_feature (345)..(345): n includes a, c, g, or t, or contains no nucleotide
  misc_feature (358)..(358): n includes a, c, g, or t, or contains no nucleotide
  misc_feature (369)..(369): n includes a, c, g, or t, or contains no nucleotide
  misc_feature (382)..(382): n includes a, c, g, or t, or contains no nucleotide
  misc_feature (391)..(391): n includes a, c, g, or t, or contains no nucleotide
  misc_feature (402)..(404): n includes a, c, g, or t, or contains no nucleotide
  misc_feature (413)..(413): n includes a, c, g, or t, or contains no nucleotide
  misc_feature (430)..(455): n includes a, c, g, or t, or contains no nucleotide
  misc_feature (461)..(461): n includes a, c, g, or t, or contains no nucleotide
  misc_feature (466)..(466): n includes a, c, g, or t, or contains no nucleotide
  misc_feature (468)..(468): n includes a, c, g, or t, or contains no nucleotide
  misc_feature (481)..(481): n includes a, c, g, or t, or contains no nucleotide
  misc_feature (485)..(485): n includes a, c, g, or t, or contains no nucleotide
ttctcaggaagagctatggcccagaaacaacaggggaaactagagttcggtctgacagtccttggggttaagtctcctgtcttatggtccagaaantcctgtttctccttagttggctnnaaactgctcccatcattccttctggcctctgctgaatgcagggaatgcaatccttccctgctcttgcagttgctctgacgtagaaagatccttcgggtgctggaagtctccatgaagagcttgtgtcctgtcctttcttgcagattctatttcccctcttctgctaatacctcttactttgcttgagaatcctctcctttcttattaatttcagtcttggnnngnttctatcaggggntgcattctggnccaaggggtgggncctgtgaantcaatcctggnnncaatcagancaccctctccttaaaannnnnnnnnnnnnnnnnnnnnnnnnnactgantctgnantcatccccacagntggntctgacaagatggtccatttgttcctgcttccgagatccccaggggcagcctgg

SEQ ID NO: 857 - DNA, 240 bp, Homo sapiens
  misc_feature (110)..(110): n includes a, c, g, or t, or contains no nucleotide
attgaaaaaagcacgtctaaagagccagttgattttgagcaatggattgaaaaagatttggtacacacagaggggcagcttcaaaatgaagaaattgtggcacatgatgnctccgctacttacttgagattcattattgtatcagcctttgatcattttgcatctgtgcatagcgtttctgcagaaggaacagtagtctcaaatctttcctcataatgataacaaaatgctcttgcatga

SEQ ID NO: 858 - DNA, 546 bp, Homo sapiens
atccttagcacgttatctcagggcttatgaaatgtaattaaatttattaagaaaatagatgaaaaattagggtacacagctggccaccaaatgcgaagtcaatctgctacttaaccctgaaaacaaaatcagttttgcatattaccactaacactaatacatatagagagcggaaccataactcattgaattttggagaggaataagcttagcgttaatattgacaatattaaggcaatattcttgtaggaatactatgtgcatgtttgatattttgccaaataacaataattaataattgttcaatgtttaagaataatattaacaaaataaaggagtttaatgcagtgatctttgtttttggcacatcaaaaattctcagtcattattcatgtttctttatgctgctggcttttgtgccctggaagatcataatagtgaccaaaatatacatgcagacttgttttttattattgttgtttaagcataatttaagaaaaaaaatttttacctggtgaacttgctatctgctctgtttctagttaa

SEQ ID NO: 859 - DNA, 586 bp, Homo sapiens
aattgaacatcagaggatgggaagagggctctgtaagccagaaccttactaaagtagagggcacaatcagtgtgaataaatccacttcagaatctcaagtcaaggccaggcacggcggctcacgcctgtaatcccagcactttgggaggccgagacaggcggatcacctgaggtcgggagttcgagaccagccttaccaacatggagaaaccccatctctactaaaaatacaaaattacctgggcgtggtggtgcatgcctgtaatcccatcatctactcaggaggctgaggcaggagaattgcttgaacccaggaggcggaggttgcagtgagccaggattgtgccattgcactccagcctgggcaacaagaacaaaactccatctcaaaaaataaaaatcccaatcccaagtcgaaatcacctcttgttttaaacaagaatgaatcattactgtgtatgttagggtattaaaactgtttcaccagtacagtgaaagttgtttcaacattttaaacaaacagtggttatagactctttctttaaccattgtatattttcttccattcttgtcattggtcaatagg

SEQ ID NO: 860 - DNA, 535 bp, Homo sapiens
  misc_feature (93)..(124): n includes a, c, g, or t, or contains no nucleotide
  misc_feature (388)..(388): n includes a, c, g, or t, or contains no nucleotide
  misc_feature (425)..(426): n includes a, c, g, or t, or contains no nucleotide
  misc_feature (428)..(428): n includes a, c, g, or t, or contains no nucleotide
  misc_feature (439)..(456): n includes a, c, g, or t, or contains no nucleotide
caccaagggctgcttcgaacacatcggccacgccatcgacagctacacgtggggtatctcgtggtttgggtttgccatcctgatgtggacgcnnnnnnnnnnnnnnnnnnnnnnnnnnnnnnnnaccatgctctgagggacaggaggggaaggcaacatacacaccccggactcctccgcatcctcctcctgcttcctccgctgggcctggatggctgcctcacctctcacctcccaacgtccctagcccttacgtccttccacttccaagatctttttccaggttcctgagccctactgtgtctcaggtgtgccctgaaaccccagggcttgtgtgcacatatccttagcccatctttcaagggacctctccatgatcccacctccnattcacagatacctctcttgtagctctctgacctccnncntcatggcaggnnnnnnnnnnnnnnnnnnaccgtttgtgattgccatttgagctctggaagcctctattgccatgagagttctgtcacggtcactttactgtccccat

SEQ ID NO: 861 - DNA, 589 bp, Homo sapiens
catggccatctttgcttctgtatgcttggcatcacgtcttccccggtccctgcatgccttcatcatggtgacatttgccattcagatttttgccctgtggcccatgttgcagaagaaactaaaggcatgtactccccggagctatgtgggggtcacactgctttttgcattttcagccgtgggaggcctactgtccattagtgctgtgggagccgtactctttgcccttctgctgatgtctatctcatgtctgtgtccattctacctcattcgcttgcagctttttaaagaaaacattcatgggccttgggatgaagctgaaatcaaggaagacttgtccaggttcctcagttaaattaggacatccattacattattaaagcaagctgatagattagcctcctaactagtatagaacttaaagacagagttccattctggaagcagcatgtcattgtggtaagagaatagagatcaaaaccaaaaaaaatgaaccaaaggcttgggtggtgagggtgcttatcctttctgttattttgtagatgaaaaaactttctggggacctcttgaattacatgctgtaacatat

SEQ ID NO: 862 - DNA, 396 bp, Homo sapiens
  misc_feature (39)..(60): n includes a, c, g, or t, or contains no nucleotide
  misc_feature (165)..(213): n includes a, c, g, or t, or contains no nucleotide
  misc_feature (277)..(318): n includes a, c, g, or t, or contains no nucleotide
tataaatagtgcatgctcagccatgtacactgtaaatannnnnnnnnnnnnnnnnnnnnnaaggaccataattaacatcacttagtgaattgtgataaagaaaaaaaagccatgatttattcgatgtgattggcttgtttttatgtggcgccaagaacgaacctnnnnnnnnnnnnnnnnnnnnnnnnnnnnnnnnnnnnnnnnnnnnnnnnnttatatttgactgtggttcaacagtattgcgttgtcagactaggaaagctaaacgaacaaaatnnnnnnnnnnnnnnnnnnnnnnnnnnnnnnnnnnnnnnnnnnttcctaacaagagattattaacttttatcaggtgttaacatctgtttcaggaacatggcagtatgtttacatgtcaga

SEQ ID NO: 863 - DNA, 450 bp, Homo sapiens
  misc_feature (86)..(104): n includes a, c, g, or t, or contains no nucleotide
  misc_feature (108)..(108): n includes a, c, g, or t, or contains no nucleotide
  misc_feature (260)..(282): n includes a, c, g, or t, or contains no nucleotide
cttcacctgccctgtgtcagtgtcttctgagggcaattgcgttgctcaaatcactagcacagaggttccttaatttggggccttannnnnnnnnnnnnnnnnnngggntccatgaaccccatgaaattatttgtagacttgtatgtacatttttctggggagaaggttcaagagattcataagattgtcaaactccttgaaggttcagaacctctgcagggaagggggaagaaaaccctcccattaggaagcatgctttnnnnnnnnnnnnnnnnnnnnnnnggtgatagggacttcaagagtaaaatgcaccttgtattgcataagaagcatacacaaatcaataaatcaagggagattataccagtaggactgaatcagggccttcaaagctggactgagttggtcctgttctggcacatatggtccactggagacaatgtatgattg

SEQ ID NO: 864 - DNA, 503 bp, Homo sapiens
  misc_feature (159)..(159): n includes a, c, g, or t, or contains no nucleotide
  misc_feature (176)..(176): n includes a, c, g, or t, or contains no nucleotide
  misc_feature (252)..(293): n includes a, c, g, or t, or contains no nucleotide
tcctaccttctctgggggatttgagggtagaggcaggggaagatctgttgttgcagttgcttctgcccccttgatccaaatgaccatcatctctgatggagatgggttgggtacctggccttcatggcaccttcactgctagggatgctcaaggggcangcctggggcccttcccntcctgtctcttctcggtctttcctctctgagcagcctcctacctcccctgcctgagccctcactccacagccctcnnnnnnnnnnnnnnnnnnnnnnnnnnnnnnnnnnnnnnnnnnacagggctggggctgggttggaacaggtgtgtgcccccaccacagctctatgactctgttctccctccctgccattgtggactcttgtatttgagggacctcaagagagtgaggaccctaccatccactgtccatattcagtcccagccccagtgcgcttcctctgttccctccctcagccatccaattcttgagttttctcactgattg

SEQ ID NO: 865 - DNA, 478 bp, Homo sapiens
  misc_feature (184)..(184): n includes a, c, g, or t, or contains no nucleotide
  misc_feature (187)..(193): n includes a, c, g, or t, or contains no nucleotide
  misc_feature (195)..(196): n includes a, c, g, or t, or contains no nucleotide
  misc_feature (274)..(309): n includes a, c, g, or t, or contains no nucleotide
gctgcctgtgtggtgtcgcgccttctcccccccggggctgggttggcgcaccctcccctcccgtctactcattccccggggcgtttctttgccgatttttgaatgtgattttaaagagtgaaaaatgagactatgcgtttttataaaaaatggtgcctgaaaaaaaaaaaaaaaaaaaaaaaanaannnnnnnannccttttcagcttctgctgggctggggcctgatggggagggtctcggtggtaccaggtctcctccaccgccatggcttnnnnnnnnnnnnnnnnnnnnnnnnnnnnnnnnnnnngtggggtgaggcagtgggtcccacttcccctcctacccctcccagctgacagtcctctccacctagtggctgtccagtgcccattcctcaccttttcccggggaggagagagcagcttctgccacttcccaggtaagcaggaggaggtgccaacagtgttaggcctggc

SEQ ID NO: 866 - DNA, 520 bp, Homo sapiens
  misc_feature (197)..(197): n includes a, c, g, or t, or contains no nucleotide
  misc_feature (364)..(364): n includes a, c, g, or t, or contains no nucleotide
catcacttcgccagtgcgttcaatgacacgctgatggcaggtggtccctgctgaaacccccacgcctccgcttcagcatctccacgctctgaagctgtctttcaaaatgtgtgcactgacccccttgtttgatcaaatttgtgtaaaatttttttagaagagatggcttattaacagggaagaagcttgttatattnccagttgtaagaatagccttagtgtttagatttttttatgatagggaagatgcggccatcactgggatattttcaaatcccaaggacatcagagtgaagtgtcagttgtcagatgattttaaaagttatgtcttcagagaaaaaaagattcattttctcattttaanccaattaaatattctgagtgagactaatcactcatttgcctacgaccttttagaaaagttgttttgttgaaatactgtacgtacgcttaatctaaatttgcattgactatgttttagtgtatttataaatggtgaactcagtttctgaaattaaac

SEQ ID NO: 867 - DNA, 445 bp, Homo sapiens
ccatgcagttgtttaccaaaaatagaggaggagagtcttaacttttgctcttggatttaagtcaaggtactgtatagaagttgtgtaaaatcagtatgaaagttcaatgttgctgttcttgctcagtgattttaaagaaattgagtagttcctatgtgatttttttttttcttttctaaactgcattcctgtgcccacctacggcatgcctctatgtattggctactacagtgttttaaaaagtgtttcagatatttctctaattatgtacaacctaaaatgttggtgttttgtatggatcacaagtgcagcattccttaattccttctgctatatgtcacacagttgttatttggagaaccaagtatgtattgcatgaaaacattatgacttttttctcttagtttaaataaactccaaggtaactggacttctaaagcacctt

SEQ ID NO: 868 - DNA, 414 bp, Homo sapiens
  misc_feature (254)..(254): n includes a, c, g, or t, or contains no nucleotide
tacagtttacagttgaagagcaaacagaaaggttttctcttggtgggatatgcagaacttgggatgtgtgtatatataaatatataatatatataaatatatataatactgacttaaaaaatcaaatcccccgacatacgttttttttaatctgtgccaaaaatgtgttttcagaggaaatcttattttcatattcagactttgtattgcccactcatttgtataagtgcgcttcggtacagcacgggtcctgntcccgcgatgtggaagtgtcacacggcacctgtacaaaaagactggctaacccctcttcctattaccttgatctcttcccccaacttcctaacacttattaatttatgaaactgtttttctcagcgcagttttgttttgtgtgtccattggattacaaac

SEQ ID NO: 869 - DNA, 482 bp, Homo sapiens
  misc_feature (132)..(132): n includes a, c, g, or t, or contains no nucleotide
cccccagttgaggagttgagagagtgcaggctggggtcaggacaggctgcggatgcttgtgcctatggggagttactccaacccacctattctgtctaatctccatggctttgcaccaaatcctccaccccntccaattgggaggggactgttcaccaccttgtggtaagggacaacaccctaaggctggtgccagtagttatgagtagcctaccaccccctcccttacagtaacccccaccccttcaggatcagtcaagggaaagcactagaacccctgggtagggaaagaaaggagggaaaaaccataaaaggaatacttataatgtgaaggtttgtaaatagtccatgatgatgtcgtggcagagtctgatttctatatagaggtgactttttttttaagtactgtgcaagctctgtgcttctataatgtgggaaatggcttggggaggatggcccctagcttaggaagactgttgtgt

SEQ ID NO: 870 - DNA, 277 bp, Homo sapiens
  misc_feature (54)..(54): n includes a, c, g, or t, or contains no nucleotide
  misc_feature (57)..(57): n includes a, c, g, or t, or contains no nucleotide
  misc_feature (68)..(68): n includes a, c, g, or t, or contains no nucleotide
  misc_feature (85)..(85): n includes a, c, g, or t, or contains no nucleotide
  misc_feature (92)..(92): n includes a, c, g, or t, or contains no nucleotide
  misc_feature (122)..(149): n includes a, c, g, or t, or contains no nucleotide
  misc_feature (151)..(151): n includes a, c, g, or t, or contains no nucleotide
  misc_feature (155)..(155): n includes a, c, g, or t, or contains no nucleotide
  misc_feature (160)..(161): n includes a, c, g, or t, or contains no nucleotide
  misc_feature (164)..(164): n includes a, c, g, or t, or contains no nucleotide
  misc_feature (184)..(193): n includes a, c, g, or t, or contains no nucleotide
  misc_feature (195)..(196): n includes a, c, g, or t, or contains no nucleotide
  misc_feature (214)..(229): n includes a, c, g, or t, or contains no nucleotide
  misc_feature (233)..(234): n includes a, c, g, or t, or contains no nucleotide
  misc_feature (236)..(239): n includes a, c, g, or t, or contains no nucleotide
ttgtttctcatttgtcaggcaccattctaagctcttttaaaatattcagtcttnacnatcctataggncgttatctccgttttanaaaatanagattgaaataatttatccaaggttgcagnnnnnnnnnnnnnnnnnnnnnnnnnnnntnctgntgcanngtnttcatcactgctttactgcnnnnnnnnnnanntgcacgccactacctagnnnnnnnnnnnnnnnngtgnnannnntcctactcattcaacctgaccttgtccttggctcttct

SEQ ID NO: 871 - DNA, 520 bp, Homo sapiens
  misc_feature (61)..(62): n includes a, c, g, or t, or contains no nucleotide
  misc_feature (69)..(71): n includes a, c, g, or t, or contains no nucleotide
  misc_feature (73)..(75): n includes a, c, g, or t, or contains no nucleotide
  misc_feature (81)..(82): n includes a, c, g, or t, or contains no nucleotide
  misc_feature (85)..(86): n includes a, c, g, or t, or contains no nucleotide
  misc_feature (110)..(110): n includes a, c, g, or t, or contains no nucleotide
  misc_feature (118)..(120): n includes a, c, g, or t, or contains no nucleotide
  misc_feature (122)..(122): n includes a, c, g, or t, or contains no nucleotide
  misc_feature (125)..(125): n includes a, c, g, or t, or contains no nucleotide
  misc_feature (131)..(131): n includes a, c, g, or t, or contains no nucleotide
  misc_feature (137)..(137): n includes a, c, g, or t, or contains no nucleotide
  misc_feature (145)..(146): n includes a, c, g, or t, or contains no nucleotide
  misc_feature (149)..(165): n includes a, c, g, or t, or contains no nucleotide
  misc_feature (176)..(176): n includes a, c, g, or t, or contains no nucleotide
  misc_feature (454)..(469): n includes a, c, g, or t, or contains no nucleotide
gtttgcatacactagaaaatgccttcaatttgtgttttaccagaattttgatactggtcannaattttnnncnnnccaacnnagnngactcaacttctcagatctataangggatacnnngncancctctngcaacncctatatnngannnnnnnnnnnnnnnnngttacatatangaattaaattcttctcaaataattcttaacctcagtaatgagcctaaatttactctgcttggctctctacacatggcatttcagggtataagatgtagcatttcaatgtgtaagatatatgtactaaacatatgtgttgctatcttcatcattaacatccttcttttctattgcttggctgtaatttttgtaaagataaattatattgtttttttgtatgtgtgtttgtagtatatgttcagaaggcaagcatcttcattttgctagctttgcagaannnnnnnnnnnnnnnncgttatttctaatgatgtaaaaaaaaatccctagtcctgtttagcatttga

SEQ ID NO: 872 - DNA, 600 bp, Homo sapiens
  misc_feature (52)..(52): n includes a, c, g, or t, or contains no nucleotide
  misc_feature (163)..(163): n includes a, c, g, or t, or contains no nucleotide
  misc_feature (216)..(216): n includes a, c, g, or t, or contains no nucleotide
  misc_feature (251)..(266): n includes a, c, g, or t, or contains no nucleotide
  misc_feature (269)..(270): n includes a, c, g, or t, or contains no nucleotide
  misc_feature (347)..(362): n includes a, c, g, or t, or contains no nucleotide
  misc_feature (364)..(364): n includes a, c, g, or t, or contains no nucleotide
  misc_feature (366)..(366): n includes a, c, g, or t, or contains no nucleotide
  misc_feature (369)..(369): n includes a, c, g, or t, or contains no nucleotide
  misc_feature (428)..(428): n includes a, c, g, or t, or contains no nucleotide
  misc_feature (477)..(477): n includes a, c, g, or t, or contains no nucleotide
  misc_feature (511)..(511): n includes a, c, g, or t, or contains no nucleotide
tcagcacccagatccgcatggaggtgggccccactatggtgggcgatgaacngtcggatccagagctgatgcagcatctgggggcttcaaagagaagagccttgggaaacaacttttatgaatactacgtcgatgaccctccccgcatagtcctggacaagcntggaacgcaggggcttccgtgtgctgagcatgacgggggtgggccagacgctnggtgtggtgtctgcacaaggagtgaccttctcatnnnnnnnnnnnnnnnnggnncacccctgtggaggggctgctgtgggccctgacctccaagctcctgcctcaccgtctgccttgctcctctcttcccnnnnnnnnnnnnnnnngngnccnagccccaaagggcagtgaatggccttctctgaaaccctgcgtcaagcagtgggagaggncagtgcccggtgccctggtgctcccagctgccctcctgcttcgggcctnggccgagggccttgtgtaggccatgttcctcggncagctgccccgggccggagctgggcactccagcggccctggcgcgtggctcctgcatagctagcccaagccaataaagggctgtgatga

SEQ ID NO: 873 - DNA, 449 bp, Homo sapiens
  misc_feature (163)..(240): n includes a, c, g, or t, or contains no nucleotide
ccagccttgggtctggccagctgttgctggtttgtcatgcctccggcttctacccaaagcctgtttgggtgacatggatgcggaatgaacaggagcaactgggcactaaacatggtgatattcttcctaatgctgatgggacatggtatcttcaggtgatccnnnnnnnnnnnnnnnnnnnnnnnnnnnnnnnnnnnnnnnnnnnnnnnnnnnnnnnnnnnnnnnnnnnnnnnnnnnnnntctactggggacaccacttttccatgaattggattgccttggtagtgatagtgcccttggtgattctaatagtccttgtgttatggtttaagaagcactgctcatatcaggacatcctgtgagactcttccccctgactcccccattgtgttaagaacccagcaacccaggagcctagtacaatatagtgatgccatcccgtcgactct

SEQ ID NO: 874 - DNA, 188 bp, Homo sapiens
  misc_feature (144)..(144): n includes a, c, g, or t, or contains no nucleotide
  misc_feature (154)..(154): n includes a, c, g, or t, or contains no nucleotide
gtagctgattttactcccaaaaaagaagaggaggagagccaaccagcaaagaaaacatacacttggaatacaaaggaagaggcaaagcaagcttttaaagaattattgaaagaaaagcgggtaccatcgaatgcttcatggggngcaggctatngaaaatgattgttaatgttccacggttacagtgc

SEQ ID NO: 875 - DNA, 477 bp, Homo sapiens
  misc_feature (27)..(27): n includes a, c, g, or t, or contains no nucleotide
  misc_feature (40)..(40): n includes a, c, g, or t, or contains no nucleotide
  misc_feature (45)..(46): n includes a, c, g, or t, or contains no nucleotide
  misc_feature (48)..(48): n includes a, c, g, or t, or contains no nucleotide
  misc_feature (57)..(57): n includes a, c, g, or t, or contains no nucleotide
  misc_feature (59)..(59): n includes a, c, g, or t, or contains no nucleotide
  misc_feature (63)..(63): n includes a, c, g, or t, or contains no nucleotide
ccatttgggcagtataggtgtttgctnttttgttttcttnttttnngnaaaaccttnanaccnttgacactgacagatgtgtttgcaaggatacggctgcagtattactaatttccatgtgtatctggaagtatttttaaatggcataccaaaatccagaagtttaaagatgcctataaaagtaaacaacatttatttaaaaagaactctgaatatgccttcttttttaattagaaatatcttcgagacttgggtgtttgttaataactaataactggagtaagctacaggatctaaagcagccctttttacagtctagttaggagagagaaaataattgcaaatatccacttagaggcaaagaacaattttttattatcaaaaaggtttctgcacattgttgtggcaatattgtatctgtttagaaaatgggcttttccaaaagcaaacaaagataggttcctcaggtgaccaaaa

SEQ ID NO: 876 - DNA, 238 bp, Homo sapiens
  misc_feature (85)..(87): n includes a, c, g, or t, or contains no nucleotide
  misc_feature (89)..(90): n includes a, c, g, or t, or contains no nucleotide
  misc_feature (92)..(92): n includes a, c, g, or t, or contains no nucleotide
  misc_feature (94)..(110): n includes a, c, g, or t, or contains no nucleotide
  misc_feature (112)..(113): n includes a, c, g, or t, or contains no nucleotide
  misc_feature (129)..(129): n includes a, c, g, or t, or contains no nucleotide
  misc_feature (188)..(209): n includes a, c, g, or t, or contains no nucleotide
  misc_feature (211)..(211): n includes a, c, g, or t, or contains no nucleotide
gacaagctaggacacctgtggtatctttaattgtatctccttcagaagtttgcttcttatggtataataaagtatggaagaatannnannanannnnnnnnnnnnnnnnngnngaacttaactttctanagcagtttgttgacttgtgtgcaatggggagaggtaccatgatgacactcacagggagnnnnnnnnnnnnnnnnnnnnnnancggtcattgttaatatcacgggcgtaa

SEQ ID NO: 877 - DNA, 248 bp, Homo sapiens
tggttcaaccatgattaggaactgaaatttagtagaagagggaaaaggagttaatgtaacaaattattttagctacaaaccccggtaatagagcacttgggggatgggatggggtgggttggtgagacaatcagaatggtaaattgattaaatgctcctaaccctgtaattttgtgcatagagcaccctatgctgtggaaataactgttcttagatttcattgtaactggactgttcaggttgcccag

SEQ ID NO: 878 - DNA, 563 bp, Homo sapiens
gtgcacaagtgttaccgggtctttttagtgtagccatggaagatactttcaaaaggacatcttcagatcataagtcttaggaccaaaggtgtttttaatgagataatctttttgattttctaacaagaaaggaaatattcactttacattttaacatcaacttttaagtgatattcagaattaattgaccatggtgatacgttgtaaaatgttttcatattaagaatgtaattatttccttattgtattttttaaaagctaaagtcatatttaaaattctctttgaaagaaacaggcaaagaaacagcaaagatttttttaaattaaatatgttagtagtgcccacttcaaatgactgtaaatatattttcactgtttctcaatgtatttaattcataaagtaaaaattttatgaaaagaaacttgcaaggaaaatcctagttttcagtccactcgccccactttgtagtagcttcactgaatttcctgctttcctggttgaattttctactgtttcacgtggtgtaaccctagactggcgcccttggcgtgcccctttgtgt

SEQ ID NO: 879 - DNA, 528 bp, Homo sapiens
tggccctgagctggagttacaaatccctgaactacctcttgacagcaatgaattttgggtccatgagggttgtattctctgggccaatggaatctacctggtttgtggcaggctctatggcctgcaggaagcgctggaaatagccagagagatgaaatgttcccactgccaggaggcaggcgccaccttgggctgctacaacaaaggctgctccttccgataccattacccgtgtgccattgatgcagattgtttgctacatgaggagaacttctcggtgaggtgccctaagcaacaaggtgagactgtggagatgagaaggtggtggacactcgtgatggaatggaaatcgtcctaccgtgcagccacaccctgccctgccccgccccgccccgcccgcgtgcctgcccatgccagcacttccttaagttctcacatcacactcaaaccagtgacaccacaggaaagaaagacccaagacgttggaatggctgtttccatggacacaatctccatagtgacaatgtg

SEQ ID NO: 880 - DNA, 329 bp, Homo sapiens
  misc_feature (70)..(70): n includes a, c, g, or t, or contains no nucleotide
  misc_feature (74)..(74): n includes a, c, g, or t, or contains no nucleotide
  misc_feature (82)..(83): n includes a, c, g, or t, or contains no nucleotide
  misc_feature (94)..(94): n includes a, c, g, or t, or contains no nucleotide
  misc_feature (100)..(100): n includes a, c, g, or t, or contains no nucleotide
  misc_feature (125)..(125): n includes a, c, g, or t, or contains no nucleotide
  misc_feature (283)..(283): n includes a, c, g, or t, or contains no nucleotide
gccatggtctctctctgtagcctttcctggtagtcaatttgttgtcccgaggattcatctttttcttccncctnccttctgnnttttttttgcntgtatncattggtcttgcctgagctcttccncaaagcttggaggaacgggggaggcccgggaatgtccctgtctgcacgacctgggactctgcccatgtgcttttgcctgtggaatggagacgcggaccctggatagtggttctatgactctgcgagggacaggcccacgcgtgtggggagaacatctnccttccggggctgccctcaagagcttctgaaaaactaatgactctg

SEQ ID NO: 881 - DNA, 542 bp, Homo sapiens
  misc_feature (29)..(29): n includes a, c, g, or t, or contains no nucleotide
  misc_feature (35)..(35): n includes a, c, g, or t, or contains no nucleotide
  misc_feature (43)..(44): n includes a, c, g, or t, or contains no nucleotide
  misc_feature (46)..(76): n includes a, c, g, or t, or contains no nucleotide
  misc_feature (81)..(81): n includes a, c, g, or t, or contains no nucleotide
  misc_feature (133)..(148): n includes a, c, g, or t, or contains no nucleotide
  misc_feature (180)..(222): n includes a, c, g, or t, or contains no nucleotide
ccaacctgacagtcctcagtatgcagagnaaccgnctgaccannannnnnnnnnnnnnnnnnnnnnnnnnnnnnnnggganctgtaccttagccacaatggcatcgaggtcatcgagggcctggagaacaatnnnnnnnnnnnnnnnntggacattgcatcaaatagaatcaaaaagatnnnnnnnnnnnnnnnnnnnnnnnnnnnnnnnnnnnnnnnnnnnaacgacaatctccttgagagctggagcgacctcgacgagctgaagggagccaggagcctggagacagtgtacctggagcggaaccccttgcagaaggacccccagtaccggcggaaggtcatgctcgccctcccctccgtgcggcagatcgatgccacgttcgtcaggttctgagtccttcttggctcctcatgtggtccctctcctcggaagaactgcccagccacgggtttttaacccacctgttgctcctgaggtcgtcactatatcaacagtcacaaacccaatggcaataaaggcactgacgatagctggcgcgc

SEQ ID NO: 882 - DNA, 585 bp, Homo sapiens
  misc_feature (92)..(107): n includes a, c, g, or t, or contains no nucleotide
  misc_feature (388)..(409): n includes a, c, g, or t, or contains no nucleotide
ctccctgtgaagagagagttaatatatttgttttatttatttgctttttgcgttgggatgggttcgtgtccagtcccgggggtctgatatgnnnnnnnnnnnnnnnntgttcccagcagccctggcttgggggcttgacgcccttccccttgccccaggccatcatctccccacctctcctcccctctcctcagttttgccgactgcttttcatctgagtcaccatttactccaagcatgtattccagacttgtcactgactttccttctggagcaggtggctagaaaaagaggctgtgggcaggaaagaaaggctcctgtttctcatttgtgaggccagcctctggcttttctgccgtggattctccccctgtcttctcccctcagnnnnnnnnnnnnnnnnnnnnnnatttaactggtttttactactgatgacttgatttaaaaaaaatacaaagatgctggatgctaacttgatactaaccatcagattgtacagtttggttgttgctgtaaatatggtagcgttttgttgttgttgttttttcatgccccatactactgaataaactagttctgtgcggg

SEQ ID NO: 883 - DNA, 448 bp, Homo sapiens
  misc_feature (338)..(338): n includes a, c, g, or t, or contains no nucleotide
  misc_feature (352)..(352): n includes a, c, g, or t, or contains no nucleotide
  misc_feature (360)..(360): n includes a, c, g, or t, or contains no nucleotide
ggagtctgagcaccagccgcagccggggccaaagtttgtggggtcagggccccatccagcagctgccctgccccatgtgacatgaggcccattcttcgctctgtgtttgaagagagcaatcagtgttctcagtggcagtgggtggaagtgagcacactgtatgtcatctctgggttccttgtctattgggtgatttggagatttatccttgctcccttttggaattgttcaaatgttcttttaatggtcagtttaatgaacttcaccatcgaagttaatgaatgacagtagtcacacatattgctgtttatgttatttaggagtaagattcttgcttntgagtcacatgggnaaatcccntgttattttgtgaattgggacaagataacatagcagaggaattaataatttttttgaaacttgaacttagcagcaaaatagagctcat

SEQ ID NO: 884 - DNA, 585 bp, Homo sapiens
  misc_feature (217)..(254): n includes a, c, g, or t, or contains no nucleotide
  misc_feature (382)..(443): n includes a, c, g, or t, or contains no nucleotide
  misc_feature (516)..(535): n includes a, c, g, or t, or contains no nucleotide
cctggtatgccagatgagaatgacaggagccatccgcaagcagttggcggctttcttagaaggcttctatgagatcattccaaagcgcctcatttccatcttcactgagcaggagttagagctgcttatatcaggactgcccaccattgacatcgatgatctgaaatccaacactgaataccacaagtaccagtccaactctattcagatccagtgnnnnnnnnnnnnnnnnnnnnnnnnnnnnnnnnnnnnnngtgccaagttcctccagtttgtcacgggtacttccaaggtacccctgcaaggctttgctgccctcgaaggcatgaatggcattcagaagtttcagatccatcgagatgacaggaccctacccaagatnnnnnnnnnnnnnnnnnnnnnnnnnnnnnnnnnnnnnnnnnnnnnnnnnnnnnnnnnnnnnnaggtgatgtttgagatgagatgtgctagacacagtgggggctggggagacactgtcagttttaatcagctggnnnnnnnnnnnnnnnnnnnntttgagaagctccgccacatgctactgttggctatccaggagtgctctga

SEQ ID NO: 885 - DNA, 511 bp, Homo sapiens
  misc_feature (358)..(385): n includes a, c, g, or t, or contains no nucleotide
  misc_feature (440)..(459): n includes a, c, g, or t, or contains no nucleotide
tcaacgaggtagtctcgctgtccacgagagactccacactggacagaaaccctacgagtgtgctatttgtcagagaagcttcaggaatcagagtaaccttgctgttcacaggagagttcacagtggtgagaagccctatagatgtgatcagtgtggaaaagccttcagtcagaaaggaagcttaattgttcacatcagagtccacacaggcctgaagccctatgcctgtacccagtgcaggaagagtttccacaccagggggaattgtattctgcatggcaaaatccacacaggagagacaccctatctgtgcggccagtgtggaaaaagcttcacccagagagggagtctggctgtnnnnnnnnnnnnnnnnnnnnnnnnnnnnaccctttgaccactttcctgaagagaagttctctttatgaattaagagtacaaannnnnnnnnnnnnnnnnnnnctatccagttctatggaatgaatggagaatctttcagaaagaccatcattgg

SEQ ID NO: 886 - DNA, 558 bp, Homo sapiens
  misc_feature (59)..(59): n includes a, c, g, or t, or contains no nucleotide
  misc_feature (132)..(132): n includes a, c, g, or t, or contains no nucleotide
  misc_feature (170)..(170): n includes a, c, g, or t, or contains no nucleotide
gtgtagcccatctgcatcctatttaatttcttcccttctccccaccagtgttgtcacangggctatgttgcttaaaggtagtctggctgctgaatccctttctcagctcagagcagttttaagatttaattngggaatacagagaaacaggattgtttgagaaccaaaantcaagaggaacagaaatcttaacttgatttcatgtgttagaacattgtaccatgcctcttctgtatctgtggaagtttcctgtttgacacagggtatctaggaggggcggggaagacatggatagtataggaagacattaatcctagcattgtcatttatatacattaatgaaatcctgatgaggacctgctttttgtttgttttcctttgaaacccagccctattgtatttgtatttaaaatttgtacacatttgtataataatctgtaccttgtggtatttggtactattagaggaaaaactttggattcagaccttcttgcagtttttatatcattgttttattttgttttttaaataaattctagtggtttgatccaaatccca

SEQ ID NO: 887 - DNA, 581 bp, Homo sapiens
  misc_feature (354)..(394): n includes a, c, g, or t, or contains no nucleotide
  misc_feature (488)..(524): n includes a, c, g, or t, or contains no nucleotide
cttaaaaccaaaagtgaggctctcagattggtaatatggtattcagcctttttcttgtttggcttttgtgccatttgcccctcactgacttgattgaattctttgtggctgatgcctcagtttttctggatcagtagtgctgcacttccacttttcctctccctcattttactgtctttatttttagccttttttctgtgtagccctctaacctgccctttatattttgaaccaaataaaacatttcttggaatcggagctttggactacagtatacagacaaacaactcacaattttagcatatgaggctactatcttctgtggatgtgtatgtaattatacagtttctgtannnnnnnnnnnnnnnnnnnnnnnnnnnnnnnnnnnnnnnnncaccatagtatttctacaacacagcaatttattagtctgacttctcttctaaaatcaactctaaaatggtattttgtacttgtctcagagacgnnnnnnnnnnnnnnnnnnnnnnnnnnnnnnnnnnnnngccaaaggtgattactttataaattataaagatccctaaactctgcattgcctttgg

SEQ ID NO: 888 - DNA, 347 bp, Homo sapiens
  misc_feature (88)..(126): n includes a, c, g, or t, or contains no nucleotide
  misc_feature (171)..(172): n includes a, c, g, or t, or contains no nucleotide
  misc_feature (175)..(175): n includes a, c, g, or t, or contains no nucleotide
  misc_feature (260)..(260): n includes a, c, g, or t, or contains no nucleotide
  misc_feature (294)..(294): n includes a, c, g, or t, or contains no nucleotide
cgtcctggactctgtgtgagcgtgtccacagagtttgtagtaaatattatgattttatttaaactattcagaggaaaaacagaggatnnnnnnnnnnnnnnnnnnnnnnnnnnnnnnnnnnnnnnnttttaggcaaaaccttgtgactcagtgtattttaaattctcagtnntgnactcacaaagataagacttgtttctttctgtctctctctctttttcttttctatggagcaaaacaaagctgatttcccttttttncttcccccgctaattcatacctccctcctgatgnttttccccaggttacaatggccctttaacctagttcccattcttgggtcaaag

SEQ ID NO: 889 - DNA, 181 bp, Homo sapiens
  misc_feature (50)..(72): n includes a, c, g, or t, or contains no nucleotide
  misc_feature (116)..(116): n includes a, c, g, or t, or contains no nucleotide
agaactagttctatgttactatctgaattaatttttccacaattttgtannnnnnnnnnnnnnnnnnnnnnnatttcatgtgtaaatgatatttttagttttgtgtcattttgtcnaataaattctgaaaatctttgtattgacagtgtgttatctctgcataaccatatatgtataagag

SEQ ID NO: 890 - DNA, 61 bp, Homo sapiens
gaggaaggccgtgttgtttgtctacctgggactacacctactgaaagaagttctcaagttc

SEQ ID NO: 891 - DNA, 570 bp, Homo sapiens
  misc_feature (75)..(75): n includes a, c, g, or t, or contains no nucleotide
  misc_feature (77)..(81): n includes a, c, g, or t, or contains no nucleotide
  misc_feature (85)..(86): n includes a, c, g, or t, or contains no nucleotide
  misc_feature (89)..(93): n includes a, c, g, or t, or contains no nucleotide
  misc_feature (138)..(138): n includes a, c, g, or t, or contains no nucleotide
  misc_feature (140)..(155): n includes a, c, g, or t, or contains no nucleotide
  misc_feature (157)..(157): n includes a, c, g, or t, or contains no nucleotide
  misc_feature (169)..(169): n includes a, c, g, or t, or contains no nucleotide
  misc_feature (173)..(173): n includes a, c, g, or t, or contains no nucleotide
  misc_feature (231)..(369): n includes a, c, g, or t, or contains no nucleotide
ttcttgactcctctcttccctggtgtgttgtgatccagggaatgaaaagaaatttgaccctggattggttctctncnnnnncttnnggnnnnnacttaaggaatcttaccttttccttccacaaagttctcccaggcnannnnnnnnnnnnnnnntntgagcccagggnagcntcttcaaccattattggtctaacctggcttgtcaggaaaccaagcccacccttccacnnnnnnnnnnnnnnnnnnnnnnnnnnnnnnnnnnnnnnnnnnnnnnnnnnnnnnnnnnnnnnnnnnnnnnnnnnnnnnnnnnnnnnnnnnnnnnnnnnnnnnnnnnnnnnnnnnnnnnnnnnnnnnnnnnnnnnnnnnncaacatgcattgacagcggcacagtgagatataactgatgggctttgaacctggttggccggggaagctgtaggggtggatagagctggctttccttctgggctgtctccatctgaccctaccccttccatgtcccaccccactcccaccaaaaagtacaaaatcaggatgtttttcactgtccattgctttgtgttttaa

SEQ ID NO: 892 - DNA, 590 bp, Homo sapiens
  misc_feature (116)..(131): n includes a, c, g, or t, or contains no nucleotide
  misc_feature (149)..(149): n includes a, c, g, or t, or contains no nucleotide
  misc_feature (151)..(455): n includes a, c, g, or t, or contains no nucleotide
tgccaatgtgtgtggcaaacttacaagaagggagctaagtatccagcctctcccaaacctctttgaacaaagcttctgtccctcccacacctctcacctcacaggcacatcaggcnnnnnnnnnnnnnnnngaaagcattgttttagtncnnnnnnnnnnnnnnnnnnnnnnnnnnnnnnnnnnnnnnnnnnnnnnnnnnnnnnnnnnnnnnnnnnnnnnnnnnnnnnnnnnnnnnnnnnnnnnnnnnnnnnnnnnnnnnnnnnnnnnnnnnnnnnnnnnnnnnnnnnnnnnnnnnnnnnnnnnnnnnnnnnnnnnnnnnnnnnnnnnnnnnnnnnnnnnnnnnnnnnnnnnnnnnnnnnnnnnnnnnnnnnnnnnnnnnnnnnnnnnnnnnnnnnnnnnnnnnnnnnnnnnnnnnnnnnnnnnnnnnnnnnnnnnnnnnnnnnnnnnnnnnnnnattgttttaattgagaggggcagggctggagaaggagcaagttgtggggagccaggcttccctcacgcagcctgtggtggatgtgggaaggagatcaacttctcctcactctgggacagacgatgtatggaaact

SEQ ID NO: 893 - DNA, 220 bp, Homo sapiens
  misc_feature (70)..(94): n includes a, c, g, or t, or contains no nucleotide
ggattcatcctgctggttttactttagtccctccatgtcaaagtgggcctgagaaaagctcatacatgcnnnnnnnnnnnnnnnnnnnnnnnnngaaaatctttcttgttcaaaacagcaacgacatatcttgttaacttttacggtgacttttggaggaggggagtttggaaattgtaaaatgttatagattgttgcctatttcctgctgaaagtaaat

SEQ ID NO: 894 - DNA, 373 bp, Homo sapiens
  misc_feature (93)..(131): n includes a, c, g, or t, or contains no nucleotide
  misc_feature (183)..(183): n includes a, c, g, or t, or contains no nucleotide
  misc_feature (202)..(253): n includes a, c, g, or t, or contains no nucleotide
  misc_feature (259)..(259): n includes a, c, g, or t, or contains no nucleotide
  misc_feature (268)..(270): n includes a, c, g, or t, or contains no nucleotide
  misc_feature (292)..(293): n includes a, c, g, or t, or contains no nucleotide
  misc_feature (297)..(329): n includes a, c, g, or t, or contains no nucleotide
ggacggcaacctgcagtattacctttacaattggaaatgccccagcatgggggcagagaaggttggactggtgctacaataaccagtcaccannnnnnnnnnnnnnnnnnnnnnnnnnnnnnnnnnnnnnnaaatggaaccccaccactgttggtccaattttcacacacgtgagaatccctngcaaagggagcagaactgnnnnnnnnnnnnnnnnnnnnnnnnnnnnnnnnnnnnnnnnnnnnnnnnnnnngggctncgtgacgtnnnctccggtcgtgtctctggtctnngtgnnnnnnnnnnnnnnnnnnnnnnnnnnnnnnnnnatcaagggaatgtaactgctgaaaactagctcgtgattggcata

SEQ ID NO: 895 - DNA, 549 bp, Homo sapiens
  misc_feature (260)..(260): n includes a, c, g, or t, or contains no nucleotide
  misc_feature (262)..(263): n includes a, c, g, or t, or contains no nucleotide
  misc_feature (269)..(269): n includes a, c, g, or t, or contains no nucleotide
  misc_feature (271)..(271): n includes a, c, g, or t, or contains no nucleotide
  misc_feature (273)..(273): n includes a, c, g, or t, or contains no nucleotide
  misc_feature (507)..(521): n includes a, c, g, or t, or contains no nucleotide
gtttccctttcaataatgaatgatgtgaccaaccaaggagaatttgtttgttctgtactaaaattatattttacagttaggaattataaaaagcaagggagcatctttaaatgttttttgtttaagcgatgtcttccatccaaagtaagaataatactctcggaaggtccttttggtgtcatgtcacttgctgtatgtggcagccttacagtgccacacttgggtactgaaaaatcaataaaacgaaagttcatcatccnannaaaaananantgtgtgggcttgcttccttgtcatctttgaatcttcttactcattagaatgatgagttgaacttgagtccaaattcagtgaaatacattgtctgagtctgacgcacactctttgcatgtgttgtgttgggtgtgcatacagtgaagcacaattgtgtggggttgtggagagggcgtccacactctctgcagctcagaaagcagatatttcacaagtagtgaccaacccacgacnnnnnnnnnnnnnnncaacaataaattgccactctgagatgga

SEQ ID NO: 896 - DNA, 490 bp, Homo sapiens
  misc_feature (89)..(106): n includes a, c, g, or t, or contains no nucleotide
  misc_feature (142)..(142): n includes a, c, g, or t, or contains no nucleotide
  misc_feature (154)..(154): n includes a, c, g, or t, or contains no nucleotide
  misc_feature (377)..(391): n includes a, c, g, or t, or contains no nucleotide
  misc_feature (465)..(465): n includes a, c, g, or t, or contains no nucleotide
cagagctgtccctgggctggttcgaggagggctgccttgtggccttcatcatcggctcgctctgggacaaggagagactcatgcaggannnnnnnnnnnnnnnnnngtctgggggccacatagcccacctgcatgtgctggncgtgcaccgcgncttccggcagcagggcaggggccccatcctgctgtggcgctacctgcaccacctgggcagccagccggccgtgcgccgggccgcgctcatgtgcgaggacgcgctggtacccttctatgagaggttcagcttccacgccgtgggcccctgcgccatcaccgtgggctccctcaccttcatggagctccactgctccctgcggggccaccccttcctgcgcagnnnnnnnnnnnnnnnaactgggctgcccacctggctgccaacatgatccccgtctctgccctgggctcctcttagctcagctgagcatngagacagcagtttccagagagtgga

SEQ ID NO: 897 - DNA, 423 bp, Homo sapiens
  misc_feature (96)..(140): n includes a, c, g, or t, or contains no nucleotide
ggtcttcagcctctttctgtcccttctgtccctcacagcactagtatttcatgttgcacacccactcagctccgtgaacttgtgagaacacagccnnnnnnnnnnnnnnnnnnnnnnnnnnnnnnnnnnnnnnnnnnnnncatggtgctacgcctgcatgtaaacacgcctgcaaacgctgcctgccggtaaacacgcctgcaaacgctgcctgcccgtaaacacgcctgcaaacgctgcctgcccacacaggttcacgtgcagctcaaggaaaggcctgaaaggagcccttatctgtgctcaggactcagaagcctctgggtcagtggtccacatcccgggacgcagcaggaggccaggccggcgagccctgtggatgagccctcagaacccttggcttgcccacgtggaaaagggatagag

SEQ ID NO: 898 - DNA, 309 bp, Homo sapiens
  misc_feature (147)..(147): n includes a, c, g, or t, or contains no nucleotide
  misc_feature (154)..(154): n includes a, c, g, or t, or contains no nucleotide
cagtccgatggtgaatggctattcgtaaatggctggtctggctctttggtgttggagcctttccaatagccccatgaaaagaagcatcacccaaggatattgtaaaaaggatgtaacaaggagatagggtagacattgtactcagtnggccttngggcctagcccagctctgagcagaggactgtggcattcactgtccttgagtgtttcaccttcttggataacacacgggccttctcttctggatttcatcagagattacagccagatgggggctgaagaccatcctcttgaccacagaggtgtgac

SEQ ID NO: 899 - DNA, 523 bp, Homo sapiens
  misc_feature (210)..(231): n includes a, c, g, or t, or contains no nucleotide
  misc_feature (234)..(234): n includes a, c, g, or t, or contains no nucleotide
  misc_feature (347)..(347): n includes a, c, g, or t, or contains no nucleotide
  misc_feature (352)..(352): n includes a, c, g, or t, or contains no nucleotide
  misc_feature (486)..(486): n includes a, c, g, or t, or contains no nucleotide
gtgtgacaacatgacctgcatcatcatttgcttcaagccccgaaacacagcagagctccagccagagagtggcaagcgaaaactagaggaggtgctctctactgagggggctgaagaaaatggcaacagcgacaagaagaagaaggccaagcgagactagcagtcatccagacccctgcccacctagactgttttctgagccctccggannnnnnnnnnnnnnnnnnnnnnttncctttagccttagcagtgggtatgaggtgtgcagggggagctgggtggcttcactccgcccattccaaagagggctctccctccacactgcagccgggagcctctgctgtccntcccnagccgcctctgctcctcgggctcatcaccggttctgtgcctgtgctctgttgtgttggagggaaggactggcggttctggtttttactctgtgaactttatttaaggacattcttttttattggcggctccatngccctcggccgcttgcacccgctctctgttgtacact

SEQ ID NO: 900 - DNA, 276 bp, Homo sapiens
agatcacgggaatgctgctggagatagacaactctgagctgctgcacatgttagagtcccccgagtctctccgctccaaggtggatgaagctgtagcagttctacaggctcatcatgccaagaaagaagctgcccagaaggtgggcgctgttgctgctgctacctcttagacaaggaaaaaccgattcaaaagccaaataaccccttatggaattcaactcaaggtttgaagacttcctagcttgtcctatggacctcaacaccaaggattacaaa

SEQ ID NO: 901 - DNA, 426 bp, Homo sapiens
  misc_feature (233)..(233): n includes a, c, g, or t, or contains no nucleotide
  misc_feature (348)..(348): n includes a, c, g, or t, or contains no nucleotide
ggttccttgacctcattatttgtcctatctctcccttatagtcctaagccaagacatttgacctttgacatttgacctttgcagtgtcatgtgagggcgtcagtatagaggcctttgcatctgggcctggcacccgctctctgcctctggaggctaaaccctgtctggatttctcttgggatctaacgtgggatcttctggacagacaaccgtgacatcagcagtgctggtgntgctgtgtgtggactgaacacctgcactttgcagaggacacgctgcatgggccccgcttgcggttcattcaggcctgctgcaggagctctgagaacaagaaagagtggacacccnttcccctgcatcatctgtcttgcgtgctatttcagagtggggaagtgataaactatttgccttctggagctctttgtg

SEQ ID NO: 902 - DNA, 510 bp, Homo sapiens
  misc_feature (26)..(53): n includes a, c, g, or t, or contains no nucleotide
  misc_feature (446)..(447): n includes a, c, g, or t, or contains no nucleotide
  misc_feature (449)..(449): n includes a, c, g, or t, or contains no nucleotide
aactacagcttcgagaaccaagcttnnnnnnnnnnnnnnnnnnnnnnnnnnnncataaagtcatcctgggctcccctgcacaccgggctggtctgcggcctggtgatgtgattttggccattggggagcagatggtacaaaatgctgaagatgtttatgaagctgttcgaacccaatcccagttggcagtgcagatccggcggggacgagaaacactgaccttatatgtgacccctgaggtcacagaatgaatagatcaccaagagtatgaggctcctgctctgatttcctccttgcctttctggctgaggttctgagggcaccgagacagagggttaaatgaaccagtgggggcaggtccctccaaccaccagcactgactcctgggctctgaagaatcacagaaacactttttatataaaataaaattatacctagcaacatannanagtaaaaaatgaggtgggagggctggatcttttcccccaccaaaaggctagaggtaaagct

SEQ ID NO: 903 - DNA, 552 bp, Homo sapiens
  misc_feature (26)..(26): n includes a, c, g, or t, or contains no nucleotide
  misc_feature (99)..(99): n includes a, c, g, or t, or contains no nucleotide
  misc_feature (429)..(443): n includes a, c, g, or t, or contains no nucleotide
cctctgcttggtacttagtctgtgtncatgtgatccaaaattaccttcctattgcatttcctactcctttgctacgtgtattggacctctggccaaatnacaaaagatgtactctttgttctctaaaaccacactaaagttttctgacttctttcacactctttatgataatcctctgcctgaaaggctattgccacctgtcaaaatcttcattattctttgcctctttcctgagcctcttgcttgaatgtgatttctttctccctgagacccataaggttcatcttatgggaccttaatttgtcttgcatggacatttgtgattctcattttctcaccattaaattaccttggagggtagggctgtggtttactcctgtctaaacccctgaagcctaacacagttcctggcacacaacaggtgttcannnnnnnnnnnnnnnattcaataaatatttactcgctttgtttaatggattccacccctgccttcctaggtgaccttggacaaattctcgaacccattcaccaaccacacaagtttgttgtgag

SEQ ID NO: 904 - DNA, 375 bp, Homo sapiens
  misc_feature (88)..(88): n includes a, c, g, or t, or contains no nucleotide
  misc_feature (128)..(128): n includes a, c, g, or t, or contains no nucleotide
  misc_feature (130)..(130): n includes a, c, g, or t, or contains no nucleotide
  misc_feature (139)..(139): n includes a, c, g, or t, or contains no nucleotide
  misc_feature (143)..(157): n includes a, c, g, or t, or contains no nucleotide
  misc_feature (247)..(247): n includes a, c, g, or t, or contains no nucleotide
agtgatcttcaaagagatggccattaacttagcagtgggacctcacttttacaagcactgctctagatatacttgaagaatttaatangtacagaagtttattctggataataaataaataaggatcncnctgtattangggnnnnnnnnnnnnnnnttgaattttttatgtacataaagccatatgtttagggtggtttctatctgtcttgtttttcacttatataacactgtgaacttctaaagnaagaggataaaagaagcatgaatgaaaagaatgacatttcaaaaaaatggttcaatgaaaaactatagctaaaatatgtaaacctttctaggtaaaccgcttgccttcatcttgagtcggaatatatt

SEQ ID NO: 905 - DNA, 480 bp, Homo sapiens
  misc_feature (123)..(152): n includes a, c, g, or t, or contains no nucleotide
  misc_feature (272)..(274): n includes a, c, g, or t, or contains no nucleotide
  misc_feature (276)..(312): n includes a, c, g, or t, or contains no nucleotide
  misc_feature (409)..(409): n includes a, c, g, or t, or contains no nucleotide
tatcactgactccatgatctgtgcaggtggcgcaggtgcctcctcgtgccagggtgactccggaggccctcttgtctgccagaagggaaacacatgggtgcttattggtattgtctcctgggnnnnnnnnnnnnnnnnnnnnnnnnnnnnnnctgtgtatactcgagttagcaagttcagcacctggatcaaccaggtcatagcctacaactgagctcaccacaggccctccccagctcaacccattaaagacccaggccctgtcccatcannnannnnnnnnnnnnnnnnnnnnnnnnnnnnnnnnnnnnnctgttgagggtccgactccctacttggacttctggcacagaaggggctgagtgactccttgagtagcagtggctcttcctagagtagccatgccgangccggggcccccacccctcctccagggcaaccccttggtcctacagcaagaagccagaactgttggaatga

SEQ ID NO: 906 - DNA, 573 bp, Homo sapiens
  misc_feature (37)..(37): n includes a, c, g, or t, or contains no nucleotide
  misc_feature (40)..(40): n includes a, c, g, or t, or contains no nucleotide
  misc_feature (42)..(42): n includes a, c, g, or t, or contains no nucleotide
  misc_feature (47)..(47): n includes a, c, g, or t, or contains no nucleotide
  misc_feature (131)..(145): n includes a, c, g, or t, or contains no nucleotide
  misc_feature (165)..(165): n includes a, c, g, or t, or contains no nucleotide
  misc_feature (168)..(169): n includes a, c, g, or t, or contains no nucleotide
  misc_feature (175)..(175): n includes a, c, g, or t, or contains no nucleotide
  misc_feature (178)..(178): n includes a, c, g, or t, or contains no nucleotide
  misc_feature (181)..(181): n includes a, c, g, or t, or contains no nucleotide
  misc_feature (184)..(185): n includes a, c, g, or t, or contains no nucleotide
  misc_feature (189)..(189): n includes a, c, g, or t, or contains no nucleotide
  misc_feature (197)..(197): n includes a, c, g, or t, or contains no nucleotide
  misc_feature (205)..(205): n includes a, c, g, or t, or contains no nucleotide
  misc_feature (218)..(218): n includes a, c, g, or t, or contains no nucleotide
  misc_feature (221)..(221): n includes a, c, g, or t, or contains no nucleotide
  misc_feature (228)..(228): n includes a, c, g, or t, or contains no nucleotide
  misc_feature (232)..(232): n includes a, c, g, or t, or contains no nucleotide
  misc_feature (235)..(235): n includes a, c, g, or t, or contains no nucleotide
  misc_feature (240)..(240): n includes a, c, g, or t, or contains no nucleotide
  misc_feature (247)..(247): n includes a, c, g, or t, or contains no nucleotide
  misc_feature (265)..(265): n includes a, c, g, or t, or contains no nucleotide
  misc_feature (270)..(270): n includes a, c, g, or t, or contains no nucleotide
  misc_feature (276)..(276): n includes a, c, g, or t, or contains no nucleotide
  misc_feature (282)..(282): n includes a, c, g, or t, or contains no nucleotide
  misc_feature (291)..(291): n includes a, c, g, or t, or contains no nucleotide
  misc_feature (296)..(296): n includes a, c, g, or t, or contains no nucleotide
  misc_feature (304)..(304): n includes a, c, g, or t, or contains no nucleotide
  misc_feature (313)..(313): n includes a, c, g, or t, or contains no nucleotide
  misc_feature (317)..(318): n includes a, c, g, or t, or contains no nucleotide
  misc_feature (340)..(340): n includes a, c, g, or t, or contains no nucleotide
gaagtgtccttactctgttcctttctatcccactttnaangngggantggctttggaagactatcagaggatgcttggttaccaagtaaaggattccaaagtggagcagcaagacaactttctaaaacgcnnnnnnnnnnnnnnncgtctctacgctgctatcanccnnagctcnggntgnccnnatanggaaaccngacaggangattcaccctcantgncttaaantcanggnatggncgctggnttggcacagatcttaaanatggnagcccnttgtcnagatgtganagccnaccctccntctttgacntccnntggaggtgtgtgggaatgcccntcatgaagcaataccaggttcagttctggaagatgctaattctcatcaaagaggactactttcccaggtatcaggcttgttgagcagacagcaggggattaagtaactcataaccaggcctcagatacccaagggtgctattacctgctggttttgattcaagttaaaaacacctgtactaagtatgacatctttcctactccagtccctctcgttgatatttgaataaatgc

SEQ ID NO: 907 - DNA, 59 bp, Homo sapiens
tctttattccggaagttgctctcagaggcagcgtgcggaacctcatcttcagatactta

SEQ ID NO: 908 - DNA, 439 bp, Homo sapiens
  misc_feature (277)..(297): n includes a, c, g, or t, or contains no nucleotide
cacttgacatgcttattagaaagctgacccaacaagagctctctgcctccggtcactcttgctgtggtgctacgtggaagtgaatggagactgatctcaaatctgaactgcagctttcgctgctgtgagttggggatatgatagtcagctcaggcttcagattgtatgagaaaaatgaagagaagtcaacaaatattttggtactcttcattcatttatctctaaaaccaggagttgaattttcctcatcttgaaagactcttggggtctgtttctnnnnnnnnnnnnnnnnnnnnngtggaatgcatgaattgcattatgttctctggtaacacgtagagttcagacccttctgaactctgttgataataccacaccatgttctggacccatagctctggcatcctcaggggttgtgatccagctccatatattgttt

SEQ ID NO: 909 - DNA, 589 bp, Homo sapiens
  misc_feature (236)..(262): n includes a, c, g, or t, or contains no nucleotide
  misc_feature (463)..(551): n includes a, c, g, or t, or contains no nucleotide
ggcggctctgtctgcggctactctggcggcggctctggcggcggctctggctgcggcggaggctcctctggcggcagcggctccggctacgtctcctcgcagcaggtcactcagacctcgtgcgcgccccagccgagttacggaggggggtcgtccggcggcggcggcagcggcggaagcggctgcttctccagcggcgggggcggcgggagctccggctgcggcggcggctcctnnnnnnnnnnnnnnnnnnnnnnnnnnngtggcgggggctccgtctgcggaggtggttcctctggaggcggcggcggcggctcctccgtgggtggctccgggagtggcaagggcgtcccgatctgccaccagacccagcagaagcaggcgcctacctggccgtccaaatagatcccccagggtaccacggaggcgaaggagttggaggtgttttccaggggcaccgatnnnnnnnnnnnnnnnnnnnnnnnnnnnnnnnnnnnnnnnnnnnnnnnnnnnnnnnnnnnnnnnnnnnnnnnnnnnnnnnnnnnnnnnnnatctagttctgctgtttagcctctttggtttctgtaca

SEQ ID NO: 910 - DNA, 516 bp, Homo sapiens
  misc_feature (35)..(35): n includes a, c, g, or t, or contains no nucleotide
  misc_feature (39)..(40): n includes a, c, g, or t, or contains no nucleotide
  misc_feature (48)..(48): n includes a, c, g, or t, or contains no nucleotide
  misc_feature (52)..(52): n includes a, c, g, or t, or contains no nucleotide
  misc_feature (56)..(56): n includes a, c, g, or t, or contains no nucleotide
  misc_feature (65)..(65): n includes a, c, g, or t, or contains no nucleotide
  misc_feature (68)..(68): n includes a, c, g, or t, or contains no nucleotide
  misc_feature (76)..(76): n includes a, c, g, or t, or contains no nucleotide
  misc_feature (78)..(78): n includes a, c, g, or t, or contains no nucleotide
  misc_feature (126)..(126): n includes a, c, g, or t, or contains no nucleotide
  misc_feature (136)..(138): n includes a, c, g, or t, or contains no nucleotide
  misc_feature (140)..(140): n includes a, c, g, or t, or contains no nucleotide
  misc_feature (142)..(145): n includes a, c, g, or t, or contains no nucleotide
  misc_feature (147)..(151): n includes a, c, g, or t, or contains no nucleotide
  misc_feature (153)..(155): n includes a, c, g, or t, or contains no nucleotide
  misc_feature (159)..(161): n includes a, c, g, or t, or contains no nucleotide
  misc_feature (164)..(166): n includes a, c, g, or t, or contains no nucleotide
  misc_feature (169)..(169): n includes a, c, g, or t, or contains no nucleotide
  misc_feature (171)..(171): n includes a, c, g, or t, or contains no nucleotide
  misc_feature (174)..(175): n includes a, c, g, or t, or contains no nucleotide
  misc_feature (177)..(199): n includes a, c, g, or t, or contains no nucleotide
ctgcaatatttcagtgttgtgcttgaaaatatgtncagnntttttccnatantaanaccttatgntgnccttaaananttctaaaagcgcctttatttcagcattacctttttttcatcactatcntttataaaannntnannnnannnnntnnntttnnnaannnaangnaannannnnnnnnnnnnnnnnnnnnnnnttaaaatcagtcattaaactcacaatagggtaagtaaatatagccacctgttaacatgtaaataagcataatttgttccaaagatggaatattgaaacttagttcatgtctgctgtaaaatattatttaaatgctgctgggcatttcacttaaagaacttaatgtcaacagctacaacaaagaccaaatctgaactgctaatgtggctgctttgtagggaatggactaatatcagtgtgttagatcttaaggtatcagtatttcagaatcctgcgacgattttatttctaaattcatgtactgtatgtccataagtg

SEQ ID NO: 911 - DNA, 565 bp, Homo sapiens
  misc_feature (97)..(97): n includes a, c, g, or t, or contains no nucleotide
  misc_feature (101)..(101): n includes a, c, g, or t, or contains no nucleotide
  misc_feature (114)..(118): n includes a, c, g, or t, or contains no nucleotide
  misc_feature (271)..(276): n includes a, c, g, or t, or contains no nucleotide
  misc_feature (282)..(335): n includes a, c, g, or t, or contains no nucleotide
  misc_feature (423)..(423): n includes a, c, g, or t, or contains no nucleotide
  misc_feature (477)..(513): n includes a, c, g, or t, or contains no nucleotide
tcgcttagttgtactggattctcagggagccctctgtggccttttgctttgcgtgctgtttcccttgtaccagagggcggcaccgtggaaattctgntttnccctgtagcatannnnnttgtgttggattgcattactggcagagaaaggacaaggtgccattcaagtcctagggtgggcttccagctgccttaatagaagtactcaagtcttttgggtagtgagctggaaagcctacaggaaaagaggggtacctgttttcatttgaaannnnnnactttnnnnnnnnnnnnnnnnnnnnnnnnnnnnnnnnnnnnnnnnnnnnnnnnnnnnnntgtagttgttcactgctttcctggatggatgggactcttatgtcataacttctgttactcctttggcccatagctaaggtcatccttncccacaggggtggctttgggattggatgatacagcttttgcttctgtgtagtannnnnnnnnnnnnnnnnnnnnnnnnnnnnnnnnnnnntgttttcagttggtttgtattctgtagctcagtagctgctaataaagttaaa

SEQ ID NO: 912 - DNA, 285 bp, Homo sapiens
  misc_feature (184)..(207): n includes a, c, g, or t, or contains no nucleotide
  misc_feature (229)..(229): n includes a, c, g, or t, or contains no nucleotide
gttacaactcaatgtttgcttttagattttatacagtatttgttttgttttggttttgagtgtatataatgcagcattagcaatatggttccaatagaggagttaaatatatattgttaaaggagacctgtagcagtcaaagattttattgatttaatgacaaaggaaattaatgaaaatgttnnnnnnnnnnnnnnnnnnnnnnnnattaagctcacatgaaaatcangattctagagtttggaatgcaaaattaattgttttaccctcaagctgggaatattt

SEQ ID NO: 913 - DNA, 422 bp, Homo sapiens
  misc_feature (317)..(373): n includes a, c, g, or t, or contains no nucleotide
aactctgctgcatggcagatgcctaggtggaaatagcaaaaacaaggcccaggctggggccagggccagaggggaaggccctggattctcactcatgtgagatcttgaatctctttctttgttctgtttgtttagttagtatcatctggtaaaatagttaaaaaacaacaaaaaactctgtatctgtttctagcatgtgctgcattgactctattaatcacatttcaaattcaccctacattcctctcctcttcactagcctctctgaaggtgtcctggccagccctggagaagcactggtgtctgcagcacccctnnnnnnnnnnnnnnnnnnnnnnnnnnnnnnnnnnnnnnnnnnnnnnnnnnnnnnnnntatttattgtaagaatgattataatgaagatacacactgtaactacaag

SEQ ID NO: 914 - DNA, 480 bp, Homo sapiens
  misc_feature (26)..(61): n includes a, c, g, or t, or contains no nucleotide
  misc_feature (276)..(290): n includes a, c, g, or t, or contains no nucleotide
  misc_feature (386)..(410): n includes a, c, g, or t, or contains no nucleotide
tgtcagagctcattcgacagttaaannnnnnnnnnnnnnnnnnnnnnnnnnnnnnnnnnnntgtgctcctgatttccctggaggttctggatgaaggctgaacacaggcttgttaatgtcagtctgtgctgaggacctcagggacttgaggttgcatttttgagcatggggtgcaggagcctttctggatttggatgtggctatggaaagaacacagaagccaaggtcatgtgcatgaaatgaggagtttgagttagtcacctcggggattttttnnnnnnnnnnnnnnnatgttaaattaatgtagcctgcctctatttgttgggcaggtaatttcaaagggttatttgcctcatctcctatctttagtgaaatcttatgtgtannnnnnnnnnnnnnnnnnnnnnnnngaacagagaatacctgtttagtgttgcactttagactggtgtctgttttgttaatgcagctgtgccacaa

SEQ ID NO: 915 - DNA, 271 bp, Homo sapiens
  misc_feature (33)..(33): n includes a, c, g, or t, or contains no nucleotide
  misc_feature (36)..(36): n includes a, c, g, or t, or contains no nucleotide
  misc_feature (59)..(74): n includes a, c, g, or t, or contains no nucleotide
  misc_feature (138)..(138): n includes a, c, g, or t, or contains no nucleotide
  misc_feature (145)..(145): n includes a, c, g, or t, or contains no nucleotide
  misc_feature (191)..(191): n includes a, c, g, or t, or contains no nucleotide
  misc_feature (207)..(207): n includes a, c, g, or t, or contains no nucleotide
  misc_feature (213)..(213): n includes a, c, g, or t, or contains no nucleotide
  misc_feature (233)..(233): n includes a, c, g, or t, or contains no nucleotide
  misc_feature (241)..(241): n includes a, c, g, or t, or contains no nucleotide
gaacacctcaatctcttggagaaagactacttnggnctttggtttcaggaaagccctgnnnnnnnnnnnnnnnnagatcctgctaaagaaatatagagacaactgagaaacctcccatggttatccactcttactgtnaagtttnatcctcctgatccttctcaattgacttgaagatatcaccagatacntcttgtgcctcccagntccggnaggacattgcctctggacgncttcctgntctctggggactcatgctctcctgggatcc

SEQ ID NO: 916 - DNA, 556 bp, Homo sapiens
  misc_feature (156)..(234): n includes a, c, g, or t, or contains no nucleotide
  misc_feature (340)..(415): n includes a, c, g, or t, or contains no nucleotide
cgacattactctgaagggacgcacagttatcgtgaagggccccagaggaaccctgcggagggacttcaatcacatcaatgtagaactcagccttcttggaaagaaaaaaaagaggctccgggttgacaaatggtggggtaacagaaaggaactggnnnnnnnnnnnnnnnnnnnnnnnnnnnnnnnnnnnnnnnnnnnnnnnnnnnnnnnnnnnnnnnnnnnnnnnnnnnnnnntgtgtatgctcacttccccatcaacgttgttatccaggagaatgggtctcttgttgaaatccgaaatttcttgggtgaaaaatacatccgcagggttcggatgagnnnnnnnnnnnnnnnnnnnnnnnnnnnnnnnnnnnnnnnnnnnnnnnnnnnnnnnnnnnnnnnnnnnnnnnnnnnntcaaattcagcggctttgattcagcaagccacaacagttaaaaacaaggatatcaggaaatttttggatggtatctatgtctctgaaaaaggaactgttcagcaggctgatgaataagatctaagagttacctggctacag

SEQ ID NO: 917 - DNA, 562 bp, Homo sapiens
  misc_feature (171)..(202): n includes a, c, g, or t, or contains no nucleotide
  misc_feature (459)..(473): n includes a, c, g, or t, or contains no nucleotide
cagaactctagctatatggggtagaaataaaatctctgagatgaaacaaaggaatcaacatgataaaatttaggcgaagtagttaagaaatggcccttttgaatgttgaagataggaaagaaagccatatattcaaatatgtaattttcctcatttagttataatgacatnnnnnnnnnnnnnnnnnnnnnnnnnnnnnnnnttcttaatagtatcctagttccagcatatattcaacatgaattttatcattctcctcctaatggaatgtcttccttatagaaatgttcacgacaaattcatttgtgttttttacatgtcaataatgtatgctaaattaaaatgttttccagttattctgatagatgtcattatggcatccttaatttttcttctccttctgtatatagggtaagggactgttctgaagaacctttccatttagtgatcaagatatgnnnnnnnnnnnnnnnaaatgctcagtgtgtactctaattatttatggtaccatttgaattgtaacttgcattttagcagtgcatgtttctaattgacttactgg

SEQ ID NO: 918 - DNA, 496 bp, Homo sapiens
  misc_feature (377)..(394): n includes a, c, g, or t, or contains no nucleotide
  misc_feature (457)..(459): n includes a, c, g, or t, or contains no nucleotide
ttgtatacacatgctgccttcttggggattcaaaaacaggtttttgattttgaatagcaattagtgatatagtgctgtttaagctactaacgataaaaggtaataacattttatacaatttccatatagtctattcattaagtaatctttttacagttgcatcaggcctgaacccgtccattcagaaagcttcaaattatagaaacaatactgttctatacgagtgaccgattatgctttctttggcctacattctttattctgcggtgaagttgaggcttataagttaaaacaaaggaactaacttactgtccaccagtttatacagaactcacagtacctatgacttttttaaactaagatctgttaaaaaagannnnnnnnnnnnnnnnnnaccgtgtacaataccgtgtggtgaaaatgaattcagacttattaaatgatgaacttgttaaannntctcagtgtctatttatcagcacaatacacacaggag

SEQ ID NO: 919 - DNA, 457 bp, Homo sapiens
tcttgatgcttgagcctttgactgataaaactcaaatagcagtccccagtgatttgcctcttaggttctttcttaaattgttggtggatgactgtacattttagtgatttgaaaaataactgacaaaccattgaaacagtttattttatgttggaagagatggcgcagatgtgtgtcagaagggagatcacggtgtgagtttcgtagctatttaagtgatacatacctctagtttttgtatgtcttttgagatcctgagttcatcccctgtgaatcagagtgcacaagcacctctcctgtgagtggctaatgagaagagggacagaccgaccaccagcacagtagggcagatctggacagcagaatgttataacgcaagttcatgtgttgctcccaactccattctcttttctctcgtgcaaccagtttgcccattctcttcctattacttgctcca

SEQ ID NO: 920 - DNA, 479 bp, Homo sapiens
  misc_feature (128)..(142): n includes a, c, g, or t, or contains no nucleotide
  misc_feature (284)..(301): n includes a, c, g, or t, or contains no nucleotide
  misc_feature (303)..(303): n includes a, c, g, or t, or contains no nucleotide
  misc_feature (305)..(309): n includes a, c, g, or t, or contains no nucleotide
  misc_feature (311)..(312): n includes a, c, g, or t, or contains no nucleotide
  misc_feature (314)..(317): n includes a, c, g, or t, or contains no nucleotide
  misc_feature (320)..(320): n includes a, c, g, or t, or contains no nucleotide
  misc_feature (355)..(403): n includes a, c, g, or t, or contains no nucleotide
ctcatcaacttagaaggtggtgatattcgtgaagagtcttcctataaagtaattgtcatgccgactacgaaagaaaaatgcccccgttgttggaagtatacagcggagtcttcagatacactgtgtcnnnnnnnnnnnnnnnttgtcagtggaaaatagtattaacagctcactcgagcaagaaccctcctgacagtactggctagaagtttggatggattatttacaatataggaaagaaagccaagatttaggtaatgagtggatgagtaaatggtggaggnnnnnnnnnnnnnnnnnnantnnnnnannannnnttncctgtaactatagaaagaattatgtatatatacannnnnnnnnnnnnnnnnnnnnnnnnnnnnnnnnnnnnnnnnnnnnnnnnctcttcctatatatatccatagtggacttattcagaacatagatatgtattcagcttgtcttcaaatacggccaag

SEQ ID NO: 921 - DNA, 451 bp, Homo sapiens
  misc_feature (336)..(336): n includes a, c, g, or t, or contains no nucleotide
  misc_feature (367)..(367): n includes a, c, g, or t, or contains no nucleotide
  misc_feature (388)..(388): n includes a, c, g, or t, or contains no nucleotide
  misc_feature (398)..(398): n includes a, c, g, or t, or contains no nucleotide
  misc_feature (414)..(414): n includes a, c, g, or t, or contains no nucleotide
  misc_feature (417)..(417): n includes a, c, g, or t, or contains no nucleotide
gcaaggaacttccatgcctctaacactcatcttcaaaagactgggactgctgagatgtcctctattcttgaagagcgtattcttggagctgatacctctgttgatcttgaagaaactgggcgtgtcttaagtattggtgatggtattgcccgcgtacatgggctgaggaatgttcaagcagaagaaatggtagagttttcttcaggcttaaagggtatgtccttgaacttggaacctgacaatgttggtgttgtcgtgtttggaaatgataaactaattaaggaaggagatatagtgaagaggacaggagccattgtggacgttccagttggtgangagctgttgggtcgtgtagttgatgcccttnggtaatgctattgatggaaanggtccaattngttccaagacgcgtangcnagttggtctgaaagcccccggtatcattcctcga

SEQ ID NO: 922 - DNA, 526 bp, Homo sapiens
ggggctcctcctcagtcaagaaagcccctcaccctgccgtcacctccgcagggacgcccaaacgggtcatcgtccaggcgtccaccagtgagctgcttcgctgcctgggtgagtttctctgccgccggtgctaccgcctgaagcacctgtcccccacggaccccgtgctctggctgcgcagcgtggaccgctcgctgcttctgcagggctggcaggaccagggcttcatcacgccggccaacgtggtcttcctctacatgctctgcagggatgttatctcctccgaggtgggctcggatcacgagctccaggccgtcctgctgacatgcctgtacctctcctactcctacatgggcaacgagatctcctacccgctcaagcccttcctggtggagagctgcaaggaggccttttgggaccgttgcctctctgtcatcaacctcatgagctcaaagatgctgcagataaatgccgacccacactacttcacacaggtcttctccgacctgaagaacgagagcggcca

SEQ ID NO: 923 - DNA, 272 bp, Homo sapiens
actagacagttttcagtttgcttggaggtagctgggtaatcaaaaatgtttagtcattgattcaatgtgaacgattacggtctttatgaccaagagtctgaaaatctttttgttatgctgtttagtattcgtttgatattgttacttttcacctgttgagcccaaattcaggattggttcagtggcagcaatgaagttgccatttaaatttgttcatagcctacatcaccaaggtctctgtgtcaaacctgtggccactctatatgcacttt

SEQ ID NO: 924 - DNA, 578 bp, Homo sapiens
  misc_feature (140)..(140): n includes a, c, g, or t, or contains no nucleotide
  misc_feature (184)..(235): n includes a, c, g, or t, or contains no nucleotide
  misc_feature (250)..(250): n includes a, c, g, or t, or contains no nucleotide
  misc_feature (281)..(376): n includes a, c, g, or t, or contains no nucleotide
ggtcaccttcgagtagagaggcccgcccgcccaccgtgggcagtgccacccgcagatgacacgcgctctccaccacccaacccaaaccatgagaatttgcaacaggggaggaaaaaagaaccaaaacttccaaggccctnctttttttcttaaaagtactttaaaaaggaaatttgtttgtatnnnnnnnnnnnnnnnnnnnnnnnnnnnnnnnnnnnnnnnnnnnnnnnnnnnnaatgatctcggatgnccaaaccagccttcggagcgttctctgtccnnnnnnnnnnnnnnnnnnnnnnnnnnnnnnnnnnnnnnnnnnnnnnnnnnnnnnnnnnnnnnnnnnnnnnnnnnnnnnnnnnnnnnnnnnnnnnnntcttattccgagcattccagtaacttttttgtgtatgtacttagctgtactataagtagttggtttgtatgagatggttaaaaaggccaaagataaaaggtttctttttttttccttttttgtctatgaagttgctgtttattttttttggcctgtttgatgtatgtgtgaaacaatgttgtccaacaataaacaggaattt

SEQ ID NO: 925 - DNA, 457 bp, Homo sapiens
cttagcagtattgttggtctaagtcaatttgattattgaggagtctcagagcaaggtgcgttctagatgtcatcctaaaaaacacttcatatataattaatcactattttgtataattacatattgctgcttgtgtgtttttttttttttccatttagttgggcgttgtgttttacacaaaaccatttttgaattaaggctatgatattaagatagaaatttggactgttgttctgcttttcctggcactcaaattcatgactagttttgaggtcaaacctatgttcgtaatgagagattttataaggatcaactaagaaatggaaggcaggtgaagatataaaaccctagaatgcttaaatgtgctgtaaaactattgtagatgtcactggattttaccaagtaatatcctttcttttttttttccccccatctgctgtggcttttcagttaaaat

SEQ ID NO: 926 - DNA, 546 bp, Homo sapiens
  misc_feature (188)..(188): n includes a, c, g, or t, or contains no nucleotide
  misc_feature (193)..(197): n includes a, c, g, or t, or contains no nucleotide
  misc_feature (199)..(203): n includes a, c, g, or t, or contains no nucleotide
  misc_feature (206)..(206): n includes a, c, g, or t, or contains no nucleotide
  misc_feature (211)..(211): n includes a, c, g, or t, or contains no nucleotide
  misc_feature (295)..(295): n includes a, c, g, or t, or contains no nucleotide
  misc_feature (380)..(381): n includes a, c, g, or t, or contains no nucleotide
tttccttctctgtggtccccggcattagattgggggttctgggagaggcaggtgaatgtcctaagtgaattgttctgtttgtaactggaatgtttttgaagtctttggtgttgctccgtgaaaggacatcgccacctggtgctcatgaggtgtctttgcagaacaataaatggcaaatgaacaaccanaaaannnnnannnnngtnggccnttctgctgtttgtagattagtgcacctatctgtgagggatttgggttacctccctgagtctgtaagcaaccacaagccctgccnactgggtgggggaagtccctccccaaccacttaaaaacaaattttccacatattacccacccacacatttgacctggctagactnnttgtttgcctaaaggaacagaccacattgctgggaaaatgagtaagtgaacgtgtgggagaaaaacacttttagaatcacgaatattcacttttaaaggtctctttgcctggctgcaatatagtgtgtgtttaaattatttacaggctgttgtttctcaaataaa

SEQ ID NO: 927 - DNA, 330 bp, Homo sapiens
  misc_feature (159)..(159): n includes a, c, g, or t, or contains no nucleotide
  misc_feature (164)..(189): n includes a, c, g, or t, or contains no nucleotide
gcaaagcagtcaatgaccttgggacagtggagattgaatgcaaactggaggtgaaagtcattgcacaataaggatttttgaatgtataatatcatctaaggtgggctctccttctgcagactcctcttgcaaggcgtacctccaaacataattgattcntatcnnnnnnnnnnnnnnnnnnnnnnnnnngaggaatactgagggagggcctggctactgtctctctgcactctgctgctttgaaatctggttgaaatgagaaaaagcattttctgttttcccaccaggcccccaagtgtggtctttttctttcctcctaatgttgaagag

SEQ ID NO: 928 - DNA, 201 bp, Homo sapiens
gattcacaatttacagagtattttcatatataaaaatcttgtgcaatgggttgttttttcattttatagaaggagcagaggctaaaggaagttgaggttaagtgatttggaagtcacaaaaactagtaagagctcaaactagcaataaaattatagtatgtttttcccttgccttctctgtaatgcttaatggttgtgtag

SEQ ID NO: 929 - DNA, 246 bp, Homo sapiens
  misc_feature (46)..(46): n includes a, c, g, or t, or contains no nucleotide
  misc_feature (48)..(48): n includes a, c, g, or t, or contains no nucleotide
  misc_feature (122)..(137): n includes a, c, g, or t, or contains no nucleotide
  misc_feature (181)..(212): n includes a, c, g, or t, or contains no nucleotide
aaagttctcttagatgttactgcttttgctcagactttgcaaaaananatatatatatatatatgtataaatatataattattaatcacttttgtccttgagaaagtcttgaatgaacagannnnnnnnnnnnnnnnaatatttgattgtatagaggcacactgtttcatcgacagaagannnnnnnnnnnnnnnnnnnnnnnnnnnnnnnnatgtaccacctctgttattcttttaaagctgaag

SEQ ID NO: 930 - DNA, 425 bp, Homo sapiens
  misc_feature (157)..(179): n includes a, c, g, or t, or contains no nucleotide
acatgcctaagcacccggagctggcagacaagaatgtgcccaaccttcatgtcatgaaggccatgcagtctctcaagtcccgaggctacgtgaaggaacagtttgcctggagacatttctactggtaccttaccaatgagggtatccagtatctccnnnnnnnnnnnnnnnnnnnnnnngagattgtgcctgccaccctacgccgtagccgtccagagactggcaggcctcggcctaaaggtctggagggtgagcgacctgcgagactcacaagaggggaagctgacagagatacctacagacggagtgctgtgccacctggtgccgacaagaaagccgaggctggggctgggtcagcaaccgaattccagtttagaggcggatttggtcgtggacgtggtcagccacctcagtaaaattggaga

SEQ ID NO: 931 - DNA, 566 bp, Homo sapiens
  misc_feature (101)..(125): n includes a, c, g, or t, or contains no nucleotide
  misc_feature (392)..(403): n includes a, c, g, or t, or contains no nucleotide
  misc_feature (409)..(410): n includes a, c, g, or t, or contains no nucleotide
  misc_feature (412)..(435): n includes a, c, g, or t, or contains no nucleotide
ttcagtgcacacacaaggtacgaacctctcaggcctttcgaagaactttcataattcatgaaagcccagttctgaagattcacgtatccatctggagaccnnnnnnnnnnnnnnnnnnnnnnnnntctggttcttgcctgcttcactgtggatgggaagaggtgacaacctcagtctccctttgggacctgtccaagggtaggcaaccaccttcaccttcacacagattgaggagacactggactttttacccattttctttaatcttcaatattaatattgtgtttacattgatgagaacaagagttaatgccctaccctctgctgggctgtttgtattgagttgcaatgtgaccagcgaaagctgcatttaataaatgaaagtacagacnnnnnnnnnnnnaaaaannannnnnnnnnnnnnnnnnnnnnnnngacacaccttgacatagagagctaaattgcagtggataaacagcaacttcacactttctgttcccccattctatttttctcatcatttgaactttagccttttttttccccttttgcctgaagttagatcc

SEQ ID NO: 932 - DNA, 380 bp, Homo sapiens
  misc_feature (63)..(81): n includes a, c, g, or t, or contains no nucleotide
  misc_feature (267)..(267): n includes a, c, g, or t, or contains no nucleotide
catcgagggacttgacttgtgtgtgtttctgaagtgttcgagggtaccaggagagctggcgannnnnnnnnnnnnnnnnnncaaatgctctgtgctctctagtgagccctgaatttgcttcctctgacaagttacctcacctaatttttgcttctcaggaatgagaatctttggccactggagagcccttgctcagttttctctattcttattattcactgcactatattctaagcacttacatgtggagatactgtaacctgaggncagaaagcccaatgtgtcattgtttacttgtcctgtcactggatctgggctaaagtcctccaccaccactctggacctaagacctggggttaagtgtgggttgtgcatcccca

SEQ ID NO: 933 - DNA, 318 bp, Homo sapiens
  misc_feature (52)..(71): n includes a, c, g, or t, or contains no nucleotide
  misc_feature (208)..(225): n includes a, c, g, or t, or contains no nucleotide
  misc_feature (257)..(279): n includes a, c, g, or t, or contains no nucleotide
ctattaacatgtgtaattagtcggcagctcaaatgtttgggagtgcaagaannnnnnnnnnnnnnnnnnnnggtcatacagggatatataaaagccatgctcattacaaaatgagcagttgatgttttatgtggcattaagacaatcaagtcctcacaactctggaatgtcttcttatactgatgctgaatttatgaatccaaattannnnnnnnnnnnnnnnnntcagatttaatgtgagatcatgatagacaagnnnnnnnnnnnnnnnnnnnnnnnttcttgttggccaacagcttctttctaatgttctgtgaa

SEQ ID NO: 934 - DNA, 462 bp, Homo sapiens
  misc_feature (30)..(30): n includes a, c, g, or t, or contains no nucleotide
  misc_feature (41)..(56): n includes a, c, g, or t, or contains no nucleotide
  misc_feature (59)..(87): n includes a, c, g, or t, or contains no nucleotide
  misc_feature (91)..(94): n includes a, c, g, or t, or contains no nucleotide
  misc_feature (96)..(108): n includes a, c, g, or t, or contains no nucleotide
  misc_feature (110)..(128): n includes a, c, g, or t, or contains no nucleotide
  misc_feature (130)..(131): n includes a, c, g, or t, or contains no nucleotide
  misc_feature (133)..(134): n includes a, c, g, or t, or contains no nucleotide
  misc_feature (136)..(161): n includes a, c, g, or t, or contains no nucleotide
  misc_feature (163)..(163): n includes a, c, g, or t, or contains no nucleotide
  misc_feature (165)..(166): n includes a, c, g, or t, or contains no nucleotide
acagtctgaagttccggcccaagcctgggntttctggcagnnnnnnnnnnnnnnnnctnnnnnnnnnnnnnnnnnnnnnnnnnnnnntttnnnntnnnnnnnnnnnnngnnnnnnnnnnnnnnnnnnngnnanntnnnnnnnnnnnnnnnnnnnnnnnnnntncnnggctggacgctactccggacgcaaagctgtcatcgtgaagaacattgatgatggcacctcagatcgcccctacagccatgctctggtggctggaattgaccgctacccccgcaaagtgacagctgccatgggcaagaagaagatcgccaagagatcaaagataaaatcttttgtgaaagtgtataactacaatcacctaatgcccacaaggtactctgtggatatccccttggacaaaactgtcgtcaataaggatgtcttcagagatcctgctcttaaacgcaaggcccgacggg

SEQ ID NO: 935 - DNA, 439 bp, Homo sapiens
  misc_feature (191)..(191): n includes a, c, g, or t, or contains no nucleotide
  misc_feature (205)..(205): n includes a, c, g, or t, or contains no nucleotide
  misc_feature (263)..(263): n includes a, c, g, or t, or contains no nucleotide
  misc_feature (270)..(335): n includes a, c, g, or t, or contains no nucleotide
ccatttcattaaagttgatgggtcgtgtgatgagatgcatttaaggccgatagtgatagatgttttttttatttcttgaacacaggctttgtctgaatgatgttcttttatctcttgaacacaagctttgaatgataactacaggttttaagtgctgttacattaataccataatgtgatgtgttagaaancaaagggatatttncaaaggtagatatttgaaaattctctagtctcaatatgtatgtgtattgaatatactnctaaaannnnnnnnnnnnnnnnnnnnnnnnnnnnnnnnnnnnnnnnnnnnnnnnnnnnnnnnnnnnnnnnnnttttatatcctagctatgtcccactttcttctaagtgcaatcctttcatgttcacttgctgttttaccccatctactctaacttcatttggaaggcttgtctag

SEQ ID NO: 936 - DNA, 472 bp, Homo sapiens
  misc_feature (196)..(213): n includes a, c, g, or t, or contains no nucleotide
  misc_feature (216)..(216): n includes a, c, g, or t, or contains no nucleotide
  misc_feature (236)..(253): n includes a, c, g, or t, or contains no nucleotide
  misc_feature (286)..(300): n includes a, c, g, or t, or contains no nucleotide
atcttttgagacttctgctccttgggacagggtggtagatctctgtagaaatgtaaaagaaagaataacaagggaatgcaaagagaagggtgttcagtttgctcctttttctacatgcagggtgacgcagacttacgatgcaggtgcttgtatctacttctattttgcctttaactacaggggaattagtgacccnnnnnnnnnnnnnnnnnnaanctgaggcagctgctagagannnnnnnnnnnnnnnnnnagggagcctgtcacatcaccatggagtgggcannnnnnnnnnnnnnnggctaaaggaaagtatctctgatgtcggctttgggatgctgaagtctgtcaaggaatatgtggaccccaataacatctttggaaacagaaaccttttataaatccattagtaccattacaaaaaaatgtcaattttttttttaagttttcaactgtggttatactagtaatc

SEQ ID NO: 937 - DNA, 554 bp, Homo sapiens
  misc_feature (28)..(28): n includes a, c, g, or t, or contains no nucleotide
  misc_feature (81)..(99): n includes a, c, g, or t, or contains no nucleotide
  misc_feature (128)..(150): n includes a, c, g, or t, or contains no nucleotide
  misc_feature (155)..(155): n includes a, c, g, or t, or contains no nucleotide
  misc_feature (239)..(239): n includes a, c, g, or t, or contains no nucleotide
gccccgacgtcttcaaatccttaggttntgaagactttattagctttgtgtttgaatttggaaagagtttatgttctatgnnnnnnnnnnnnnnnnnnnttgcattattttctgcatttgtactgatnnnnnnnnnnnnnnnnnnnnnnnaaganaaggtaaaaattgaaaaactgcaacagaaaattcagctagctcttcaacacgtcctacagaagaatcaccgagaagatggaatnctaacaaagttaatatgcaaggtgtctacattaagagccttatgtggacgacatacagaaaagctaatggcatttaaagcaatatacccagacattgtgcgacttcattttcctccattatacaaggagttgttcacttcagaatttgagccagcaatgcaaattgatgggtaaatgttatcacctaagcacttctagaatgtctgaagtacaaacatgaaaaacaaacaaaaaaattaaccgagacactttatatggccctgcacagacctggagcgccacacactgcacatcttttggtgatcggggtcaggc

SEQ ID NO: 938 - DNA, 442 bp, Homo sapiens
  misc_feature (183)..(183): n includes a, c, g, or t, or contains no nucleotide
  misc_feature (311)..(335): n includes a, c, g, or t, or contains no nucleotide
  misc_feature (341)..(348): n includes a, c, g, or t, or contains no nucleotide
ccccgcatagaggagatgcgagctctgcgctctgccagggccccgagcccgtcagaggccgccccgcgccgcccggaagccaccgcggcccccctcactcctagaggaagggagcaccgcgaggctcacggcagggccctggcgccgggcagggcgagcctcggaagccgcctggaggacgtnctgtggctgcaggaggtctccaacctgtcagagtggctgagtcccagccctgggccctgagccgggtccccttccgcaagcgcccaccgatccggaggctgcgggcagccgttatcccgtggtttaannnnnnnnnnnnnnnnnnnnnnnnnaaaaannnnnnnntgcttccgcgtcgggcccgggcggggcggggcggggcgtggagccgcgccgcggcctgacgtcacccacacctccctgggactgcgtcactggt

SEQ ID NO: 939 - DNA, 88 bp, Homo sapiens
  misc_feature (42)..(42): n includes a, c, g, or t, or contains no nucleotide
gatactgctgccaagaagttgctctgaagtcagtttctatcnttctgctctttgattcaaagcactgtttctctcactgggcctccaa

SEQ ID NO: 940 - DNA, 583 bp, Homo sapiens
ctcaatattctatcaattcaagtattcttactatggttgcctttccctatttgttcaatagactgataatactggtatttatagagtttgagccattacaacttttgtgaggatgtgtttcaaacatttctggacaaatcttattttgtatttctggaagaatgtagtaatcttctagaccgcttaaaaccaatgctcccaagctgaatattcttgagcaaatttgttttttattatgccatttgacatttcaaatcagtgctcatatacagtaaacttgtgatagaaattgtattttattgctttttggattataattcatataaatataattacttgaatattgtttgagatcattaacatgccagggcagttcccactgatttagatggtccaagataatctcattcaggaggcttgaaacattaatggtttagtcttgtgaattttaacagttctctgtcatcgtttaacaaaaccaacaactgacacaactccttaagctgtggtttcagtctctgctagttcatattgcatgtttattttggacagtcttttgttaagcatggtgcttgtactggtt

SEQ ID NO: 941 - DNA, 423 bp, Homo sapiens
  misc_feature (27)..(30): n includes a, c, g, or t, or contains no nucleotide
  misc_feature (34)..(34): n includes a, c, g, or t, or contains no nucleotide
  misc_feature (42)..(42): n includes a, c, g, or t, or contains no nucleotide
  misc_feature (45)..(45): n includes a, c, g, or t, or contains no nucleotide
  misc_feature (47)..(48): n includes a, c, g, or t, or contains no nucleotide
  misc_feature (107)..(107): n includes a, c, g, or t, or contains no nucleotide
  misc_feature (271)..(296): n includes a, c, g, or t, or contains no nucleotide
  misc_feature (319)..(340): n includes a, c, g, or t, or contains no nucleotide
gacattcacatcctcagtgtctcagtnnnntttnccgagaangcncnngtagtctgggactgggcatttatcttctctgactgaaaatctctccttggtcttaaggnaaaatactaacattgaactcactgacatgatcttagcttctttaatcagactttgtgacttaaaagtttgggggttttctttgaaagtttccagccctattcagaaagcaactcttggctgtgtgcatttttcaactccaagcagcccaggggtaagtaaacannnnnnnnnnnnnnnnnnnnnnnnnntgtcagtttctgagaaacctggnnnnnnnnnnnnnnnnnnnnnngccagtattgggttttattgaatttggtatgtgaccaaggtcggcctaaaggatggcgcaggtcctgggcaggaaagaatttt

SEQ ID NO: 942 - DNA, 282 bp, Homo sapiens
  misc_feature (149)..(149): n includes a, c, g, or t, or contains no nucleotide
  misc_feature (205)..(254): n includes a, c, g, or t, or contains no nucleotide
tgagaccaagactcccatcagctggtctcggatttacatcggaactgctcaggattgatacatttcaagtctgtaaatacggacaccaacgccatttaccctaatttaagaacagcggggactgaccctccgtgccgagggctgcatgntaccgcactaagtcaatacatgggctccccgattcgcagctgtcgtcttggcagcnnnnnnnnnnnnnnnnnnnnnnnnnnnnnnnnnnnnnnnnnnnnnnnnnntaacctgctatgaaaaccatttgtatag

SEQ ID NO: 943 - DNA, 46 bp, Homo sapiens
aattgtattttttatttcagtcactcctgataaataacaaatttgg

SEQ ID NO: 944 - DNA, 507 bp, Homo sapiens
  misc_feature (78)..(101): n includes a, c, g, or t, or contains no nucleotide
  misc_feature (195)..(218): n includes a, c, g, or t, or contains no nucleotide
  misc_feature (220)..(221): n includes a, c, g, or t, or contains no nucleotide
acccctgaactcattgagctgaggaagaagaagattgaggaggcgatggacggaagtgagacacctcagctcttcacnnnnnnnnnnnnnnnnnnnnnnnncactgttggaggggccatgatgggatcaacccacatttatgacatgtccacggttatgagccggaagggcccggctcctgagctgcaaggtgtnnnnnnnnnnnnnnnnnnnnnnnngnnttggagctggatcctatggccatgacccagaagtatgaggagcatgtgcgggagcagcaggctcaagtagagaaggaggacttcagtgacatggtggctgagcacgctgccaaacagaagcaaaaaaaacggaaagctcagccccaggacagccgtgggggcagcaagaaatataaggagttcaagttttaggtcccctcacactagccctttttttggccctacgtctggatgcctgggcttcacacaagaaccacctctcccgcagttcccaaggacttgtcat

SEQ ID NO: 945 - DNA, 334 bp, Homo sapiens
  misc_feature (58)..(73): n includes a, c, g, or t, or contains no nucleotide
  misc_feature (248)..(248): n includes a, c, g, or t, or contains no nucleotide
  misc_feature (256)..(256): n includes a, c, g, or t, or contains no nucleotide
  misc_feature (258)..(260): n includes a, c, g, or t, or contains no nucleotide
aaccgaagactctttgaagacatcgtaacactgaaaagtacactttctactaaagatnnnnnnnnnnnnnnnnttggaattcatcataacatggaatctacagtactgaccatcaatgaaaattatattttaacttcatatttgtatggtacttggatgataaaaattaattattcctttctgcttagtgaatgaatactggaatccatctgtgttgatacataaaaattcattcaactcttgaaaanaaaaaaanannntggccttttattagctagatttcctctcatgttaattagaaaaatcattctgaaaggcaatccattgaaaattt

SEQ ID NO: 946 - DNA, 501 bp, Homo sapiens
  misc_feature (337)..(337): n includes a, c, g, or t, or contains no nucleotide
  misc_feature (340)..(340): n includes a, c, g, or t, or contains no nucleotide
  misc_feature (344)..(344): n includes a, c, g, or t, or contains no nucleotide
  misc_feature (358)..(358): n includes a, c, g, or t, or contains no nucleotide
ggcctccaagtccacagtggaaccagcccagacccttctccttagaagtggaagtagtggagcccctgctctggtggggctgccaggggagaccccgggagccggggaaggaggccgtccatcccgtcgacgtagaacctcgaggtttctcaaagaaatttccactcaggtctgttttccgaggcggccccggccggggtggattggatttgtctttggtgaacattgcaatagaaatccaattggatacgacaacttgcacgtattttaatagcgtcataactagaactgaattttgtctttatgatttttaaagaaaagttttgtaaatttctcnacngtcncagtttacattttngtatatttgtatttaaatgaaagtgagactttgagggtgtatattttctgtgcagccactgttaagccatgtgttccaaggcattttagcggggagggggttatcaaaaaaaaaaaaatgtgactcaagacttccagagcctc

SEQ ID NO: 947 - DNA, 477 bp, Homo sapiens
  misc_feature (66)..(66): n includes a, c, g, or t, or contains no nucleotide
  misc_feature (83)..(83): n includes a, c, g, or t, or contains no nucleotide
  misc_feature (119)..(119): n includes a, c, g, or t, or contains no nucleotide
  misc_feature (171)..(274): n includes a, c, g, or t, or contains no nucleotide
  misc_feature (276)..(283): n includes a, c, g, or t, or contains no nucleotide
  misc_feature (286)..(286): n includes a, c, g, or t, or contains no nucleotide
  misc_feature (288)..(290): n includes a, c, g, or t, or contains no nucleotide
  misc_feature (295)..(296): n includes a, c, g, or t, or contains no nucleotide
  misc_feature (299)..(299): n includes a, c, g, or t, or contains no nucleotide
  misc_feature (301)..(316): n includes a, c, g, or t, or contains no nucleotide
  misc_feature (356)..(356): n includes a, c, g, or t, or contains no nucleotide
  misc_feature (376)..(376): n includes a, c, g, or t, or contains no nucleotide
  misc_feature (404)..(404): n includes a, c, g, or t, or contains no nucleotide
tgtacacaaggctccctctgtttcgggactggatcaaagagaacactggggtataggggccggggncacccaaatgtgtacanctgcggggccacccatcgtccaccccagtgtgcacncctgcaggctggagactggaccgctgactgcaccagcgcccccagaacatannnnnnnnnnnnnnnnnnnnnnnnnnnnnnnnnnnnnnnnnnnnnnnnnnnnnnnnnnnnnnnnnnnnnnnnnnnnnnnnnnnnnnnnnnnnnnnnnnnnnnnntnnnnnnnnccnannnggggnnaangnnnnnnnnnnnnnnnntcccccgccagccccaagctgggccgaggcgcgtttgtgnatatctgcctcccctgtctntaaggagcagcgggaacggagcttcggngcctcctcagtgaaggtggtggggctgccggatctgggctgtggggcccttgggccacgctcttgaggaagcc

SEQ ID NO: 948 - DNA, 300 bp, Homo sapiens
  misc_feature (125)..(125): n includes a, c, g, or t, or contains no nucleotide
  misc_feature (160)..(163): n includes a, c, g, or t, or contains no nucleotide
  misc_feature (229)..(258): n includes a, c, g, or t, or contains no nucleotide
agatactgactgtgggacctgcctgcctggcttctatgaacatggcgatggctgcgtgtcctgccccacgtaattcctagctgtcgtgggatggagggaagggcggctgggagcagagcaggggncctggggtggggcaggtgctgctggttcaggaatnnnnaggaagaggggatagggaggagggagccttggccctgtgatgggtgggccccacttcaggcaaacnnnnnnnnnnnnnnnnnnnnnnnnnnnnnncttagccagatacataagggtatttgccttcactttcagcca

SEQ ID NO: 949 - DNA, 261 bp, Homo sapiens
gtcttccctgcttcacgattcttaccctttcttttgaatcaatctggcttctgcattactattaactctgcatagacaaaggccttaacaaacgtaatttgttatatcagcagacactccagtttgcccaccacaactaacaatgccttgttgtattcctgcctttgatgtggatgaaaaaaagggaaaacaaatatttcacttaaactttgtcacttctgctgtacagatatcgagagtttctatggattcacttctatt

SEQ ID NO: 950 - DNA, 532 bp, Homo sapiens
  misc_feature (65)..(72): n includes a, c, g, or t, or contains no nucleotide
  misc_feature (96)..(96): n includes a, c, g, or t, or contains no nucleotide
  misc_feature (120)..(120): n includes a, c, g, or t, or contains no nucleotide
  misc_feature (428)..(446): n includes a, c, g, or t, or contains no nucleotide
  misc_feature (449)..(449): n includes a, c, g, or t, or contains no nucleotide
  misc_feature (453)..(455): n includes a, c, g, or t, or contains no nucleotide
cttcagcgacgcagcgtctcgttctcgtgcagcccctcggttgccatcttcgcgcggggacgcannnnnnnnctatagattccagcaaaggggganaatgtatccactatctaacacttnggtagagaagggagggggtttaagcttagtgagggcaaaattactccattccaccttccgagaccagttagggttttgagagaggtttctgctcaacctgggatctggagggagagctttgatgttggtaaatctgccttgaattcattggtttaacttgcatcaaaataccatgtgagtgtgctcattctcatatatcccctaccaccatcaccaccattctgctgttcagtgtctcttgagagagcctctttgcatgttttccagaatctgtgtgtgtttttcctttcttctcctttgttcttttnnnnnnnnnnnnnnnnnnntcnattnnncctctggggctttcattctccaggagaaacatcccagaaccagcactgtttagcctgatacctttctaatgtccatg

SEQ ID NO: 951 - DNA, 519 bp, Homo sapiens
  misc_feature (298)..(301): n includes a, c, g, or t, or contains no nucleotide
  misc_feature (305)..(310): n includes a, c, g, or t, or contains no nucleotide
  misc_feature (474)..(474): n includes a, c, g, or t, or contains no nucleotide
ctgatcagtttgagtgactgcaacatgttctggttgcacaacagttaggcatgctatggtttatatttgtgaagtttggatgcctgtgaagaatgattaaatacatgtttctaatattttagtgttttgtatttaggttatttattctttgtatctaaaactgaacagctactgtgctatattgattttattggtagtattgagcagaccttgtttctgcatgaaactagttgcaaaacccactattttggaaataaaaatgtattttgacatatacaaataaaatgaataaaactannnnaaannnnnnaacttttaatgaagacattttaaattttgttctgagatatttaaattctgcatgggtattttttcactaattgctttacttggataccaatttgaataatttctgaaattgtaatattgtgataatttgcacagcattgtacatgcacatctgtaaatgcaatnttaattgccatatttatgcaatctgtgtaccaatttggacaaatg

SEQ ID NO: 952 - DNA, 369 bp, Homo sapiens
  misc_feature (73)..(87): n includes a, c, g, or t, or contains no nucleotide
  misc_feature (155)..(155): n includes a, c, g, or t, or contains no nucleotide
  misc_feature (246)..(246): n includes a, c, g, or t, or contains no nucleotide
  misc_feature (285)..(286): n includes a, c, g, or t, or contains no nucleotide
  misc_feature (290)..(293): n includes a, c, g, or t, or contains no nucleotide
  misc_feature (295)..(297): n includes a, c, g, or t, or contains no nucleotide
  misc_feature (299)..(305): n includes a, c, g, or t, or contains no nucleotide
  misc_feature (307)..(309): n includes a, c, g, or t, or contains no nucleotide
  misc_feature (311)..(318): n includes a, c, g, or t, or contains no nucleotide
  misc_feature (321)..(321): n includes a, c, g, or t, or contains no nucleotide
  misc_feature (326)..(327): n includes a, c, g, or t, or contains no nucleotide
  misc_feature (329)..(332): n includes a, c, g, or t, or contains no nucleotide
  misc_feature (334)..(334): n includes a, c, g, or t, or contains no nucleotide
ctcttttgagcctccgcttgctttggtcgatggtttccctcagctttttctttgctgttcttcatcctcgttnnnnnnnnnnnnnnnttcactgtggcttttacaatacagcctgtaaattccttatgacatagttcagtgcatttggctttatngcctgctccacagttctttacctttacttggcttagagaaactgtatctttgttgcttcatataacctttccccaaccccactaagctggnacataacttattagtggtcctcccgtcactttatttgtnnaaannnntnnntnnnnnnngnnngnnnnnnnncangtggnntnnnngncagcagaactagtgattctagacattttgcatggc

SEQ ID NO: 953 - DNA, 536 bp, Homo sapiens
gtatctctctctctttttggaggtgcttaagcagaagcattaacttctctggaaaggggggagctggggaaactcaaacttttcccctgtcctgatggtcagctcccttctctgtagggaactgtggggtcccccatccccatcctccagcttctggtactctcctagagacagaagcaggctggaggtaaggcctttgagcccacaaagccttatcaagtgtcttccatcatggattcattacagcttaatcaaaataacgccccagataccagcccctgtatggcactggcattgtccctgtgcctaacaccagcgtttgaggggctgccttcctgccctacagaggtctctgccggctctttccttgctcaaccatggctgaaggaaacagtgcaacagcactggctctctccaggatccagaaggggtttggtctggacttccttgctctcccctcttctcaagtgccttaatagtagggtaagttgttaagagtgggggagagcaggctggcagctctccagtcaggaggc

SEQ ID NO: 954 - DNA, 600 bp, Homo sapiens
gtagtgaatgctacactcattttcaactctttaacatgaaactgttcaatcttaacacattgttactttaatatatgtataaagaagtattactgtttgtaaagctgctgtttgcttaaaaaaaaaaaaacacccttgtcatgtattttctgtatgttgggccaacaggttagaacatcaactcatttaaaaatttttatctttttttgatttaaaaaaattctgtgaaataatttatttacagacatcttcctcctccctcatcccttccaacctttacatacatcacagaatcaaccaaactgtttgcctaatctgaaatctgaatcctaatgagaaaaatttaaattttgttggcacatcacaccttgaaagtatttgtattattttataatttaatttctaaatataccacataagtttataatttaatgtcttaattgtaatgctctaataaaaaactagcaaaattagtgtgagttataacatgaagggattttcatcttttgctgtatgaaggataattgttatatcacatttggggggtaataacagcttttttgcactatgtaaatactagtggggattcttctgtactaa

SEQ ID NO: 955 - DNA, 373 bp, Homo sapiens
tgatggcttttccatatgttgtaacaggaaaaaaatggtgtctatgaatttcttcttaatttaacaaatttggttaatttataaaatcacagattggtaaatgctataattatgtaatgatcaggattgagattaatactgtagtataaattgggacattataacagattccatattttatttcctaaaatctaaattcagtctttaatgaaataatattagccaaatggtggaactaatttatttcttttgaggaaaagataataaagaatgtaattaaatttaaatttcttggaattcccagttgtatattcatcacctttgtagcatttgacaaattttatgcttagcagcttcttcactgttttgaaat

SEQ ID NO: 956 - DNA, 599 bp, Homo sapiens
  misc_feature (336)..(336): n includes a, c, g, or t, or contains no nucleotide
  misc_feature (349)..(350): n includes a, c, g, or t, or contains no nucleotide
  misc_feature (352)..(378): n includes a, c, g, or t, or contains no nucleotide
  misc_feature (394)..(412): n includes a, c, g, or t, or contains no nucleotide
ctgctaaggactagttctgccctcccgtcacccctgtttctggcaccaggaatccccaacatgcactgatgttgtgtttttaacatgtcaatctgtccgttcacatgtgtggtacatggtgtttgtggccttggctgacatgaagctgttgtgtgaggttcgcttatcaactaatgatttagtgatcaaattgtgcagtactttgtgcattctggattttaaaagttttttattatgcattatatcaaatctaccactgtatgagtggaaattaagactttatgtagtttttatatgttgtaatatttcttcaaataaatctctcctataaaccanaaaaaaaaaaaanncnnnnnnnnnnnnnnnnnnnnnnnnnnngtcagacaggaacaannnnnnnnnnnnnnnnnnngacccacgtggagtttgaagctagcacgtttgaagctagacactccgtgtgtctgtctgtgtttgttcagaactgagtcacgtgagttgatccccatgacatgcaaatggaacttgctagtgtagcttccaggaaagccttttaaaggaagtcttggctggccttccccgtggctggtaggctttct

SEQ ID NO: 957 - DNA, 75 bp, Homo sapiens
cactcttgcccatgggtgactcttacccacagctgactagggccagcgcaaatactggaacctgtaacagaatta

SEQ ID NO: 958 - DNA, 394 bp, Homo sapiens
  misc_feature (99)..(113): n includes a, c, g, or t, or contains no nucleotide
  misc_feature (213)..(214): n includes a, c, g, or t, or contains no nucleotide
taatgctccttgttcctagagtagagtggagggagggtggcctaagagttgagctctcggaactgcatgctgctggacagtatcactgtctttcctagnnnnnnnnnnnnnnnttccattttttcaaggtaatttcttgtgcctctaatagcccaagaatgggaggttgatcagatctgacatgattccttcctgttctgaactgtggggtgnncacatctctgcttgagtcaggtttgagtagaggcttagagacagttgggtgagaacaaccaaaatcttatcatggtctcagtcataatcattagggggaactctagccaaatggtttaacttctgcctgtggaactggggattgggtgggcaggaaaaggtgatatccattctttctgat

SEQ ID NO: 959 - DNA, 93 bp, Homo sapiens
tatatgcttggctaactatatttgctttttgctaacaatgctctggggtctttttatgcatttgcatttgctctttcatctctgcttggatta

SEQ ID NO: 960 - DNA, 546 bp, Homo sapiens
  misc_feature (26)..(40): n includes a, c, g, or t, or contains no nucleotide
  misc_feature (59)..(80): n includes a, c, g, or t, or contains no nucleotide
  misc_feature (299)..(354): n includes a, c, g, or t, or contains no nucleotide
accttcatctcttcctcgggatgtcnnnnnnnnnnnnnnntggcatcaatttgccctgnnnnnnnnnnnnnnnnnnnnnnttctccttgtcttggttgttactgggttgagtgtttcagtgacatccttaatacagaaatcatcaatagaaaaatgcagtgtggacattcaacagagcaggaataaaacaacagagagaccgggtctcttaaactgcccaatatattggcagcaactccgagagaaatgcttgttattttctcacactgtcaacccttggaataacagtctagctgatnnnnnnnnnnnnnnnnnnnnnnnnnnnnnnnnnnnnnnnnnnnnnnnnnnnnnnnncacacagaacctgatacgtgacaaagcaattctgttttggattggattaaatttttcattatcagaaaagaactggaagtggacaaacggctcttttttaaattctaatgacttagaaattagaggtgatgctaaagaaaacagctgtatttccatctcacagacatctgtgtattctgagtactgtagtac

SEQ ID NO: 961 - DNA, 423 bp, Homo sapiens
acgtagttactgtatggcactcaaaaactatgttaaatgatccactaactttttttttcttggcccatgattaatggaatgtatgtaactaggtagggttcctttcttagatctagaggaagtacagccacccactgacatctgaatttatatacctgttgagttttgagtgcacccaaacactcgataaaccaggtgaagaaatttagcttccatgttctacttcagctaaaacagctacatacaacctagtacacttgaagtcagacagacatttcagttgcttacctccagtactgagccttgctttgggaaactaaaagatttagaccaagtcactgccagtttttgcctttgttgcattttgtacagtttttatatttttgatatcttgtaaataaagacaaccagcttttccaggtt

SEQ ID NO: 962 - DNA, 506 bp, Homo sapiens
  misc_feature (48)..(69): n includes a, c, g, or t, or contains no nucleotide
  misc_feature (158)..(158): n includes a, c, g, or t, or contains no nucleotide
  misc_feature (192)..(208): n includes a, c, g, or t, or contains no nucleotide
  misc_feature (274)..(276): n includes a, c, g, or t, or contains no nucleotide
  misc_feature (278)..(279): n includes a, c, g, or t, or contains no nucleotide
  misc_feature (281)..(288): n includes a, c, g, or t, or contains no nucleotide
  misc_feature (291)..(295): n includes a, c, g, or t, or contains no nucleotide
ttggtgggtctcaatccttaacatatttgcacaattttatagcacaannnnnnnnnnnnnnnnnnnnnngacaactgacaatatgattttaaatttgaagatgggatgtgtacatgttgggtatcctactactttgtgttttcatctcctaaaagtgntttttatttccttgtatctgtagtcttttatttnnnnnnnnnnnnnnnnntgacatattttatcttgttctttaaaatcacaacacagagctgctattaaattaatattgatatannnannannnnnnnnaannnnntcacgaggaagaatttcctgtagttaattttaactttccttcattacattgttgcataaaactagtcccttagtgccagtttggaagttacttgcaattgtttggaagatttgcaggtcgctgacctcatcatttcactctaagtatatgtggtaggctaagctcagaaaaaggtatgtatgctttacactgataggcaccaaatttagta

SEQ ID NO: 963 - DNA, 556 bp, Homo sapiens
  misc_feature (314)..(314): n includes a, c, g, or t, or contains no nucleotide
  misc_feature (324)..(324): n includes a, c, g, or t, or contains no nucleotide
  misc_feature (341)..(341): n includes a, c, g, or t, or contains no nucleotide
  misc_feature (351)..(353): n includes a, c, g, or t, or contains no nucleotide
agatcacaaagctcaaggaatttaatattcttgtaatggactagataattcaaactgattagcccattccagaagaaaaacagctgggaattaagttaatccacttgaaattgttttacaataatcagaacatccaaacctcaaggctcaggatcccatagaccagagcccacctttttgataaacttagtaaagtcttggagactagaagcaagatagtttgtgacacataagcttcccaaaaactagaatagatttttactgaatagtggtatatctgatggtatatgtttcttaaaggtccaaatgtaatnaaaaaaaaantgaaaaaaaaaaaaaanaaaaaaaaannnactacatatttgtatgcaagacaagcatccagtttttttctgtaatgcagtgacagtgtggaatgaccactcagccattataaatttgtgtactcagggcacttgtcacacccaactatctctataaactgctgcagtagcttatttgtacaagacacttgtgaaaatcagttttcaaacattatagtcattgtcacaaatgg

SEQ ID NO: 964 - DNA, 176 bp, Homo sapiens
  misc_feature (97)..(111): n includes a, c, g, or t, or contains no nucleotide
tccgtctgttctccaaactcttaaaataagttactcccttcatgccatatcccacatcacttgcttgtataccgtgtaaatattttatatatacctnnnnnnnnnnnnnnngtgctgattttgtaaattttgaatgtgtttgttttagattttaagcataacattatggcacatat

SEQ ID NO: 965 - DNA, 471 bp, Homo sapiens
  misc_feature (53)..(53): n includes a, c, g, or t, or contains no nucleotide
  misc_feature (60)..(60): n includes a, c, g, or t, or contains no nucleotide
  misc_feature (400)..(400): n includes a, c, g, or t, or contains no nucleotide
tagcagtgtagtctcaattatatctgaaagtaattgtgactaacaagtatgcntttgccnttatttccacatttaaactacctgttaatataagggatttgtagtatcagcttgttgagcaatgactttgaatctagttttcagtgatcagaagcagcagttatttgagtgtatgaatggaatgatgatcactgtgctataatgtactgaaaccaccatattacagaaatatttactacatattttccatctgtagtttctcagaagggctatggattagtttgaactgtcaaatccttgcatacttctgtgacacccctgcccattttctgtctttaattaaccaaggtgttaggtgtgactgtcacaactgttatgttttccagtaaactagaagtangatatttgataattatatttgtatttcaccacctaaatgtaatgttgattcctcaagaatgaaatgaaggc

SEQ ID NO: 966 - DNA, 447 bp, Homo sapiens
  misc_feature (46)..(71): n includes a, c, g, or t, or contains no nucleotide
  misc_feature (139)..(139): n includes a, c, g, or t, or contains no nucleotide
  misc_feature (182)..(182): n includes a, c, g, or t, or contains no nucleotide
  misc_feature (186)..(186): n includes a, c, g, or t, or contains no nucleotide
  misc_feature (203)..(203): n includes a, c, g, or t, or contains no nucleotide
  misc_feature (297)..(297): n includes a, c, g, or t, or contains no nucleotide
  misc_feature (328)..(328): n includes a, c, g, or t, or contains no nucleotide
  misc_feature (338)..(338): n includes a, c, g, or t, or contains no nucleotide
  misc_feature (374)..(376): n includes a, c, g, or t, or contains no nucleotide
aagacataaccagtgcggtgcaatccaagcgaagaaaatccaagtnnnnnnnnnnnnnnnnnnnnnnnnnnttggaaatgtgtgtgacttttacaaagagcaattttgagctgtgacttttttaaatcaatttctgtancagttagtaattttaataatgtggcccttttcctagtccctgncaancctgtttcataaagtgncaatggggaaagcaggactgttgagcccttttggtgttgcgagttgaagttcaaggtttctaaaatgttgtcttgtattgaaaggagctaatgnccattataaatgttactagttttcacatttncctaagcagncctagagtacagggtgagcatttttagatctcctannnatgtattgtgccgtggaagtactgtgtgtgaatagcagtagtgggggcaaaagcaatcttctcatttggaa

SEQ ID NO: 967 - DNA, 293 bp, Homo sapiens
tgttactgagttagctctactcttttggaccaaagcaacatgagagcaagtacttttcacacttgttaagatggagttataactgtcatacatttggaatattatgatcccaagtagtctttttataatttggattgtatcgtatgttagatttttgataaaatttggccaatttttacagaagaaattctctgatcatttagttctatctatttagaaatatgtaaaactggatttttttttaagtaatatgtgaccaaagttaattttgtcccaaaggtctaaataaagag

SEQ ID NO: 968 - DNA, 232 bp, Homo sapiens
  misc_feature (62)..(76): n includes a, c, g, or t, or contains no nucleotide
  misc_feature (83)..(130): n includes a, c, g, or t, or contains no nucleotide
  misc_feature (135)..(135): n includes a, c, g, or t, or contains no nucleotide
  misc_feature (137)..(137): n includes a, c, g, or t, or contains no nucleotide
  misc_feature (142)..(142): n includes a, c, g, or t, or contains no nucleotide
  misc_feature (144)..(146): n includes a, c, g, or t, or contains no nucleotide
  misc_feature (151)..(151): n includes a, c, g, or t, or contains no nucleotide
  misc_feature (164)..(164): n includes a, c, g, or t, or contains no nucleotide
aggatcctctggtcccacggtttcatgccgacttcattcataagcacgtgaaaggctcacgnnnnnnnnnnnnnnnagaaggnnnnnnnnnnnnnnnnnnnnnnnnnnnnnnnnnnnnnnnnnnnnnnnncagangncttcntnnnaatgngaatgcacactcnagtcttggtggttccttcgtgtggggcttgatcgtgttgctgcctgttaacatgatgcctttgaaact

SEQ ID NO: 969 - DNA, 350 bp, Homo sapiens
  misc_feature (165)..(180): n includes a, c, g, or t, or contains no nucleotide
  misc_feature (269)..(284): n includes a, c, g, or t, or contains no nucleotide
ctctatcagggaagttagctttcagtccactggcgagtctgaatggaaggatactaattatacactcaacacagattccttggactgggccttatatgaccacctaatggatttccttgccgaccgaggggtggacaacacttttgcagatgagctggtggagcnnnnnnnnnnnnnnnnagcaccaggagtacattacttttcttgaagacctcaagagttttgtcaagagccagtagagcagacagatgctgaaagccatagtttcnnnnnnnnnnnnnnnnagtgaacaaatcctactctgaagctagacatgtgctttgaaatgattatcatcctaatatcatggg

SEQ ID NO: 970 - DNA, 446 bp, Homo sapiens
  misc_feature (304)..(304): n includes a, c, g, or t, or contains no nucleotide
gttctgatttgacacactgattttaatcttcgaatcatgacactgagtgcagaggaggtggcattccgacagcaggacatacatgttggtgtgaagactgggacgacactgggtagaatctagtttttaattattattaatataaaggatcaaattaatttaaatatgattctgaagtctacagaacttttagttctgtgctgtctatgtggacactttggtaaaatgcaaattatgatatggacgttatcattggtctggtgagatgtttcatatttgtgacagttaatttaaaaattatganttaatgctgcctgtgtctatggggttctgtcttctttgatagccatctattcatctggatcatgggaccctctctaatccttccaccaatcaaataagctattgctattggtttggagttgagatatcagtctcggaaactt

SEQ ID NO: 971 - DNA, 535 bp, Homo sapiens
  misc_feature (400)..(417): n includes a, c, g, or t, or contains no nucleotide
ccccttcttgtttgcacatgccaagataactgcttttatgcaggctgtacccccttgaaaaatcctttctacagtgctgctcacaaaagagcccaagttcgcctcctacctgcattgctgacttgaattcacagtcgccgagtctacctagctttcttggaagcagtctagcaaaatttctatttgtacgttcactaattatctacaaggacaaaatcagttgtatttacaaaactctacttcagtgtttgttttagtttttttttttactgaaacttgtttttgtgaatactctgtgcttagaattaaatatcactttcttatgaacaacataacttcttcagattgtgtatatgaaaacattagcaagtcttgttttttctatgaagcaaacacaatnnnnnnnnnnnnnnnnnnatcatttcttcaaaattataatgcagttctaatggtcagcatattttgatattaaatttaaagatcacctctctgcatttgtttttaaattatgctaatacaccacacattatgttgg

SEQ ID NO: 972 - DNA, 231 bp, Homo sapiens
  misc_feature (90)..(91): n includes a, c, g, or t, or contains no nucleotide
gccgcaagctcgatcgacttgcctacattgcccaccccaagcttgggaagcgtgctcgtgcccgtattgccaaggggctcaggctgtgcnngccaaaggccaaggccaaggccaaggccaaggatcaaaccaaggcccaggctgcagccccagcttcagttccagctcaggctcccaaacgtacccaggcccctacaaaggcttcagagtagatatctctgccaacatgag

SEQ ID NO: 973 - DNA, 505 bp, Homo sapiens
tcctacttctctgctatctgtagggatccttgcctgtccattttctagctctggtgcagtcatgctgctgctgctttagtagacactcacgtcatagtcttcagtgaggagatagtcttctgtgatgtgggggctgagcagtgtgtagcccactaggtagaaaaggcccagactcaggcgcttgagagcaggaatgatgctggaaaggaacgagtgaagttcctggtcacagagagcagagactattcccttcaccctctgaccttcagttatggagaggagtgtttaggggtgtggttgtctacctggaatgggatgagaagctctgctgcccaaagtgtttcctgtttcagggaaagatttctatggctggctatgaggaatggggactgcaaacctcttaagagttgtaggaaagtcagggcagcagacagtggaccagtcttgtgtttacccctcagggatgctactgatctcaaggtcttgccaggtctcacaatctcca

SEQ ID NO: 974 - DNA, 441 bp, Homo sapiens
  misc_feature (40)..(40): n includes a, c, g, or t, or contains no nucleotide
  misc_feature (42)..(42): n includes a, c, g, or t, or contains no nucleotide
  misc_feature (46)..(46): n includes a, c, g, or t, or contains no nucleotide
  misc_feature (48)..(48): n includes a, c, g, or t, or contains no nucleotide
ctacaaatgtgcagaggtaatacatatgtgatgtcgatgncnctgncnttttttttgtctttaaaaaataattggcagcaactgtatttgaataaaatgatttcttagtatgattgtacagtaatgaatgaaagtggaacatgtttctttttgaaagggagagaattgaccatttattgttgtgatgtttaagttataacttattgagcacttttagtagtgataactgtttttaaacttgcctaatacctttcttgggtattgtttgtaatgtgacttatttaacgccttttttgtttgtttaagttgctgctttaggttaacagcgtgttttagaagatttaaatttctttcctgtctgcacaattagctattcagagcaagagggcctgattttatagaagccccttgaaaagaggtccagatgagagcagagataca

SEQ ID NO: 975 - DNA, 577 bp, Homo sapiens
  misc_feature (30)..(30): n includes a, c, g, or t, or contains no nucleotide
  misc_feature (160)..(240): n includes a, c, g, or t, or contains no nucleotide
  misc_feature (245)..(245): n includes a, c, g, or t, or contains no nucleotide
  misc_feature (380)..(380): n includes a, c, g, or t, or contains no nucleotide
  misc_feature (523)..(523): n includes a, c, g, or t, or contains no nucleotide
aacgcaaaagtgatggctcggcggtccganctgctggtcccacttctgacaccaaaatgcatcccaacccccggcagtgccaagggcaccagcagggccctgactgaagactgtctggcaggtggaacggtccttgtcctctccagccaggcccagcagnnnnnnnnnnnnnnnnnnnnnnnnnnnnnnnnnnnnnnnnnnnnnnnnnnnnnnnnnnnnnnnnnnnnnnnnnnnnnnnnngtttnttttgggggtactgtgcaaagctaatgatctggttggacttctacacttggccaaatgtactggctccagacatgacatttggtttgggggccctttgaagttgatgccaagaaggagtgaacacttctcagttncccctggcttttccctcctttcagccaccacccacacaatgaacaaaagggaagggcccatttctgggggagtctggctgcctcttggctacgaaggctggcactgagcacccatcctgctccctctgcctgagctgagctgnctttcaggaagctctggtttagaaggggaaagatgtcatatgctcagttcaaat

SEQ ID NO: 976 - DNA, 446 bp, Homo sapiens
  misc_feature (106)..(120): n includes a, c, g, or t, or contains no nucleotide
  misc_feature (270)..(271): n includes a, c, g, or t, or contains no nucleotide
  misc_feature (273)..(274): n includes a, c, g, or t, or contains no nucleotide
  misc_feature (289)..(289): n includes a, c, g, or t, or contains no nucleotide
  misc_feature (369)..(393): n includes a, c, g, or t, or contains no nucleotide
gatatcattctagagcacgcaactgcaaagaaaacagaatgttgactgttagtttgtatagctttttagctaggaaaaaaaggctttggtacagtaatttcatctnnnnnnnnnnnnnnntcaaattgggaatgttacctgcttggttgttgctgacttgatatgattcattagaaatttatatcttcagtactcaagtacttcttgaatctctgtattttactataaaatgtatgtaatgatttgttttatgaaatttagaacttgaanntnnctgaattggaccacnttttatttttaaatattgagtttaaatattttataactggttttgcactgaaaaaattaacatttcagattgacaagagnnnnnnnnnnnnnnnnnnnnnnnnntaatgttattgagcaatgaattttttatttccgcatggaaagttattgatctc

SEQ ID NO: 977 - DNA, 295 bp, Homo sapiens
  misc_feature (99)..(99): n includes a, c, g, or t, or contains no nucleotide
  misc_feature (147)..(170): n includes a, c, g, or t, or contains no nucleotide
  misc_feature (181)..(199): n includes a, c, g, or t, or contains no nucleotide
tagggactccaaaggcagctgacagcatctggctttcagttcctcagtcaccactactttgtaccaaattcactgttttggctctgaaatctaattttnagtttagcaaggatgtctgcattgctcatgcaaatgaactaagcgttnnnnnnnnnnnnnnnnnnnnnnnncaaatgaaaannnnnnnnnnnnnnnnnnntcagcctactaatgtcatctcccaacccactctccaaactccatcccaaaaaagcatccagttcagaattgcccactgttggcaaagaaagaatgt

SEQ ID NO: 978 - DNA, 458 bp, Homo sapiens
  misc_feature (57)..(57): n includes a, c, g, or t, or contains no nucleotide
  misc_feature (75)..(75): n includes a, c, g, or t, or contains no nucleotide
  misc_feature (86)..(86): n includes a, c, g, or t, or contains no nucleotide
  misc_feature (88)..(102): n includes a, c, g, or t, or contains no nucleotide
  misc_feature (136)..(136): n includes a, c, g, or t, or contains no nucleotide
  misc_feature (198)..(198): n includes a, c, g, or t, or contains no nucleotide
  misc_feature (200)..(200): n includes a, c, g, or t, or contains no nucleotide
  misc_feature (202)..(202): n includes a, c, g, or t, or contains no nucleotide
  misc_feature (204)..(204): n includes a, c, g, or t, or contains no nucleotide
  misc_feature (213)..(213): n includes a, c, g, or t, or contains no nucleotide
  misc_feature (216)..(216): n includes a, c, g, or t, or contains no nucleotide
tttcttcagttaccatagaggttggtgaattagctacatgagcattagaccattctnccaaaggtggagcctccntactcggaacnannnnnnnnnnnnnnnacttggggactggcaacaacaacaagattaactngggccatggaggacaagcaggagatggtggacatcatcgagacggtgtaccgcggggcccgnanangncgcggcctnggntggtgtcccccaaggactactccaccaagtaccgctactgaggcgccctcagtctgcgcggataaatgtcgtggagccctttttgtatggaaacgttttaagctatttaaagcctttggaaaatacaggaagctccagggctggagcacctctgagatggaattgataacatggtcttaactcaccgaaataaacaagcacgtggtgagaggagcaggcctacttgtttgttctcaggaaac

SEQ ID NO: 979 - DNA, 248 bp, Homo sapiens
  misc_feature (86)..(105): n includes a, c, g, or t, or contains no nucleotide
  misc_feature (117)..(180): n includes a, c, g, or t, or contains no nucleotide
gatgcttcatcctgacctctagtaattctagggtcttcttgctcctctgggaaagtaatggctgatgtggttccagttccctgtgnnnnnnnnnnnnnnnnnnnntgctgagtaatnnnnnnnnnnnnnnnnnnnnnnnnnnnnnnnnnnnnnnnnnnnnnnnnnnnnnnnnnnnnnnnngctctcccagcatgtccccttgtaatgtcataagttgaaccaacagaaaatcctgatataggaggacc

SEQ ID NO: 980 - DNA, 459 bp, Homo sapiens
  misc_feature (32)..(32): n includes a, c, g, or t, or contains no nucleotide
  misc_feature (85)..(85): n includes a, c, g, or t, or contains no nucleotide
  misc_feature (139)..(139): n includes a, c, g, or t, or contains no nucleotide
  misc_feature (199)..(199): n includes a, c, g, or t, or contains no nucleotide
  misc_feature (270)..(270): n includes a, c, g, or t, or contains no nucleotide
  misc_feature (272)..(272): n includes a, c, g, or t, or contains no nucleotide
  misc_feature (274)..(274): n includes a, c, g, or t, or contains no nucleotide
  misc_feature (331)..(331): n includes a, c, g, or t, or contains no nucleotide
tccttgtcttttacttggggcacggggccccnggagggcttccctactttccccactatgttaacaggtaattctgatttatgcntttagtttgacttatttttaacaaaatattagaagttatgctttaaaatgtttnaatgtggactgaaattttcatcttttgtttgagaatctatgaagtgtatcatatacgtgncctaaagcaaggtgtgtattttgttattctgaaattgttttgcatctggacaaatactaaatatcccagtngncntttttttttttttttaaacctgtgtatccatctcatccttttgcgcattcctagtangcaaaaaaatttgttatgccatcttcattattcgaattacagactgaaaaaatatggccagtttttaaagaagtttagattatgttttccatggaaggacaagtctgactgttcataggctgattttc

SEQ ID NO: 981 - DNA, 455 bp, Homo sapiens
  misc_feature (26)..(27): n includes a, c, g, or t, or contains no nucleotide
  misc_feature (159)..(159): n includes a, c, g, or t, or contains no nucleotide
  misc_feature (175)..(175): n includes a, c, g, or t, or contains no nucleotide
  misc_feature (182)..(182): n includes a, c, g, or t, or contains no nucleotide
  misc_feature (221)..(246): n includes a, c, g, or t, or contains no nucleotide
  misc_feature (314)..(314): n includes a, c, g, or t, or contains no nucleotide
acatgcttctcaggatgccaagaggnntaggaacccagaaacccccttggaggagctgtgtatgcgggggtgccaggaagggcatagctcctgcccccaggcctaggcatgctgcttgctcggccatccccacttcctcctctaccccaacacatgcanggctaggccttgcccntggaacntggaggccctgcccggggctggggcctagtccagcagcnnnnnnnnnnnnnnnnnnnnnnnnnntttgagaaacatgacaaagggccccgcagcccttctgcacccagcacagcctgcccagcccagccctncccccgggcactgcacagcctgtctgggggccagaccaccccattgtccatccttgttgtccgtgagtccttggcctccaccaagcacgtgtggccattgtgtgcctgccttagtgactccgtggttttgtgaggagcaga

SEQ ID NO: 982 - DNA, 343 bp, Homo sapiens
tccagcgtttgacataccgacgtaggctttcctacaatacagcctctaacaaaactaggctgtcccgaacccctggtaatagaattgtttacctttataccaagaaggttgggaaagcaccaaaatctgcatgtggtgtgtgcccaggcaaacttcgaggggttcgtcctgtaagacctaaagttcttatgagattgtccaaaacaaagaaacatgtcagcagggcctatggtggttccatgtgtgctaaatgtgttcgtgacaggatcaagcgtgctttccttatcgaggagcagaaaatcattgtgaaagtgttgaaggcacaagcacagagtcagaaagc

SEQ ID NO: 983 - DNA, 601 bp, Homo sapiens
agatgttccagctaattgacattgcccggcagacggctcagggaatggactatttgcatgcaaagaacatcatccatagagacatgaaatccaacaatatatttctccatgaaggcttaacagtgaaaattggagattttggtttggcaacagtaaagtcacgctggagtggttctcagcaggttgaacaacctactggctctgtcctctggatggccccagaggtgatccgaatgcaggataacaacccattcagtttccagtcggatgtctactcctatggcatcgtattgtatgaactgatgacgggggagcttccttattctcacatcaacaaccgagatcagatcatcttcatggtgggccgaggatatgcctccccagatcttagtaagctatataagaactgccccaaagcaatgaagaggctggtagctgactgtgtgaagaaagtaaaggaagagaggcctctttttccccagatcctgtcttccattgagctgctccaacactctctaccgaagatcaaccggagcgcttccgagccatccttgcatcgggcagcccacactgaggatatcaatgcttgcacgctgaccac

SEQ ID NO: 984 - DNA, 421 bp, Homo sapiens
  misc_feature (178)..(256): n includes a, c, g, or t, or contains no nucleotide
caataaactatacttctgggaaccgtaattgaaacatttacttttgctttctacctgactgccccagaattgggcaactattcatgagaattgatatgtttatggtaatacacatatttgcacaagtacagtaacaatctgctttctttgtaacatgacacatttgaaatcattggtnnnnnnnnnnnnnnnnnnnnnnnnnnnnnnnnnnnnnnnnnnnnnnnnnnnnnnnnnnnnnnnnnnnnnnnnnnnnnnngtctgaagtcagccttggtttggcttcctattctcaagaggtttgtgaagatttaatctcagattccttataaaaacttagagaaaagaaaattttagaagacagcctacatggtccattgctactcttgctgcacttatgtaaacaatcagaccacatttgaag

SEQ ID NO: 985 - DNA, 456 bp, Homo sapiens
  misc_feature (325)..(325): n includes a, c, g, or t, or contains no nucleotide
cgcagatgtctggtaatgaggtctcaagagctgttctgctccctcagtcatgctaaggtcctcactgaagcttctctctctggagcctgaagtagtgatgagtagtctgggccctgggtgaggtaaaggacattcatgaggtcaatgttctgggaataactctcttccctgatccttggaggagcccgaactgattctggagctctgtgttctgagatcatgcatctcccacccatctgcccttctcccttctacgtgtacatcattaatccccattgccaagggcattgtccagaaactcccctgagaccttactccttccagncccaaatcatttacttttctgtggtccagccctactcctataagtcatgatctccaaagctttctgtcttccaactgcagtctccacagtcttcagaagacaaatgctcaggtagtcactgtttccttttc

SEQ ID NO: 986 - DNA, 555 bp, Homo sapiens
  misc_feature (63)..(106): n includes a, c, g, or t, or contains no nucleotide
  misc_feature (442)..(515): n includes a, c, g, or t, or contains no nucleotide
agcttctccagctactctgacagcttcatgaatccggcggcgccctccaaccacatgaacccnnnnnnnnnnnnnnnnnnnnnnnnnnnnnnnnnnnnnnnnnnnnaccccagtgcggtgcccccgcagccacaggctgacttctccatctccccgctgcatggcggcctggactcggccacctccatctcagccagctgcagccagcgggccgactccatcaagccaggggacagcctgcccacctcccaggcctactgcccacccacctacagcaccaccggctacagcgtggaccccgtggccggctatcagtacggccagtacggccagagtgagtgcctggtgccctgggcgtcccccgtccccattccttctcccacccccagggcctcctgcttgtttatggagagctacaaggtggtgtcagggtggggaatgnnnnnnnnnnnnnnnnnnnnnnnnnnnnnnnnnnnnnnnnnnnnnnnnnnnnnnnnnnnnnnnnnnnnnnnnnnaacccaggacatctcctggctaagcctctgcttccgtact

SEQ ID NO: 987 - DNA, 416 bp, Homo sapiens
  misc_feature (330)..(330): n includes a, c, g, or t, or contains no nucleotide
  misc_feature (336)..(336): n includes a, c, g, or t, or contains no nucleotide
  misc_feature (343)..(343): n includes a, c, g, or t, or contains no nucleotide
atatatgtatctaaaccatatgaacatatattttttagaaactaagagaatgataggcttttgttcttatgaacgaaaaagaggtagcactacaaacacaatattcaatccaaatttcagcattattgaaattgtaagtgaagtaaaacttaagatatttgagttaacctttaagaattttaaatattttggcattgtactaataccgggaacatgaagccaggtgtggtggtatgtacctgtagtcccaggctgaggcaagagaattacttgagcccaggagtttgaatccatcctgggcagcatactgagaccctgcctttaaaaacnaacagnaccaaanccaaacaccagggacacatttctctgtcttttttgatcagtgtcctatacatcgaaggtgtgcatatatgttg

SEQ ID NO: 988 - DNA, 173 bp, Homo sapiens
gcggcaggcttctcagtctctgtccgagacagccgggaggagcctgggggctcctcaccacgtggggccatgctgagagctgggctttcctctgtgaccatcccggcctgtaacatatctgtaaatagtgagatggacttggggcctctgacgccgcgcactcagccgtgggc

SEQ ID NO: 989 - DNA, 564 bp, Homo sapiens
  misc_feature (143)..(157): n includes a, c, g, or t, or contains no nucleotide
  misc_feature (366)..(380): n includes a, c, g, or t, or contains no nucleotide
aattggttactttcatgtccagctgtatataagtccagtgtgttcatctagatgacgcaaagaatctcctggtagagaagcgacatgtaaaaaactggtggaaaaaggttttggattttttttccagtggggtggggggaggnnnnnnnnnnnnnnnaggtcacggctggactgaatgggcctttttatcttcccactgtatcatggaagtagctgcttgcttgtactgtccatccttcaggcatccctaaagctcactctgaagatgttagagacaaacacaaactcttcgagttaaagttgatcctgacactgacatgaaggcaagccttgatttcgtatgaacgttgctgaagtggtaattgnnnnnnnnnnnnnnncagattgttaagagttcactgaagatattgacacaattttaaaaaatcagtaaaggaatgtatataatattgctctcgtgttttacagtaagatttgttgctctcagactgtgtaaaacaaaatttattcatgttttctgcatattaaaaaatcttattgtaccaactggtaaactattaaatg

SEQ ID NO: 990 - DNA, 180 bp, Homo sapiens
  misc_feature (40)..(112): n includes a, c, g, or t, or contains no nucleotide
tcttgcggcaaattgagaaacaagaagagtcagcaattannnnnnnnnnnnnnnnnnnnnnnnnnnnnnnnnnnnnnnnnnnnnnnnnnnnnnnnnnnnnnnnnnnnnnnnntgcagggacagaaggggcaaggtcttttctggggttcctactgtgtgcagctactatggggtaccagg

SEQ ID NO: 991 - DNA, 521 bp, Homo sapiens
tgagaaataactctgtctggaaccaaagatacttcgttatttctaacaccactggctacaatgatcgtgctgtattggagagagaagtccaatacactctggaaatgattaaactagtaccacataatgaaagtgcatggaactatttgaaagggattttgcaggatcgtggtctttccaaatatcctaatctgttaaatcaattacttgatttacaaccaagtcatagttccccctacctaattgcctttcttgtggatatctatgaagacatgctagaaaatcagtgtgacaataaggaagacattcttaataaagcattagagttatgtgaaatcctagctaaagaaaaggacactataagaaaggaatattggagatacattggaagatcccttcaaagcaaacacagcacagaaaatgactcaccaacaaatgtacagcaataacaccatccagaagaacttgatggaatgcttttattttttattaagggaccctgcaggagtttcacacgagag

SEQ ID NO: 992 - DNA, 494 bp, Homo sapiens
  misc_feature (160)..(160): n includes a, c, g, or t, or contains no nucleotide
  misc_feature (222)..(223): n includes a, c, g, or t, or contains no nucleotide
gcttttgagctgcttccctcatcacaccacactcacatgcatctgttctctctcacactctatacccctgccacttcctggcacctccccccatgcttgtcatttaattttggccacttgtaggtatcagtgtgatctgatcaacactctggttaccttnggtcagtgaaaagatgctactatattgcttttgtcccaaagtgagtaaaatcccctagagcnnagagagagagagagagagagagtgtcttcatgccaaccacagcctgtttctgctgagtttcttatcagccctcaagctatgctaggaaaagttataaaatgccaaaatatttataaacatttactttgtccataaaaaatttacattggatactctgtaagtaggaggtactttgtcccaaaaagatgtataagaatgtactaatagttttatttgattaggattgaacagttcagttgtatctatgccccacagtgaccagtaaagtcca

SEQ ID NO: 993 - DNA, 459 bp, Homo sapiens
  misc_feature (32)..(32): n includes a, c, g, or t, or contains no nucleotide
  misc_feature (88)..(88): n includes a, c, g, or t, or contains no nucleotide
  misc_feature (115)..(116): n includes a, c, g, or t, or contains no nucleotide
  misc_feature (145)..(145): n includes a, c, g, or t, or contains no nucleotide
accgagaagttgatgctcggcccacgccgttnagctcgtgtgcgtgtagtctgtgcgtgagactccttcgattgtagctctgtgctgncggattggaacagtagttcccgccaanntcctcccaccaccgcggcctcggaggccngggccgtggccagataggagtttgcatcatccacgtggctccgttgcctctgcattgcgccctgtcctgtcatgtgtcctcaccggggtatcggccgtcactcagctctcctgtgcccctgcgtctcaccctaggcgggctgggcggggcaggcctcctttgttctccacaatctactgtctccgagtgtacacgttgcgctgtttgtgtttgatccccctgacttgtagccagcttgtgtaagatcccttgcagaacgagaaagttaaaaacaagcccacccagtactcacaccatcaagtctgttatagagt

SEQ ID NO: 994 - DNA, 574 bp, Homo sapiens
  misc_feature (137)..(152): n includes a, c, g, or t, or contains no nucleotide
  misc_feature (164)..(178): n includes a, c, g, or t, or contains no nucleotide
  misc_feature (347)..(363): n includes a, c, g, or t, or contains no nucleotide
  misc_feature (459)..(459): n includes a, c, g, or t, or contains no nucleotide
  misc_feature (480)..(480): n includes a, c, g, or t, or contains no nucleotide
  misc_feature (483)..(483): n includes a, c, g, or t, or contains no nucleotide
  misc_feature (509)..(512): n includes a, c, g, or t, or contains no nucleotide
  misc_feature (515)..(515): n includes a, c, g, or t, or contains no nucleotide
  misc_feature (521)..(521): n includes a, c, g, or t, or contains no nucleotide
  misc_feature (524)..(524): n includes a, c, g, or t, or contains no nucleotide
cgggtcatcgtgcaggcgtccaccggcgagctgctgcgctgtctgggcgacttcgtgtgccgacgctgctatcgcctcaaggagctgagcccgggcgagctggtgggctggttccgcggtgtggaccgctcgctgcnnnnnnnnnnnnnnnnagaccaggcctnnnnnnnnnnnnnnnacctggtgttcgtgtacctgctgtgccgcgagtcgctgcgtggggacgagctggcgtcggccgccgagctgcaggccgccttcctcacctgcctctacctcgcctactcctacatgggcaacgagatctcctacccactcaagcccttcctcgtggagcccgacaaggnnnnnnnnnnnnnnnnntgcctgcgcctcatccagcggctcagcccgcagatgctgcggctcaacgccgacccccacttcttcacgcaggtctttcaagacctcaagaacganggcgaggccgccgccagcggnggnggcccaccgagcgggggcgcgcccgnnnnctnctcggncgncagggacagctgcgcggccggaaccaagcactggactatgaacctggacc

SEQ ID NO: 995 - DNA, 94 bp, Homo sapiens
ggtttccattcatttgtctctccagagagtgggaaggcttatcactggctgtggatacagactctctccctgatcttgaactttcttctgtgtc

SEQ ID NO: 996 - DNA, 545 bp, Homo sapiens
  misc_feature (188)..(218): n includes a, c, g, or t, or contains no nucleotide
  misc_feature (421)..(435): n includes a, c, g, or t, or contains no nucleotide
cctacaatctgctcttagacacggccttgccaggagagcctgccctcagactgcaggaccagaacccctgcctccatctttccaagcaccggggcgaaaaaccacaaaggaaaggaagaaaatttatatatatataatataaaatcacttggtgattaaaaaaataactgctccataaataaaactcnnnnnnnnnnnnnnnnnnnnnnnnnnnnnnngtgttttttgtttttcggagaaatattgtaaatatatatttttttgttgctgatttagagtcaatctccaatgttgtgctaaaaagtttaaattaaatgtaagcattaaggggataagtcttatgctatctcagttgacacattgaggttattttgggccagagaaggaggaagctagttggactttgttttgttttccaaannnnnnnnnnnnnnngttttagagagagcaaggacatctttcctctgacacgtgggaatgggtgatatttgtgtaataaaatttttaaaagacaaaaaaagaaatagcctccaatgggaaatatt

SEQ ID NO: 997 - DNA, 391 bp, Homo sapiens
  misc_feature (52)..(67): n includes a, c, g, or t, or contains no nucleotide
  misc_feature (96)..(116): n includes a, c, g, or t, or contains no nucleotide
gcggtgcacaactcgcgcctcaagtctaggcagggactgctgcgcgagagcnnnnnnnnnnnnnnnncccgccagaggggcgaccgcttccaccgnnnnnnnnnnnnnnnnnnnnngggtgctcgccccgggggccagtctcgcgcgctgcccgccgcgccgcgcgccgatttcttcctgaccggtgcgctcgaggtgatctgcgaagcctggctgcgcgatctgcttttcgcgcgcggcgcgcccgcctggctgcggcgccgctacctgaggctgcgctatgaggacctggtgcggcagccacgcgcccagctgcgccgcctgctgcgcttctccgggctacgcgcgctcgcagcgctcgatgccttcgcgctcaacatgactcgcggcg

SEQ ID NO: 998 - DNA, 476 bp, Homo sapiens
  misc_feature (47)..(47): n includes a, c, g, or t, or contains no nucleotide
  misc_feature (63)..(77): n includes a, c, g, or t, or contains no nucleotide
  misc_feature (106)..(106): n includes a, c, g, or t, or contains no nucleotide
  misc_feature (274)..(274): n includes a, c, g, or t, or contains no nucleotide
gatataccacattcttggatctgtgagaagcatattttatggcttanggattataagaatagnnnnnnnnnnnnnnntttcaaagaatgttggaaacaaggacagnctgcagtggtttctggtgtgcataagaaaatgaacattagcctatggaaggcggaatcaattagtcttgattttggagaccaccaagctgatctcctgaactgcaaagatagcatcatttcaaatgccaatgttaaggaattctgggatggttttgaagaagtttcanaacggcagaaaaacaagagtggagaaacagttgttttaaaattgaaagattggccttcaggagaagacttcaagactatgatgccagcaagatacgaagatcttttaaaaagtctgccattgccagaatattgtaatccagaaggaaaattcaatttggcctctcatttgccaggattttttgtacgtcctgatctaggacc

SEQ ID NO: 999 - DNA, 455 bp, Homo sapiens
actcagtactatctattggtaatggatgcatatatgtatgtacatgtttttgaaacggattggaaggatacagaccaaactcttgatagtggtcacctgtgaagagtggagaagggaaaataatgagtgtgggaggtgggatgggtattggttaaaggggacttcagctttttatataaacatccacttctctttcaaaagacttcaagtaaatataagaagatactgattgattctggattgtggtatagggatatcttgtcttattttttgtacttttctgtatttttaaaatttctcaaaataggaatgggagtgaggatgggaatgctgtatctgtggaagtcatgttatactggattcatttccaattaaatactaaacattttatagaaaatatttctaaaattttatcacggatgaatggatggacttgctctctatgtaatatgaaa

SEQ ID NO: 1000 - DNA, 433 bp, Homo sapiens
  misc_feature (153)..(153): n includes a, c, g, or t, or contains no nucleotide
  misc_feature (340)..(355): n includes a, c, g, or t, or contains no nucleotide
agcatggtgcgtgctgccagctgccggccagccgggatagaggagatgccactggccctccgtgcccccagcccctccctcttaaccgaggctgtccttgctctctgcagaggccgctctgcaggatcctcgtgtcgcgcgtgatgtgtggtngcacagccgtgtcaaagtcacagtgtcttttctgtcgttctagttccagggtcacccccgagaggacaacaggcatctggaagtgctctctcgccactctgggtgctttactgtctctggcttgtttccatcactggaaatcacttagagaattgtagtgtttttggtccttgataaagcctagaannnnnnnnnnnnnnnncaaaatggaagttttcttttgtttctgttttttaagatctaagaagttgtgaatgttgttaatcatttagccgttgca

SEQ ID NO: 1001 - DNA, 54 bp, Homo sapiens
agtatggcttttgtgtgtggctttcttcactcaatattctatatgtaagattca

SEQ ID NO: 1002 - DNA, 423 bp, Homo sapiens
  misc_feature (102)..(102): n includes a, c, g, or t, or contains no nucleotide
  misc_feature (116)..(117): n includes a, c, g, or t, or contains no nucleotide
  misc_feature (119)..(119): n includes a, c, g, or t, or contains no nucleotide
  misc_feature (121)..(121): n includes a, c, g, or t, or contains no nucleotide
  misc_feature (123)..(123): n includes a, c, g, or t, or contains no nucleotide
  misc_feature (127)..(185): n includes a, c, g, or t, or contains no nucleotide
  misc_feature (291)..(313): n includes a, c, g, or t, or contains no nucleotide
gacaagtttcggttggtcatagctagtaccttgtatgaagatggtaccctggatgatggtgaatacaaccccactgatgataggccttccagggctgaccantttgagtatgtaanntntngnaaannnnnnnnnnnnnnnnnnnnnnnnnnnnnnnnnnnnnnnnnnnnnnnnnnnnnnnnnnnacgtgtcctatgggggcctgctcatgaggctgcagggggatgccaacaacctgcatggattcgaggtggactccagagtttatctcctgatgaagaagctagcctnnnnnnnnnnnnnnnnnnnnnnnctctctgccaagtcactcaggtcatgggcattgttcaagcctgagtggcagccgctcttgctcacctgttgaggaagggctggctcactgtccaccgtggcggcatcttt

SEQ ID NO: 1003 - DNA, 532 bp, Homo sapiens
  misc_feature (29)..(30): n includes a, c, g, or t, or contains no nucleotide
  misc_feature (67)..(67): n includes a, c, g, or t, or contains no nucleotide
  misc_feature (70)..(71): n includes a, c, g, or t, or contains no nucleotide
  misc_feature (79)..(122): n includes a, c, g, or t, or contains no nucleotide
  misc_feature (208)..(208): n includes a, c, g, or t, or contains no nucleotide
  misc_feature (492)..(506): n includes a, c, g, or t, or contains no nucleotide
cactgtactctgaggtccaaatactgtcnngtcaatgtgtaacctgatgtctcaaccccctgtgagnagnntccattannnnnnnnnnnnnnnnnnnnnnnnnnnnnnnnnnnnnnnnnnnnttgctttgggctctgctatttgtttgcagaacacccaagagcgagcaaacatgctctcttcacagcagtaccttagggttttgccnattgtaaatgggtctgatgtgatatgacaagaccagagaaattggatgtaaatttacatttttgaatatgcttgttgtttcacatgatacatttagggtatgcagctccttttgtagtttttatttttactatttaagtttggaaatgatgccaaatttttgtatttctttaatcaatgtgttctcttcggtgatatatattgcattatatattgatgtgtgtatcaatatatattgatatgtattacacttacacatacaaacacatataagagggggtgaannnnnnnnnnnnnnnattctctatagcctctgcagagagat

SEQ ID NO: 1004 - DNA, 287 bp, Homo sapiens
  misc_feature (123)..(123): n includes a, c, g, or t, or contains no nucleotide
  misc_feature (133)..(133): n includes a, c, g, or t, or contains no nucleotide
cacactaccgcacagttgatggcattaaccaaatatcagccactgccagtagaagaagctcagctctgtgaagaggtggcaaatagtggtgctttctattaacacctttgttataaaaagcancaaagggggnaaatggaacaggaattaaaagaaattaaagaatgcataagcaaaaactcaattgtatgtagggaaacccaattcctcctgaggaagagaaagaggtggagtcctttaaaaattcactgcctgtttttccgtctgtagctagtgagccttatctc

SEQ ID NO: 1005 - DNA, 295 bp, Homo sapiens
  misc_feature (31)..(31): n includes a, c, g, or t, or contains no nucleotide
  misc_feature (42)..(42): n includes a, c, g, or t, or contains no nucleotide
  misc_feature (48)..(62): n includes a, c, g, or t, or contains no nucleotide
  misc_feature (236)..(237): n includes a, c, g, or t, or contains no nucleotide
tcttgcacactggaagagagtggaaggggcnttgaatctttngcattnnnnnnnnnnnnnnncttttcggatgatcccttatcccttggaaaaggggcacctattttatccttacccaatctgtacagaaacagcagaccgagagctgcttccatctttccatgaagtctcagtttacccaaagaaggagcttcccttctttattctctttactgctggattatgttccttcacanncatgctggccctcctgacacatcagttcccggaacttatgggggtcttcgcaaaagct

SEQ ID NO: 1006 - DNA, 265 bp, Homo sapiens
ccatctctttgaaacatctggtaatttgaattctagtgctcattattcattattgtttgttttcattgtgctgatttttggtgatcaagcctcagtccccttcatattaccctctcctttttaaaaattacgtgtgcacagagaggtcacctttttcaggacattgcattttcaggcttgtggtgataaataagatcgaccaatgcaagtgttcataatgactttccaattggccctgatgttctagcatgtgattacttcactc

SEQ ID NO: 1007 - DNA, 469 bp, Homo sapiens
  misc_feature (56)..(56): n includes a, c, g, or t, or contains no nucleotide
  misc_feature (181)..(215): n includes a, c, g, or t, or contains no nucleotide
  misc_feature (346)..(346): n includes a, c, g, or t, or contains no nucleotide
gtagactaggcttccccaggcatgccgtccgtgggggcctgaagagacagtgagtnccattggccccattcgcagatgtgggagactctgctcaggcctgtgaggctgggcagcccttcaccagagttcggaggagcagtgtgtggcgccacgtcccgactggccatacccacacagaagnnnnnnnnnnnnnnnnnnnnnnnnnnnnnnnnnnnggactctgcttcctccaggagcagcagggaagctctgggccacctccctggatagcaggaacttgacctgccatgtgtgccctgccttcctggccagctgtgcttgttatcttccattctcacaaactgtntttgaagcaatagaataaagaatgtgtgttttctttcctggtatacatacatgatcccatgctcccaagctccattcttccttccctcaactctctgccctccacagagctatggagaaggct

SEQ ID NO: 1008 - DNA, 542 bp, Homo sapiens
  misc_feature (85)..(99): n includes a, c, g, or t, or contains no nucleotide
  misc_feature (312)..(312): n includes a, c, g, or t, or contains no nucleotide
  misc_feature (498)..(516): n includes a, c, g, or t, or contains no nucleotide
gcaccccgtaactggactggggacaaatttgttacgtgtttccaaggctacagacatggcgccatcctcacaggcctagctcatnnnnnnnnnnnnnnnctttgctggggggatacaatgacccatgtggtctgcgtcttctgccattggcttgaactgggcaccccctgaagtctccatctcagctgtatattctagtccaaattttcctggctcccctgctccctcccaggtcctgcacactgtctttttgccaacacctcagccctgtttgctatttcatgtctgcatggtacgagacaccccttcacngcatacactgccatggtatgtacatatgcatccacgtgtgtgtatgtgtagcatgtagctcattctgctcagcctctggcgccgttccacattgctcccagccccattgctgtcactgtcgtcccagatgtccttgccatggccacagacaatctgccgtctcctggaaacgctggggctgccctnnnnnnnnnnnnnnnnnnnagcagtcagggcctgctttgcagaat

SEQ ID NO: 1009 - DNA, 494 bp, Homo sapiens
  misc_feature (84)..(101): n includes a, c, g, or t, or contains no nucleotide
  misc_feature (214)..(228): n includes a, c, g, or t, or contains no nucleotide
  misc_feature (296)..(333): n includes a, c, g, or t, or contains no nucleotide
gacgatacagctaattcagaatcattttgtggacgaatatgatccaacaatagaggattcctacaggaagcaagtagtaattgnnnnnnnnnnnnnnnnnntggatattctcgacacagcaggtcaagaggagtacagtgcaatgagggaccagtacatgaggactggggagggctttctttgtgtatttgccataaataatactaaatcattnnnnnnnnnnnnnnnttatagagaacaaattaaaagagttaaggactctgaagatgtacctatggtcctagtaggaaataaannnnnnnnnnnnnnnnnnnnnnnnnnnnnnnnnnnnnntcaggacttagcaagaagttatggaattccttttattgaaacatcagcaaagacaagacagagagtggaggatgctttttatacattggtgagagagatccgacaatacagattgaaaaaaatcagcaaagaagaaaagactcctggctgtgtgaaaatta

SEQ ID NO: 1010 - DNA, 365 bp, Homo sapiens
  misc_feature (179)..(197): n includes a, c, g, or t, or contains no nucleotide
  misc_feature (262)..(277): n includes a, c, g, or t, or contains no nucleotide
catgcgtgttaatggctgttcgagagaaatcggaataaaagcctaaacaggaacaacttcatcacagtgttgatgttggacacatagatggtgatggcaaaggtttagaacacattattttcaaagactaaatctaaaacccagagtaaacatcaatgctcagagttagcataatttgnnnnnnnnnnnnnnnnnnngagaaatgcattttcacagaaatcaagatgttatttttgtatactatatcacttagacaactgtnnnnnnnnnnnnnnnntcagtttttaaaagtcagatggaaagagcaactgaagtcctagaaaatagaaatgtaattttaaactattccaataaagctggaggag

SEQ ID NO: 1011 - DNA, 203 bp, Homo sapiens
  misc_feature (52)..(52): n includes a, c, g, or t, or contains no nucleotide
  misc_feature (65)..(114): n includes a, c, g, or t, or contains no nucleotide
  misc_feature (122)..(122): n includes a, c, g, or t, or contains no nucleotide
  misc_feature (151)..(151): n includes a, c, g, or t, or contains no nucleotide
  misc_feature (161)..(161): n includes a, c, g, or t, or contains no nucleotide
tctccaagccatcacagatatctcctgctgctatccccaaactgccactctnaactcttgaagtnnnnnnnnnnnnnnnnnnnnnnnnnnnnnnnnnnnnnnnnnnnnnnnnnnctctaatnagatgtcctaggtcctcccaattcttagnccttttatanctgtttttctccttctcttattccatttagtttttcaattca

SEQ ID NO: 1012 - DNA, 515 bp, Homo sapiens
  misc_feature (28)..(28): n includes a, c, g, or t, or contains no nucleotide
  misc_feature (37)..(38): n includes a, c, g, or t, or contains no nucleotide
  misc_feature (55)..(55): n includes a, c, g, or t, or contains no nucleotide
  misc_feature (79)..(79): n includes a, c, g, or t, or contains no nucleotide
  misc_feature (92)..(92): n includes a, c, g, or t, or contains no nucleotide
  misc_feature (111)..(111): n includes a, c, g, or t, or contains no nucleotide
  misc_feature (256)..(291): n includes a, c, g, or t, or contains no nucleotide
  misc_feature (329)..(329): n includes a, c, g, or t, or contains no nucleotide
  misc_feature (464)..(481): n includes a, c, g, or t, or contains no nucleotide
gagcggcacagcaacggctcccagagcnagcacagcnntctgaccctgcccaggntccttgtggaacgcggggacctcngtcacctgcacantgaaccatcccagcctccnaccccagaggttgatggcgctgagagaacccgctgcgcaggcacccgtcaagctttccctgaacctgctggcctcgtctgaccctcccgaggcggcctcgtggctcctgtgtgaggtgtctggcttctcgccccccaacatcctnnnnnnnnnnnnnnnnnnnnnnnnnnnnnnnnnnnnttctgggtttgcccccgcacgcccccctccacagcccnggagcaccacgttctgggcctggagtgtgctgcgtgtcccagccccgcccagccctcagccagccacctacacgtgtgtggtcagccacgaggactcccggactctgctcaacgccagccggagcctagaagtcnnnnnnnnnnnnnnnnnnggccccatgaaatgatcccggaccagatccgtcc

SEQ ID NO: 1013 - DNA, 512 bp, Homo sapiens
  misc_feature (26)..(26): n includes a, c, g, or t, or contains no nucleotide
  misc_feature (54)..(54): n includes a, c, g, or t, or contains no nucleotide
  misc_feature (69)..(69): n includes a, c, g, or t, or contains no nucleotide
  misc_feature (245)..(263): n includes a, c, g, or t, or contains no nucleotide
  misc_feature (385)..(385): n includes a, c, g, or t, or contains no nucleotide
  misc_feature (465)..(466): n includes a, c, g, or t, or contains no nucleotide
tgagttcctctactctcatggcgtgncaaggactctatcccctcatcagtaccnctctgtgcacggagntggcatggtgccagagtggagcgacaatagctaaagtgaggcctgcttcacaacagacatttcctagagaaagagagagagagaggagaaagagagagaaggagagagacagtagccaagagaaccccacagacaagatttttcatttcacccaatgttcacatctgcactcaagnnnnnnnnnnnnnnnnnnnatcagtagcttgaaaccacaattttaaaaatgtgactttcttgttttgtctcaaaacttaaaaaaacaaacacaaaaagatgagtcccaccccccactaccaccacacccatcaaccagccnacattcacgctactccccagatctcttcccccattccttcttttgggctctagaaagtcttgcctcattgagtgtttttnnctagtgcgtagttggagtctgtccctgtcttggtgttaatgttgac

SEQ ID NO: 1014 - DNA, 242 bp, Homo sapiens
  misc_feature (91)..(91): n includes a, c, g, or t, or contains no nucleotide
gcggcttcacccttcgtaaccaggagacaaggcggccatggatttgcccttgattctattttgctaatggaagatagaaaggagagaaggnttttttttttttttaacattctgaagatggtgctgtgtcaagaaggaccttttttttcccctctcccctattttttaagtaccttggaggaggagaggttggtgacatgcatggtggggatctatggcctctggtgctttgtcctgtattt

SEQ ID NO: 1015 - DNA, 406 bp, Homo sapiens
  misc_feature (104)..(104): n includes a, c, g, or t, or contains no nucleotide
  misc_feature (107)..(112): n includes a, c, g, or t, or contains no nucleotide
  misc_feature (194)..(194): n includes a, c, g, or t, or contains no nucleotide
  misc_feature (196)..(196): n includes a, c, g, or t, or contains no nucleotide
  misc_feature (258)..(258): n includes a, c, g, or t, or contains no nucleotide
  misc_feature (286)..(286): n includes a, c, g, or t, or contains no nucleotide
  misc_feature (295)..(295): n includes a, c, g, or t, or contains no nucleotide
  misc_feature (297)..(297): n includes a, c, g, or t, or contains no nucleotide
  misc_feature (304)..(304): n includes a, c, g, or t, or contains no nucleotide
  misc_feature (317)..(317): n includes a, c, g, or t, or contains no nucleotide
  misc_feature (319)..(319): n includes a, c, g, or t, or contains no nucleotide
  misc_feature (323)..(323): n includes a, c, g, or t, or contains no nucleotide
  misc_feature (338)..(338): n includes a, c, g, or t, or contains no nucleotide
tattcatgccaaacgcgtgaccatcatgcctaaagacatccagcttgcccgccgcattcgtggggagagggcgtgaattgttttgagtacaaaccttaaatccnaannnnnntctcagagccaaccactttgtccgtgaaaagggctgtaatcctttgagacgcattagaccactaaactgcactgatccaaananacatttgaaatagtggcattcagttccctcgatgcttcatttaaatttccaaatttaagcgntccctcaggttttcgcctagggctgggnctccctacngntgttctnccattggtttagntnggcntttgttttgctgttnaggccctctgctgctttcttgtacattgttctcgttttctaaactcctggccacttaattgtaccctg

SEQ ID NO: 1016 - DNA, 575 bp, Homo sapiens
  misc_feature (75)..(92): n includes a, c, g, or t, or contains no nucleotide
  misc_feature (104)..(118): n includes a, c, g, or t, or contains no nucleotide
  misc_feature (198)..(213): n includes a, c, g, or t, or contains no nucleotide
  misc_feature (252)..(290): n includes a, c, g, or t, or contains no nucleotide
  misc_feature (342)..(405): n includes a, c, g, or t, or contains no nucleotide
  misc_feature (501)..(501): n includes a, c, g, or t, or contains no nucleotide
  misc_feature (545)..(545): n includes a, c, g, or t, or contains no nucleotide
tggaccgccgcatcaccaggttcgtcctgcccgtgggcgccacggtcaacatggatggcactgccctctacgagnnnnnnnnnnnnnnnnnnattgctcaagtnnnnnnnnnnnnnnncaacctgggtcagatcacaaccatcagcatcacggccacagcagccagtgttggggctgctggcatcccccaggcgggtnnnnnnnnnnnnnnnnttgtgcttacgtcggtcggcttgcccacggaagacatcnnnnnnnnnnnnnnnnnnnnnnnnnnnnnnnnnnnnnnncgcacaatgaccaacgtactgggggactcaattggagcggccgtcatcgagnnnnnnnnnnnnnnnnnnnnnnnnnnnnnnnnnnnnnnnnnnnnnnnnnnnnnnnnnnnnnnnncctacaagtccctcatggcacaggagaagggggcatcccggggacggggaggcaacgagagtgctatgtgaggggcctccagctctgcccccccanagaggagggaagggggctggggaggggagtcctggtgacacatntgttgcccaactgaccgtgggctgaacaca

SEQ ID NO: 1017 - DNA, 583 bp, Homo sapiens
  misc_feature (29)..(29): n includes a, c, g, or t, or contains no nucleotide
  misc_feature (49)..(51): n includes a, c, g, or t, or contains no nucleotide
  misc_feature (59)..(59): n includes a, c, g, or t, or contains no nucleotide
  misc_feature (67)..(67): n includes a, c, g, or t, or contains no nucleotide
  misc_feature (69)..(74): n includes a, c, g, or t, or contains no nucleotide
  misc_feature (76)..(76): n includes a, c, g, or t, or contains no nucleotide
  misc_feature (78)..(78): n includes a, c, g, or t, or contains no nucleotide
  misc_feature (80)..(80): n includes a, c, g, or t, or contains no nucleotide
  misc_feature (83)..(84): n includes a, c, g, or t, or contains no nucleotide
  misc_feature (230)..(231): n includes a, c, g, or t, or contains no nucleotide
  misc_feature (238)..(238): n includes a, c, g, or t, or contains no nucleotide
  misc_feature (241)..(242): n includes a, c, g, or t, or contains no nucleotide
  misc_feature (244)..(244): n includes a, c, g, or t, or contains no nucleotide
  misc_feature (248)..(250): n includes a, c, g, or t, or contains no nucleotide
  misc_feature (257)..(271): n includes a, c, g, or t, or contains no nucleotide
  misc_feature (302)..(317): n includes a, c, g, or t, or contains no nucleotide
  misc_feature (335)..(335): n includes a, c, g, or t, or contains no nucleotide
  misc_feature (377)..(391): n includes a, c, g, or t, or contains no nucleotide
tgataaggccagagcttgtgtgctgggcnagaaatcacctgctgcatcnnntgctccgnaggctggncnnnnnncntntnccnncaggtttctatgctgtttcttagcacagaatccagcctagccttagccgcagtctaggccctgcttggactaggactccttgcttgaccccatctctggttcctgccctggctcctgcaccagccccagctcctgcctacatccanncagaaanatnngncagnnnctcttgnnnnnnnnnnnnnnntgtgacctccgagccctcctggtgggaagannnnnnnnnnnnnnnnggaggagaagggaggggntgggggttcccaggagccatgcgtggcctgcagagtccattnnnnnnnnnnnnnnngcccgctatgggctgtgtccatgaccagaggctggagtgggggtgtgttagagcccctcaccgggacttgctgtgcggatggggcctgggcctccttcctacaggggctcctctgtgggtgaggggccctctggaatggcatcccatgagcttgtggcctctatctgctaccatctgtgttttatctgagta

SEQ ID NO: 1018 - DNA, 561 bp, Homo sapiens
  misc_feature (26)..(26): n includes a, c, g, or t, or contains no nucleotide
  misc_feature (29)..(31): n includes a, c, g, or t, or contains no nucleotide
  misc_feature (60)..(60): n includes a, c, g, or t, or contains no nucleotide
  misc_feature (62)..(62): n includes a, c, g, or t, or contains no nucleotide
  misc_feature (88)..(88): n includes a, c, g, or t, or contains no nucleotide
  misc_feature (104)..(104): n includes a, c, g, or t, or contains no nucleotide
  misc_feature (114)..(114): n includes a, c, g, or t, or contains no nucleotide
  misc_feature (140)..(140): n includes a, c, g, or t, or contains no nucleotide
  misc_feature (157)..(157): n includes a, c, g, or t, or contains no nucleotide
  misc_feature (192)..(192): n includes a, c, g, or t, or contains no nucleotide
ccgacagacatggtgggcaaccctantgnnntgtggggctgatgtgaatgcgcaggatgngnatggggccacagcgctgatgtgtgcnagtgagtatgggcgcntggacaccgntgcggctgctgctcacccagccaggnctgtgaccctgccatcntggacaatgagggcaccagtgccctggccatcgcnctggaggctgagcaggatgaggtggccgctctgctacatgcccacctgagctcgggccagcccgacacccagagcgagtcaccccctggctcccagacagccacacctggtgaaggagaatgcggtgacaatggagagaacccccaggttcagtaagctgcctcgtctggctcactacacctagctgtggggagatctcctcgtcagtcacctcagcctttggcgcacagaagggtccagggtcccctgctcagaggctaacactggccgaagagaaaggcaatttcagttggggtgactgtggcaggaaggggctcactctggccccaccaaggtgaggtggggaccaagtgatagagccctgatcca

SEQ ID NO: 1019 - DNA, 487 bp, Homo sapiens
agcagaaggtcatcgtggtggctgtctgcgtggtggtgcttgtcatgctgctcctcctgagcctgtggggggcccactactacaggactcagaagctgctatcgaaaaacccaaagaatccttatgaggagtcgagcagagatgtgaggagtcgcaggcctgctgacactgaggatgggatgtcctcttgccctcaaccttggtttgtggttataaaagaacaccaagacctcaagaatgggggtcaaccagtggctggtgaggatggccaggcagcagatgggtcaatgcaaccaacttcatggaggcaggagccccagttatgtggaatgggcacagagcaaggctgctggattccagtatccagtgataagggctcctgtccccaggtaatggagcgaagctttcatatgccctcctatgggacacagacccttgaagggggtgtcgagaagccccattctctcctatcagctaacccattatg

SEQ ID NO: 1020 - DNA, 521 bp, Homo sapiens
gcccttcaataattgtccatgcctgccttttgttgtttacatgctcttctgcccagactgttagtaatctagggaccccctttggagctgataagtacagttcagccttttctcctcaaatatataatgactttaacattcctaagaatataggtatttctgaatgatttaaatttgaggaattttaatacataaaatacaatgtacaaactttctgcccactcagatctcttctccatcatgtacttagtatttcccattaacctacacactgatttttatgctactccttgtagaaacaaaattctggtttgactcagtttttgtgtttataaacttttggaatgtgtaccccgtttatgtgaagaattatgacctatcagtcatagctaaatagtgaacctcaaaagtgttaacttttgactattcatgtgaggtttggtatcttgcatttatgtacatggctgtaaattatgtgcatttactctgtatttatgttatctagctgacttttacttgaa

SEQ ID NO: 1021 - DNA, 460 bp, Homo sapiens
  misc_feature (311)..(325): n includes a, c, g, or t, or contains no nucleotide
atatccagtgcactggtgggaaaaaatgtttatgggatttcaaggttgggagaggccggtgttccctctgtgatgagctgtgccctgacagtaagtcggatgagcctgtctgtgccagtgacaatgccacttatgccagcgagtgtgccatgaaggaagctgcctgctcctcaggtgtgctactggaagtaaagcactccggatcttgcaactccatttcggaagacaccgaggaagaggaggaagatgaagaccaggactacagctttcctatatcttctattctagagtggtaaactctctataagtgnnnnnnnnnnnnnnngcctttgtgcaaaaaaaaaaaaaaaaaaaaagaaaaagaaaaaaagaaaaatatattgtccatactgtaaataagtgtatgcttatttatttggggggaaaactatacattaaaggacctttgtcctaaagctct

SEQ ID NO: 1022 - DNA, 361 bp, Homo sapiens
tggcatgaccacaacacatcacagcctcaagtgaccttcccacttcagccttcccagtagctgggactacaggtgcacgccaccatgttcacctaattttttactttttgtagagatgagacttcaccatgttgctcaggctggtcttgaattcctaggcttaagtgatcttcccgctttggcctcccaaagtgctgggattataggtatgagccactgcatgtggcctattttcttccactgttgttcggcgtggagaatattatatacataattacgtaaatgatatcatactgtatataccttttttcctactccttccttaagttatatcataatgagactaccaattattagactt

SEQ ID NO: 1023 - DNA, 522 bp, Homo sapiens
  misc_feature (239)..(239): n includes a, c, g, or t, or contains no nucleotide
  misc_feature (249)..(249): n includes a, c, g, or t, or contains no nucleotide
  misc_feature (373)..(373): n includes a, c, g, or t, or contains no nucleotide
  misc_feature (390)..(390): n includes a, c, g, or t, or contains no nucleotide
  misc_feature (414)..(414): n includes a, c, g, or t, or contains no nucleotide
  misc_feature (418)..(418): n includes a, c, g, or t, or contains no nucleotide
  misc_feature (432)..(432): n includes a, c, g, or t, or contains no nucleotide
  misc_feature (436)..(436): n includes a, c, g, or t, or contains no nucleotide
  misc_feature (449)..(449): n includes a, c, g, or t, or contains no nucleotide
  misc_feature (452)..(452): n includes a, c, g, or t, or contains no nucleotide
  misc_feature (454)..(454): n includes a, c, g, or t, or contains no nucleotide
  misc_feature (462)..(462): n includes a, c, g, or t, or contains no nucleotide
  misc_feature (470)..(471): n includes a, c, g, or t, or contains no nucleotide
  misc_feature (475)..(475): n includes a, c, g, or t, or contains no nucleotide
  misc_feature (486)..(486): n includes a, c, g, or t, or contains no nucleotide
  misc_feature (492)..(492): n includes a, c, g, or t, or contains no nucleotide
  misc_feature (494)..(495): n includes a, c, g, or t, or contains no nucleotide
  misc_feature (497)..(497): n includes a, c, g, or t, or contains no nucleotide
gatcatgacccctgggatctgcgcggggatcttcatcttcttcttgatcaagtacaagccactcaagtacaacaacatctacacctacccagcctggggctatggcattggctggctcatggccctgtcctccatgctctgcatcccgctctggatctgcatcacagtgtggaagacggaggggacgctgcccgagaaactccagaagttgacgacccccagcacagatctgaaaatgncggggcaagncttggggtgagcccacggatggtgacagttaatgactgtgatgccaaactcaagagtgacgggaccatcgcagccatcacagagaaggagacgcacttctgagcggccaccagccatctggggnctcttcttcctttcttnccccccgtgtatgtaaatgaattncctngaaccccatacttncacntaatggtaggggnttngnttgttttngcacaggnnttanttaacaagttnattttnanntngccactgtacactgctctaaagtat

SEQ ID NO: 1024 - DNA, 558 bp, Homo sapiens
tgccccatctctctgcatgagctcatgatccactgctggaaaaaggaccctgaagaacgccccacttttgagtacttgcagagcttcctggaagactactttaccgcgacagagccccagtaccaacctggtgaaaacctgtaaggcccgggtctgcggagagaggccttgtcccagaggctgccccacccctccccattagctttcaattccgtagccagctgctccccagcagcggaaccgcccaggatcagattgcatgtgactctgaagctgacgaacttccatggccctcattaatgacacttgtccccaaatccgaacctcctctgtgaagcattcgagacagaaccttgttatttctcagactttggaaaatgcattgtatcgatgttatgtaaaaggccaaacctctgttcagtgtaaatagttactccagtgccaacaatcctagtgctttccttttttaaaaatgcaaatcctatgtgattttaactctgtcttcacctgattcaactaaaaaaaaaaagtattattttccaaaagtggcctctttgt

SEQ ID NO: 1025 - DNA, 490 bp, Homo sapiens
  misc_feature (30)..(30): n includes a, c, g, or t, or contains no nucleotide
  misc_feature (58)..(58): n includes a, c, g, or t, or contains no nucleotide
  misc_feature (64)..(64): n includes a, c, g, or t, or contains no nucleotide
  misc_feature (119)..(119): n includes a, c, g, or t, or contains no nucleotide
  misc_feature (125)..(125): n includes a, c, g, or t, or contains no nucleotide
  misc_feature (132)..(133): n includes a, c, g, or t, or contains no nucleotide
  misc_feature (163)..(163): n includes a, c, g, or t, or contains no nucleotide
  misc_feature (181)..(209): n includes a, c, g, or t, or contains no nucleotide
  misc_feature (245)..(246): n includes a, c, g, or t, or contains no nucleotide
  misc_feature (320)..(321): n includes a, c, g, or t, or contains no nucleotide
  misc_feature (323)..(347): n includes a, c, g, or t, or contains no nucleotide
  misc_feature (349)..(349): n includes a, c, g, or t, or contains no nucleotide
  misc_feature (352)..(372): n includes a, c, g, or t, or contains no nucleotide
ctaccgaatgtgtctttagatagccctgtncctggtggtattttcaatagccactaanccttgncctggtacagtatgggggttgtaaattggcatggaaatttaaagcaggttcttgnttggtngcacagnncacaaattagttatatatggggatggtagnttttttcatcttcagttnnnnnnnnnnnnnnnnnnnnnnnnnnnnngttgttctgttaactgaataccactctgtaattgcnnaaaaaaaaaaaaaagttgcagctgttttgttgacattctgaatgcttctaagtaaatacaattttttttattannannnnnnnnnnnnnnnnnnnnnnnnnanaannnnnnnnnnnnnnnnnnnnnacacaccaatcaagagatgactttaaggattaaaatgctgacatttgacatcagcatttgtactacatcttgcctttctttgatgtgcagaaaacaactcataaaatggcaagcaatg

SEQ ID NO: 1026 - DNA, 301 bp, Homo sapiens
  misc_feature (63)..(80): n includes a, c, g, or t, or contains no nucleotide
ccaggcagaagctgctctaggacctgggcctctcagagggctcttctgccatcccttgtctcnnnnnnnnnnnnnnnnnncaggacagagttggaagaggagactgggaggcagcaagaggggtcacataccagctcaggggagaatggagtactgtctcagtttctaaccactctgtgcaagtaagcatcttacaactggctcttcctcccctcactaagaagacccaaacctctgcataatgggatttgggctttggtacaagaactgtgacccccaaccctgataaaagagatggaag

SEQ ID NO: 1027 - DNA, 597 bp, Homo sapiens
  misc_feature (422)..(422): n includes a, c, g, or t, or contains no nucleotide
  misc_feature (452)..(452): n includes a, c, g, or t, or contains no nucleotide
  misc_feature (524)..(524): n includes a, c, g, or t, or contains no nucleotide
  misc_feature (546)..(546): n includes a, c, g, or t, or contains no nucleotide
  misc_feature (554)..(555): n includes a, c, g, or t, or contains no nucleotide
  misc_feature (572)..(572): n includes a, c, g, or t, or contains no nucleotide
aatgcgctcaagtcatcgccgcacgcctcgctgggaggctttcccgtggagaagtacatggacgtgtcaggcctggcgagcagcagcgtaccggccaacgaggtgccagcgcgagccaaggaggtatccttctaccagggctatacgagcccttaccagcacgtgcccggctatatcgacatggtgtccactttcggctccggggagcctcggcacgaggcctacatctccatggaggggtaccagtcctggacgctggctaacgggtggaacagccaggtgtactgcaccaaggaccagccacaggggtcccacttttggaaatcttcctttccaggggatgtggctctaaatcagccggacatgtgcgtctaccgaagagggaggaagaagagagtgccttacaccaaactgcagcttanagaactggagaacgagtatgccattaacanattcattaacaaggacaagcggcggcgtatctcggctgctacgaacctatctgagagacaagtgaccatttngtttcagaaccgaagagtgaangacaagannattgtctccaagctcanagatactgtctcctgatgtggtcca

SEQ ID NO: 1028 - DNA, 433 bp, Homo sapiens
  misc_feature (144)..(144): n includes a, c, g, or t, or contains no nucleotide
  misc_feature (199)..(199): n includes a, c, g, or t, or contains no nucleotide
  misc_feature (202)..(202): n includes a, c, g, or t, or contains no nucleotide
  misc_feature (207)..(207): n includes a, c, g, or t, or contains no nucleotide
gcacccagtgcatcctttttacaagtggaagaactaggatggctttccaaagtcttctagaaatgaagttctttctctgtgcagctttcccccttggagcaggagtgaagatgtttcattatcttgggcctgggaaaccacttnccccaggcttctccctccccccacccccataggaacaggatttggccttagcttnctngggcntatcggctgccttccctctacttcctaccacctcttctgccttcctttgagctctgttgggcttggggatcttagttttcttttgtttatttcccagctcatttttttcttctggtcagtttttttaagggggggtgttgtggttttttgtttttgttttgcttctgagaaagcatttgcctttcttcctctcccaacataacaatcgtggtaacagaatgcgact

SEQ ID NO: 1029 - DNA, 359 bp, Homo sapiens
  misc_feature (87)..(87): n includes a, c, g, or t, or contains no nucleotide
  misc_feature (102)..(102): n includes a, c, g, or t, or contains no nucleotide
  misc_feature (153)..(153): n includes a, c, g, or t, or contains no nucleotide
  misc_feature (165)..(165): n includes a, c, g, or t, or contains no nucleotide
  misc_feature (175)..(176): n includes a, c, g, or t, or contains no nucleotide
  misc_feature (195)..(195): n includes a, c, g, or t, or contains no nucleotide
caacacacgatagtaaggagcatttagcaatgatggaaaggattcttggacctctaccaaaacatatgatacagaaaaccaggaaancgtaaatattttcanccacgatcgattagactgggatgaacacagttctgccggcagatatgtttncaagacgctgtnaaacctctgnnaaggaatttatgctttctncaagatgttgaacatgagcgtctctttgacctcattcagaaaatgttggagtatgatccagccaaaagaattactctcagagaagccttaaagcatcctttctttgaccttctgaagaaaagtatatagatctgtaattggacagctctctcgaagagatctta

SEQ ID NO: 1030 - DNA, 302 bp, Homo sapiens
ctccaaggagtctcggaataattcaagtagagttgtttggttgagaggaacatccccatctcaaggccgaacctgtgtgaacctcatgccaagcacagatatagggctggcgcaggtgcttcccaaagcttaccttcctggagatgacatgcatagaaagaggggttgggactttttacttcactaggagaacttgtaacaccatggggaagtcagctgaaacttgtcttgttttgccaggaaaggaagtagttgcctttggtcatccatctgctaatagtcacagaatacagtgaaatgac

SEQ ID NO: 1031 - DNA, 503 bp, Homo sapiens
  misc_feature (105)..(122): n includes a, c, g, or t, or contains no nucleotide
  misc_feature (345)..(381): n includes a, c, g, or t, or contains no nucleotide
ctattgcattgctgtgattttcagatgaaatcaagcacagtggtttacttttaaccaaaccccagtcatacttcctctctctgactcagcttccttgtcgtacgnnnnnnnnnnnnnnnnnnccaccagctcacatttacaaaggcgttctaggtcttttgatgaacacctatatggcatctatattaatataattttctctgtgagaggagagatttaaatgagagttgtcttagtagctgaggaaacagatacaatgattaggggaatagctaatttcttgcctgatgtgatgtatggaaactgagaaaagcctggaaaaggaggttggaaaactgaaagtgnnnnnnnnnnnnnnnnnnnnnnnnnnnnnnnnnnnnngcccaaaacaccgtgggggcatcccctcctcacagggcctgtgtgctgggctgcactgacatgcattccggctcagagttggcttcacccttaacagcgggtactgggactctgtggacaca

SEQ ID NO: 1032 - DNA, 520 bp, Homo sapiens
  misc_feature (144)..(167): n includes a, c, g, or t, or contains no nucleotide
gcttttccagtggacctggggaagaggctttgttgcagatgagatcaaacatcatctatgactccactgcccgaatcagaaggaacgccaaaggaaactactgtaagaggaccccgctctacatcgacttcaaggagattgggnnnnnnnnnnnnnnnnnnnnnnnncctggatacgaagcctatgaatgccgtggtgtttgtaactaccccctggcagagcatctcacacccacaaagcatgcaattatccaggccttggtccacctcaagaattcccagaaagcttccaaagcctgctgtgtgcccacaaagctagagcccatctccatcctctatttagacaaaggcgtcgtcacctacaagtttaaatacgaaggcatggccgtctccgaatgtggctgtagatagaagaagagtcctatggcttatttaataactgtaaatgtgtatatttggtgttcctatttaatgagattatttaataagggtgtacagtaatagaggcttgctgccttcag

SEQ ID NO: 1033 - DNA, 311 bp, Homo sapiens
  misc_feature (64)..(65): n includes a, c, g, or t, or contains no nucleotide
  misc_feature (115)..(115): n includes a, c, g, or t, or contains no nucleotide
  misc_feature (252)..(275): n includes a, c, g, or t, or contains no nucleotide
ctgaaatggcctgtccctagggctctccaagcactagccttcccagcttcccgccgcccccccnnatctcttcctgtctaacttggggaaggggcctgggctgtgaggacagggncccccacaggggatggtttcacgagtgtagtcccggaggccttccctttacagctctcctccagccctgggcacatagcataggctggggacacaggatcctggcctgagaattgaggggaggtggccagcccgcannnnnnnnnnnnnnnnnnnnnnnnatttttgccctgcgtcccttctctttggggctcctt

SEQ ID NO: 1034 - DNA, 106 bp, Homo sapiens
ccttcctgatcacatgacattgtggcggggcttcctgaatgaggcgtggctgaccgggatgctccagctgtgtctcttcgccatcacggaccaggagaacaaccca

SEQ ID NO: 1035 - DNA, 467 bp, Homo sapiens
  misc_feature (360)..(362): n includes a, c, g, or t, or contains no nucleotide
  misc_feature (364)..(375): n includes a, c, g, or t, or contains no nucleotide
  misc_feature (379)..(379): n includes a, c, g, or t, or contains no nucleotide
gatgccttcgacaaaccagagaagccaagttggggggagctggtgcctggagtgggccctgtgcacctcacctggcggaggctgggggggctctgtcagcaggaccctagaggagactctcattcgattttaaagaagcacaacgggtcattttcctttgtatgttcctagcgcagaactgtttctaaaacaacttgaagtatagttttgttatctaagcaatttttgttttaagtaagtaagtgtactagaatgcgaagccgttatggttcaggtttttaaaaactggtacagtattgtatttgtctcatctgttgcactgtatttcaatcatctgtaattaaaatgatcatatgtttnnnannnnnnnnnnnntaantaagtaagtaagtatcttagtagatttttcctttgaggaaaatcggtaataaaataacatggattgaatgtttactgtgcgtcaagca

SEQ ID NO: 1036 - DNA, 265 bp, Homo sapiens
  misc_feature (65)..(65): n includes a, c, g, or t, or contains no nucleotide
  misc_feature (155)..(156): n includes a, c, g, or t, or contains no nucleotide
  misc_feature (186)..(186): n includes a, c, g, or t, or contains no nucleotide
  misc_feature (193)..(195): n includes a, c, g, or t, or contains no nucleotide
  misc_feature (232)..(232): n includes a, c, g, or t, or contains no nucleotide
cagccttaggtaaacaacttagattctgaggtcaaagaaaaaaggagagggaatgcagccttgtnggggagaagcggggcagagggttctctaatctaatcaggacaggacaggtttcacatacaattgtcccagttcgcatcccagccctgggnnacttttctgcttccttccagaggcctgggnctctgannnaacactttggctttttctccattcacgctgatttggncaaaaggccagagatgggcctccttccctgggg

SEQ ID NO: 1037 - DNA, 204 bp, Homo sapiens
tagaaggggccaggttgcctcctgatgggggcagcgtgtggaggatgagcctgggcttacttggcagacagatctggtcatgttccagctctatctcctacttgcagaatgtcttcgggaaaattacctacattctcaaagcctcagattcttgctttgtcaacattccttgaagattgctaaactgaagactctggtgttccc

SEQ ID NO: 1038 - DNA, 559 bp, Homo sapiens
tgccctttgtgattccctcagatctgccctaatcccgggcatttgggtgggggaatcttgcctttccctttcagagccccagggatctcatctggggaactgtcattgccagcagaggctgttccttcctgcagtttggagatgtgactcattccattcactcactccaccctgcctctgcatcccttaatggagaaacgggcctaaaaccaaacgggtaaaaaagccctgggccatccctgtcttcctgtcccttgtctgcccagttgacacctactggtgacttctagggcactgaggagtgaaagcgcctagggctggagaatagcgctgagttgggtttgtgactcttccctctccctgcctcacaggattgtgactccccagcccctgccctcaaagcttcagacccctcaggtagcagcaggaccttgtgatcttggccccttggatctgagatggtttttgcatctttccaggagagcctcacattcttcttccaggttgtatcacccccgagttagcatatcccaggctcgcagactcaacacagcaaggg

SEQ ID NO: 1039 - DNA, 527 bp, Homo sapiens
  misc_feature (42)..(42): n includes a, c, g, or t, or contains no nucleotide
  misc_feature (141)..(141): n includes a, c, g, or t, or contains no nucleotide
  misc_feature (151)..(151): n includes a, c, g, or t, or contains no nucleotide
  misc_feature (463)..(477): n includes a, c, g, or t, or contains no nucleotide
cggaattattgtctcctacacctgtttcaacagagctgtcanaaaatggggaaggtgactttaggtatttgggaatgggagatagtcatatcccaccaccagtaccaagtgaattcaatgatgtttcccagaacacacatntgagacaggnccataattattgtagccccaccaagaaaaatccatgtgaagttcagccagactctctgacaaataatgcctgcgttagaacattaaacttggagagtccgatgaagactgatattttcgatgagtttttttcctcctcagcattaaatgctttagcaaatgacacattagacctacctcatttcgatgaatatctgtttgagaattattgaattaatgcttgttaacttttttcatataatatttattattattagaagaacttacaatgtgttcaggtagtgtttatacactggacttgtgtaattacttnnnnnnnnnnnnnnnacaaaatgcaaggtttaacctttggttctgcccatgaagcatgtaatctt

SEQ ID NO: 1040 - DNA, 310 bp, Homo sapiens
  misc_feature (36)..(36): n includes a, c, g, or t, or contains no nucleotide
  misc_feature (68)..(83): n includes a, c, g, or t, or contains no nucleotide
  misc_feature (272)..(272): n includes a, c, g, or t, or contains no nucleotide
tagtgatgcagctctcctggccccagaggagatcanggagaaaaataaagctggagatataaaaacannnnnnnnnnnnnnnnctacagacaagaaacgagagcgaaggaaaaagaaatatcaaaagcgtatgaaaataaaagagaaggagaagcggagaaaactgcttgaaaagagcagtgtagatcaagcagggaaatacagcaaaacagtagcttcggagaagttaaaacagctgaccaaaactggcaaagcttccttcataaaggatnaaggtaaagacaaggccttaaagtcctctcaagcattc

SEQ ID NO: 1041 - DNA, 521 bp, Homo sapiens
  misc_feature (139)..(179): n includes a, c, g, or t, or contains no nucleotide
  misc_feature (377)..(378): n includes a, c, g, or t, or contains no nucleotide
  misc_feature (381)..(381): n includes a, c, g, or t, or contains no nucleotide
  misc_feature (383)..(383): n includes a, c, g, or t, or contains no nucleotide
  misc_feature (385)..(385): n includes a, c, g, or t, or contains no nucleotide
  misc_feature (396)..(463): n includes a, c, g, or t, or contains no nucleotide
  misc_feature (495)..(495): n includes a, c, g, or t, or contains no nucleotide
ggtttttcaaggtgccatagccacccccaaatatgtttgtttaaagcgtggggttttttaatctctgccacccttgtcaagggagtcttgtaaagttgccgagggtaggttcatctccaggtttcgggattcccatccnnnnnnnnnnnnnnnnnnnnnnnnnnnnnnnnnnnnnnnnntgagctccctcgggctcgcctgccagcctggagttcttcctgtgctccttgatcacctgagctgcctcagattccatttggtcctctccttcctggaaggcttccttttatgttttgttttaatcccaaatgtctgaatgttttgcagtgtgtaggggtttgagccccttgttcattctccttcctttttcctcccgnnctntncncctctccatgnnnnnnnnnnnnnnnnnnnnnnnnnnnnnnnnnnnnnnnnnnnnnnnnnnnnnnnnnnnnnnnnnnnntgggcttttttcggtgttagattcaacactgngctaaagcggggatgttccattgaat

SEQ ID NO: 1042 - DNA, 468 bp, Homo sapiens
  misc_feature (30)..(31): n includes a, c, g, or t, or contains no nucleotide
  misc_feature (35)..(35): n includes a, c, g, or t, or contains no nucleotide
  misc_feature (38)..(40): n includes a, c, g, or t, or contains no nucleotide
  misc_feature (43)..(46): n includes a, c, g, or t, or contains no nucleotide
  misc_feature (48)..(48): n includes a, c, g, or t, or contains no nucleotide
  misc_feature (50)..(53): n includes a, c, g, or t, or contains no nucleotide
  misc_feature (55)..(57): n includes a, c, g, or t, or contains no nucleotide
  misc_feature (63)..(63): n includes a, c, g, or t, or contains no nucleotide
  misc_feature (66)..(66): n includes a, c, g, or t, or contains no nucleotide
  misc_feature (68)..(68): n includes a, c, g, or t, or contains no nucleotide
  misc_feature (95)..(95): n includes a, c, g, or t, or contains no nucleotide
  misc_feature (97)..(97): n includes a, c, g, or t, or contains no nucleotide
  misc_feature (102)..(102): n includes a, c, g, or t, or contains no nucleotide
  misc_feature (152)..(226): n includes a, c, g, or t, or contains no nucleotide
  misc_feature (260)..(260): n includes a, c, g, or t, or contains no nucleotide
  misc_feature (320)..(320): n includes a, c, g, or t, or contains no nucleotide
  misc_feature (401)..(401): n includes a, c, g, or t, or contains no nucleotide
  misc_feature (406)..(406): n includes a, c, g, or t, or contains no nucleotide
  misc_feature (428)..(428): n includes a, c, g, or t, or contains no nucleotide
  misc_feature (443)..(443): n includes a, c, g, or t, or contains no nucleotide
cagtgtgtcggaggttccagtatgaatggnntttnccnnntgnnnncncnnnntnnntacagngtntncttcaacatctcagattcgaagacggngncaggntggcagagcaggactccgagagagggaccagctcttggcaatcaatgggnnnnnnnnnnnnnnnnnnnnnnnnnnnnnnnnnnnnnnnnnnnnnnnnnnnnnnnnnnnnnnnnnnnnnnnnnnngtgcagcggtatggacctctctcctcttctcttnccctaatccagggctcccattgcctgtctcagctctatgtctcactggcctggctttagnaactaacaggtacctatttctgctcgtgcgtttctgctggagtgcagatggtttgtgtctgcctcccagagggcttgaatngtatnctgcaattaagggatggggatngtcagtgggtatttngactgatgagcctacttcaacccct

SEQ ID NO: 1043 - DNA, 471 bp, Homo sapiens
  misc_feature (96)..(96): n includes a, c, g, or t, or contains no nucleotide
  misc_feature (100)..(100): n includes a, c, g, or t, or contains no nucleotide
  misc_feature (145)..(160): n includes a, c, g, or t, or contains no nucleotide
  misc_feature (184)..(185): n includes a, c, g, or t, or contains no nucleotide
  misc_feature (187)..(188): n includes a, c, g, or t, or contains no nucleotide
  misc_feature (238)..(260): n includes a, c, g, or t, or contains no nucleotide
  misc_feature (420)..(420): n includes a, c, g, or t, or contains no nucleotide
ttaggaggccgcagccttccatcaccggatcagtttttcctcttaggaaagctgcaggaacctcgtgggctccagggacccaggcccacatccatncagngttcccgctggctgtgggacagacagggaggggcctgtacagaannnnnnnnnnnnnnnntaaatcacaatgatttttattaannanntctaactacgtatctgtgccacagcttgcagtgaggcaggccactcgtgnnnnnnnnnnnnnnnnnnnnnnnggcagtgggtaggatggtcacactctgcccattgccctcctggaggccccatttcctcatcataaaatgagggacttttaaataaagtgctatgccgggggataattattttgatgtgtttacctagggtttttcatacaaggggccaggttggaaaccnacagccatgtgttaatggccacgtggggtgagcagcaatccatcatgaatg

SEQ ID NO: 1044 - DNA, 534 bp, Homo sapiens
  misc_feature (73)..(73): n includes a, c, g, or t, or contains no nucleotide
  misc_feature (81)..(81): n includes a, c, g, or t, or contains no nucleotide
  misc_feature (84)..(84): n includes a, c, g, or t, or contains no nucleotide
  misc_feature (86)..(86): n includes a, c, g, or t, or contains no nucleotide
  misc_feature (105)..(105): n includes a, c, g, or t, or contains no nucleotide
  misc_feature (204)..(204): n includes a, c, g, or t, or contains no nucleotide
  misc_feature (217)..(233): n includes a, c, g, or t, or contains no nucleotide
acagattagctgatgcccttgtcacctgccctctgtgcaccctgagagctcacagtaacactgtgtgtgtcancatataantgnanctcacccccgcacgtgtgnatgactcgcagagaatattccagcaattgtgtacccctgggccagtctctttgaaccctgagggtggccaggatctggagctgcatctctaaggggccnaggctttggggannnnnnnnnnnnnnnnngactcaggaggaaagacacttaaagacacttttacatgtctagtaattcttgatgttcatcttcagcaccagtggaaacacatgaacttcgatgcaggtccagagaccatggacactcccacgaggctcagctctcaggcaccccctacacttcagttgagggaaaagctcaagtgccttaggcccgtggaccacagtcttggctgagatcaaagggatgagcaacagggacttctgccacagtgacaatggaattgtgttgtgccttacttcagaggtggtctcttctttcttgtaataa

SEQ ID NO: 1045 - DNA, 602 bp, Homo sapiens
  misc_feature (122)..(369): n includes a, c, g, or t, or contains no nucleotide
  misc_feature (429)..(429): n includes a, c, g, or t, or contains no nucleotide
  misc_feature (442)..(442): n includes a, c, g, or t, or contains no nucleotide
  misc_feature (444)..(483): n includes a, c, g, or t, or contains no nucleotide
  misc_feature (577)..(577): n includes a, c, g, or t, or contains no nucleotide
tgcccctaaaacaggaggacgggagagagatatgaagcatgagaaagagcaggaaggctggtttgaagctggaggggaccacataagaaggaatgcaggcagccttgaggtgagagaggggnnnnnnnnnnnnnnnnnnnnnnnnnnnnnnnnnnnnnnnnnnnnnnnnnnnnnnnnnnnnnnnnnnnnnnnnnnnnnnnnnnnnnnnnnnnnnnnnnnnnnnnnnnnnnnnnnnnnnnnnnnnnnnnnnnnnnnnnnnnnnnnnnnnnnnnnnnnnnnnnnnnnnnnnnnnnnnnnnnnnnnnnnnnnnnnnnnnnnnnnnnnnnnnnnnnnnnnnnnnnnnnnnnnnnnnnnnnnnnnnnnnnnnnnctgcccaagggtaacttttcttaacctaattacatttggcagtttctgcttgggttctgnatgcatttttttncnnnnnnnnnnnnnnnnnnnnnnnnnnnnnnnnnnnnnnnnggaaacctttaatataaatcatactgttttgtattcagtatccagtattgtttgtttggcctaagtcctgttttctaatgtactttctgtctantgacctggcaaacaactgaccacct

SEQ ID NO: 1046 - DNA, 612 bp, Homo sapiens
  misc_feature (241)..(241): n includes a, c, g, or t, or contains no nucleotide
  misc_feature (275)..(275): n includes a, c, g, or t, or contains no nucleotide
  misc_feature (310)..(310): n includes a, c, g, or t, or contains no nucleotide
  misc_feature (487)..(487): n includes a, c, g, or t, or contains no nucleotide
  misc_feature (493)..(493): n includes a, c, g, or t, or contains no nucleotide
  misc_feature (503)..(503): n includes a, c, g, or t, or contains no nucleotide
  misc_feature (511)..(511): n includes a, c, g, or t, or contains no nucleotide
  misc_feature (516)..(516): n includes a, c, g, or t, or contains no nucleotide
  misc_feature (520)..(520): n includes a, c, g, or t, or contains no nucleotide
  misc_feature (525)..(525): n includes a, c, g, or t, or contains no nucleotide
  misc_feature (534)..(534): n includes a, c, g, or t, or contains no nucleotide
  misc_feature (546)..(546): n includes a, c, g, or t, or contains no nucleotide
  misc_feature (550)..(551): n includes a, c, g, or t, or contains no nucleotide
  misc_feature (553)..(557): n includes a, c, g, or t, or contains no nucleotide
  misc_feature (559)..(561): n includes a, c, g, or t, or contains no nucleotide
  misc_feature (563)..(568): n includes a, c, g, or t, or contains no nucleotide
  misc_feature (571)..(576): n includes a, c, g, or t, or contains no nucleotide
  misc_feature (579)..(581): n includes a, c, g, or t, or contains no nucleotide
  misc_feature (583)..(585): n includes a, c, g, or t, or contains no nucleotide
  misc_feature (587)..(587): n includes a, c, g, or t, or contains no nucleotide
ctgtggaggctttgcaggaaactctcattcgtgcactaaggaccttaataatgaaaaaccatccaaatgaggcctctatttttacaaaactgcttctaaagttgccagatcttcgatctttaaacaacatgcactctgaggagctcttggcctttaaagttcacccttaaggcctttgtttatttaaacatgaactgatggtaactgtacattttgtgctaaaatgcatatttatatgtgnataccatatgtggagatagaaaagacctttaagncaataaaagattgtaggctatctctgtaatcatgncaatagctgttcggattgagaactcttcagccatgattagacgttgactgcatctccctgatagaccaatcagctgtgtcgcacttaaactggagaagttacactgaagtataatcacactgaatgttagactttttcatctgccaaaaccaaaaaccattttgatctccctgtggnttatcnaatataacgncacaatcnacaangtgntatgnaggacttangaaattaatccnttgnngnnnnngnnntnnnnnntgnnnnnnatnnnannncnaccacaagactatttgatctggtaa

SEQ ID NO: 1047 - DNA, 387 bp, Homo sapiens
cattgtggtgttctcttctcaaggctttgaaatctccccttgcactgagattagtcgtcagatctctccccgtctccctcccaacttatacgacctgatttccttaggacggaaccgcaggcacctgcgccgggcgtcttactcccgctgcttgttctgtcccctccctcggaccaaacagtgctcatgcttcaggaccttgtttgtcgaagatgttggtttccctttctctgttatttatataaaaataatttatcaaaaggatattttaaaaaagctagtctgtcttgaaacttgtttaccttaaaattatcagaatctcagtgtttgaaagtactgaagcacaaacatatatcatctctgtaccattctgtactaaagcacttg

SEQ ID NO: 1048 - DNA, 278 bp, Homo sapiens
  misc_feature (26)..(50): n includes a, c, g, or t, or contains no nucleotide
  misc_feature (160)..(174): n includes a, c, g, or t, or contains no nucleotide
tccgtgtctgggtcgcctggacagtnnnnnnnnnnnnnnnnnnnnnnnnncagcagtgacgttggtgcttataactatgtctcctggtaccaacagcacccaggcaaagcccccaaactcatgatttatgaggtcagtaatcggccctcaggggtttctnnnnnnnnnnnnnnntccaagtctggcaacacggcctccctgaccatctctgggctccaggctgacgacgagggtgattactactgcatctcatatacaagtagcaaccctctcgtggt

SEQ ID NO: 1049 - DNA, 412 bp, Homo sapiens
cttttggctgttgtgctaatagtgtaaataaaataagcctgccttcataaaacactaacttttaaaaggaataaacgacttctaaaattatgcctattaacatgtgtaattagtcggcagctcaaatgtttgggagtgcaagaaattcggcaccccaggatataggtcatacagggatatataaaagccatgctcattacaaaatgagcagttgatgttttatgtggcattaagacaatcaagtcctcacaactctggaatgtcttcttatactgatgctgaatttatgaatccaaattaatttccaacaggttggaatcagatttaatgtgagatcatgatagacaagaccacagaggacgtatgctctatttcttgttggccaacagcttctttctaatgttctgtgaaa

SEQ ID NO: 1050 - DNA, 466 bp, Homo sapiens
  misc_feature (27)..(27): n includes a, c, g, or t, or contains no nucleotide
  misc_feature (36)..(36): n includes a, c, g, or t, or contains no nucleotide
  misc_feature (48)..(48): n includes a, c, g, or t, or contains no nucleotide
  misc_feature (60)..(60): n includes a, c, g, or t, or contains no nucleotide
  misc_feature (74)..(97): n includes a, c, g, or t, or contains no nucleotide
  misc_feature (102)..(102): n includes a, c, g, or t, or contains no nucleotide
  misc_feature (135)..(135): n includes a, c, g, or t, or contains no nucleotide
  misc_feature (225)..(226): n includes a, c, g, or t, or contains no nucleotide
  misc_feature (228)..(228): n includes a, c, g, or t, or contains no nucleotide
  misc_feature (230)..(230): n includes a, c, g, or t, or contains no nucleotide
  misc_feature (232)..(263): n includes a, c, g, or t, or contains no nucleotide
  misc_feature (270)..(302): n includes a, c, g, or t, or contains no nucleotide
  misc_feature (384)..(384): n includes a, c, g, or t, or contains no nucleotide
  misc_feature (387)..(387): n includes a, c, g, or t, or contains no nucleotide
  misc_feature (390)..(391): n includes a, c, g, or t, or contains no nucleotide
cgcagcagcttatgccaggacagatgnccccctgcnccagcctctttntgagaatccacngaatcacatcttgnnnnnnnnnnnnnnnnnnnnnnnngaccnaacgagctcatgctgtccatgcttttcaatcangttccctggcttcaaggaggtccgtctggtacccgggcggcatgacatcgccttcgtggagtttgacaatgaggtacaggcaggggcagnncngncnnnnnnnnnnnnnnnnnnnnnnnnnnnnnnnnacgcagnnnnnnnnnnnnnnnnnnnnnnnnnnnnnnnnngtagcaccttttccccccatgcctgccccttcccctgttctggggccacccctttcccccttggctcagccccctgaaggtnaangtnncccccttgggggccttcttggagccgtgtgtgagtgagtggtcgccacacagcattgtacccagagtctgtcccc

SEQ ID NO: 1051 - DNA, 517 bp, Homo sapiens
  misc_feature (27)..(27): n includes a, c, g, or t, or contains no nucleotide
  misc_feature (32)..(57): n includes a, c, g, or t, or contains no nucleotide
  misc_feature (192)..(209): n includes a, c, g, or t, or contains no nucleotide
aactcatggggagacagcagattcttnccttnnnnnnnnnnnnnnnnnnnnnnnnnntcctacccccctgtcttcatgcagggaagttggaaatgggggctacatatgccctctcctccccgtctacaagagttgtggttttccatctgatccttccactcttgtcaggggaagaagggggcctggtatctnnnnnnnnnnnnnnnnnncctgttctatcccttctctatcccaccctgccttgataatatgttagcccataccccaaataactgtctatattagacacccccagccagtttctggctgcctgtctttgctgccatgttttttacaagaaggaaagaattcttgctatttttttttcataatttactatttatgatgtatttaagtgttttattaaggacagagttctgttaggggtgggagggaatatttgagggagggctgggtcttagggaaaggaatggggaagcaacatttttattaagtgttactatttgcctctactttg

SEQ ID NO: 1052 - DNA, 423 bp, Homo sapiens
  misc_feature (127)..(145): n includes a, c, g, or t, or contains no nucleotide
  misc_feature (319)..(376): n includes a, c, g, or t, or contains no nucleotide
gaacagccacaaagggaggatgacagtgggatgacacacagcaggcagcaacatggagagtgatccgcaatcaatctcactactcagaagtgaggagctttgctctccaaaaggagtgttagctggnnnnnnnnnnnnnnnnnnnggtgagagggcagggcttgatttccctcagccatagtccctttatgtctctgcacatttgcccacacagtctccaagacctaggatgcccacccccaatccctatccctccctgcccttcctttgcagatgcggatctccccttggtcattcaaggcactgctcaggcatcttnnnnnnnnnnnnnnnnnnnnnnnnnnnnnnnnnnnnnnnnnnnnnnnnnnnnnnnnnncacccttccccggcagagcccctgcctgtctgcctccgtggtgtcag

SEQ ID NO: 1053 - DNA, 251 bp, Homo sapiens
  misc_feature (30)..(30): n includes a, c, g, or t, or contains no nucleotide
  misc_feature (43)..(43): n includes a, c, g, or t, or contains no nucleotide
  misc_feature (55)..(55): n includes a, c, g, or t, or contains no nucleotide
  misc_feature (95)..(95): n includes a, c, g, or t, or contains no nucleotide
  misc_feature (101)..(101): n includes a, c, g, or t, or contains no nucleotide
  misc_feature (105)..(106): n includes a, c, g, or t, or contains no nucleotide
  misc_feature (117)..(124): n includes a, c, g, or t, or contains no nucleotide
  misc_feature (127)..(127): n includes a, c, g, or t, or contains no nucleotide
  misc_feature (136)..(136): n includes a, c, g, or t, or contains no nucleotide
  misc_feature (139)..(139): n includes a, c, g, or t, or contains no nucleotide
  misc_feature (141)..(142): n includes a, c, g, or t, or contains no nucleotide
  misc_feature (144)..(144): n includes a, c, g, or t, or contains no nucleotide
  misc_feature (170)..(170): n includes a, c, g, or t, or contains no nucleotide
  misc_feature (175)..(175): n includes a, c, g, or t, or contains no nucleotide
  misc_feature (191)..(191): n includes a, c, g, or t, or contains no nucleotide
  misc_feature (209)..(209): n includes a, c, g, or t, or contains no nucleotide
  misc_feature (214)..(214): n includes a, c, g, or t, or contains no nucleotide
atgtcaagcagatcatcccgatggtcactngaactgattgggnagaagccaccgntaccaccgaaaagagaacctgggagtactgtattcatggntcattngggnntccccaacgtnnnnnnnntcntccctcatnaantnncnccggaggcagcacctcaggaaaggtnctggngcgtgcggctgatcanctcaggaaaggtactggngcgtntggctgatgtgctgatgccaccatctttcttgggagg

SEQ ID NO: 1054 - DNA, 485 bp, Homo sapiens
  misc_feature (305)..(385): n includes a, c, g, or t, or contains no nucleotide
cactacgtgatgctgtataaattggattacaaaccatattcttgttcagcttgcactaatctatataaataaaatatgtactttgaaaaaaattaggctacatgagtttcaaatggactgtgatgttatagacctgctttctctttggttctgggccagtgtcagacggggacaggggtgataggcctggtgtcctaggggccatttgtgtaccttgaggccgtgttaacatggcctgggggaaagaaagctctcctgtcacttggagtctcattcctaaaccctccttcccagggagcaagtgnnnnnnnnnnnnnnnnnnnnnnnnnnnnnnnnnnnnnnnnnnnnnnnnnnnnnnnnnnnnnnnnnnnnnnnnnnnnnnnnnagatgcttactctctctgagctccctcctcctggctcccaactttattataaaatggggaaaatgattgtgcttgccctacagaattgtagtatgaatta

SEQ ID NO: 1055 - DNA, 407 bp, Homo sapiens
  misc_feature (48)..(73): n includes a, c, g, or t, or contains no nucleotide
  misc_feature (175)..(176): n includes a, c, g, or t, or contains no nucleotide
  misc_feature (212)..(231): n includes a, c, g, or t, or contains no nucleotide
agaccaaatggcaaagcaaccttctgatgtaagttctgagtgtgaccnnnnnnnnnnnnnnnnnnnnnnnnnngagaggcctccccagctcagacctggggcccctacctccctacagacagagccacaagacaggagcccagcacccatgagttgtgacaaatcaacacaaacnncaagtcctccttgccaggccttcaaccactatctcnnnnnnnnnnnnnnnnnnnnagaggatataggtgatctttcactgtgctttggatttatatttactggcttagatttgtatggccaccaccatagtcaagatacagaacaactcaaccacaaggatttctcatgatacctttttatagccacagccacctctctccctcttccttgagcattttgtcatatggtca

SEQ ID NO: 1056 - DNA, 469 bp, Homo sapiens
  misc_feature (62)..(87): n includes a, c, g, or t, or contains no nucleotide
  misc_feature (89)..(97): n includes a, c, g, or t, or contains no nucleotide
  misc_feature (99)..(103): n includes a, c, g, or t, or contains no nucleotide
  misc_feature (108)..(123): n includes a, c, g, or t, or contains no nucleotide
  misc_feature (140)..(140): n includes a, c, g, or t, or contains no nucleotide
  misc_feature (149)..(149): n includes a, c, g, or t, or contains no nucleotide
  misc_feature (214)..(214): n includes a, c, g, or t, or contains no nucleotide
acaacgctgagagaatcttttctctaatgccagagaaaaatgaacattcctattgcacaatnnnnnnnnnnnnnnnnnnnnnnnnnntnnnnnnnnngnnnnnccgannnnnnnnnnnnnnnnaggggtcctccctgcgnccacacggnccgtcgccatggtgaagctgagcaaagaggccaagcagagactacagcagctcttcaaggggagnccagtttgccattcgctggggctttatccctcttgtgatttacctgggatttaagaggggtgcagatcccggaatgcctgaaccaactgttttgagcctactttggggataaaggattatttggtcttctggatttggaggcaatcagcggacagcatggaagatgtgtgctctggctcggataagagatgggacatcattcagtcactagttggatggcacaaggctcttcacagacgcatctgtagcagagtg

SEQ ID NO: 1057 - DNA, 227 bp, Homo sapiens
  misc_feature (51)..(51): n includes a, c, g, or t, or contains no nucleotide
  misc_feature (107)..(107): n includes a, c, g, or t, or contains no nucleotide
  misc_feature (171)..(171): n includes a, c, g, or t, or contains no nucleotide
cccactagccaagagaaacagagaaagaccattccccctgcctgtccttgnggccctgtcttctgaggttctctgtctggggttggctctcttaaccctttctctgntcccagcctgcctcaccagggaaggttggaggggcctccctctggcttctgcatctgcgccagnaaacatcactgccgttggtctctcatgacttaactggcttccctctgctgctgagt

SEQ ID NO: 1058 - DNA, 448 bp, Homo sapiens
  misc_feature (365)..(407): n includes a, c, g, or t, or contains no nucleotide
cttgctacagtagacagaattggtaatagcaacttttaaaattgtcattagttctgcaatattagctgaaatgtagtacagaaaagaatgtacatttagacatttgggttcagttgcttgtagtctgtaaatttaaaacagcttaatttggtacaggttacacatatggccatttatgtaaagtccctctaagactacatactttttgtttaaaacaaaattggaatttgttttcccttcttggaagggaacattgatatttaacagagtttttagagattgtcatctcatatatataaaatggacacgtggctataaaacaccatataagagatgagtagtgcgttttattttatatgccaatnnnnnnnnnnnnnnnnnnnnnnnnnnnnnnnnnnnnnnnnnnntgtagtgaaataccttaagctgttaactaactgtaaggcgt

SEQ ID NO: 1059 - DNA, 347 bp, Homo sapiens
  misc_feature (34)..(34): n includes a, c, g, or t, or contains no nucleotide
  misc_feature (150)..(165): n includes a, c, g, or t, or contains no nucleotide
  misc_feature (176)..(176): n includes a, c, g, or t, or contains no nucleotide
  misc_feature (199)..(234): n includes a, c, g, or t, or contains no nucleotide
tgtttggctgtagcagtgcggccctggctgtgcntggaaacctggagggggctggcatcgtgctcaagtacatcatggctggttgccccttgtttctgggtaatctctgggatgtgactgaccgcgacattgaccgctacacggaagctnnnnnnnnnnnnnnnnttggagcaggnccaggggccccccttctctactnnnnnnnnnnnnnnnnnnnnnnnnnnnnnnnnnnnnatcttattggggctgcacctatagcctatggcttgcctgtctctctgcggtaaccccatggagctgtcttattgatgctagaagcctcataactgttctacctccaaggttag

SEQ ID NO: 1060 - DNA, 553 bp, Homo sapiens
cccatctgaggatgtagtcgtcactccagaaagctttggaagagattcatccctcacatgcctggctgggaatgtcagtgcatgtgacgcccctattctctcctcttccaggtccctagactgcagggagagtggcaagaatgggcctcatgtgtaccaggacctcctgcttagccttgggactacaaacagcacgctgccccctccattttctctccaatctggaatcctgacattgaacccagttgctcagggtcagcccattcttacttccctgggatcaaatcaagaagaagcatatgtcaccatgtccagcttctaccaaaaccagtgaagtgtaagaaacccagactgaacttaccgtgagcgacaaagatgatttaaaagggaagtctagagttcctagtctccctcacagcacagagaagacaaaattagcaaaaccccactacacagtctgcaagattctgaaacattgctttgaccactcttcctgagttcagtggcactcaacatgagtcaagagcatcctgcttctaccatgtggatttgg

SEQ ID NO: 1061 - DNA, 509 bp, Homo sapiens
  misc_feature (324)..(340): n includes a, c, g, or t, or contains no nucleotide
agcaaataaatctcccttaagtaggaaaactagatttcatatttgcttactttgaattaacagcaactttccacaggtaaatctgttcttgcaaagatgtgagcagaatagttaaaaataatatttttatgtttcatggttctaaatggaagccataaatgcagtaaatactatctgttgtttaactactttaatcgtcattttttacattttcaagtttattaggttaagaaaaacagggcagccttggaaggcagctactacagaaaactgcagttttgcgttaaagataaagtagtattttcagctccctgaaaaaccatnnnnnnnnnnnnnnnnntagaaattgtgaagctgcatgagtggagagtattgaatctgtggttatagtagttttctcaggtttgtttatcttgatgtttgatgcactgtgttttatagttattaaaattgagtaatattatttctatgcagtgttatgtgtcattggccttttgtgaatgtgcatg

SEQ ID NO: 1062 - DNA, 544 bp, Homo sapiens
  misc_feature (351)..(370): n includes a, c, g, or t, or contains no nucleotide
  misc_feature (479)..(479): n includes a, c, g, or t, or contains no nucleotide
  misc_feature (481)..(481): n includes a, c, g, or t, or contains no nucleotide
  misc_feature (483)..(483): n includes a, c, g, or t, or contains no nucleotide
ggtcctcagctgttctcttcatatcctattacagtctctcagattcttgtgggggcactcttagatctcccttggagacaaggttatagttatatgttgttaatctcgcagagcttccttttagtcacaatagccttcattttctgccatgccccttcataagggagaaggatgtttgtaccatgatcctccccgcataatctatggaattaggagtcctgtgtggagtcttatcaataaatatgcacattcatcaaatgtctacttaaatgtgagtattctaccagtgagaaaaaacacataattttcaaggtaatcattgttaaaccaacagcaaacttctttcttatnnnnnnnnnnnnnnnnnnnngacagtagaaaagtatcttcaaagtgctgaggaaaataagtatcaacttagaattttatgtacaatattggaggcaaaataaagacatgtttagacatacaaaaaaaanananttgaattattaaaggttatattccaaggacaaaaaagaggatctgcccaaggtgaaggtat

SEQ ID NO: 1063 - DNA, 265 bp, Homo sapiens
gatagccagataaaccactctttgtattaagaaatgtttctttcctagtggtgaggggtgggtaactgtgaaagagctttatatcttgtctattcatggtattatagctgtatattcccaggatgataagcttgattgaaatcctgtatttagtcatatattatttgcgctgcttcatttgtatcatgtgcaatctctagaccaaccctatttttaaactctggtacagcatcattttgtacatattcccagctgcagaactagt

SEQ ID NO: 1064 - DNA, 446 bp, Homo sapiens
  misc_feature (26)..(26): n includes a, c, g, or t, or contains no nucleotide
  misc_feature (28)..(28): n includes a, c, g, or t, or contains no nucleotide
  misc_feature (30)..(30): n includes a, c, g, or t, or contains no nucleotide
  misc_feature (32)..(34): n includes a, c, g, or t, or contains no nucleotide
  misc_feature (39)..(47): n includes a, c, g, or t, or contains no nucleotide
  misc_feature (51)..(55): n includes a, c, g, or t, or contains no nucleotide
  misc_feature (57)..(59): n includes a, c, g, or t, or contains no nucleotide
  misc_feature (62)..(131): n includes a, c, g, or t, or contains no nucleotide
  misc_feature (178)..(178): n includes a, c, g, or t, or contains no nucleotide
tgattgctgactactttggcagaggngntntnnncaaannnnnnnnnctgnnnnncnnnccnnnnnnnnnnnnnnnnnnnnnnnnnnnnnnnnnnnnnnnnnnnnnnnnnnnnnnnnnnnnnnnnnnnnnnggcacttaagcagcctggaggaagatgtgggcaacagtggaggaccnagagaacagacacaatgggacctgggcgggcgttacacagaaggctggctgacatgcccagggctccactctcatctaatgtcacagccctcagaactaaagcggactttctttccctgccttcttatttagtcagcttgccatccctcctcttcactagcagtgtagatcattccagatcagtgggggagggcacctcagcaacctctgagtgtggacaatagctgctttcttctctatccaagagcaccaggctgtgcttgggtcc

SEQ ID NO: 1065 - DNA, 430 bp, Homo sapiens
  misc_feature (148)..(150): n includes a, c, g, or t, or contains no nucleotide
  misc_feature (254)..(254): n includes a, c, g, or t, or contains no nucleotide
  misc_feature (346)..(363): n includes a, c, g, or t, or contains no nucleotide
ccatagttcagctaattgtagttttatatagaaatgatcctgaacactctgaacttgacgtagtcctgcggtgatattctatctgcagtatttgtacctccagaatggcagatccctcagcaggaacaaaggcatattgacggttctnnnctcagcgtatgcattaaaaaaggtacttcctgaaacttttgattcaataatgactaaacatactatgtacacaattactgtaaggctaattcacgtgccatacnccacctgaaagcctgagttatcttgctataagcttttcatggagcacttcctttccagaaactgatttgtaactcatttagagaatgtcctnnnnnnnnnnnnnnnnnnatgtggtatttaaacagagctagaatgtgatgtctgaagataatgctgcatttctgggtttcttgtg

SEQ ID NO: 1066 - DNA, 455 bp, Homo sapiens
caaaggcatcccagcctgggggccagtggggaactgagggcaaggggatatagtgatggggctcagatggactgggaggagggggagggtgatgcattaattaatggcttcgttaattaatgtcatgttgcttgtcgctttctcagtgtgtgtgtgtggtccatgcccactgctggtgccagggtgggtgtccatgtgcacccggcctggatgccagctgtgtccttcgggggcgtgcgtgtaactgtagtgtagtcaggtgctcaatggagaatataaacatatacagaaaaatatatattttaagtttaaaaaacagaaaaacagacaaaacaatccccatcaggtagctgtctaacccccagctgggtctaatccttctcattacccacccgacctggctgcccctcaccttgggctgggggactggggggccatttccttttctctgccct

SEQ ID NO: 1067 - DNA, 483 bp, Homo sapiens
  misc_feature (168)..(171): n includes a, c, g, or t, or contains no nucleotide
  misc_feature (174)..(174): n includes a, c, g, or t, or contains no nucleotide
  misc_feature (178)..(178): n includes a, c, g, or t, or contains no nucleotide
  misc_feature (180)..(185): n includes a, c, g, or t, or contains no nucleotide
  misc_feature (255)..(257): n includes a, c, g, or t, or contains no nucleotide
  misc_feature (355)..(355): n includes a, c, g, or t, or contains no nucleotide
  misc_feature (359)..(360): n includes a, c, g, or t, or contains no nucleotide
  misc_feature (362)..(362): n includes a, c, g, or t, or contains no nucleotide
agcacaaaaacagtatcaatgttgaatctgtgaatggttttccgtttactgtgatgtgctactgtaaatatacctctttaattacttctggtctctttggtgacctgtttaaatttgtgtacattattgtacatagaataaaatgttttcacatttttatgacaaaannnnaanaaanannnnnntaatagatgtaatgatcatatggtgcgtcacctgtgccaaatattcttcaatgaaattatataatgtaannntggacctcagtttttctttagaaatgggtgggagaatgaaaatgcaaatcaggaaaccacattaaagtcaaggaaataaaataatttgaccagagganaaannanatgagagagtattttaaaactaaagaaaaaattagctgccagaagcaactgaggaccttttttgaaacttgagtagcagtgtaattgagctgagtttgaaagtcctgattcagagagagac

SEQ ID NO: 1068 - DNA, 603 bp, Homo sapiens
  misc_feature (88)..(127): n includes a, c, g, or t, or contains no nucleotide
  misc_feature (160)..(178): n includes a, c, g, or t, or contains no nucleotide
  misc_feature (197)..(225): n includes a, c, g, or t, or contains no nucleotide
  misc_feature (315)..(330): n includes a, c, g, or t, or contains no nucleotide
gtgtcacagtccacttaattagtcaaattagcaatggctaaacagtatcaagtactgcagaatttatcactgaaatggataagaggannnnnnnnnnnnnnnnnnnnnnnnnnnnnnnnnnnnnnnnaagaggtatagtatacaagttaatagtatttgnnnnnnnnnnnnnnnnnnnagtgggatcacagaaatcnnnnnnnnnnnnnnnnnnnnnnnnnnnnnatcaagcctagtgtaaatttctgcatctcacacgactttagtttggccaggtatttatctgccaaaacaaggacaaatcttgttgtattnnnnnnnnnnnnnnnnctcattttctttgctgacttacctttttactgaccgttgtgaatttctgtctcaaaatgtataatatagaaatgcaagaaaaaaacaaatgtacagattgtaaagttttttgatacctaatgtaagttttctttgtgtaatatttatatgataaaagacattaggatccctacaaaaaaaaaaaaaaaaaaaaaaaaaaaaaaaaaaaaaaaaaaaaaaaaaaaaaaaaaaaaaaaaaaaaaaaaaagggatcgacaattacgactccccggg

SEQ ID NO: 1069 - DNA, 479 bp, Homo sapiens
  misc_feature (76)..(113): n includes a, c, g, or t, or contains no nucleotide
  misc_feature (279)..(279): n includes a, c, g, or t, or contains no nucleotide
  misc_feature (282)..(286): n includes a, c, g, or t, or contains no nucleotide
  misc_feature (288)..(293): n includes a, c, g, or t, or contains no nucleotide
  misc_feature (296)..(297): n includes a, c, g, or t, or contains no nucleotide
gattatgcgaaatacccaagattcatgctactgtaccacagatttgttttcacagcaataaatcttcagttctttnnnnnnnnnnnnnnnnnnnnnnnnnnnnnnnnnnnnnntttattatttgggtatttggagataatacatttgatggttttttggaaaacctttttcactccatactcagatatgcttcattgtcaaatgcatatttagattagattattgaattgtaatgtttatctgctgctttttttaaataaaatttgactgaaaatgttnaannnnnannnnnnaannacttagccaaagaagtgcagctattattccatattaataggcttgcatttcttttcctaaatcttatttaggctaaatcagttttatttttctctgattttttttaataccacagaatcacctgagtgtcaattgaaagttgtcaattaaaaggtaaccttttaatctcgtaggaggaatct

SEQ ID NO: 1070 - DNA, 344 bp, Homo sapiens
  misc_feature (126)..(126): n includes a, c, g, or t, or contains no nucleotide
cctagattctgtgacgcgtcatatatatatatctgtatatatatatatagatatagatatctgtatatagatagattttctttttttgtgtttttgggggggtggtgggtgattttttttctctcnctctgtctctctctttctcgggtttctgttttctctttttggtttttaggcgagtccggctgtgaagttaccgtcggtggcggccccggggccacctccgctgtcacctcctccaccggcgcccgctacattcaaccggcccaagccgtcggggctggccacgtcctcgtcctcgtcctcgtccttaaagtgcttctcctggccgttgcgccgggcgt

SEQ ID NO: 1071 - DNA, 553 bp, Homo sapiens
cccctggggactctgtcagaggctccatggaggcctctcaagtccaagtgcctctggaagcctctccaattacattcccaccaccctgtgccccagaaaggccccccatcagcccagtcccaggcgcccgtcaagcaggcctctgagagtgctacccttctcttgtaaccttgcagccaacacccctgcccggcccctgagctgcctcctccagcccatgctcttacaggccctgcacagagtagcactcattaattcttggttaaggaatgaatcaacgaatgaatggctatgcatggacctctgggcagggagacctgggtcttctctggctgagaggggaaggctaaggcatggctgagattcaagccaccattccaggcctctttgcccaagaaagaaacttctgtcacccttgcactctcctgtgttctgagtccctggccaatagcacagccttccatgccccgacccccaccccaagcctctccactaggcctctgccaggatctaagcccatgagcacagggactggctatcccaagacctggca

SEQ ID NO: 1072 - DNA, 451 bp, Homo sapiens
  misc_feature (31)..(31): n includes a, c, g, or t, or contains no nucleotide
  misc_feature (86)..(86): n includes a, c, g, or t, or contains no nucleotide
  misc_feature (91)..(91): n includes a, c, g, or t, or contains no nucleotide
  misc_feature (109)..(109): n includes a, c, g, or t, or contains no nucleotide
  misc_feature (112)..(113): n includes a, c, g, or t, or contains no nucleotide
  misc_feature (179)..(179): n includes a, c, g, or t, or contains no nucleotide
  misc_feature (242)..(243): n includes a, c, g, or t, or contains no nucleotide
  misc_feature (250)..(250): n includes a, c, g, or t, or contains no nucleotide
  misc_feature (258)..(258): n includes a, c, g, or t, or contains no nucleotide
  misc_feature (260)..(260): n includes a, c, g, or t, or contains no nucleotide
  misc_feature (262)..(263): n includes a, c, g, or t, or contains no nucleotide
  misc_feature (266)..(267): n includes a, c, g, or t, or contains no nucleotide
  misc_feature (272)..(272): n includes a, c, g, or t, or contains no nucleotide
  misc_feature (281)..(282): n includes a, c, g, or t, or contains no nucleotide
  misc_feature (285)..(285): n includes a, c, g, or t, or contains no nucleotide
  misc_feature (288)..(291): n includes a, c, g, or t, or contains no nucleotide
  misc_feature (293)..(332): n includes a, c, g, or t, or contains no nucleotide
  misc_feature (374)..(374): n includes a, c, g, or t, or contains no nucleotide
acccacaggaaagagtgtggcagcaactgcntggctgacctttctatcttctctaggctcaggtactgctcctccatgcccatggntgggncgtggggagaagaagctntcnnacgccttcccactccctctggtttataggacttcactccctagccaacaggagaggaggcctcctnggggtttccccagggcagtaggtcaaacgacctcatcacagtcttccttcctcttcaagcgtnncatgttnaacacagntntnnccnntcccntgtgatttnnganggnnnncnnnnnnnnnnnnnnnnnnnnnnnnnnnnnnnnnnnnnnnnctatgcttggtctgactgagcctaaagttgagaaaatgggtngccaaggccagtgccagtgtcttggggcccctttggctctccctcactctctgaggctccagctggtcctgggacat

SEQ ID NO: 1073 - DNA, 502 bp, Homo sapiens
  misc_feature (59)..(60): n includes a, c, g, or t, or contains no nucleotide
  misc_feature (82)..(82): n includes a, c, g, or t, or contains no nucleotide
  misc_feature (107)..(107): n includes a, c, g, or t, or contains no nucleotide
  misc_feature (118)..(119): n includes a, c, g, or t, or contains no nucleotide
  misc_feature (127)..(132): n includes a, c, g, or t, or contains no nucleotide
  misc_feature (202)..(202): n includes a, c, g, or t, or contains no nucleotide
  misc_feature (214)..(214): n includes a, c, g, or t, or contains no nucleotide
  misc_feature (229)..(229): n includes a, c, g, or t, or contains no nucleotide
  misc_feature (265)..(265): n includes a, c, g, or t, or contains no nucleotide
  misc_feature (268)..(268): n includes a, c, g, or t, or contains no nucleotide
  misc_feature (274)..(274): n includes a, c, g, or t, or contains no nucleotide
  misc_feature (316)..(317): n includes a, c, g, or t, or contains no nucleotide
  misc_feature (404)..(404): n includes a, c, g, or t, or contains no nucleotide
  misc_feature (406)..(407): n includes a, c, g, or t, or contains no nucleotide
  misc_feature (412)..(414): n includes a, c, g, or t, or contains no nucleotide
  misc_feature (417)..(418): n includes a, c, g, or t, or contains no nucleotide
  misc_feature (445)..(445): n includes a, c, g, or t, or contains no nucleotide
agaaggacagcattacccagaacgccatggaggaccagagcgccacggccgggactccnncgatggctgggggggctatggntctgacaagaggatgagcgagggcngggggctgccnnctcccccnnnnnncagacgtgactggggggaccatggccgaagagaggatgaccggtcatggcagggcacggccgacgggggnatgatggacagngatcacaagaggtgncaaggtggcgagagaagcatgtccggtcactccggnccntggccnacatgatgaaccgaggaggaatgtcagggcgcggcagctttnnccccaggcggggcctcccggggccaccccatcccacacggtggcatgcagggcgggtttggaggccagagccgggggagcaggcccnanngatgnnngcnncactcgccgctactgagtacttggaancctgtgtcctgtctcgtggcaacaaggctatgttctgttaggagttaccttaaactg

SEQ ID NO: 1074 - DNA, 539 bp, Homo sapiens
  misc_feature (39)..(39): n includes a, c, g, or t, or contains no nucleotide
  misc_feature (41)..(41): n includes a, c, g, or t, or contains no nucleotide
  misc_feature (53)..(53): n includes a, c, g, or t, or contains no nucleotide
  misc_feature (73)..(74): n includes a, c, g, or t, or contains no nucleotide
  misc_feature (76)..(77): n includes a, c, g, or t, or contains no nucleotide
  misc_feature (79)..(79): n includes a, c, g, or t, or contains no nucleotide
  misc_feature (88)..(89): n includes a, c, g, or t, or contains no nucleotide
  misc_feature (91)..(91): n includes a, c, g, or t, or contains no nucleotide
  misc_feature (93)..(95): n includes a, c, g, or t, or contains no nucleotide
  misc_feature (97)..(101): n includes a, c, g, or t, or contains no nucleotide
  misc_feature (104)..(105): n includes a, c, g, or t, or contains no nucleotide
  misc_feature (108)..(187): n includes a, c, g, or t, or contains no nucleotide
  misc_feature (386)..(409): n includes a, c, g, or t, or contains no nucleotide
  misc_feature (435)..(436): n includes a, c, g, or t, or contains no nucleotide
tatagcacaaaatcagccaaagcagaatttttaaaaatngncttttttaggantctttttctccccctcccanntnngncttaccttnngngnnnannnnnatnngannnnnnnnnnnnnnnnnnnnnnnnnnnnnnnnnnnnnnnnnnnnnnnnnnnnnnnnnnnnnnnnnnnnnnnnnnnnnnnncctattaccagtgttccctggggactcctcttaatgtttccaaatgggaaggacagttgatttccaacatgaggttttttgttttttatccagaaatattttcagcaaaactttccaactgagtggagtctgattaaggatttatttgaaaatggtgggattcattggcccataggtacattggaaaatgtatatctcnnnnnnnnnnnnnnnnnnnnnnnnaggctgtttatatgttcacagttacnnttttttttttttttaaataaaagtcatttaatgtagaatacttttaatttcactttctgtattttaattttgttgaagggctgattgggatttccatgttctt

SEQ ID NO: 1075 - DNA, 113 bp, Homo sapiens
ttgttgccatgtgcaccttggggttttgtaatgacagtgctaaaaaaaaagcattttttttttatgatttgtctctgtcacccttgtccttgagtgctcttgctattaacgtt

SEQ ID NO: 1076 - DNA, 481 bp, Homo sapiens
gtaatcacttactcagtgataaatgaatctctgaaaacaaatgcttttacattttaatttaaaaagaaaacaggtgcaggccacagaaaagttttaaagtatgccttcttaccagcaatagttcattttaaaaatcatgccagatttttgccaagatcagtgtttcctcaacatgaagatagaaatagatttgtatagtgtgctcttgtacctctacatagattattatataattttgagcagttacacatttatctaaaggaaataaatcaactgtgaataaatgcatgtttaccaaaatggctgtttacagtgcatttagttctgatatttataaagatgacatttcacagaataactttaaaatagtttgaaattctatatagtttagacatcgatcacatctggagacaaaataaaatgtgcaatattttttatgtaggcgagctaacacagtgtacctaattgcagaattatctga

SEQ ID NO: 1077 - DNA, 592 bp, Homo sapiens
caatccttgactgatgaatttgaagttctactagaaccatgaaaacttgttcctttcgtgcatctccaaggagcttgctggctctgcagccacgcttgggccctcgcaccagcctgcaatgaatcagatgtctgtcacagaatctgggcctctctgaagttttctggagagctgttgggactcatccagtgctccacaacgtggacttgcctcctggtgtgttttaaaggatcctccaggagctctgcttagccaatcatcatgatggatttttttttttttttttgagacggagtctcaactcttgtcgcccaggctggaggttaatggcatgatctcggctcactgcaacctctgcctcccgggttcaagcgattctcctgcctgagccttccgagtagctgggatcgcaggcgcctgccaccacgcctagctaatttctgtatttttagtagagatggggtttcaccacattggccaggctggtcttgacctcctgacctaggtgatccactgcctccatgatagattttgccccagctggactctgcagctccacgtggaatccaggtgcctgcctccagtctgggaa

SEQ ID NO: 1078 - DNA, 358 bp, Homo sapiens
  misc_feature (29)..(30): n includes a, c, g, or t, or contains no nucleotide
  misc_feature (34)..(34): n includes a, c, g, or t, or contains no nucleotide
  misc_feature (40)..(40): n includes a, c, g, or t, or contains no nucleotide
  misc_feature (42)..(42): n includes a, c, g, or t, or contains no nucleotide
  misc_feature (58)..(81): n includes a, c, g, or t, or contains no nucleotide
atagcaaaatggaccagggtaacaagaanngggnccttangnccgttgggactttgannnnnnnnnnnnnnnnnnnnnnnntatgaacaacaaagaagctttgcccaaggctgcattccagtatggtatcaaaatgtctgaagggcggaaaaccaggcgcttcaaggaaaccaatgacaaagcagagcttgatcgccagtggaagaagattagtgcaatcattgagaagaggaagaagatggaagctgatggggttgaagtcaaaagaccaaaatactaatcactagttacaaccagagatgctccacaaggatatgctccccactgttttctttctacaatttccaaaggttgcaag

SEQ ID NO: 1079 - DNA, 438 bp, Homo sapiens
  misc_feature (26)..(44): n includes a, c, g, or t, or contains no nucleotide
ttgccctggtgagacccataccattnnnnnnnnnnnnnnnnnnncttaaagtccagtgttggctgttagtgtatttgatattctgcctgtctcctcatggttgaaatatgtctgaagaatagcagcataatctcttggctgtttatacttttttaaactttcctgtgttgtaaatattgtatacttttggtgattccagctatgtaacctctatgctctgtaaggtgattatttgtatatagcaacatggcccagtgatattatatagtttcccaatggagaggttattgagtaacctttgcattagtttaaacactaccagaagaatgctgagccaactataaacactcaattttgtatgttttccaaattgtacttattactgcttttgatactgtattacgtgccaatagtttcccaatcacatagcaggcaaga

SEQ ID NO: 1080 - DNA, 324 bp, Homo sapiens
  misc_feature (57)..(57): n includes a, c, g, or t, or contains no nucleotide
  misc_feature (83)..(83): n includes a, c, g, or t, or contains no nucleotide
  misc_feature (283)..(283): n includes a, c, g, or t, or contains no nucleotide
agctggagccacagccctggtcttcctctccttctgtgtcatcttcattgtagtgangtcctgcaggaagaaatcggcaaggncagcagcggacgtgggagacataggcatgaaggatgcaaacaccatcaggggctcagcctctcagggtaacctgactgagtcctgggcagatgataacccccgacaccatggcctggctgcccactcctcaggggaggaaagagagatccagtatgcacccctcagctttcataagggggagcctcaggacctatcaggncaagaagccaccaacaatgagtactcagagatcaagatccc

SEQ ID NO: 1081 - DNA, 385 bp, Homo sapiens
  misc_feature (44)..(58): n includes a, c, g, or t, or contains no nucleotide
  misc_feature (83)..(85): n includes a, c, g, or t, or contains no nucleotide
  misc_feature (87)..(87): n includes a, c, g, or t, or contains no nucleotide
  misc_feature (89)..(93): n includes a, c, g, or t, or contains no nucleotide
  misc_feature (95)..(95): n includes a, c, g, or t, or contains no nucleotide
  misc_feature (97)..(102): n includes a, c, g, or t, or contains no nucleotide
accacatttgactgtagcattgcatctgtgtcctgttgtcattnnnnnnnnnnnnnnngtattaaacttgctgcatatcttgnnnanannnnnanannnnnncatgtcttgtaaagagaggggatgtgcatttgtgtgtgatgttggatagtcatccacgctcagtttggaccattggaggaacttagtgtcacgcacaaatggggctattcctacgcttagaatagggcttgtctgcccactttagaagagtccaggttggtgagcatttagagggaagcagggcagaactctgaacgacaatacgtctctctgagcagagacccctttgttcttgttatccacccatatggacttggaatcaatcttgccaaatatttggaga

SEQ ID NO: 1082 - DNA, 470 bp, Homo sapiens
  misc_feature (110)..(110): n includes a, c, g, or t, or contains no nucleotide
  misc_feature (116)..(116): n includes a, c, g, or t, or contains no nucleotide
  misc_feature (127)..(181): n includes a, c, g, or t, or contains no nucleotide
  misc_feature (379)..(379): n includes a, c, g, or t, or contains no nucleotide
tgggtttacccttctgagcagatgttctggaatgcaatgttaaagaaagggtggaagtggaaggatgaggatatcagtcagaaggatatgtataatatcattagaattcncaatcngaataacgagnnnnnnnnnnnnnnnnnnnnnnnnnnnnnnnnnnnnnnnnnnnnnnnnnnnnnnntgtggtccatcattgatccggtttggagggaaagcaaaagagtattcaccaagggcacgaattcgttcctggatggggtatgagttgccttttgataggcacgattggatcataaaccgttgcgggacagaagttagatatgtgattgattattatgatggtggtgaagtcaacaaggactaccagttcaccatcctngacgtccgtcctgccttagattcactttcggcagtatgggacagaatgaaagtcgcttggtggcgttggacctcgtaaagcactgtttcag

SEQ ID NO: 1083 - DNA, 505 bp, Homo sapiens
  misc_feature (26)..(44): n includes a, c, g, or t, or contains no nucleotide
  misc_feature (176)..(191): n includes a, c, g, or t, or contains no nucleotide
  misc_feature (279)..(349): n includes a, c, g, or t, or contains no nucleotide
catacgcgagcctcatgaaagaaagnnnnnnnnnnnnnnnnnnnctctgagtacggtgcatagtcagaagatgaagaaggccaaggagcagcggcacctgcacaataaagagcacttcagagccaagcagaaggaggaggaggagaagctgaagcggcagaaggacctcaggaagnnnnnnnnnnnnnnnncaggggcagaaggaaagaagaaaccagaagtccagtttgaagggggctgagggccaattgcagtgagcctttggactggagggactgnnnnnnnnnnnnnnnnnnnnnnnnnnnnnnnnnnnnnnnnnnnnnnnnnnnnnnnnnnnnnnnnnnnnnnnaaagagctcaagagatgtctctactcaaactgtgcctgcaggaggaggaacagagaagcctgggctgctgggactgggttcattctcatgacttggggctgtcgagatttaaagtgatgtaagctgtggttatgtggattctcttactttcctctg

SEQ ID NO: 1084 - DNA, 409 bp, Homo sapiens
  misc_feature (26)..(26): n includes a, c, g, or t, or contains no nucleotide
  misc_feature (35)..(35): n includes a, c, g, or t, or contains no nucleotide
  misc_feature (60)..(60): n includes a, c, g, or t, or contains no nucleotide
  misc_feature (63)..(77): n includes a, c, g, or t, or contains no nucleotide
  misc_feature (147)..(147): n includes a, c, g, or t, or contains no nucleotide
  misc_feature (167)..(167): n includes a, c, g, or t, or contains no nucleotide
  misc_feature (216)..(216): n includes a, c, g, or t, or contains no nucleotide
  misc_feature (252)..(252): n includes a, c, g, or t, or contains no nucleotide
  misc_feature (284)..(284): n includes a, c, g, or t, or contains no nucleotide
tggagacagactgacgcgagcagccnaaggtgttnggagcagctcacagggcagaccccntgnnnnnnnnnnnnnnngatacactgtcagatcctttggcatccggagaaatgaaaagattgctgtccactgcacagttcgaggggnccaaggcagaagaaatcttnggagaagggtctaaaggtgcgggagtatgagttaagaaaaaacaacttnctcagatactggaaactttggttttgggatccaggnaacacatcgatctgggtatcaaatatgacccnaagcattggtatctacggcctggacttctatgtggtgctgggtaggccaggtttcagcatcgcagacaagaagcgcaggacaggctgcattggggccaaacacagaatcagcaaagaggaggcca

SEQ ID NO: 1085 - DNA, 495 bp, Homo sapiens
ccagggaactccaaattcagctaatacccaaggaaattcaacaccaaatcctcaggtccctgattaccctccaaactatattttattccttaataacttaccagaagagactaatgagatgatgttatccatgctgtttaatcagttccctggcttcaaggaagtacgtctggtaccagggaggcatgacattgcttttgttgaatttgaaaatgatgggcaggctggagctgccagggatgctttacagggatttaagatcacaccgtcccatgctatgaagatcacctatgccaagaaataacatttgggatagtcgtctttaaaagacttggtgttatttacagtgtttgttttgataacatttggctgggtcattttaatagttagagatgaggaggagtaaaagtgaaatttttgtgaaggacttaaattatccagtgtttctttagccttggtgaactatgaaatacgaaggccttaattttgtacaat

SEQ ID NO: 1086 - DNA, 536 bp, Homo sapiens
  misc_feature (27)..(27): n includes a, c, g, or t, or contains no nucleotide
  misc_feature (31)..(45): n includes a, c, g, or t, or contains no nucleotide
  misc_feature (115)..(116): n includes a, c, g, or t, or contains no nucleotide
  misc_feature (170)..(170): n includes a, c, g, or t, or contains no nucleotide
  misc_feature (255)..(305): n includes a, c, g, or t, or contains no nucleotide
  misc_feature (319)..(319): n includes a, c, g, or t, or contains no nucleotide
  misc_feature (322)..(322): n includes a, c, g, or t, or contains no nucleotide
agttcttgtgcaaagacctgtgggtgncggnnnnnnnnnnnnnnntggacagcctgcgcaccaatcaccaggggacctacgtcctgcaagacaacagcttccccctcctcctccnnatggcctctggcctgcagtatctggaggaagcacccaagttcctggccttcacntgcggcctcctgcgcggcgccctctataccctgggcattgagagcgtggtcaccgcctccgtggcagccctgcccgtctgtaagnnnnnnnnnnnnnnnnnnnnnnnnnnnnnnnnnnnnnnnnnnnnnnnnnnncactgctgcccctngcntcaccggcctcaggagacggtggggccgctgcatttcggggtggtcttgggaatcccaggccctaggggtcacatttgctcaggaagtgggtatcaaattgaggtgggggtgtcagaggaggcaaaggggtcccagctgcggtcaggactgtggtgggattcccgcctcggcagcgtcactgcccagtagctgctcaataaaggctgtgtgtgt

SEQ ID NO: 1087 - DNA, 580 bp, Homo sapiens
tttggcctatgaaattgttaaacctggaacatgacattgttaatcatataataatgattcttaaatgctgtatggtttattatttaaatgggtaaagccatttacataatatagaaagatatgcatatatctagaaggtatgtggcatttatttggataaaattctcaattcagagaaatcatctgatgtttctatagtcactttgccagctcaaaagaaaacaataccctatgtagttgtggaagtttatgctaatattgtgtaactgatattaaacctaaatgttctgcctaccctgttggtataaagatattttgagcagactgtaaacaagaaaaaaaaaatcatgcattcttagcaaaattgcctagtatgttaatttgctcaaaatacaatgtttgattttatgcactttgtcgctattaacatcctttttttcatgtagatttcaataattgagtaattttagaagcattattttaggaatatatagttgtcacagtaaatatcttgttttttctatgtacattgtacaaatttttcattccttttgctctttgtggttggatctaacactaa

SEQ ID NO: 1088 - DNA, 521 bp, Homo sapiens
  misc_feature (100)..(154): n includes a, c, g, or t, or contains no nucleotide
  misc_feature (212)..(244): n includes a, c, g, or t, or contains no nucleotide
  misc_feature (262)..(276): n includes a, c, g, or t, or contains no nucleotide
  misc_feature (285)..(285): n includes a, c, g, or t, or contains no nucleotide
  misc_feature (301)..(301): n includes a, c, g, or t, or contains no nucleotide
  misc_feature (456)..(456): n includes a, c, g, or t, or contains no nucleotide
  misc_feature (474)..(488): n includes a, c, g, or t, or contains no nucleotide
cagtcagtgctggtcaaaagtaatgaagaaggaatccagcgagtcctcacctctgattatgctttcctaatggagtcaacaaccatcgagtttgttaccnnnnnnnnnnnnnnnnnnnnnnnnnnnnnnnnnnnnnnnnnnnnnnnnnnnnnnngcgttggcactcccatgggttctccatatcgagacaaaattaccatagcaattcttcnnnnnnnnnnnnnnnnnnnnnnnnnnnnnnnnnaggagaaatggtggaggnnnnnnnnnnnnnnngaagagganagcaaagaggccagtnccctgggggttcagaatattggtggcatcttcattgttctggcagccggcttggtgctttcagtttttgtggcagtgggagaatttttatacaaatccaaaaaaaacgctcaattggaaaagaggtccttctgtagtgccatggtagaagaattnaggatgtccctgaagtgnnnnnnnnnnnnnnnacataagccacaggccccagttattgtgaaaac

SEQ ID NO: 1089 - DNA, 497 bp, Homo sapiens
  misc_feature (205)..(219): n includes a, c, g, or t, or contains no nucleotide
  misc_feature (368)..(445): n includes a, c, g, or t, or contains no nucleotide
ctggtatgagcaacatcggaaatatggagcattaccggatcagggaatagccaaggcagcaccagaggaattcagaaaagcagctcagcaacaggaagaacaagaagaaaaggaggaagaggatgatgaacaaacactccacagagcccgggagtgggatgactggaaggacacccatcctaggggctatgggaaccgacagaannnnnnnnnnnnnnnccacaacaccacaggactgcagggtgcacaactcccctgccaaggaaaaccatgcagtcctcccctccctggtctcctgcttcagctctgtacaacgagggcaaagatgctaaatcttgctttgcattcagtaaagtgtcaagtgattnnnnnnnnnnnnnnnnnnnnnnnnnnnnnnnnnnnnnnnnnnnnnnnnnnnnnnnnnnnnnnnnnnnnnnnnnnnnnntcttaagtggaaggaaaagagtgctgagaaatggctctgtataatctatggc

SEQ ID NO: 1090 - DNA, 439 bp, Homo sapiens
  misc_feature (101)..(115): n includes a, c, g, or t, or contains no nucleotide
gatatccatacacttttgactggcattctattttagccgtaagactatgattcacagcaagcctgtttttcctcttgcttggggtggcagcagaaagcatnnnnnnnnnnnnnnnctccaagggtaggggcaaaggggctggggtttctcctccccagtacagctttctctggctgtgcacactgctccctgtgagcagacagcaagtctcccctcactccccactgccattcatccagcgctgtgcagtagcccagctgcgtgtctgccgggaggggctgccaagtgccctgcctactggctgcttcccgaatccctgccattccacgcacaaacacatccacacactctctctgcctagttcacacactgagccactcgcacatgcgagcacattccttccttccttctcactctctcggcccttgacttctacaag

SEQ ID NO: 1091 - DNA, 304 bp, Homo sapiens
  misc_feature (158)..(172): n includes a, c, g, or t, or contains no nucleotide
tgatttttcccagcaaatgaggcaggcaattctaagatcttccacaaaacatctagccatctaaaatggagagatgaatcattctacctatacaaacaagctagctattagagggtggttggggtatgctactcataagatttcagggtgtcttccannnnnnnnnnnnnnnttctcagtacgaaaaacctgaaatcacatgcctatgtaaggaaagtgctattcacccagtaaacccaaaaaagcaaatggataatgctggccattttgcctttctgacatttccttgggaatctgcaagaac

SEQ ID NO: 1092 - DNA, 482 bp, Homo sapiens
  misc_feature (108)..(108): n includes a, c, g, or t, or contains no nucleotide
  misc_feature (124)..(124): n includes a, c, g, or t, or contains no nucleotide
  misc_feature (166)..(166): n includes a, c, g, or t, or contains no nucleotide
  misc_feature (176)..(176): n includes a, c, g, or t, or contains no nucleotide
  misc_feature (183)..(183): n includes a, c, g, or t, or contains no nucleotide
  misc_feature (262)..(262): n includes a, c, g, or t, or contains no nucleotide
  misc_feature (284)..(306): n includes a, c, g, or t, or contains no nucleotide
tcctgaatggagtggctccatcctccgccactaatgctgagtttgcccagaccttcggtgctgccctgggccgccgagccttcatccctctccccagcgctgtggtgncaagctgtctttgggncgacagcgtgccatcatgctgctggagggccagaaggtgatncccacggcgnaacactnggccactggctaccagtattccttcccagagctaggggctgccttaaaggaaattgtagcctaagtaggtcatggcaanggcctgaggcctgttcctcacnnnnnnnnnnnnnnnnnnnnnnnaataggctcagctcctctagagagctgaagccatctggttcttagattcctctcccagtcctctttcccattgttctgttgctccaccttattgtctcaaggccgtaatctcatcaggttgggacattaatcttttcaactccttgtaagatttcccggtttggtttctctacatg

SEQ ID NO: 1093 - DNA, 452 bp, Homo sapiens
ttctccccatgtgaaagtctgaaatatggcctcgtgggaagggaaagacctgaccgtcccccagcccgacacccgtaaagggtctgtgctgaggaggattagtaaaagaggaaggaatgcctcttgcagttgagacaagaggaaggcatctgtctcctgcctgtccctgggcaatggaatgtctcggtataaaacccgattgtatgctccatctactgagatagggaaaaaccgccttagggctggaggtgggacctgcgggcagcaatactgctttgtaaagcattgagatgtttatgtgtatgcatatccaaaagcacagcacttaatcctttacattgtctatgatgccaagacctttgttcacgtgtttgtctgctgaccctctccccacaattgtcttgtgaccctgacacatccccctctttgagaaacacccacagatgatcaat

SEQ ID NO: 1094 - DNA, 353 bp, Homo sapiens
  misc_feature (26)..(26): n includes a, c, g, or t, or contains no nucleotide
  misc_feature (148)..(148): n includes a, c, g, or t, or contains no nucleotide
  misc_feature (152)..(152): n includes a, c, g, or t, or contains no nucleotide
  misc_feature (170)..(170): n includes a, c, g, or t, or contains no nucleotide
  misc_feature (178)..(178): n includes a, c, g, or t, or contains no nucleotide
  misc_feature (189)..(189): n includes a, c, g, or t, or contains no nucleotide
  misc_feature (192)..(192): n includes a, c, g, or t, or contains no nucleotide
  misc_feature (194)..(194): n includes a, c, g, or t, or contains no nucleotide
gttacgcgcacatgaacggctggagnaacggcagctacagcatgatgcaggaccagctgggctacccgcagcacccgggcctcaatgcgcacggcgcagcgcagatgcagcccatgcaccgctacgacgtgagcgccctgcagtacanctcnatgaccagctcgcagacntacatgancggctcgcccnacntncagcatgtcctactcgcagcagggcacccctggcatggctcttggctccatgggttcggtggtcaagtccgaggccagctccagcccccctgtggttacctcttcctcccactccagggcgccctgccaggccggggacctccgggacatgatcagcat

SEQ ID NO: 1095 - DNA, 308 bp, Homo sapiens
  misc_feature (170)..(204): n includes a, c, g, or t, or contains no nucleotide
  misc_feature (242)..(242): n includes a, c, g, or t, or contains no nucleotide
  misc_feature (283)..(283): n includes a, c, g, or t, or contains no nucleotide
cactgtacgagtgaggcctgtgagagctgtgtcctgcaccgctcatgctcgcccggctttggggtcaagcagattgctacaggggtttctgataccatctgcgagccctgcccagtcggcttcttctccaatgtgtcatctgctttcgaaaaatgtcacccttggacaannnnnnnnnnnnnnnnnnnnnnnnnnnnnnnnnnnggcacaaacaagactgatgttgtctgtggtccccaggntcggctgagagccctggtggtgatccccatcatcttcgggntcctgtttgccatcctcttggtgct

SEQ ID NO: 1096 - DNA, 405 bp, Homo sapiens
  misc_feature (26)..(45): n includes a, c, g, or t, or contains no nucleotide
  misc_feature (47)..(50): n includes a, c, g, or t, or contains no nucleotide
  misc_feature (52)..(56): n includes a, c, g, or t, or contains no nucleotide
  misc_feature (59)..(62): n includes a, c, g, or t, or contains no nucleotide
  misc_feature (274)..(338): n includes a, c, g, or t, or contains no nucleotide
tgccttctcttttctctcccccggtnnnnnnnnnnnnnnnnnnnnannnngnnnnnctnnnncttgtccaagtacatcgacaagacgatccgggtaaagttccagggaggccgcgaagccagtggaatcctgaagggcttcgacccactcctcaaccttgtgctggacggcaccattgagtacatgcgagaccctgacgaccagtacaagctcacggaggacacccggcagctgggcctcgtggtgtgccggggcacgtccgtggtgctaatcnnnnnnnnnnnnnnnnnnnnnnnnnnnnnnnnnnnnnnnnnnnnnnnnnnnnnnnnnnnnnnnnnccgggggcgcggggggtgcagggcaggcccgagcagctcggtttcccgcggacttggctgctgctcc

SEQ ID NO: 1097 - DNA, 520 bp, Homo sapiens
  misc_feature (449)..(463): n includes a, c, g, or t, or contains no nucleotide
ttctaaggggacctacagacagacatacatagacatttcaaaattaatagcttttgattagtataatatttcttaatttggataataaaaattgtagctttttattaagccaggaaacatgaagcataatttgtttaaaattctctttggtcattgagggaccaaaaaaggacgtaaaatttacagtcaatctatgagggtttttttccctccataagtttaactttaaaactgtatttaaggaatcaaatcttacaaaatcctggaagattttggtaatgatgttgataatttcagggaaattaatcaagtacctatattgatttaaaagtgtattttattcagtagtttgaggatcttgccgtggaagatactagcccagcctagcagaaaagtgcaatatgtatagcatactttggcattttaaacatgataagtccataaccatnnnnnnnnnnnnnnnaaactacatgaagttatttataattaattcacagctaatcaggcattttggaaagcc

SEQ ID NO: 1098 - DNA, 435 bp, Homo sapiens
  misc_feature (31)..(31): n includes a, c, g, or t, or contains no nucleotide
cttcattggataacttgaaggctttgatttnctttaaaaatttaaattttagtgtgtatattactttgacagttccctcatctttgagatgcactgatcactgtgcttgaaaaagacaatactgaagattgtactatgaagtttattgaataattttcataaattatttatccaaatgagagatttttagatttttgtattctgcttagttttaaaaaaaaaaaatagtagtttaaaagagaggctagtaagtttgatgctattcttgccaaacaaactcagccaaaatctttaaagtaacaagagggaaaaggatgactaatcgttctgcttctgagtacattttccaaaacgttggaaagaaacttctgaattgaaatcttgaatgtattgaatctgtcaaggtacacagcggtgcctttgtaaatgttcatt

SEQ ID NO: 1099 - DNA, 135 bp, Homo sapiens
ctcaacttcaaaagtaatctacctctgaaaaatttgtagtttaatatttgtttggtgaatttgtgccactttaatccttccactatcattcccattttgttacatttctgttatggggactttatgttgaaatat

SEQ ID NO: 1100 - DNA, 267 bp, Homo sapiens
  misc_feature (81)..(81): n includes a, c, g, or t, or contains no nucleotide
  misc_feature (109)..(109): n includes a, c, g, or t, or contains no nucleotide
  misc_feature (159)..(159): n includes a, c, g, or t, or contains no nucleotide
agtggtgtctcaagtcaaaatttcaggtgcacccaccctatccccaagtcttctcggcttactgctgcctgcctttggcantccttgtctacttggaattctgaatgtnttgtgacagctgctgttcccatcccagctcagaagacacccttcaacccngggatgaccacaattccttccaatttctgcggctccatcctaagccaaataaattatactttaacaaactattcaactgatttacaacacacatgatgactgaggcat

SEQ ID NO: 1101 - DNA, 496 bp, Homo sapiens
  misc_feature (93)..(93): n includes a, c, g, or t, or contains no nucleotide
  misc_feature (95)..(96): n includes a, c, g, or t, or contains no nucleotide
  misc_feature (221)..(222): n includes a, c, g, or t, or contains no nucleotide
  misc_feature (224)..(224): n includes a, c, g, or t, or contains no nucleotide
  misc_feature (235)..(235): n includes a, c, g, or t, or contains no nucleotide
  misc_feature (256)..(256): n includes a, c, g, or t, or contains no nucleotide
  misc_feature (395)..(395): n includes a, c, g, or t, or contains no nucleotide
  misc_feature (436)..(436): n includes a, c, g, or t, or contains no nucleotide
acatcctcagtacaggctgtgcacccccagggaagaacatctactataagagtgacttgaccaaggacgtcacaacatcagtgctgatagtgnannacaaggcccacatggtgaccctggactatacggtgcaggtgccgggggctggccaggatggctctcctggcttgagtaagttccggctctcctactacccacactgtctggcatccttcacgganntnctccaagcagncttcggaggtaagtgccagcncagcgtcctgggcgacttcaagccttacaagccaggccaaacctacattccctgctacttcatccacgtgctcaagaggacagactgagtgtggcctcagctcccacaagcctctgcccaggcactgctaggctctgtntggaagatggggaccagcagccccacaccagggccagcctntagagcagactacagctggggtgcagggatgtgggttccacagacggaagggtaaacaat

SEQ ID NO: 1102 - DNA, 135 bp, Homo sapiens
  misc_feature (58)..(60): n includes a, c, g, or t, or contains no nucleotide
agagtctaacataggcttagctacagtgaagttttgcattgcttttgaagacaagaannnaagtgctagaataaataagattacagagaaaattttttgttaaaaccaagtgatttccagctgatgtatctaata

SEQ ID NO: 1103 - DNA, 591 bp, Homo sapiens
ggcaaaggctccattccatactcctcctgaggaacccaatgaatgtgacttcaagaatatggatagtttaccttctggtaaaatacatcgaaaagtgaaaataatattaggacgaaatagaaaagaaaatctggaaccaaatgctgaatttgataaaagaactgaatttattacacaagaagaaaacagaatttgtagttcaccggtacagtctttactagacttgtttcagactagtgaagagaaatcagaatttttgggtttcacaagctacacagaaaagagtggtatatgcaatgttttagatatttgggaagaggaaaattcagataatctgttaacagcgtttttctcgtccccttcaacttctacatttactggcttttagaatttaaaaaatgcatacttttcagaagtgataaggatcatattcttgaaatttttataaatatgtatggaaattcttaggatttttttaccagctttgtttacagacccaaatgtaaatattaaaaataaatatttgcaattttctacagaattgaatacctgttaaagaaaaattacagaataaacttgtgactggtcttg

SEQ ID NO: 1104 - DNA, 266 bp, Homo sapiens
  misc_feature (43)..(59): n includes a, c, g, or t, or contains no nucleotide
tcttctttgccaagagcaagtcaaatgaaacaaagagtcctcnnnnnnnnnnnnnnnnnaatacgctccctttaaacggtggattgaaaatgactttgatttataaagagaagactgagggcggggatactgattcagaaatcctgtagcgtgtaataaaagaagaggaaatggcatggaatcactgcctcctgtgatttgaaggccattgtgaaggaaaacaatgcagtgaaagaaagttcttcatattaggacagatatcattg

SEQ ID NO: 1105 - DNA, 376 bp, Homo sapiens
  misc_feature (185)..(185): n includes a, c, g, or t, or contains no nucleotide
  misc_feature (188)..(190): n includes a, c, g, or t, or contains no nucleotide
tactaattgcattggcagcattgtgtctttgaccttgtatactagcttgacatagtgctgtctctgatttctaggctagttacttgagatatgaattttccatagaatatgcactgatacaacattaccattcttctatggaaagaaaacttttgatgatgaaacaataaagattttaaatatcnaannnaaaaaaaaaatgtttttgaaatgaaaatatatggcacactttcattctgaagtgcattaacattctaataaggtgatgtaaagcaagatgacattggtgtaatgttagagttgcagaagtttccattccaaaataaaatggaaaccatagttacagatattacaatgcagccctgtaattttgagc

SEQ ID NO: 1106 - DNA, 501 bp, Homo sapiens
  misc_feature (239)..(253): n includes a, c, g, or t, or contains no nucleotide
  misc_feature (272)..(272): n includes a, c, g, or t, or contains no nucleotide
  misc_feature (300)..(300): n includes a, c, g, or t, or contains no nucleotide
  misc_feature (372)..(396): n includes a, c, g, or t, or contains no nucleotide
acttgtacatacaatggaaatgcttttagtagtgattatttagcaatttttgtttttgttatattaggcatgtttggaggctttcctattctagcatttaaatttaaattttattaaaattaaataatttaaatctagcatttaaatttaaataatttaagtctagcatttacttttaaataattataatgaagttttgaaatactaagttaatccagacctttagttgtcccatggtnnnnnnnnnnnnnnnaaagaagatgtattatgancaattcagcaataagacaattgtcaacncagttgagaataacaatggtaatcgttagtaatatttagaattggaatttgcctactgaaatagttatagannnnnnnnnnnnnnnnnnnnnnnnnttgagcatgacaaccagacatttccagttggttttgtaagttttgagaatctagatactgggttttattttttgaaagattagctctgtttgtaagggctgattc

SEQ ID NO: 1107 - DNA, 65 bp, Homo sapiens
tatgtatcctctataattagttatgacagccatttgtaatgaatttgtcgcaaagacgtaataaa

SEQ ID NO: 1108 - DNA, 489 bp, Homo sapiens
  misc_feature (196)..(196): n includes a, c, g, or t, or contains no nucleotide
  misc_feature (328)..(402): n includes a, c, g, or t, or contains no nucleotide
aagttgttggagacgccaatagcaatatctaggaaatttgcattgagaccattgtattttccactagcagtgaaaatgatttttcacaactaacttgtaaatatattttaatcattacttctttttttctagtccatttttatttggacatcaaccacagacaatttaaattttatagatgcactaagaattcacntgcagcagcaggttacatagcaaaaatgcaaaggtgaacaggaagtaaatttctggcttttctgctgtaaatagtgaaggaaaattactaaaatcaagtaaaactaatgcatattatttgattgacaataannnnnnnnnnnnnnnnnnnnnnnnnnnnnnnnnnnnnnnnnnnnnnnnnnnnnnnnnnnnnnnnnnnnnnnnnnngaaatttgcagtctgcaccttatggatcacaattacctttagttgttttttttgtaataattgtagccaagtaaatctccaataaag

SEQ ID NO: 1109 - DNA, 193 bp, Homo sapiens
tccttgggaccgtgagttcctagagcttggctgggtctaggctgttctgtgcctccaaggactgtctggcaatgacttgtattggccaccaactgtagatgtatatatggtgcccttctgatgctaagactccagaccttttgtttttgctttgcattttctgattttataccaactgtgtggactaagatgc

SEQ ID NO: 1110 - DNA, 368 bp, Homo sapiens
tggacacaacaaaggctgttattgcattaggtgtaagtaaactggagtttatgttaaattacattgattggaaaagaatgaaaatttcttatttttccattgctgttcaatttatagtttgaagtgggtttttgactgcttgtttaatgaagaaaaatgcttggggtggaagggactcttgagatttcaccagagactttttctttttaataaatcaaaccttttgatgatttgaggttttatctgcagttttggaagcagtcacaaatgagacctgttataaggtggtatttttttttttcttctggacagtatttaaaggatcttattcttatttcccagggaaattctgggctcccacaaagtaa

SEQ ID NO: 1111 - DNA, 235 bp, Homo sapiens
tactgattccagactccagatgcctattattagttaggcttctgagcttgcaatcatattgaatgtatgaagagcgaaatcaaattcttatttttgtacagttttgaagtttatacttagaactgaccacctccccggccacgcggagagctgtacagtgtgtaaatctgcctttatcttggattgattggtacagtatttttgcatctgtgggacctaccttttcgttcagtag

SEQ ID NO: 1112 - DNA, 517 bp, Homo sapiens
  misc_feature (26)..(26): n includes a, c, g, or t, or contains no nucleotide
  misc_feature (66)..(66): n includes a, c, g, or t, or contains no nucleotide
  misc_feature (72)..(72): n includes a, c, g, or t, or contains no nucleotide
  misc_feature (90)..(90): n includes a, c, g, or t, or contains no nucleotide
  misc_feature (96)..(96): n includes a, c, g, or t, or contains no nucleotide
  misc_feature (101)..(101): n includes a, c, g, or t, or contains no nucleotide
  misc_feature (194)..(226): n includes a, c, g, or t, or contains no nucleotide
  misc_feature (378)..(399): n includes a, c, g, or t, or contains no nucleotide
  misc_feature (474)..(474): n includes a, c, g, or t, or contains no nucleotide
ctgggcaattcctgttttctaaggtnggtctctgctgctatttaacaacccagagtaggcctctgntgaggnttcagtggcctcagaaanccagangggtnccagatagggggcctgcttgggccctctgctgccaactgctcaaacctgctttagctccagccacttgtggcaaacaacctcgtttccttacnnnnnnnnnnnnnnnnnnnnnnnnnnnnnnnnncttgtgaaaaatctattctgttgtctttgatgtgtccaagaaaattcgtgtagtttacgtaaaaatatctgactcacaagaaagccaactgtatgtcttgtgatgggacagttcataatgtagttgctagaccactttacaaattgttcttnnnnnnnnnnnnnnnnnnnnnntgctgtgcaattgttggggagggtagggggaaaggcgagaggagatacttattggtctttttgtttaataccttncccaagaggggacagtctggccaacttgctccagtaatgcaat

SEQ ID NO: 1113 - DNA, 526 bp, Homo sapiens
ctctatagctctagattttggtggtagcaaatttatcgggtggagggattgatcggagagggcagatcctcaggttcaacacaagaactggattggaaaaggtcattgtaggttgatgtgagcatcttgggtacatagcccattgcccttaatgatggtttcttactgtttctctgggttgtttgtcagatagcctttaattttaattatttttccttccctttgctaccttggcccttttaaattcttgtgtttaacctaatgctcagccttggtactccattcccttctccttcccctctttgctactattaaaagtcggagaagtggaattcaaacgttgaaatttccacggggctatagttgtatcttaataatgccaagtgtcaaaacaaccccattaaaatgccgcctgattaaataatgtgctgctaaatatagtgcacatgaaaacagcaagactgtatatatatgtaaatatatatatatatctgtatctttgtatgtatctctgtatctgtacctt

SEQ ID NO: 1114 - DNA, 525 bp, Homo sapiens
  misc_feature (306)..(322): n includes a, c, g, or t, or contains no nucleotide
ccctttctagccaaggttatagctgccctggactgctcactctctggtctcaatttaaaatgatccatggccacagggctcctgcccaggggcttgtcaccttcccctcctccttcctgagtcactccttcagtagaaggccctgctccctatcctgccccacagccctgcctggatttgtatccttggcttcgtgccagttcctccaagtctatggcacctccctccctctcaaccacttgagcaaactccaagacaccttctaccccaacaccagcaattatgccaagggccattaggctctcnnnnnnnnnnnnnnnnncccgtgtcatcacggagacctttgttcctgtgggaaaatatccctcccacctgcaacagctgcccctgctgactgcgcctgtcttctccctctgaccccagagaaaggggctgtggtcagctgggatcttctgccaccatcagggacaaacgggggcaggaggaaagtcactgatgcccagatgtttgcatcctgcacagcta

SEQ ID NO: 1115 - DNA, 275 bp, Homo sapiens
  misc_feature (76)..(104): n includes a, c, g, or t, or contains no nucleotide
  misc_feature (179)..(243): n includes a, c, g, or t, or contains no nucleotide
tgggatctcaacgaaggcaaacacctttacacgctagatggtggggacatcatcaacgccctgtgcttcagccctnnnnnnnnnnnnnnnnnnnnnnnnnnnnnccccagcatcaagatctgggatttagagggaaagatcattgtagatgaactgaagcaagaagttatcagtaccannnnnnnnnnnnnnnnnnnnnnnnnnnnnnnnnnnnnnnnnnnnnnnnnnnnnnnnnnnnnnnnngctggctacacggacaacctggtgcgagtgtg

SEQ ID NO: 1116 - DNA, 389 bp, Homo sapiens
  misc_feature (26)..(42): n includes a, c, g, or t, or contains no nucleotide
  misc_feature (264)..(281): n includes a, c, g, or t, or contains no nucleotide
  misc_feature (331)..(346): n includes a, c, g, or t, or contains no nucleotide
tcttccatagaacagccacagccgannnnnnnnnnnnnnnnntctccttaaagaagttacaggtaaacaatatctctggtattgaaaaggtgaatatgtttacaaaccaaggaacagtgatccactttaacaaccctaaatttcaggcatcgctggcagtgaacactttcaccataacaggtcatgctgaggcaaagcaggtgacagaaatgctacccagtgtcttaagccagcttggtgcagacagtctgactagtttaaggnnnnnnnnnnnnnnnnnncccaaacaacctgtggatggaaaagcaccacttgctactggaggggatgnnnnnnnnnnnnnnnnagaattgtggagaattttgatgaggcttccaggaatgaggcaa

SEQ ID NO: 1117 - DNA, 339 bp, Homo sapiens
  misc_feature (144)..(146): n includes a, c, g, or t, or contains no nucleotide
  misc_feature (148)..(149): n includes a, c, g, or t, or contains no nucleotide
  misc_feature (151)..(151): n includes a, c, g, or t, or contains no nucleotide
  misc_feature (153)..(154): n includes a, c, g, or t, or contains no nucleotide
  misc_feature (280)..(294): n includes a, c, g, or t, or contains no nucleotide
gttttgttccctctgtgctccattctgaggctcaagagcttaatgcaagtatgttttctgagttaaaataacacttttagatgagaaaatgcttgtatcatacagggctataatataaataaataaattgtatgtatgcaaaannnannanannttctaccccttaaaaaattaagttagaaataagcttattttcttgcacatcaatatttttctgttggtaaagaggacacaatttctagtagattgttaataacatcaggaagatatttctttcgtnnnnnnnnnnnnnnngcttattcccatattctcagctcataactccctgttttgggctgc

SEQ ID NO: 1118 - DNA, 601 bp, Homo sapiens
  misc_feature (134)..(135): n includes a, c, g, or t, or contains no nucleotide
  misc_feature (167)..(181): n includes a, c, g, or t, or contains no nucleotide
  misc_feature (230)..(254): n includes a, c, g, or t, or contains no nucleotide
  misc_feature (453)..(467): n includes a, c, g, or t, or contains no nucleotide
  misc_feature (494)..(530): n includes a, c, g, or t, or contains no nucleotide
  misc_feature (557)..(557): n includes a, c, g, or t, or contains no nucleotide
tcgacccggcactgggtaccggaagaaccagacagctcggtttttgccaccatttataagtctgtgtccttttcttgagtactgaaccgagatacagttttaaatgtgctgtgcggtctctgagcagcgactcnnctgtgcagatcaaatgatgctgtttggaaaannnnnnnnnnnnnnntgtggcgtaaagaaactcccatggtcatgtgactccagatacttctggnnnnnnnnnnnnnnnnnnnnnnnnnaggtggattatgatcgcatcagggatgttggccctgacagggcggcatccgagtggttgctgcgctgtggggccatggtgcgctaccatggccaggagaggtggcagaaggactacaaccaccttccaacaggccctctggacaaatacaagattcaggcgatcgacgccaccgactcttgtatcatgagcattggatnnnnnnnnnnnnnnnactaccctatcgttttgctaatagaannnnnnnnnnnnnnnnnnnnnnnnnnnnnnnnnnnnngactcacgattatagtcataggtatgncctttttgcccatttcattatagtcaagtttgtttcttcctgtg

SEQ ID NO: 1119 - DNA, 394 bp, Homo sapiens
  misc_feature (71)..(86): n includes a, c, g, or t, or contains no nucleotide
  misc_feature (156)..(174): n includes a, c, g, or t, or contains no nucleotide
  misc_feature (208)..(223): n includes a, c, g, or t, or contains no nucleotide
  misc_feature (305)..(367): n includes a, c, g, or t, or contains no nucleotide
ttatttctagcatggacaatccagataatgaaatagtgttgtacttaatgttacgggctgttgatagattnnnnnnnnnnnnnnnnagatatccaggagtatctaactatcaagttgaagaagatataggaaagttgaagtcttgtctcactggcnnnnnnnnnnnnnnnnnnntatctgtaatggtgaaagatgattatgtccacgnnnnnnnnnnnnnnnnagctgctgagccacataccattgctgcattcttggggggagctgctgctcaagaggtcatcaaaataatcaccaaacaattnnnnnnnnnnnnnnnnnnnnnnnnnnnnnnnnnnnnnnnnnnnnnnnnnnnnnnnnnnnnnnngtagagtaagcaagcaccttaagtagt

SEQ ID NO: 1120 - DNA, 453 bp, Homo sapiens
  misc_feature (26)..(26): n includes a, c, g, or t, or contains no nucleotide
  misc_feature (82)..(86): n includes a, c, g, or t, or contains no nucleotide
  misc_feature (88)..(91): n includes a, c, g, or t, or contains no nucleotide
  misc_feature (95)..(95): n includes a, c, g, or t, or contains no nucleotide
  misc_feature (117)..(117): n includes a, c, g, or t, or contains no nucleotide
  misc_feature (293)..(340): n includes a, c, g, or t, or contains no nucleotide
  misc_feature (366)..(411): n includes a, c, g, or t, or contains no nucleotide
gacccaagtaatccattccatcgagnactgtctgggatgcatctccaacaccgcctcctacctgaggctctgggcgcttagnnnnncnnnngcanagttgtctgatgtcctgtgggnccatgctgatgcgcgtgggcctccgcgttgacaccacctatggcgtcttgctactgctcccggttatcgcgctctttgcagttttgaccattttcatccttctgatcatggaagggctttctgcgtttcttcacgccatacgcctccactgggtagaatttcagaacaaattctannnnnnnnnnnnnnnnnnnnnnnnnnnnnnnnnnnnnnnnnnnnnnnnatcaaagttcaataacgacgacagtnnnnnnnnnnnnnnnnnnnnnnnnnnnnnnnnnnnnnnnnnnnnnnagaatgaccatgttatagactttcacttatgtcagatttatg

SEQ ID NO: 1121 - DNA, 595 bp, Homo sapiens
tccccaaggtcttggccatgtccggagaccccaactacctgcaccgcatgactacgctcttctgcatcaatgtgctgtctgaggtctgtgggcaggacatcaccaccaagcacatgctacccacggttctgcgcatggctggggacccggttgccaatgtccgcttcaatgtggccaagtctctgcagaagatagggcccatcctggacaacagcaccttgcagagtgaagtcaagcccatcctagagaagctgacccaggaccaggatgtggacgtcaaatactttgcccaggaggctctgactgttctgtctctcgcctgatgctggaagaggagcaaacactggcctctggtgtccaccctccaacccccacaagtccctctttggggagacactggggggcctttggctgtcactccctgtgcatggtctgaccccaggccccttcccccagcacggttcctcctctccccagcctgggaagatgtctcactgtccacctcccaacggctaggggagcacggggttggacaggacagtgaccttgggaggaaggggctactccgccatccttaaaagccatggagccggag

SEQ ID NO: 1122 - DNA, 540 bp, Homo sapiens
  misc_feature (73)..(73): n includes a, c, g, or t, or contains no nucleotide
  misc_feature (152)..(202): n includes a, c, g, or t, or contains no nucleotide
  misc_feature (238)..(238): n includes a, c, g, or t, or contains no nucleotide
  misc_feature (324)..(343): n includes a, c, g, or t, or contains no nucleotide
  misc_feature (460)..(515): n includes a, c, g, or t, or contains no nucleotide
ccttttgtctgaacgccagagctactgaccaggtcggggggccgcggtggggagtggaagagccggtcctgcntgtccgccctcccagccccaggtggaaggctcagttgtcggaaagacaaaagcgatttcttcccactcctgcagggccnnnnnnnnnnnnnnnnnnnnnnnnnnnnnnnnnnnnnnnnnnnnnnnnnnntgaggtatgcatttcccagaaccgtgggcgtacccnaccttggggggcatgttggttctggggggaccacctctccttgcattcaggggctgtgaagctgagtaattttcggtcacagggcnnnnnnnnnnnnnnnnnnnntttgtcctgctctgggcccaaaggtggtggtggtttgggtcatcagaggactgcctgggacggttcagcgggcacggagcgctgtgctggcctggctggggatggccgcggaggtgnnnnnnnnnnnnnnnnnnnnnnnnnnnnnnnnnnnnnnnnnnnnnnnnnnnnnnnntttcagcctggaatcagacatcttc

SEQ ID NO: 1123 - DNA, 393 bp, Homo sapiens
  misc_feature (112)..(112): n includes a, c, g, or t, or contains no nucleotide
  misc_feature (118)..(158): n includes a, c, g, or t, or contains no nucleotide
  misc_feature (221)..(221): n includes a, c, g, or t, or contains no nucleotide
  misc_feature (229)..(229): n includes a, c, g, or t, or contains no nucleotide
  misc_feature (316)..(316): n includes a, c, g, or t, or contains no nucleotide
  misc_feature (341)..(364): n includes a, c, g, or t, or contains no nucleotide
tgactcactaactgaggcctttccatagctccacagcttcccacctcctccccaccaaaccggggttctagagttaaggatgggggagggtattatactgcctcagtctgantcctcnnnnnnnnnnnnnnnnnnnnnnnnnnnnnnnnnnnnnnnnntgccttttggaggcccccttcacctgcagctatgatgcccttccccttctcccctgtcctcanccatatgnccttatccccattctactcccctgctatgcaagtgcccctgtggcttgtccccaaccccctcagcaacaaagctcagctggggaacngagagtaatttgaagaatgcttgannnnnnnnnnnnnnnnnnnnnnnngacccccattcttcctttgggggtatgat

SEQ ID NO: 1124 - DNA, 75 bp, Homo sapiens
gttgccgttcttgaagcccgtctcctaaggattctcccggtgtccgcgtagggatctcatgctatataggagggc

SEQ ID NO: 1125 - DNA, 238 bp, Homo sapiens
  misc_feature (109)..(109): n includes a, c, g, or t, or contains no nucleotide
  misc_feature (191)..(191): n includes a, c, g, or t, or contains no nucleotide
agtattgtcaggtattctctccatagaacagcactaccctcctctctccccagatgtgactactgaggggaggtctgagtgtttaatttccgattttttcctctgcatntacacacacaccacacacgcacacacacacaccaagtaccagtataagcatctcccatctgcttttctccattgccatgcgncctggtcaagcccccctcactctgtttcctgttcagcatgtactccc

SEQ ID NO: 1126 - DNA, 453 bp, Homo sapiens
  misc_feature (67)..(67): n includes a, c, g, or t, or contains no nucleotide
  misc_feature (72)..(72): n includes a, c, g, or t, or contains no nucleotide
  misc_feature (139)..(139): n includes a, c, g, or t, or contains no nucleotide
  misc_feature (338)..(338): n includes a, c, g, or t, or contains no nucleotide
tcagcttctagtggatgttgcactcaaacgggctgcagagatggagcttcaggcaaaacttacagcnttaancccattttcaagcaaaacagttctcagaaatgtcatgattgccggggtgaaggcaagagatgaattngcattattttatatattttttattaatatttgcacatgggattgctaaaacagcttcctgttactgagatgtcttcaatggaatacagtcattccaagaactataaacttaaagctactgtagaaacaaagggttttcttttttaaatgtttcttggtagattattcataatgtgagatggttcccaatatcatgtgantttttttttcctccccttccctttttttgttattttttcagactgtgcaatacttagagaacctatagcatcttctcattcccatgtggaacaggatgcccacatactgtctaat

SEQ ID NO: 1127 - DNA, 572 bp, Homo sapiens
  misc_feature (54)..(54): n includes a, c, g, or t, or contains no nucleotide
  misc_feature (68)..(68): n includes a, c, g, or t, or contains no nucleotide
  misc_feature (80)..(80): n includes a, c, g, or t, or contains no nucleotide
gtgtaccagatttcagaacttatatttccacctcttccaatgtggcaccctttngcccagaaaaaagnccaggaatgtantcgagggaatggccatcagaatcactatcctcctcctgttccatttggttatccaaatcagggaagaaaaaataaaccatatcgcccaattccagtgacatgggtacctcctcctggaatgcattgtgaccggaatcactggattaatcctcacatgttagcacctcactaacttcgtttttgattgtgttggtgtcatgttgagaaaaaggtagaataaaccttactacacattaaaagttaaaagttcttactaatagtagtgaagttagatgggccaaaccatcaaacttatttttatagaagttattgagaataatctttcttaaaaaatatatgcactttagatattgatatagtttgagaaattttattaaagttagtcaagtgccgaagtttttaatattggacttgagtatttatatattgtgcatcaactctgttggatacgagaacactgtagaagtggacgatttgttctagcacctttga

SEQ ID NO: 1128 - DNA, 495 bp, Homo sapiens
  misc_feature (244)..(258): n includes a, c, g, or t, or contains no nucleotide
  misc_feature (349)..(349): n includes a, c, g, or t, or contains no nucleotide
  misc_feature (355)..(357): n includes a, c, g, or t, or contains no nucleotide
  misc_feature (360)..(367): n includes a, c, g, or t, or contains no nucleotide
  misc_feature (422)..(422): n includes a, c, g, or t, or contains no nucleotide
  misc_feature (437)..(437): n includes a, c, g, or t, or contains no nucleotide
  misc_feature (447)..(447): n includes a, c, g, or t, or contains no nucleotide
cattttggtctctgcagttaagtgccatgaaaatgtggttgaattattcattatgcagtgttattggtaagtgtattttcacttttagtttagtgaattctaacacataattcttgaattctctactattggcatgtaacgaatttaaattttttataacatagtgcaagctgcctaaatatgtattatttgagaattgtgaaacagatagttatatgtatacaagtcaaagaacaacttaacnnnnnnnnnnnnnnntttttcttaatggttatcctcttaaatacacctgctggtacttggtgtggttaaataggaaaattgttattaaataaagaatttgtatgancctttnnnaannnnnnnnacacgttttactaattattgttcctgaattatgtttctggttttatctatttttngaggtttttttgttngcttattttncaaaacattcatttattgtaatgtttactagcggactagtaaacaata

SEQ ID NO: 1129 - DNA, 316 bp, Homo sapiens
  misc_feature (44)..(114): n includes a, c, g, or t, or contains no nucleotide
  misc_feature (190)..(206): n includes a, c, g, or t, or contains no nucleotide
  misc_feature (262)..(276): n includes a, c, g, or t, or contains no nucleotide
cacctaccaggagtttataagctcttggggaatggactctattnnnnnnnnnnnnnnnnnnnnnnnnnnnnnnnnnnnnnnnnnnnnnnnnnnnnnnnnnnnnnnnnnnnnnnncatcgagtcgcggctggagcccgtgcggttcctcaggagtaccttcaccaacaacctggtgtatgacacctcggannnnnnnnnnnnnnnnntcctaaaggacctagaggaaggcatccaaatgctgatggggaggctggaagacggnnnnnnnnnnnnnnngcagaccctcaagcagacctacagcaagtttgacacaaac

SEQ ID NO: 1130 - DNA, 313 bp, Homo sapiens
  misc_feature (34)..(34): n includes a, c, g, or t, or contains no nucleotide
  misc_feature (44)..(44): n includes a, c, g, or t, or contains no nucleotide
  misc_feature (50)..(50): n includes a, c, g, or t, or contains no nucleotide
  misc_feature (187)..(187): n includes a, c, g, or t, or contains no nucleotide
ggcacatcaggatgcccctcggagagcatgtgcnacgtgtcccnacctgnagcgagcgtgtgtgtgtgctcctctgcgtcccaggtttggacgtctagggtttggtgtgcctgtcttctgccctccctgagcccacagggtcagtcaatgtatcttctacgtgcctctccctctgccttctctcacnagtgcccccggctccagagctcaggggtaggggttctcctgagggtgcaggggatccttctcatctcctggaccctccagggcactctggtccctattccccagctcctaggcagctgagccgggt

SEQ ID NO: 1131 - DNA, 174 bp, Homo sapiens
  misc_feature (40)..(40): n includes a, c, g, or t, or contains no nucleotide
  misc_feature (78)..(78): n includes a, c, g, or t, or contains no nucleotide
  misc_feature (100)..(100): n includes a, c, g, or t, or contains no nucleotide
  misc_feature (115)..(115): n includes a, c, g, or t, or contains no nucleotide
  misc_feature (121)..(121): n includes a, c, g, or t, or contains no nucleotide
  misc_feature (130)..(130): n includes a, c, g, or t, or contains no nucleotide
ggttttatgatctacttcagggaacagccacttcgggttnatggtctgcttcaggggagaaggggtaaggggaaggtntgagaaaccttgcttctgcagntcctcaaataacagngtgcantattttggngttatgtgtccctgaatcccatcaacgttaagatggagagacca

SEQ ID NO: 1132 - DNA, 548 bp, Homo sapiens
  misc_feature (26)..(26): n includes a, c, g, or t, or contains no nucleotide
  misc_feature (40)..(129): n includes a, c, g, or t, or contains no nucleotide
  misc_feature (131)..(132): n includes a, c, g, or t, or contains no nucleotide
  misc_feature (134)..(136): n includes a, c, g, or t, or contains no nucleotide
  misc_feature (138)..(145): n includes a, c, g, or t, or contains no nucleotide
  misc_feature (147)..(147): n includes a, c, g, or t, or contains no nucleotide
  misc_feature (151)..(159): n includes a, c, g, or t, or contains no nucleotide
  misc_feature (161)..(163): n includes a, c, g, or t, or contains no nucleotide
  misc_feature (165)..(165): n includes a, c, g, or t, or contains no nucleotide
  misc_feature (167)..(170): n includes a, c, g, or t, or contains no nucleotide
  misc_feature (202)..(203): n includes a, c, g, or t, or contains no nucleotide
  misc_feature (205)..(205): n includes a, c, g, or t, or contains no nucleotide
  misc_feature (209)..(209): n includes a, c, g, or t, or contains no nucleotide
  misc_feature (214)..(214): n includes a, c, g, or t, or contains no nucleotide
  misc_feature (216)..(216): n includes a, c, g, or t, or contains no nucleotide
  misc_feature (227)..(227): n includes a, c, g, or t, or contains no nucleotide
  misc_feature (237)..(243): n includes a, c, g, or t, or contains no nucleotide
  misc_feature (245)..(248): n includes a, c, g, or t, or contains no nucleotide
  misc_feature (254)..(261): n includes a, c, g, or t, or contains no nucleotide
  misc_feature (263)..(266): n includes a, c, g, or t, or contains no nucleotide
  misc_feature (269)..(269): n includes a, c, g, or t, or contains no nucleotide
  misc_feature (274)..(275): n includes a, c, g, or t, or contains no nucleotide
  misc_feature (277)..(277): n includes a, c, g, or t, or contains no nucleotide
  misc_feature (295)..(301): n includes a, c, g, or t, or contains no nucleotide
  misc_feature (318)..(318): n includes a, c, g, or t, or contains no nucleotide
  misc_feature (348)..(394): n includes a, c, g, or t, or contains no nucleotide
agttcctgccttccagtatcctgtangaccacagaggtannnnnnnnnnnnnnnnnnnnnnnnnnnnnnnnnnnnnnnnnnnnnnnnnnnnnnnnnnnnnnnnnnnnnnnnnnnnnnnnnnnnnnnnnncnncnnntnnnnnnnntnccannnnnnnnncnnncncnnnnctggatgccaaccctcgagttgcttggcctanngncctnaaagncntcacgttgtgnccagcagccnnnnnnncnnnnggggcnnnnnnnntnnnnggntgccnnancctctgacccatgtgttnnnnnnnacgtgtcgtccatcttngctctggactgtgaaaccagcagcttcttnnnnnnnnnnnnnnnnnnnnnnnnnnnnnnnnnnnnnnnnnnnnnnntccatggacttttgcttctttgctagtagcaactgatgtttcttagttttactgtgcctgatctaatgcaagctgcttctctcgcatgttttatcttgttttcatctttccttgacatcaaaaaaattagtttacaatgctattcaatgttgct

SEQ ID NO: 1133 - DNA, 384 bp, Homo sapiens
  misc_feature (71)..(109): n includes a, c, g, or t, or contains no nucleotide
atattctgggtctgatctgtcagagaataaatatcaaatctaaatttaatgtagagatacatactatttcnnnnnnnnnnnnnnnnnnnnnnnnnnnnnnnnnnnnnnnctgaaagcaatccagttgctcctgtgctagatggtagccagagaattttatagtaatggaggttagcccttaatctcttcattgcatttcatttctgtaaatcagattaagtccttaatattattttaaattaaaatttgtgtgtaattgccattaaattttcaaaatgtaatttaaaaggattaaatactcatttaataatttaaaataattattgtataatatctacatttggagaattttgaactatcaagcatatactgtatacagttaga

SEQ ID NO: 1134 - DNA, 441 bp, Homo sapiens
  misc_feature (26)..(26): n includes a, c, g, or t, or contains no nucleotide
  misc_feature (202)..(202): n includes a, c, g, or t, or contains no nucleotide
  misc_feature (219)..(219): n includes a, c, g, or t, or contains no nucleotide
  misc_feature (229)..(229): n includes a, c, g, or t, or contains no nucleotide
agtgggagctggtctaatgtttcacnttcagcaaaatgcctctctcctttcaggcacagtgaagatcgtctcagtgtcttctcatctccgtcatcaaaaactacagtgtaccaactcgcatctgttagtttattgataacagcttcctgatatgcaccatcaagattcttcacttccacaatagctcctacctttagtgggnccctttatgtggtcatncctgaacttnccactgttgaagaatcatgtctaaatgtcaccttgactttgacaagtctttttgctgtcttgatcttggcttcacaaaaggctcctctgtatttagcactcacatcagtgcccactgtcaaatagggaggctcatcaagggccttcatgatgactctgggaccaaggtatcctctaaaacaccaggttcagctgcaccttcctcggaggcga

SEQ ID NO: 1135 - DNA, 449 bp, Homo sapiens
  misc_feature (156)..(172): n includes a, c, g, or t, or contains no nucleotide
  misc_feature (242)..(242): n includes a, c, g, or t, or contains no nucleotide
  misc_feature (273)..(277): n includes a, c, g, or t, or contains no nucleotide
  misc_feature (279)..(280): n includes a, c, g, or t, or contains no nucleotide
  misc_feature (327)..(342): n includes a, c, g, or t, or contains no nucleotide
accagctgtttgtgccatttttagtgtaaaagttgcagacctattagatctgcagtttaagttgccatgctgctaggaaattgtcctttttctttctagctgttaacctacttcctggaaaaagtagtagctctctgtagcattatggagtttcannnnnnnnnnnnnnnnnccattaaaaactggcattatactgaactatacattgagaaatcaatcaaaataaaaatttttactttcanaaaaaaaaaaaaaaaaaaaaaaaaaaaaaannnnnannaggctattttggtatataacctcattaaaatgtaccatatttaaaannnnnnnnnnnnnnnnagaataacccttttcaaaattgtgttctgcaaataaacagatttgttccacagaatattggtgaggactactggggggatagatggtcataaccaaataaatctggg

SEQ ID NO: 1136 - DNA, 426 bp, Homo sapiens
  misc_feature (168)..(169): n includes a, c, g, or t, or contains no nucleotide
  misc_feature (180)..(302): n includes a, c, g, or t, or contains no nucleotide
cttttttggcacatgtgaatcttgttttgtgtaaaatgaaattactttctcttgttctctgatgatgggtttaaaattaaaagagcatccggttttggtatggggatgatccaggattatgttgtgactgatacatattagttacttgtgcttttttttttttttttnnggatctttgcnnnnnnnnnnnnnnnnnnnnnnnnnnnnnnnnnnnnnnnnnnnnnnnnnnnnnnnnnnnnnnnnnnnnnnnnnnnnnnnnnnnnnnnnnnnnnnnnnnnnnnnnnnnnnnnnnnnnnnnnnnntgactttcaccttaggacaactgttgcatgccaagttttttgtgtgtgtgaaacacttcaaaactgatttaaaagatgtaaatttaaaattggttgtatctaatatgccccaggttcggtaaat

SEQ ID NO: 1137 - DNA, 280 bp, Homo sapiens
cttctgtgtttaggtattctctgccactcttgctgtgaaattgaagtggatgtagaaaaaaccttttactatatgaaactttacaacacttgtgaaagcaactcaatttggtttatgcacagtgtaatatttctccaagtatcatccaaaattccccacagacaaggctttcgtcctcattaggtgttggcctcagcctaaccctctaggactgttctattaaattgctgccagaattttacatccagttacctccactttctagaacatattctttact

SEQ ID NO: 1138 - DNA, 273 bp, Homo sapiens
gccatgcttcagtgcgcaggaagtggggcagctgcgggcgctgcgtgccgtgttccggagccagcagcaggagactgtgggccttgaggatgtggtagtgacctcaccagaggagttggcaattcctaagtgctgcctggaggcctctacagagacataatgttggagaacttctgccacatggcagtgctgggtaagacccctctgtccccaccagtgcccttgaggttatgggtgttggtaggtctgtggcctccatttccatgacgatgg

SEQ ID NO: 1139 - DNA, 403 bp, Homo sapiens
  misc_feature (57)..(57): n includes a, c, g, or t, or contains no nucleotide
caaagcaggaacagcggcagaaaattgtgcaggccgagggtgaggccgaggctgccnaagatgcttggagaagcactgagcaagaaccctggctacatcaaacttcgcaagattcgagcagcccagaatatctccaagacgatcgccacatcacagaatcgtatctatctcacagctgacaaccttgtgctgaacctacaggatgaaagtttcaccaggggaagtgacagcctcatcaagggtaagaaatgagcctagtcaccaagaactccacccccagaggaagtggatctgcttctccagtttttgaggagccagccaggggtccagcacagccctaccccgccccagtatcatgcgatggtcccccacaccggttccctgaacccctcttggattaagg

SEQ ID NO: 1140 - DNA, 477 bp, Homo sapiens
  misc_feature (61)..(76): n includes a, c, g, or t, or contains no nucleotide
  misc_feature (255)..(273): n includes a, c, g, or t, or contains no nucleotide
  misc_feature (322)..(359): n includes a, c, g, or t, or contains no nucleotide
gctgaccgacagcactcaaattaaaatggacattttggcgcaagttttacagattttattnnnnnnnnnnnnnnnngtcttggaagatgaaaatgcaaatgttgatgaggtggaattgaagccagataccttaataaaattatatcttggttataaaaataagaaattaagggttaacatcaatgtgccaatgaaaaccgaacagaagcaggaacaagaaaccacacacaaaaacatcgaggaagaccgcaaacnnnnnnnnnnnnnnnnnnncgtgagaatcatgaagatgaggaaggttctgaaacaccagcagttactnnnnnnnnnnnnnnnnnnnnnnnnnnnnnnnnnnnnnnctcgagtccctgtgatcaagaaatgcattgacattctaattgagaaagaatatttggagcgagtggatggtgaaaaggacacctacagttacttggcttaacccttctggaagggtct

SEQ ID NO: 1141 - DNA, 601 bp, Homo sapiens
  misc_feature (39)..(54): n includes a, c, g, or t, or contains no nucleotide
  misc_feature (252)..(255): n includes a, c, g, or t, or contains no nucleotide
  misc_feature (257)..(260): n includes a, c, g, or t, or contains no nucleotide
  misc_feature (263)..(264): n includes a, c, g, or t, or contains no nucleotide
  misc_feature (292)..(292): n includes a, c, g, or t, or contains no nucleotide
  misc_feature (296)..(325): n includes a, c, g, or t, or contains no nucleotide
  misc_feature (372)..(402): n includes a, c, g, or t, or contains no nucleotide
  misc_feature (479)..(479): n includes a, c, g, or t, or contains no nucleotide
  misc_feature (573)..(573): n includes a, c, g, or t, or contains no nucleotide
  misc_feature (576)..(576): n includes a, c, g, or t, or contains no nucleotide
cactgctatcaacacggagaacatccgccttgttttccnnnnnnnnnnnnnnnntattctgcatgacaacctcaagcagcttatgctacagtgatgtacaaaagacttgctgttttaatatctttttgtgtttttgatgttttctgtttgttttgttttttaaaatagcagtttacaaccagaattagaacaatcttaattctacgtttaacttcttgaaaatcttagtactttttctgcggcctttggttnnnngnnnnaanntgttgagtgactcatcgccaagatttgntgtnnnnnnnnnnnnnnnnnnnnnnnnnnnnnnttctattcaagtccagttaaaacctcccagctgacctcagactaggnnnnnnnnnnnnnnnnnnnnnnnnnnnnnnncaaactgaattctcctgcagtgccaagtatcaaaggtgtccttaaatacttgtagggatgaggttaggaatattcanttccaaaacaagatatcttctgtccgccttacatatagcagtgacacttgttgcctaactttatggtgacctcctattttgtaagggctgttanaanttctatctaagaaatggcattctgt

SEQ ID NO: 1142 - DNA, 462 bp, Homo sapiens
taatgaattcattgagcctctttgctgccatttctggaatgattctttcaatcatggacatacttaatattaaaatttcccattttttaaaaatggagagtctgaattttattagagctcacacaccatatattaacatatacaactgtgaaccagctaatccctctgagaaaaactccccatctacccaatactgttacagcatacaatctctgttcttgggcattttgtcagtgatgctgatctttgccttcttccaggaacttgtaatagctggcatcgttgagaatgaatggaaaagaacgtgctccagacccaaatctaacatagttctcctgtcagcagaagaaaaaaaagaacagactattgaaataaaagaagaagtggttgggctaactgaaacatcttcccaaccaaagaatgaagaagacattgaaattattccaatccaagaagaggaag

SEQ ID NO: 1143 - DNA, 427 bp, Homo sapiens
ctattctccagtggagagatctggcctcagcttgggctagagatgccaaggcctgtgccaggttccctgtgccctcctcgaggtgggcagccatcaccagccacagttaagccaagccccccaacatgtattccatcgtgctggtagaagagtctttgctgttgctcccgaaagccgtgctctccagcctggctgccagggagggtgggcctcttggttccaggctcttgaaatagtgcagccttttcttcctatctctgtggctttcagctctgcttccttggttattaggagaatagatgggtgatgtctttccttatgttgctttttcaacatagcagaattaatgtagggagctaaatccagtggtgtgtgtgaatgcagaagggaatgcaccccacattcccatgatggaagtctgcgtaac

SEQ ID NO: 1144 - DNA, 419 bp, Homo sapiens
  misc_feature (97)..(97): n includes a, c, g, or t, or contains no nucleotide
  misc_feature (137)..(137): n includes a, c, g, or t, or contains no nucleotide
  misc_feature (145)..(145): n includes a, c, g, or t, or contains no nucleotide
  misc_feature (210)..(229): n includes a, c, g, or t, or contains no nucleotide
  misc_feature (272)..(324): n includes a, c, g, or t, or contains no nucleotide
tataaagcctcagagaacaggaagaaaaggcgggtccataagaagatgaggtctaaccgggaagatgctgccgagaaggcagagacagatgtggaangaaatctatcacccagtcatgtgcactgaatgttccactngaagtggncagtctacgacaaggatgaagtctttcattttttcaatgttttagcaagccattcctaaacagcnnnnnnnnnnnnnnnnnnnncaatactgtatataaggcaaatatggacagttactttcctctnnnnnnnnnnnnnnnnnnnnnnnnnnnnnnnnnnnnnnnnnnnnnnnnnnnnnggagaatagttgtcaaccttcattcatctcttacatctctcaccctctccttttttttttctttgattttcccccttattgatgggactgatatt

SEQ ID NO: 1145 - DNA, 410 bp, Homo sapiens
  misc_feature (191)..(205): n includes a, c, g, or t, or contains no nucleotide
  misc_feature (343)..(348): n includes a, c, g, or t, or contains no nucleotide
  misc_feature (350)..(350): n includes a, c, g, or t, or contains no nucleotide
  misc_feature (352)..(353): n includes a, c, g, or t, or contains no nucleotide
  misc_feature (357)..(364): n includes a, c, g, or t, or contains no nucleotide
  misc_feature (366)..(371): n includes a, c, g, or t, or contains no nucleotide
  misc_feature (373)..(375): n includes a, c, g, or t, or contains no nucleotide
  misc_feature (377)..(377): n includes a, c, g, or t, or contains no nucleotide
ccaaaacctcggatgcgtggccttctggccaggcgtctgcgaaatcatatggctgtagcattcgtgctatccctgggggttgcagctttgtataagtttcgtgtggctgatcaaagaaagaaggcatacgcagatttctacagaaactacgatgtcatgaaagattttgaggagatgaggaaggctggtannnnnnnnnnnnnnnagtaatcttggaatataaagaatttcttcaggttgaattacctagaagtttgtcactgacttgtgttcctgaactatgacacatgaatatgtgggctaagaaatagttcctcttgataaataaacaattaacaaatannnnnnanannaaannnnnnnnannnnnnannnanaatgcagggcacttactagcataagaattggtt

SEQ ID NO: 1146 - DNA, 421 bp, Homo sapiens
gagctcttcgggagagaacaagagcaaaaagaagaggaggaggagcgaggactctgaagaagaagaactagccagtactccccccagctcagaggactcagcgtcaggatccgatgagtagaaacggaggaaggttctctttgcgcttgccttctcacaccccccgactccccacccatattttggtaccagtttctcctcatgaaatgcagtccctggattctgtgccatctgaacatgctctcctgttggtgtgtatgtcactagggcagtggggagacgtcttaactctgctgcttcccaaggatggctgtttataatttggggagagatagggtgggaggcagggcaatgcaggatccaaatcctcatcttactttcccgaccttaaggatgtagctgctgcttgtcctgttcaagt

SEQ ID NO: 1147 - DNA, 296 bp, Homo sapiens
tatttaatggcttcaagcaggtacttctctgtgcattatagaatagattttaataatcttatagcattgtatattattattgctgttgtcactgttattattattgtggatactggcccttggtgtgttgcatagctccctatgtattctctgtttccatctttaagttcccagaccaatatacattaagagttttgcatggtctaaattgtgtttattccaaccacgtggaaagctcctggaaagaaattttacattcggttgttctgtgctcctaatgacacttgaccttgttg

SEQ ID NO: 1148 - DNA, 355 bp, Homo sapiens
tacctcatgggaagagttacttttttagatctaaaaagctgaatagcatgttagttacttggtttcaacttgagttttcttttaatgttaataagattgaaactttagtatttagtggggaatggaaagagttgcccttgttgcaagtaatgaagcctgatttgattatgaagctgcttaatcactcttcatgtgttcagaattactgttttttttgtttgtttttcctttttgtcactgtgtacattaaaattttggaagatgctttactatgtaaagtatagatggtcattttaatcattcagccacatacggttggctggtaaacagcttattctgatacaagaatgcttgg

SEQ ID NO: 1149 - DNA, 412 bp, Homo sapiens
  misc_feature (26)..(57): n includes a, c, g, or t, or contains no nucleotide
  misc_feature (146)..(146): n includes a, c, g, or t, or contains no nucleotide
  misc_feature (316)..(316): n includes a, c, g, or t, or contains no nucleotide
  misc_feature (321)..(341): n includes a, c, g, or t, or contains no nucleotide
attgagatggcattctctgcatgttnnnnnnnnnnnnnnnnnnnnnnnnnnnnnnnntatggtttaaacatattcttagctaattttttccattagtttttgaaattggtggcagttgtctgatccacaagggcaagatcttctgnagtactctggggtgtgagtatgtgtgcacacgtgtgtgttggagtgagtgagagaatgtgtctgtgcatgtggccatgctttcctagaatgtcaagtagatatttttacactttgagttttaaagcaattactatcagactgagatcttgtatgccaaactttaatctgnctttnnnnnnnnnnnnnnnnnnnnntgtgaaaatcctaagaggatttcatattgaatatgtgtacacaatcttaactatcgtggtggaaaacatac

SEQ ID NO: 1150 - DNA, 239 bp, Homo sapiens
  misc_feature (37)..(37): n includes a, c, g, or t, or contains no nucleotide
  misc_feature (41)..(55): n includes a, c, g, or t, or contains no nucleotide
  misc_feature (81)..(81): n includes a, c, g, or t, or contains no nucleotide
tgtctcctgctctggtttctctctgacccttagagcnaacnnnnnnnnnnnnnnnaggacagtccctgcctcccatcaccngcagctcctcacttacccagatcatccgtcttcctgccatgccagtgttctaagtccctcactgatttctcaatgacctctggtgtgtaagaagccttcatgaggctctttgtctcctcagcagcccctgtagaataccatgaagaaaccccaagtgc

SEQ ID NO: 1151 - DNA, 299 bp, Homo sapiens
  misc_feature (65)..(85): n includes a, c, g, or t, or contains no nucleotide
  misc_feature (105)..(105): n includes a, c, g, or t, or contains no nucleotide
  misc_feature (113)..(113): n includes a, c, g, or t, or contains no nucleotide
gattctccaggtctatcttgatttcataggtccttctcaatccaaggtcaaaaactgagaatctnnnnnnnnnnnnnnnnnnnnnagggttatccccaacctatnccgctggnacatgatggtcatccaacctgtgtttttgtgagtgagtgaatgtgtgactggttggcctctgagtggatgactggatgcgtgaatgtgtgagtgaatgggggagttaatgaatccctacctaactgtgaagagaagaaaaatgaggagcccctctcccactgaaacccataactgccccatcaagg

SEQ ID NO: 1152 - DNA, 557 bp, Homo sapiens
  misc_feature (351)..(408): n includes a, c, g, or t, or contains no nucleotide
  misc_feature (436)..(437): n includes a, c, g, or t, or contains no nucleotide
  misc_feature (454)..(488): n includes a, c, g, or t, or contains no nucleotide
  misc_feature (498)..(498): n includes a, c, g, or t, or contains no nucleotide
aactgagtcttgaatgctttactagtccggcaatctttggacttaggcttctgccctttgagactcacatgactttctggtttggggtctggtcatttccctttcaatttttgaatctccttctctgttcagttggcttggcaaagtaccctctgttctcatgtcactaattcctgctctaggtcatctttcctttgtgcagcccacattcccaccatcctgtgaactttgttgtacttggtgttgggcaactggtgagtgttgtgacaggctcagacctgatccttcctcaggagcaattggagaccacaaatttaaagcagaaatacctgttaaaagcttggctttccnnnnnnnnnnnnnnnnnnnnnnnnnnnnnnnnnnnnnnnnnnnnnnnnnnnnnnnnnntgggccagagggggtcttagtaatgtgnntagagagacacatgctnnnnnnnnnnnnnnnnnnnnnnnnnnnnnnnnnnnctccctttanacacctgcctctcgctggcttttcctttagacctagccaccagtgttttgaatcatggt

SEQ ID NO: 1153 - DNA, 69 bp, Homo sapiens
ctgggttcatccaggttgttcccagccctttgtccttgtctgttagggcctctttcttccatggggcgt

SEQ ID NO: 1154 - DNA, 503 bp, Homo sapiens
  misc_feature (35)..(35): n includes a, c, g, or t, or contains no nucleotide
  misc_feature (49)..(49): n includes a, c, g, or t, or contains no nucleotide
  misc_feature (61)..(61): n includes a, c, g, or t, or contains no nucleotide
  misc_feature (74)..(74): n includes a, c, g, or t, or contains no nucleotide
  misc_feature (128)..(128): n includes a, c, g, or t, or contains no nucleotide
  misc_feature (143)..(143): n includes a, c, g, or t, or contains no nucleotide
  misc_feature (149)..(149): n includes a, c, g, or t, or contains no nucleotide
  misc_feature (169)..(169): n includes a, c, g, or t, or contains no nucleotide
  misc_feature (260)..(297): n includes a, c, g, or t, or contains no nucleotide
  misc_feature (344)..(344): n includes a, c, g, or t, or contains no nucleotide
gcgagcttgccctgtccctgcttgtagcccctgangccctcacagttgntcacacacccangcagtctgccaanggagctgcttttcctgactactgtctctccatgcctagggaagtcaaagccctngggccttgccttcangggagnttgacagtgtccttgaagtnggtgaagtgcccaccacatgaaccaaggagagacgccaaagcagctgccatggactctggcctgtccaagcctctgtgcacctgcagtctnnnnnnnnnnnnnnnnnnnnnnnnnnnnnnnnnnnnnngaagaatggaagggagggggagaaggtgggtgggctcagggagaacngccagagtggccagaagatgcagagagaagccccactgggatctgagtattccccaagggcactcagccacagggatgaactagtgtttgtttgtatccttgcagttatgtgacttaaagtgactcagagatatctatgtatgcgagtgtactccgctg

SEQ ID NO: 1155 - DNA, 156 bp, Homo sapiens
  misc_feature (51)..(51): n includes a, c, g, or t, or contains no nucleotide
  misc_feature (60)..(60): n includes a, c, g, or t, or contains no nucleotide
  misc_feature (86)..(86): n includes a, c, g, or t, or contains no nucleotide
  misc_feature (99)..(99): n includes a, c, g, or t, or contains no nucleotide
gacattcatttggattcccctcttctttctctttcttttccctttgggccnttggccttnctatgatgatatgagattctttatgnaagaacatgaatntaagttttgtcttgccttggttattagcacaaaactttaccatgttagatgttgaaa

SEQ ID NO: 1156 - DNA, 561 bp, Homo sapiens
  misc_feature (93)..(93): n includes a, c, g, or t, or contains no nucleotide
  misc_feature (258)..(272): n includes a, c, g, or t, or contains no nucleotide
  misc_feature (353)..(354): n includes a, c, g, or t, or contains no nucleotide
  misc_feature (356)..(358): n includes a, c, g, or t, or contains no nucleotide
  misc_feature (360)..(364): n includes a, c, g, or t, or contains no nucleotide
  misc_feature (373)..(373): n includes a, c, g, or t, or contains no nucleotide
  misc_feature (375)..(375): n includes a, c, g, or t, or contains no nucleotide
  misc_feature (404)..(411): n includes a, c, g, or t, or contains no nucleotide
  misc_feature (413)..(413): n includes a, c, g, or t, or contains no nucleotide
  misc_feature (415)..(422): n includes a, c, g, or t, or contains no nucleotide
  misc_feature (428)..(428): n includes a, c, g, or t, or contains no nucleotide
  misc_feature (515)..(515): n includes a, c, g, or t, or contains no nucleotide
  misc_feature (528)..(528): n includes a, c, g, or t, or contains no nucleotide
ctgggcctggcctctacagagccttttagggggagggggtactcatgtggatgcctacttggaacctgggcctctgagacatgtcctgaccanccccccagggcatttgcctccatcttcaccccagattgtgggtttcccatccccctgactttacccctttcaagcctggggttgtctatacccacagcccttagggacttaaagttacggggcttcgttgaatgctccttcccctaggcagctggtaatagaggnnnnnnnnnnnnnnnccctcctccctgctgccacttatcccagctccaagtttttttaaaaataatattattaaaaatgtaagttaaaaaaaaaannannnannnnnccccctctncnccctattaaaagtccagctacctccctannnnnnnnanannnnnnnntagggnctaggtgggggtgagagtgggggagggaggtgtgcataccattttatatggtgtgagagctttcagaccaaggagacatttcaccanctttccccctttnctctgggggtgactgcagttgaggaaagcatgc

SEQ ID NO: 1157 - DNA, 335 bp, Homo sapiens
  misc_feature (39)..(39): n includes a, c, g, or t, or contains no nucleotide
  misc_feature (56)..(56): n includes a, c, g, or t, or contains no nucleotide
  misc_feature (68)..(68): n includes a, c, g, or t, or contains no nucleotide
  misc_feature (84)..(84): n includes a, c, g, or t, or contains no nucleotide
agctgtcccatgtttccatggtccccagtctcccctccnacttggtggggtcaccnaactactcaccnagaagggggcttaccnaagaaagccctaaaaagctgttgacttatctgcgcttgttccaactcttatgcccccaacctgccctaccaccaccacgcgctcagcctgatgtgtttacatggtactgtatgtatgggagagcagactgcaccctccagcaacaacagatgaaagccagtgagcctactaaccgtgccatcttgcaaactacactttaaaaaaaactcattgctttgtattgtagtaaccaatatgtgcagtatacgttg

SEQ ID NO: 1158 - DNA, 361 bp, Homo sapiens
  misc_feature (167)..(181): n includes a, c, g, or t, or contains no nucleotide
  misc_feature (224)..(246): n includes a, c, g, or t, or contains no nucleotide
tatggaatagcttctttgatgtacctctttgccttaaattgctttttagttctaagattgtagaatgatcctttcaaattgtaatcttttctaacagagatattttaatatacttgctttcttaaaaaacaaaaaaactactgtcagtattaatactgagccagacnnnnnnnnnnnnnnntcagatctatcattttattgattcttaagcttgtattaaaaannnnnnnnnnnnnnnnnnnnnnncataggagaagacacatttacaatcattcattgggccttttatctgtctatccatccatcatcatttgaaggcctaatatatgccaagtactcacatggtatgcattgagacata

SEQ ID NO: 1159 - DNA, 339 bp, Homo sapiens
  misc_feature (161)..(248): n includes a, c, g, or t, or contains no nucleotide
  misc_feature (283)..(297): n includes a, c, g, or t, or contains no nucleotide
ctcggccgcagaagcgagatgacgaagggaacgtcatcgtttggaaagcgtcgcaataagacgcacacgttgtgccgccgctgtggctctaaggcctaccaccttcagaagtcgacctgtggcaaatgtggctaccctgccaagcgcaagagaaagtatannnnnnnnnnnnnnnnnnnnnnnnnnnnnnnnnnnnnnnnnnnnnnnnnnnnnnnnnnnnnnnnnnnnnnnnnnnnnnnnnnnnnnnnattccgtgaaggaacaacacctaaacccaagaggnnnnnnnnnnnnnnntccagttcatcttaagaatgtcaacgattagtcatgcaataa

SEQ ID NO: 1160 - DNA, 414 bp, Homo sapiens
  misc_feature (212)..(237): n includes a, c, g, or t, or contains no nucleotide
tgagtttgaccattgtgctcttggctcttgggctggagtaccgtggtgagggagtaaacactagaagtctttagtacaaaactgctctagggacacctggtgattcctacacaagtgatgtttatatttctcataaagagtcttccctatcccaaggtcttcatgatgccagtagccatatatgataaattatgttcagtgataacttagtnnnnnnnnnnnnnnnnnnnnnnnnnncccgccatgattcacatttgatgagtttttaaaaatcaaagtgattttgaaaatctctaatggctcagaaaataaaaacatccagtttgtggatgactatatttagatttctctagactctagtggaagacctttggaaaggccatgccaaccgtgcttgtactgctagaagcactt

SEQ ID NO: 1161 - DNA, 559 bp, Homo sapiens
  misc_feature (51)..(67): n includes a, c, g, or t, or contains no nucleotide
  misc_feature (163)..(163): n includes a, c, g, or t, or contains no nucleotide
  misc_feature (170)..(170): n includes a, c, g, or t, or contains no nucleotide
  misc_feature (174)..(175): n includes a, c, g, or t, or contains no nucleotide
  misc_feature (200)..(200): n includes a, c, g, or t, or contains no nucleotide
  misc_feature (362)..(363): n includes a, c, g, or t, or contains no nucleotide
agaactctgttctttaaagaccaagattacattctcaattagaaaactgcnnnnnnnnnnnnnnnnncatcctgactactaccgtatagttttctctattctttcatttcccccttccccattcctttattgtacataaagtaactggtatatgtgcacaagncatattngcannttttttttttttttaactaaacagnccaatggtatgttttgattgacatcaagtggagacgggatggggaaaaatactgattctgtgaaaataccccctttctccattagtggcatgctcattcagctcttatctttatattccagtaagttattttgctctcactgttttaacaaaaaaaaaaaanncaacaacataaaaatccttgcataccttgttcaattggagaattttaatgtttttcatttatcattgtaaaaccaaggacaattttataacttttttgtacgtagctgttacatgtagggcaatctgtctttaagtagggataaattactctaaaacaaaaaagaatcctagatagttttcccttcaagtcaagcg

SEQ ID NO: 1162 - DNA, 491 bp, Homo sapiens
  misc_feature (27)..(27): n includes a, c, g, or t, or contains no nucleotide
  misc_feature (32)..(34): n includes a, c, g, or t, or contains no nucleotide
  misc_feature (36)..(36): n includes a, c, g, or t, or contains no nucleotide
  misc_feature (39)..(40): n includes a, c, g, or t, or contains no nucleotide
  misc_feature (42)..(42): n includes a, c, g, or t, or contains no nucleotide
  misc_feature (51)..(51): n includes a, c, g, or t, or contains no nucleotide
  misc_feature (55)..(56): n includes a, c, g, or t, or contains no nucleotide
  misc_feature (71)..(71): n includes a, c, g, or t, or contains no nucleotide
  misc_feature (185)..(185): n includes a, c, g, or t, or contains no nucleotide
  misc_feature (305)..(306): n includes a, c, g, or t, or contains no nucleotide
  misc_feature (309)..(343): n includes a, c, g, or t, or contains no nucleotide
attgatgccgctgtgttgcttgaagcnggctnnnanaanntngtccatgangtgnngactgctgtcatccnagagactgaggctgtaagacgcattgtggagagggatggcctcagtgaagccgcggctcaaagccggctgcagagccagatgagcgggcagcagcttgtggaacagagccacgntggtgctcagcaccttgtgggagccgcatatcacccaacgccaggtggagaaagcctgggccctcttgcagaagcgcattcccaagactcatcaggccctcgactgaaaagttctcagtnnggnnnnnnnnnnnnnnnnnnnnnnnnnnnnnnnnnnngtggtgaggagaaatgggggccttgatgctcaccctggttcaggcccagaggtccaagctatactgtgcaggacatggccaggcctggtggacacaggaagcctacccaacacgctggtatttggccaacactgaggatgtggttcat

SEQ ID NO: 1163 - DNA, 432 bp, Homo sapiens
  misc_feature (181)..(202): n includes a, c, g, or t, or contains no nucleotide
gaactacatatctaaaatcttggagaaaaatcaaggcaagaatttccagaactgtcctcaaatagctcatttatttaagttttgttaaaaagcaaaagcgaattgattacatttgattaacttttcctattccatgcacaagttaccttaaaacatgataaaaaccttatgggcattaccnnnnnnnnnnnnnnnnnnnnnnaacttataatagtaaaattactaatgtttgataaaataagatggaggcattacaaatagtctacagtttgtattttaaggaattggacatgaagaattctagatcattttgtgtctataaacccgactttctatcttgccttgggcaaactttctgtgcctcaatgtactctttaaatatgtgaaggatgctctttttgattaagtgttttgcactcctgaataaagggc

SEQ ID NO: 1164 - DNA, 557 bp, Homo sapiens
  misc_feature (117)..(117): n includes a, c, g, or t, or contains no nucleotide
  misc_feature (182)..(274): n includes a, c, g, or t, or contains no nucleotide
  misc_feature (355)..(384): n includes a, c, g, or t, or contains no nucleotide
  misc_feature (516)..(516): n includes a, c, g, or t, or contains no nucleotide
cagttcactacatatgggttgtttgagttttttgtgtgctgtatttctttctgttttttaatacctggttttgtacatatctaactctgttctcttttggttgttcagaaactgganttttttttttcttaagcagtgcttaatttgtgttttttaattttgattcagaagtagtcccagcnnnnnnnnnnnnnnnnnnnnnnnnnnnnnnnnnnnnnnnnnnnnnnnnnnnnnnnnnnnnnnnnnnnnnnnnnnnnnnnnnnnnnnnnnnnnnttcctggattttttttttatgagaaaaatactgtatttaaaatgtaaaataaacttttaaaaagcaggcactaatatatannnnnnnnnnnnnnnnnnnnnnnnnnnnnncttgcacatgttaagatgaattatctcctaaaaatatcattgttcttgggagcagtgtatgttactttacatagcagcggttcctgtcatgtgttcatgtcagaatatttttggttttaaactttcttattncctttggctgttgattagtacagtacaagtgcgatttcaaa

SEQ ID NO: 1165 - DNA, 238 bp, Homo sapiens
caaattcagtgttatttccaaagtgttccaacatctcccactcaaaatgaatcttctccctagtactcccattgtttagtacctaattgttcttaccagtttgtcttagagctcagtcattcctacacagcacttttcttcattatactgctaatttcattacactgtaagagtggggacaagctgttcttcttgtataccagaaagtagtgagtgcactgctgtgaagaaagcagga

SEQ ID NO: 1166 - DNA, 572 bp, Homo sapiens
  misc_feature (38)..(38): n includes a, c, g, or t, or contains no nucleotide
  misc_feature (54)..(54): n includes a, c, g, or t, or contains no nucleotide
  misc_feature (88)..(88): n includes a, c, g, or t, or contains no nucleotide
  misc_feature (156)..(157): n includes a, c, g, or t, or contains no nucleotide
  misc_feature (181)..(181): n includes a, c, g, or t, or contains no nucleotide
  misc_feature (199)..(199): n includes a, c, g, or t, or contains no nucleotide
  misc_feature (204)..(204): n includes a, c, g, or t, or contains no nucleotide
  misc_feature (233)..(233): n includes a, c, g, or t, or contains no nucleotide
  misc_feature (236)..(239): n includes a, c, g, or t, or contains no nucleotide
  misc_feature (244)..(247): n includes a, c, g, or t, or contains no nucleotide
  misc_feature (249)..(250): n includes a, c, g, or t, or contains no nucleotide
  misc_feature (280)..(280): n includes a, c, g, or t, or contains no nucleotide
  misc_feature (285)..(285): n includes a, c, g, or t, or contains no nucleotide
  misc_feature (410)..(425): n includes a, c, g, or t, or contains no nucleotide
tgcctgggccacagcaattcccaggttggaaaaacttnagctaatgctagctcnagagactctgcaactcatgagagcgaaagagttntgtttaaatcacaaaagagctgaaattcagggaaagatggaagatcttccagaacaagaaaaaaatannaatgttgtagatgaattagaaatncaattttatgaaattcanttagnactatatgaagttaaatttgagatattanaannnnaagannnncnncttactacacagttggactctcttaaaagncttanaaaagaaaaacaagatgaagttgtctattacgatccatgtgaaaatccagaggaacttaaagtcattgactgtgtggtggggctgcaggatgataagaatttggaagtgaaagaactcagaaggnnnnnnnnnnnnnnnnagtctaaacggggcaggatctgtgccaaaagagcctctctccggagtagaaaggtgatttgtattattccaccaggatcagtgcaaagaaaatcatcggttcagattgcaacaggctgaagaaagcataagatactctcgtcagcat

SEQ ID NO: 1167 - DNA, 466 bp, Homo sapiens
tcctggaagttccttagggacttgcccagggtcccagggccacccacacttcatctgctccctcataggccccacctccacgtcccggctgggccccagaccccagcttcctgccctccaccgggagtctgcatggttgggagtcctgggtggaggggcctttgtgaggctggacccggctcagggcaggtggaggagctgggcctcccacagggtgcccgggcagtgccatcctggtgggggagggcagccttcaaacgtgtggggtctacagtcctcaggtctaggcagggctgccggttctccacctccccatccgccccaggccccctgcctgtgcctgccttgcaccccctctgcttgggccacggtgtctctgcattgcctgcctttttgccttcacctcttttcttccccgccccctgcacattcggggtctcagcccccaggctgtgagctccttggg

SEQ ID NO: 1168 - DNA, 438 bp, Homo sapiens
  misc_feature (218)..(249): n includes a, c, g, or t, or contains no nucleotide
tgattggggcttccacagccctcctctcccaagaaatccaggctcctctcccaagaaatccaggtgctttccagactccaaagggtatcttaaatgcaatctcttctctcttagcccttggccactttctcctggatcctgccctgctctcagccatagtgaaggaccagccctaggagtctgcgagagcctccttggttccatcgtgaagccataannnnnnnnnnnnnnnnnnnnnnnnnnnnnnnncctagagggccctctgatgccccactgaggtgctgttggtttattgctggcaacgtgaattctctcaggggtctaggaggggcattttggagactgcctgacaccacccctatcccctgcctccccctctcagaagagggtggaagatgaaatgaaagctatgggactcttggaggatacccagtgtct

SEQ ID NO: 1169 - DNA, 203 bp, Homo sapiens
ctgggccgtgatttggaaaggaactggtgggagccgggtggattgtttaatcttcggagctggagacctgtttctgtgttgggatgagcgatgccctcttgccccaacccactcgtccagaccagccctgtccacacaggcccccggcccccaacccccagccccagctgtgccagcagactcgacaggtttttatacaaggt

SEQ ID NO: 1170 - DNA, 572 bp, Homo sapiens
  misc_feature (167)..(172): n includes a, c, g, or t, or contains no nucleotide
  misc_feature (174)..(177): n includes a, c, g, or t, or contains no nucleotide
  misc_feature (179)..(181): n includes a, c, g, or t, or contains no nucleotide
  misc_feature (184)..(184): n includes a, c, g, or t, or contains no nucleotide
  misc_feature (186)..(189): n includes a, c, g, or t, or contains no nucleotide
  misc_feature (191)..(191): n includes a, c, g, or t, or contains no nucleotide
  misc_feature (193)..(193): n includes a, c, g, or t, or contains no nucleotide
  misc_feature (195)..(198): n includes a, c, g, or t, or contains no nucleotide
  misc_feature (202)..(202): n includes a, c, g, or t, or contains no nucleotide
  misc_feature (210)..(210): n includes a, c, g, or t, or contains no nucleotide
  misc_feature (216)..(216): n includes a, c, g, or t, or contains no nucleotide
  misc_feature (219)..(219): n includes a, c, g, or t, or contains no nucleotide
  misc_feature (226)..(226): n includes a, c, g, or t, or contains no nucleotide
  misc_feature (233)..(233): n includes a, c, g, or t, or contains no nucleotide
  misc_feature (241)..(241): n includes a, c, g, or t, or contains no nucleotide
  misc_feature (250)..(250): n includes a, c, g, or t, or contains no nucleotide
  misc_feature (259)..(259): n includes a, c, g, or t, or contains no nucleotide
  misc_feature (263)..(263): n includes a, c, g, or t, or contains no nucleotide
  misc_feature (267)..(267): n includes a, c, g, or t, or contains no nucleotide
  misc_feature (278)..(278): n includes a, c, g, or t, or contains no nucleotide
  misc_feature (288)..(288): n includes a, c, g, or t, or contains no nucleotide
  misc_feature (302)..(302): n includes a, c, g, or t, or contains no nucleotide
  misc_feature (447)..(482): n includes a, c, g, or t, or contains no nucleotide
tctctctaaagagcaggaaaggacagagactggtcgctctctgcagtcacacttgaggtgaagaaaccatgggatagaattagctgttagttgagtccctaggttcagaggaagaaagaagaccataccacctggtagggagtgcgaaggaggttccagggactgannnnnngnnnngnnncanannnncntnannnnaaanagttgccnttattntcnttggtcnaaggggnaacttccntgtgtgccnttctatccntgantgancaccccctcanctgaaatccntggtgttgtttccnacagagctgtctggccttttgtccttgatccttggttaaggaaatgaccaaccaggtaagacctgtgttgaagggaaaaacatcaattggtctctttgccaagttcaagtccagtaggttttctggatgtgtagtcaagaaactnnnnnnnnnnnnnnnnnnnnnnnnnnnnnnnnnnnntgaccctgggtacctagtcaccacagtgttaggtgggactagtgaaatgcaaatactgagaggaggattggttcatccaagtctttacca

SEQ ID NO: 1171 - DNA, 440 bp, Homo sapiens
  misc_feature (66)..(81): n includes a, c, g, or t, or contains no nucleotide
  misc_feature (118)..(133): n includes a, c, g, or t, or contains no nucleotide
  misc_feature (178)..(201): n includes a, c, g, or t, or contains no nucleotide
  misc_feature (284)..(284): n includes a, c, g, or t, or contains no nucleotide
  misc_feature (356)..(356): n includes a, c, g, or t, or contains no nucleotide
  misc_feature (388)..(388): n includes a, c, g, or t, or contains no nucleotide
  misc_feature (390)..(390): n includes a, c, g, or t, or contains no nucleotide
  misc_feature (404)..(404): n includes a, c, g, or t, or contains no nucleotide
ctgatcaataatgcaggttgcatggtcaataaaagagagctcacagaagatggacttgaaaaaaannnnnnnnnnnnnnnntctgggtgtgtacattctcacgaccggcctgatcccnnnnnnnnnnnnnnnncacgacccccgagtgataaccgtctcctcaggaggaatgttggtnnnnnnnnnnnnnnnnnnnnnnnnccagtccgaaagaacaccatttgatggaactatggtctatgcacaaaacaagaggcagcaagtggttctgacggagcggtggncccaagggcacccggccatccatttttcttccatgcatcctggctgggccgacaccccaggtgtgaggcagncgatgccggggttccacgccaggttcggggancncctgcgctccgagncccagggcgcggacaccatgctgtggctggccctct

SEQ ID NO: 1172 - DNA, 532 bp, Homo sapiens
  misc_feature (65)..(65): n includes a, c, g, or t, or contains no nucleotide
  misc_feature (140)..(140): n includes a, c, g, or t, or contains no nucleotide
  misc_feature (179)..(179): n includes a, c, g, or t, or contains no nucleotide
  misc_feature (182)..(196): n includes a, c, g, or t, or contains no nucleotide
  misc_feature (245)..(245): n includes a, c, g, or t, or contains no nucleotide
  misc_feature (478)..(478): n includes a, c, g, or t, or contains no nucleotide
caaatataccaagaagatgaatgctgaaggaaccaacagtccacctcagcgggccagcagcccangggaacccctgcccaccaggattgctggaagtgtgacggagcaggcgggctgaggagagtggaaaaggaagcgancccagaaatggcagggacacttctcttgcagaccaaganggnnnnnnnnnnnnnnntagacaaactacccagcacaggcggggctggaattctggcggagggcangagcctgggactccatgtcacgtttccttctgatttggaatctctccatctgtaattcctcaccctcacccttccaccgttgttagtatcatggtgtttttgtttttgtttttgttttaagaacctgcagtttgactcttcatcgttcatctaggggaagacatctgatgttgttttcctatggaaatatatatctattatatatatattttttgcaaatctcacaaagtgcngcaagcccagctggtcaggaaagagaatacttgcagaggggttcaggttcctct

SEQ ID NO: 1173 - DNA, 281 bp, Homo sapiens
  misc_feature (128)..(197): n includes a, c, g, or t, or contains no nucleotide
caaattgccatgttatggttctgccttgaaacagcacaatgaagtgtatcagtatattctgtgattatgaaacttatatgttgtgttgttttgtgtcttctgttgcctgtcctttgggccagatgtgnnnnnnnnnnnnnnnnnnnnnnnnnnnnnnnnnnnnnnnnnnnnnnnnnnnnnnnnnnnnnnnnnnnnnnttacctaactttttgtatgttttcatgactgtgtgttattttccaaagctgttcctacctcaccatgaggctttatggattgtt

SEQ ID NO: 1174 - DNA, 170 bp, Homo sapiens
tccgtgcactggagaaggcgaggtcaagtgcccaactgcagaccaactacccctcctcagacaacagcctctacaccaacgccaagggcagcaccatttctgccttcgatgggggctcggactccagctcggagtctgagcctgaagagccccaaagcaggaagaagctc

SEQ ID NO: 1175 - DNA, 265 bp, Homo sapiens
aattactgtatctaaaaggagctgctatgaagtacctttcttatgttgctaggctactgtttctgaaagccctggatctctttgcaccaaaaatggtccagatagactctttttaaggatcttggctgctttttactagaaggttgcttttatgagcatatttatactgctgaaggatgagtgttaattttaattaactttgccgttttgtagagaaaactattcacaagataaattccaagtcttttcacctgtcaggcatgca

SEQ ID NO: 1176 - DNA, 519 bp, Homo sapiens
  misc_feature (105)..(140): n includes a, c, g, or t, or contains no nucleotide
  misc_feature (281)..(295): n includes a, c, g, or t, or contains no nucleotide
  misc_feature (399)..(431): n includes a, c, g, or t, or contains no nucleotide
cggcttccaacatgctgcggcatcttaatcttgagtatcactccagcatgatcgcagatgcggtgaagaaggtgatcaaagttggcaaggtgcggactcgagacnnnnnnnnnnnnnnnnnnnnnnnnnnnnnnnnnnnntctgtcatcggtcacctgcagactaaagggagctagagccctttatttcttccaaccttgcaaggaccacactccccatacccttcagtgcagtgtaccagggaagagaccttgtgcctctaagcagtggaccatggtcannnnnnnnnnnnnnncctaggttgtccttgggccggcttccttaggggacagactgttgggtggtgatggggattgttaggatggagcccaggccacatggatgatgatgattctcccnnnnnnnnnnnnnnnnnnnnnnnnnnnnnnnnngctacttgccatgacttcactgaggctgtcattgctgccttgccccacccataggccctgtccatacccatgtaaggtgttcaataaa

SEQ ID NO: 1177 - DNA, 540 bp, Homo sapiens
  misc_feature (62)..(62): n includes a, c, g, or t, or contains no nucleotide
  misc_feature (178)..(178): n includes a, c, g, or t, or contains no nucleotide
  misc_feature (198)..(198): n includes a, c, g, or t, or contains no nucleotide
  misc_feature (419)..(419): n includes a, c, g, or t, or contains no nucleotide
  misc_feature (434)..(441): n includes a, c, g, or t, or contains no nucleotide
  misc_feature (443)..(446): n includes a, c, g, or t, or contains no nucleotide
  misc_feature (448)..(449): n includes a, c, g, or t, or contains no nucleotide
  misc_feature (451)..(452): n includes a, c, g, or t, or contains no nucleotide
  misc_feature (454)..(455): n includes a, c, g, or t, or contains no nucleotide
  misc_feature (457)..(458): n includes a, c, g, or t, or contains no nucleotide
aaagtgctatctgacgttgttatcctgtttttgcaaaaaaaaaaaaaaaaaaaagttaactncagaccattgtttctaataagcagagagatctattttagtagtaaactgaaggtttagttgtgagcttcagattttgtgaactccagatgttgtgcggtgtttttttttttttttnaagacaacaactaaaaaaantgcaaggaatatgtacactggaactgtagtggtagctttcagtattgtaaagagattgttctatacggacctttttgctgtttatcctgtatgtaataaagtcctttctagatcctatgtgaaaagaaaagtgaagcaactgaatcttcagcatgttctcatcggcggagccttcttgtgtaatgtaaactgtgccatgttattaaaaaatgtgaactaanaaaaaaaaaaaaaannnnnnnnannnnannannannannttagggaagaagccatacctgtacaagaccgggctcttgaaaagaaacacctcgaacccagcccgtgtaagaacagaaggct

SEQ ID NO: 1178 - DNA, 404 bp, Homo sapiens
  misc_feature (26)..(26): n includes a, c, g, or t, or contains no nucleotide
  misc_feature (28)..(28): n includes a, c, g, or t, or contains no nucleotide
  misc_feature (39)..(64): n includes a, c, g, or t, or contains no nucleotide
  misc_feature (102)..(147): n includes a, c, g, or t, or contains no nucleotide
  misc_feature (259)..(259): n includes a, c, g, or t, or contains no nucleotide
ccacaggctgcactcgaggagatccncnaattctcaggnnnnnnnnnnnnnnnnnnnnnnnnnnaagggcggacatagagacaggatgaagacatgcttgannnnnnnnnnnnnnnnnnnnnnnnnnnnnnnnnnnnnnnnnnnnnncacctgtccattggcatgcttctgctgggtgagcaggacagctcctgtccccagcgaagaatccggctgcccctgggccagtcccaggacctttgcacaggactgatgggtntaactgacccccacagggaggcaggaaaacagccagaagccaccttgacacttttgaacatttccagttctgtagagtttattgtcaattgcttctcaagtctaaccagcctcagcagtgtgcatagaccatttccaggagggtc

SEQ ID NO: 1179 - DNA, 463 bp, Homo sapiens
tctcactaaccacacactcttgcagagctttcaggtgttactcagctgcatagttacgcagatgtaatgcacattattggcgtatctttaagttggattcaaatggccatttttctccaattttggtaaattggatatcttttttttacaaatacgaccattaacctcagttaaatttttgtttgttttcctgtttgatgctgtctatttgcattgagtgtaagtcatttgaactaatggtataactcctaaagcttctctgctccagttatttttattaaatatttttcacttggcttatttttaaaactgggaacataaagtgcctgtatcttgtaaaacttcatttgtttcttttggttcagagaagttcatttatgttcaaagacgtttattcatgttcaacaggaaagacaaagtgtacgtgaatgctcgctgtctgatagggttccagctccatata

SEQ ID NO: 1180 - DNA, 536 bp, Homo sapiens
  misc_feature (46)..(46): n includes a, c, g, or t, or contains no nucleotide
  misc_feature (59)..(59): n includes a, c, g, or t, or contains no nucleotide
  misc_feature (242)..(242): n includes a, c, g, or t, or contains no nucleotide
  misc_feature (355)..(355): n includes a, c, g, or t, or contains no nucleotide
  misc_feature (402)..(421): n includes a, c, g, or t, or contains no nucleotide
  misc_feature (428)..(443): n includes a, c, g, or t, or contains no nucleotide
gtatccagagcaaggctggatctgggctaggtgacccctggggccntcagacctctgantgggccccagagcccagctgaggaagccacacagcctccaggacgtggcacggttcccctccacttggctgcaagtcgcctgccatggggcgaggaggcctgcaccccagtataagggcctccccagctgagtaagaagctgcttcccctcctctcataggccaagcctattgtgtgaaaccntctcatggtcttggtgacgtagaccatttttgaaaccgtctcatggtcttggtgacgtagaccgtttgcttctttaactccagccgcggaatgacattagtggaaccgggctngggaactgctggaagttcaggatgccaccaccttgaacacctaggcnnnnnnnnnnnnnnnnnnnncgggttnnnnnnnnnnnnnnnntagaaccgttcattcttgctttgtgtcccattccatctcttgaaaaaatgtagtctttgaatgtgtgaaaatctagggacattcaatctagtc

SEQ ID NO: 1181 - DNA, 490 bp, Homo sapiens
  misc_feature (238)..(239): n includes a, c, g, or t, or contains no nucleotide
  misc_feature (278)..(284): n includes a, c, g, or t, or contains no nucleotide
  misc_feature (286)..(286): n includes a, c, g, or t, or contains no nucleotide
  misc_feature (289)..(295): n includes a, c, g, or t, or contains no nucleotide
  misc_feature (297)..(297): n includes a, c, g, or t, or contains no nucleotide
  misc_feature (299)..(299): n includes a, c, g, or t, or contains no nucleotide
  misc_feature (301)..(301): n includes a, c, g, or t, or contains no nucleotide
  misc_feature (303)..(313): n includes a, c, g, or t, or contains no nucleotide
  misc_feature (315)..(315): n includes a, c, g, or t, or contains no nucleotide
  misc_feature (317)..(318): n includes a, c, g, or t, or contains no nucleotide
ttatacttcgggtaaccttgatatttgtattttaatagtacataatctttatgaaaaatagtttgggaatgtaaatgaattattatttggcttggggagattagggcctacattgtttatcgcaattacttgtatcattgatacgggatttctttgtaaagcatcctctacctctcagctgctgaaagctagacctttggtattttccatgctataattcttatggctgctgaaatgnntggtttttatgatttattaaataatctcttaggaggcannnnnnnanaannnnnnnanananannnnnnnnnnnanannggaggggagggtatgataaatgtgggaaactggaaatatattgacttttatgtttataatcttggtagcatttagaatgcccctaagaaatttccattgacaaatgaaatgctatagacttggttttccagttatccatattcattttgtctgtcatatgctttgtatcatc

SEQ ID NO: 1182 - DNA, 549 bp, Homo sapiens
  misc_feature (377)..(384): n includes a, c, g, or t, or contains no nucleotide
  misc_feature (386)..(387): n includes a, c, g, or t, or contains no nucleotide
  misc_feature (399)..(471): n includes a, c, g, or t, or contains no nucleotide
gatttcgtttcgatgactcattacccaatccccatgaacttgtttcagatttgctctgttagcacttttttctttgactcatttggactgaatttgaaattttatatccactccagtgagattatgatttgtagcttcatatatgacatgtttatattgtaaatgcacttttccatggaataatttagggaagtgttttaatgttaaattactagttgctagcatgttatgatttcatatcctgagatagctctgcagataagaaaatatttaaatatatgacaaaaagtaaaattgtacatgtgagtttacatgttaatgaaataattcaacttcaaatgaacttaccagaatgttttgcatatcaacaaaaaaannnnnnnnanntttattatagtnnnnnnnnnnnnnnnnnnnnnnnnnnnnnnnnnnnnnnnnnnnnnnnnnnnnnnnnnnnnnnnnnnnnnnnnnctctatcaacataatttgtttaggaaagcagtatgaagtttaagccaaaataatttctactttatagatgctcaagag

SEQ ID NO: 1183 - DNA, 323 bp, Homo sapiens
  misc_feature (124)..(124): n includes a, c, g, or t, or contains no nucleotide
ggttcatcttccttcctgtacagtattttcaaacttcccagtcattaaaaataagaatatttctcatgttcataccatggatttttctccgagaagtggatactttgccttggggaatgaaaanggcaaggccctgatgtataggttgcaccattactcagacttctaaagagactatttgaagtccagttgagtcacaagagaagcctgtcttgatatatcatctcagaaactttcctgaatatgtgataatatatggaaaatgatttatagatccagctgtgcttaagagccagtaatgtcttaataaacatgtggcagct

SEQ ID NO: 1184 - DNA, 571 bp, Homo sapiens
cctggcagctgcctgcatttcaggaaaagaggaggctcagaccatccagcccccgcccatatcctgaggtggatcaggcaggctctctccccggggacatgaggcacccatacctaggaccccctgcgccttttttagcttcagtcatggcagcacctgagggacacaaggacttgggtgcatcaggacgccttggagaagcgtggcttcctgccaccctgcaacccaccctcccagccaaggaggctgctgtggtggggatccccaggggctttgacacagtcctctgctgtcctccactgggctaattctacacccctgtgcccctcctaggggcccatgagtcagagaggcttgccccaagtcacagccactcagatgttcgacgccccctaaggtccattccagcacccacctgagttccgaggagcacctgggaagctctgggtgcaggatagcagtccagagtccatgccccgctaggccatctgggtgctgggcatggatttctcagcaaggaagactcattaccttccctccctgggcctccattctctcctgggaaacacaa

SEQ ID NO: 1185 - DNA, 85 bp, Homo sapiens
ctgctgcttttatgtgtgctggtgctatgtgtgttcatgtccgcggcagctgtctttttgctactataagggaattctggccacc

SEQ ID NO: 1186 - DNA, 420 bp, Homo sapiens
  misc_feature (103)..(103): n includes a, c, g, or t, or contains no nucleotide
  misc_feature (124)..(124): n includes a, c, g, or t, or contains no nucleotide
  misc_feature (143)..(157): n includes a, c, g, or t, or contains no nucleotide
  misc_feature (160)..(160): n includes a, c, g, or t, or contains no nucleotide
atgtcctgttcacatacctgcttgtatttaaagccctcagtctgtcctgttgtgtggggcgaagtgatggactctgccaggtggacatgctgtgggtggatgnttcccggcgtgtgccgggccntgaatggacaggggccacnnnnnnnnnnnnnnnggnaaaatcactgtcacacaattccaatggattttgtgctctttttgaaaaaaaaaaattctttagcgtaaacatgaattttttttcaatgtagcccctggggaatgaatgaaattttgagcttcttcaatacgtaaaattaaatttataccactgagggagagaccctttctgaaagaagtatggccaaaagcactttaatgctgctgacattgttgtttttatgttcatttgctggagcgcaagacgtgctgacacagtga

SEQ ID NO: 1187 - DNA, 573 bp, Homo sapiens
  misc_feature (360)..(374): n includes a, c, g, or t, or contains no nucleotide
aaggcatttcacatcaccaatgatgagcccatccctttctggacattcctgtctcgcatcctgacaggcctcaattatgaggcccccaagtaccacatcccctactgggtggcctactacctggccctcctgctatccctgctggtgatggtgatcagtcctgtcatccagctgcagcccaccttcacacccatgcgggtcgcactggctggcacattccactactacagctgcgagagagccaaaaaggccatgggctaccagccactagtgaccatggatgatgctatggagaggaccgtgcagagctttcgccacctgcggagggtcaagtgagggacactggaggctgggctctcnnnnnnnnnnnnnnngccagtcactccttcccctgtggattgatgaaataacatcctttgaatgagtttgctctgagcctgtgactccttctgctaggcagagagcgcaccctactctttccgtgacgatgagggcggcaaaaacagacatttcttccttcatggaactggatttggatttcttgaagcaggcagcttcatattataccgattt

SEQ ID NO: 1188 - DNA, 341 bp, Homo sapiens
  misc_feature (68)..(106): n includes a, c, g, or t, or contains no nucleotide
  misc_feature (173)..(192): n includes a, c, g, or t, or contains no nucleotide
cgtgctgtgttttagtcctggtaggaatatttatcagagttcacactatataaaacccaacagcttcnnnnnnnnnnnnnnnnnnnnnnnnnnnnnnnnnnnnnnnagaaacggtttcagtctctggatggatgtgtttgtggtttgtaaccattacggtttaaaccatggtnnnnnnnnnnnnnnnnnnnncagaaattttgttcgggaagggataaactagatatagcatacagagcctgtttttgagttttagatactttatttgtaaataacttaaaatagctttctgaaaccgtgcattctgtagtttcttcctttcagtgaaattgctaaatgtc

SEQ ID NO: 1189 - DNA, 214 bp, Homo sapiens
gcaaatgcactgtgccatttataaccctgacatcacctcccaaggctctcaaggaagatttattttaaataacttaaatagaagtcctagatgatattgtttaggaatttaagagggtggtggatatggtcctgtgaatagcacttcccctgaagccagctcatggtctgttcatttggtttaaaaatgagcttgtattttgcagaagcccaac

SEQ ID NO: 1190 - DNA, 545 bp, Homo sapiens
  misc_feature (73)..(73): n includes a, c, g, or t, or contains no nucleotide
  misc_feature (209)..(209): n includes a, c, g, or t, or contains no nucleotide
  misc_feature (211)..(211): n includes a, c, g, or t, or contains no nucleotide
  misc_feature (302)..(302): n includes a, c, g, or t, or contains no nucleotide
  misc_feature (306)..(307): n includes a, c, g, or t, or contains no nucleotide
  misc_feature (393)..(393): n includes a, c, g, or t, or contains no nucleotide
ggttccatcacaagctatgtttaaaaagaaaattggtgtttggcaaacggaacagaacctttgatgagagcgnttcacagggacactgtctgggggtgcagtgcaagcccccggcctcttccctgggaacctctgaactcctccttcctctgggctctctgtaacatttcaccacacgtcagcatctaatcccaagacaaacattcccncntgctcgaagcagctgtatagcctgtgactctccgtgtgtcagctccttccacacctgattagaacattcataagccacatttagaaacagntttnntttcagctgtcacttgcacacatactgcctagttgtgaaccaaatgtgaaaaaacctccttcatcccattgtgtatctgatacctnccgagggccaagggtgtgtgttgacaacgccgctcccagccggccctggttgcgtccacgtcctgaacaagagccgcttccggatggctcttcccaagggaggaggagctcaagtgtcgggaactgtctaacttcaggttgtgtgagtgcgt

SEQ ID NO: 1191 - DNA, 385 bp, Homo sapiens
  misc_feature (90)..(90): n includes a, c, g, or t, or contains no nucleotide
  misc_feature (97)..(97): n includes a, c, g, or t, or contains no nucleotide
ctgatctatacaaattttcagaaggttattttctttatcattgctaaactgatgacttaccatgggatggggtccagtcccatgaccttnggggtancaattgtaaacctagagttttatcaactttggtgaacagttttggcataatagtcaatttctacttctggaagtcatctcattccactgttggtattatataattcaaggagaatatgataaaacactgccctcttgtggtgcattgaaagaagagatgagaaatgatgaaaaggttgcctgaaaaatgggagacagcctcttacttgccaagaaaatgaagggattggaccgagctggaaaacctcctttaccagatgctgactggcactggtggtttttgctctcg

SEQ ID NO: 1192 - DNA, 133 bp, Homo sapiens
tcacataagggtgcttacttagtttttctcttccttgtctcccactctttcttcatatacggtgtttcttatgtgttccctaaaacaatactttgctttttcctaggttgactatagtcaatggggccaatgg

SEQ ID NO: 1193 - DNA, 511 bp, Homo sapiens
  misc_feature (63)..(114): n includes a, c, g, or t, or contains no nucleotide
  misc_feature (149)..(164): n includes a, c, g, or t, or contains no nucleotide
  misc_feature (258)..(287): n includes a, c, g, or t, or contains no nucleotide
  misc_feature (435)..(482): n includes a, c, g, or t, or contains no nucleotide
tgcctggcttcgccccacctggtttcagctgctcttccttacctgctcgccttttacccttcnnnnnnnnnnnnnnnnnnnnnnnnnnnnnnnnnnnnnnnnnnnnnnnnnnnnactcacccctagatttttgttgcatagccagtaannnnnnnnnnnnnnnntgttttggggaaaactggaaggactgtgttatgggagtggagtataactggtaactggttaatgctttcccctttccattattctttttcttcnnnnnnnnnnnnnnnnnnnnnnnnnnnnnnagacagccaaggcggctcggaatgatgtgtacagagcagccaacagtctcttgcggctggcagtggacggccgcctcagcctgtgtttcatccctccaggctacagtgaacagaaaggcacttgggagtcccaaccctgtaaaatccnnnnnnnnnnnnnnnnnnnnnnnnnnnnnnnnnnnnnnnnnnnnnnnnaaagatgtaccactgtgctcactctttac

SEQ ID NO: 1194 - DNA, 447 bp, Homo sapiens
aatgaccttgaagtcagcacttgctttagctatcaaagtactaaataagaccatggatgttagtaaactctctgctgaaaaagtggaaattgcaacactaacaagagagaatggaaagacagtaatcagagttctcaaacaaaaagaagtggagcagttgatcaaaaaacatgaggaagaagaagccaaagctgagcgtgagaagaaagaaaaagaacagaaagaaaaggataaatagaatcagagattttattactcatttggggcaccatttcagtgtaaaagcagtcctactcttccacactaggaaggctttactttttttaactggtgcagtgggaaaataggacattacatactgaattgggtccttgtcatttctgtccaattgaatactttattgtaacgatgatggttacccttcatggacgtcttaatcttccacac

SEQ ID NO: 1195 - DNA, 479 bp, Homo sapiens
  misc_feature (26)..(26): n includes a, c, g, or t, or contains no nucleotide
  misc_feature (70)..(70): n includes a, c, g, or t, or contains no nucleotide
  misc_feature (77)..(77): n includes a, c, g, or t, or contains no nucleotide
  misc_feature (189)..(189): n includes a, c, g, or t, or contains no nucleotide
  misc_feature (221)..(221): n includes a, c, g, or t, or contains no nucleotide
  misc_feature (224)..(266): n includes a, c, g, or t, or contains no nucleotide
  misc_feature (275)..(275): n includes a, c, g, or t, or contains no nucleotide
  misc_feature (357)..(371): n includes a, c, g, or t, or contains no nucleotide
ggcccctctaccaatagggcagtagnctcctgccctggatgggtataaggtgggcttggtccaacaggtncccaganggtacatactcctttctggggagagaatgctccctaccatatagttgacagtggttaggaactctccctttccctacctaccttccttttaatagcagaattcctatttttncccttgattatgtgtattgatcaccctgcaanccnnnnnnnnnnnnnnnnnnnnnnnnnnnnnnnnnnnnnnnnnnntgggggaangggggggttctttaaaatttctgtggtttgtggctttttcttccatacattagttcccaccatcgcatgcccagggaccacnnnnnnnnnnnnnnncatgctgggatcatcgggggagggtagtgaagctcaccactgtcctttgttttggagatttttatttttgcataagtagtccatcctatacagatagctgattaactg

SEQ ID NO: 1196 - DNA, 389 bp, Homo sapiens
  misc_feature (30)..(44): n includes a, c, g, or t, or contains no nucleotide
  misc_feature (140)..(140): n includes a, c, g, or t, or contains no nucleotide
  misc_feature (144)..(144): n includes a, c, g, or t, or contains no nucleotide
  misc_feature (150)..(150): n includes a, c, g, or t, or contains no nucleotide
  misc_feature (161)..(181): n includes a, c, g, or t, or contains no nucleotide
  misc_feature (292)..(309): n includes a, c, g, or t, or contains no nucleotide
  misc_feature (314)..(332): n includes a, c, g, or t, or contains no nucleotide
aattcaggatattgccctgccatccatgannnnnnnnnnnnnnncaaaagtaatgacaaatgttaagtgtaataatagaaaagtagagcaaagagccattcagcttcagtctttacataccatgaataaaacattaaaancatncatatnggagaagtttnnnnnnnnnnnnnnnnnnnnnagtactgtggagttttaacattttgtcctcttttcagtgaaacagagtaaaaatattcatctaccattactgttatttgctgattttgttttattttttgatggtaatatnnnnnnnnnnnnnnnnnnttgcnnnnnnnnnnnnnnnnnnntcttggctttagtaggtatagaagacaatggattaccatctttattgctgtaatgtg

SEQ ID NO: 1197 - DNA, 520 bp, Homo sapiens
  misc_feature (89)..(110): n includes a, c, g, or t, or contains no nucleotide
  misc_feature (329)..(350): n includes a, c, g, or t, or contains no nucleotide
  misc_feature (422)..(489): n includes a, c, g, or t, or contains no nucleotide
gacgtgacacgcagcccacggtctgtactgacgcgccctcgcttcttcctctttctcgactccatcttcgcggtagctgggaccgccgnnnnnnnnnnnnnnnnnnnnnntttgtccgcgcccaggagctacacaccttcgaggtgaccggccaggaaacggtcgcccagatcaaggctcatgtagcctcactggagggcattgccccggaagatcaagtcgtgctcctggcaggcgcgcccctggaggatgaggccactctgggccagtgcggggtggaggccctgactaccctggaagtagcaggccgcatgcttggaggtaaagtnnnnnnnnnnnnnnnnnnnnnnggaaaagtgagaggtcagactcctaaggtggccaaacaggagaagaagaagaagaagacaggtcgggctaannnnnnnnnnnnnnnnnnnnnnnnnnnnnnnnnnnnnnnnnnnnnnnnnnnnnnnnnnnnnnnnnnnnatgccaactcttaagtcttttgtaattctgg

SEQ ID NO: 1198 - DNA, 565 bp, Homo sapiens
ggacccagggatgacatgtccctacacccctcccctgccctagagcacactgtagcattacagtgggtgccccccttgccagacatgtggtgggacagggacccacttcacacacaggcaactgaggcagacagcagctcaggcacacttcttcttggtcttatttattattgtgtgttatttaaatgagtgtgtttgtcaccgttggggattggggaagactgtggctgctggcacttggagccaagggttcagagactcagggccccagcactaaagcagtggaccccaggagtccctggtaataagtactgtgtacagaattctgctacctcactggggtcctggggcctcggagcctcatccgaggcagggtcaggagaggggcagaacagccgctcctgtctgccagccagcagccagctctcagccaacgagtaatttattgtttttcctcgtatttaaatattaaatatgttagcaaagagttaatatatagaagggtaccttgaacactgggggaggggacattgaacaagttgtttcattgactatcaaactgaag

SEQ ID NO: 1199 - DNA, 540 bp, Homo sapiens
  misc_feature (113)..(127): n includes a, c, g, or t, or contains no nucleotide
  misc_feature (340)..(355): n includes a, c, g, or t, or contains no nucleotide
  misc_feature (414)..(414): n includes a, c, g, or t, or contains no nucleotide
  misc_feature (457)..(457): n includes a, c, g, or t, or contains no nucleotide
tggagacataacaccaattaaagcaaagaagatgttcttaaagccccaggattaagatggatgccttaagcgatggcccaggggtgcttggtggaagtcagcagggcatctgnnnnnnnnnnnnnnngtgtctctatagttattaatactgtaacgtttacttgtaaagagattatcattttagaaacatgctgtttttgaaacagatgtgtgatggatgttgtacatcctttgcttcttggtattcattcagagtggatttttagcccctgatctacaaatgtacattgttacagggctgcttcctaaagattttttttacctcaggtttctcttaatnnnnnnnnnnnnnnnntgaccttgaattgacttacataaactactgccaatgtttaaattgcccttatgtttatntttattatgtcaagccaattcgtacatacaatttggaatcaantgtcataagaatttattatataaatttatcaagaataaaaatgcctctccagccttaagtatttacatgctcccaggtcattg

SEQ ID NO: 1200 - DNA, 402 bp, Homo sapiens
  misc_feature (49)..(49): n includes a, c, g, or t, or contains no nucleotide
  misc_feature (99)..(99): n includes a, c, g, or t, or contains no nucleotide
  misc_feature (236)..(236): n includes a, c, g, or t, or contains no nucleotide
  misc_feature (294)..(294): n includes a, c, g, or t, or contains no nucleotide
  misc_feature (333)..(333): n includes a, c, g, or t, or contains no nucleotide
  misc_feature (341)..(355): n includes a, c, g, or t, or contains no nucleotide
  misc_feature (372)..(372): n includes a, c, g, or t, or contains no nucleotide
ctcatggacatcacaagaccatcagtctgaatccaggtcgtgggggctntcatagccgaactccttctgcacatccagagggtacttgctccacatccnctgtctgctgctgcctctttcctcctcactcaggctgttgtagtcagcagagcctagaatgacatcccgggagtggattctaaatgtgattttcctaggctactgcaggagccccttctcttctcagaaaggtctgnttttgttcccgattgtaatgcaaaatccttgctcaataaataaaaaagaatatagaantcttttttttttaaagaaggaatcactttcctatcatcntaaaccannnnnnnnnnnnnnngagtattttgtcacttnctcccctccgtggagtattttgtcacttct

SEQ ID NO: 1201 - DNA, 411 bp, Homo sapiens
  misc_feature (30)..(30): n includes a, c, g, or t, or contains no nucleotide
  misc_feature (90)..(91): n includes a, c, g, or t, or contains no nucleotide
  misc_feature (97)..(116): n includes a, c, g, or t, or contains no nucleotide
  misc_feature (172)..(172): n includes a, c, g, or t, or contains no nucleotide
cccaaggtgggacttggagaatattttgcnttggcatatgtttggtctgaatggtgtagttgctggttccctagagaggaaaaggtggcnnggcccnnnnnnnnnnnnnnnnnnnncttaatttccagttgaaaccctagtagaattgtgaatgaaaacctcaaggttgagncccctctgccaagcagcagagctagtagaaggggatgcaggggcaaagcactcagttgccaagcaaggaggagagatgtacgtgggctgtgtggcagtccccacaccctgccctggcttcttcaggttatcgcaccactatggaatcctttgcagaatggtactcatataatggtttaaaacaacacattcataattgactctgtgcaggatgtcactcaatcagtttgggtttgcttt

SEQ ID NO: 1202 - DNA, 203 bp, Homo sapiens
  misc_feature (68)..(154): n includes a, c, g, or t, or contains no nucleotide
ccatatattctacagcaccccggtgccgtgttaactccctcaatggagcacaccatgtcactacagcnnnnnnnnnnnnnnnnnnnnnnnnnnnnnnnnnnnnnnnnnnnnnnnnnnnnnnnnnnnnnnnnnnnnnnnnnnnnnnnnnnnnnnntgcaaggagcctacttgccacagtatgaacatatgcagacgacagcggc

SEQ ID NO: 1203 - DNA, 175 bp, Homo sapiens
  misc_feature (29)..(29): n includes a, c, g, or t, or contains no nucleotide
  misc_feature (32)..(32): n includes a, c, g, or t, or contains no nucleotide
  misc_feature (35)..(35): n includes a, c, g, or t, or contains no nucleotide
  misc_feature (39)..(39): n includes a, c, g, or t, or contains no nucleotide
  misc_feature (43)..(43): n includes a, c, g, or t, or contains no nucleotide
  misc_feature (46)..(46): n includes a, c, g, or t, or contains no nucleotide
  misc_feature (82)..(83): n includes a, c, g, or t, or contains no nucleotide
  misc_feature (86)..(86): n includes a, c, g, or t, or contains no nucleotide
  misc_feature (90)..(90): n includes a, c, g, or t, or contains no nucleotide
  misc_feature (93)..(93): n includes a, c, g, or t, or contains no nucleotide
  misc_feature (108)..(108): n includes a, c, g, or t, or contains no nucleotide
  misc_feature (134)..(134): n includes a, c, g, or t, or contains no nucleotide
  misc_feature (139)..(140): n includes a, c, g, or t, or contains no nucleotide
  misc_feature (145)..(146): n includes a, c, g, or t, or contains no nucleotide
tgggctatccatcctctgtcttagcctgnacnatnctgntttntgntagaatggttaccacttgcggctctagctaggtganngtntaancanggtctcggttctcanacaactctgatggcatcgaagaattntcccnnacaanngcctagacactgacattgacgtctctgct

SEQ ID NO: 1204 - DNA, 220 bp, Homo sapiens
gggaacagcccctgtgacatgtccccttccacctgccctctcccccaaagctgtatttttctctggctgagattagaacacattccttgtaaagtatttttctacatcgggttttcttagggctctcgggaagcacaaggggctgtattgcaaaggccgcttatggtctgtttggggccctcgtctaagtctttgtcccaccaggggttgcagtggcttg

SEQ ID NO: 1205 - DNA, 441 bp, Homo sapiens
  misc_feature (29)..(30): n includes a, c, g, or t, or contains no nucleotide
  misc_feature (37)..(37): n includes a, c, g, or t, or contains no nucleotide
  misc_feature (40)..(40): n includes a, c, g, or t, or contains no nucleotide
  misc_feature (43)..(43): n includes a, c, g, or t, or contains no nucleotide
  misc_feature (50)..(50): n includes a, c, g, or t, or contains no nucleotide
  misc_feature (52)..(52): n includes a, c, g, or t, or contains no nucleotide
  misc_feature (59)..(60): n includes a, c, g, or t, or contains no nucleotide
  misc_feature (73)..(73): n includes a, c, g, or t, or contains no nucleotide
  misc_feature (93)..(93): n includes a, c, g, or t, or contains no nucleotide
  misc_feature (105)..(106): n includes a, c, g, or t, or contains no nucleotide
  misc_feature (121)..(121): n includes a, c, g, or t, or contains no nucleotide
  misc_feature (129)..(129): n includes a, c, g, or t, or contains no nucleotide
  misc_feature (131)..(132): n includes a, c, g, or t, or contains no nucleotide
  misc_feature (139)..(139): n includes a, c, g, or t, or contains no nucleotide
  misc_feature (145)..(145): n includes a, c, g, or t, or contains no nucleotide
  misc_feature (188)..(188): n includes a, c, g, or t, or contains no nucleotide
  misc_feature (190)..(190): n includes a, c, g, or t, or contains no nucleotide
  misc_feature (211)..(211): n includes a, c, g, or t, or contains no nucleotide
  misc_feature (247)..(247): n includes a, c, g, or t, or contains no nucleotide
  misc_feature (252)..(252): n includes a, c, g, or t, or contains no nucleotide
  misc_feature (254)..(256): n includes a, c, g, or t, or contains no nucleotide
  misc_feature (259)..(260): n includes a, c, g, or t, or contains no nucleotide
  misc_feature (263)..(264): n includes a, c, g, or t, or contains no nucleotide
  misc_feature (269)..(275): n includes a, c, g, or t, or contains no nucleotide
  misc_feature (278)..(279): n includes a, c, g, or t, or contains no nucleotide
  misc_feature (281)..(286): n includes a, c, g, or t, or contains no nucleotide
  misc_feature (288)..(289): n includes a, c, g, or t, or contains no nucleotide
  misc_feature (291)..(294): n includes a, c, g, or t, or contains no nucleotide
  misc_feature (296)..(297): n includes a, c, g, or t, or contains no nucleotide
  misc_feature (299)..(303): n includes a, c, g, or t, or contains no nucleotide
  misc_feature (305)..(305): n includes a, c, g, or t, or contains no nucleotide
  misc_feature (307)..(308): n includes a, c, g, or t, or contains no nucleotide
  misc_feature (398)..(416): n includes a, c, g, or t, or contains no nucleotide
gggtccctgagactctcctgtgcagcctnnggattcnacnttnagtagcnantggatgnnctgggtccgccangctccagggaaggggctggngtgggtctcacnnattaatagtgatggnagtagcanannctacgcngactcngtgaagggccgattcaccatctccagagacaacgccaagaacncnctgtatctgcaaatgaacagnctgagagccgaggacacggctgtgtattactgtgcnagagncnnngtnnggnnaagtnnnnnnnagnncnnnnnnanncnnnncnncnnnnncntnngagaccacgagggggtgtcctgggccctgtgaactgggctgctctccgtggcagcggctggtggtgctaaaggctgattttctctcagcnnnnnnnnnnnnnnnnnnnagtttcctcagagaacctttcagat

SEQ ID NO: 1206 - DNA, 568 bp, Homo sapiens
  misc_feature (109)..(109): n includes a, c, g, or t, or contains no nucleotide
  misc_feature (228)..(242): n includes a, c, g, or t, or contains no nucleotide
  misc_feature (288)..(288): n includes a, c, g, or t, or contains no nucleotide
  misc_feature (420)..(434): n includes a, c, g, or t, or contains no nucleotide
  misc_feature (503)..(505): n includes a, c, g, or t, or contains no nucleotide
agccgagtggcctttgctcagatgactatgccctgccccaacttctacattctggatgaacccacaaaccacctggacatggagaccattgaggctctgggccgtgccntcaacaatttcaggggtggtgtgattctggtgtcccacgatgagcgctttatcaggctggtgtgccgggagttgtgggtatgcgaaggaggcggcgtcacccgtgtggaaggaggattnnnnnnnnnnnnnnncctcctccaggaacagttccgccgcgaaggcttcctctagggccanccaggctgaggactcgcccaggacatggactggtctctcagacccctgggccaccatgtaggccaccactccaggccgtggacttcccccaacttggggacagccttattcccaaatgtctctatccttttnnnnnnnnnnnnnnntgcacaaccttgggagcccatccaagggttggtgaggactggtctcccgggggtgggggtctggggggnnncctctggggttatagattcccccactgccccagctctgactggaccccaagtggctgctatgt

SEQ ID NO: 1207 - DNA, 290 bp, Homo sapiens
  misc_feature (47)..(61): n includes a, c, g, or t, or contains no nucleotide
  misc_feature (63)..(63): n includes a, c, g, or t, or contains no nucleotide
  misc_feature (79)..(79): n includes a, c, g, or t, or contains no nucleotide
  misc_feature (262)..(262): n includes a, c, g, or t, or contains no nucleotide
ttgattatctgcagcagaagaaaacagaaggttataccatcattggnnnnnnnnnnnnnnncnaaaagtttagacctancccaatattgctttcctgagaaatctctgctcttgttgggaaatgaacgtgagggaattccagcaaatctgatccaacagttggacgtttgtgtggaaattcctcaacagggcattatccgctccctgaatgtccatgtgagtggagccctgctgatctgggagtacaccaggcagcagctgntctcgcacggagataccaagccatgatg

SEQ ID NO: 1208 - DNA, 144 bp, Homo sapiens
aatcgagcaccgttgactcacaagatgaacaaaatggtgacgtcagaagaacagatgaagttgccatccaccaagaaggcagagccgccgacttgggcacaactaaagagctgacgcagttagctacaaaatatctagagaaca

SEQ ID NO: 1209 - DNA, 576 bp, Homo sapiens
gattcaggtccgttcctctgaagaatgggtacagcgaggacatagagctggcttccctcctggttttctgtgagatgcggccagtcctggagagcgaagaggaactttactcctcctgtcgccagctgaggaggcggcaagaagaactgaacaaccagctctttctgtatgacacacaccagaacttgcgcaatgccaaccgggatgccctggttaaagagttcagtgttaatgagaaccactccagctgtaccaggagaaatgcaacaagaggttaagagagaagagagtcagcaacagcaagttttactcatagaagctggggtatgtgtgtaagggtattgtgtgtgtgcgcatgtgtgtttgcatgtaggagaacgtgccctattcacactctgggaagacgctaatctgtgacatcttttcttcaagcctgccatcaaggacatttcttaagacccaactggcatgagttggggtaatttcctattattttcatcttggacaacttctaacttatatctttatagaggattccccaaaatgtgctcctcatttttggcctctcatgttcca

SEQ ID NO: 1210 - DNA, 550 bp, Homo sapiens
  misc_feature (44)..(44): n includes a, c, g, or t, or contains no nucleotide
  misc_feature (431)..(432): n includes a, c, g, or t, or contains no nucleotide
  misc_feature (438)..(438): n includes a, c, g, or t, or contains no nucleotide
  misc_feature (443)..(444): n includes a, c, g, or t, or contains no nucleotide
  misc_feature (446)..(461): n includes a, c, g, or t, or contains no nucleotide
  misc_feature (463)..(468): n includes a, c, g, or t, or contains no nucleotide
tacagagggcctagtggaggctacagaggatctgggggattccnagcgaggaggtggtaggggggcctatggaactggctactttggacagggaagaggaggtggcggctattaaaacttggttatgtcagttcctgtgtgtagacagtaaggaaaaaaaggcatgctatgtgttacgtgttttttccagtatgtttatttgccaccaaaaagtaaatgcattttcacccattctgtggttcattgtagtttaaggaaaccaagcatatagatgcattagtgattttgtttatattatgtaaaatataacgatctcttaaaaataccacagtttgtattttttctttaaggagtaaagatttgcctttaaataacttggtattttcctggctttcgtttaatacaatagaaaataaagtattacaccgaannaaaaanaaaannannnnnnnnnnnnnnnncnnnnnntagaaaattttacaatgccagctacatctgttgattttaaatgtcaaagaagttgtaccctgtttcaaaagtatactaagtg

SEQ ID NO: 1211 - DNA, 305 bp, Homo sapiens
  misc_feature (146)..(148): n includes a, c, g, or t, or contains no nucleotide
  misc_feature (221)..(222): n includes a, c, g, or t, or contains no nucleotide
cagattccggcttctacatgggacagacggggacgcacaggccaccttccttctggcagggactcttatttattcccattgctctagggctttcggtttccccttcttccggtaggccgcgtagaggcatgcaccgggtaggtttnnncggtgaccccgcggcggcctgagggacgctccctgccccatcccggctgttgggctgggccgctttgcctctnnttcgccctgtgctgtgttctccagctttgtagcagcagccttgacaaacccaggcgcactgtaccaaggcaatgtaacttttg

SEQ ID NO: 1212 - DNA, 586 bp, Homo sapiens
  misc_feature (391)..(442): n includes a, c, g, or t, or contains no nucleotide
  misc_feature (459)..(481): n includes a, c, g, or t, or contains no nucleotide
  misc_feature (518)..(518): n includes a, c, g, or t, or contains no nucleotide
  misc_feature (520)..(520): n includes a, c, g, or t, or contains no nucleotide
gcccactgaaggtgcttagcggctctgaggtgaccgcatagacttctcagaccaagggacctggatgacaggcaatcaaggcctgagcaaccaaaaggagtgccccatatggcttttctacctgtaacatgcacatagagccatggccgtagatttataaataccaagagaagttctatttttgtaaagactgcaaaaaggaggaaaaaaaaccttcaaaaacgccccctaagtcaacgctccattgactgaagacagtccctatcctagaggggttgagctttcttcctccttgggttggaggagaccagggtgcctcttatctccttctagcggtctgcctcctggtacctcttggggggatcggcaaacaggctacccctgaggtccnnnnnnnnnnnnnnnnnnnnnnnnnnnnnnnnnnnnnnnnnnnnnnnnnnnngagagacacagccctcnnnnnnnnnnnnnnnnnnnnnnnggtgccagctgtgtcctgggttaggggttgggggtcngncccttccagggccaggagggcaggttccctctctggtgctgctgcttgcaagtcttagaggaaata

SEQ ID NO: 1213 - DNA, 516 bp, Homo sapiens
  misc_feature (122)..(160): n includes a, c, g, or t, or contains no nucleotide
  misc_feature (235)..(270): n includes a, c, g, or t, or contains no nucleotide
  misc_feature (402)..(450): n includes a, c, g, or t, or contains no nucleotide
cctgggcctcagtgaagaattaggggcccgcgctgcacaggaaagttccctttggtccacagggccatttcaagcaagttcaatgacctggtcccttagagctccatatcccagtcccagcnnnnnnnnnnnnnnnnnnnnnnnnnnnnnnnnnnnnnnncagcttgctcaggccccagggtggctgcctcggccctcccagctcttacactcagctccagtggcttctcctttnnnnnnnnnnnnnnnnnnnnnnnnnnnnnnnnnnnntccagcttgctggatgttacctgtcctcttccctccacaagtcttggcccttaacctttatctttcttcctgtcctctcacctagattgtaagctccctgggccaggacttcagcctgcctccgagggtccnnnnnnnnnnnnnnnnnnnnnnnnnnnnnnnnnnnnnnnnnnnnnnnnntctgatgactgactaaagatgctaggcgtgacaccgttccctccaaaagcagacctcggaatcact

SEQ ID NO: 1214 - DNA, 541 bp, Homo sapiens
  misc_feature (214)..(219): n includes a, c, g, or t, or contains no nucleotide
  misc_feature (221)..(223): n includes a, c, g, or t, or contains no nucleotide
  misc_feature (225)..(225): n includes a, c, g, or t, or contains no nucleotide
gtatccaggttgatgcctacttcagtcccattcactcccagttggatcatttactggatccttcttctttcactggtcgtgcctcccagcaggtgcagagattcttagaagaggaggtgtatcccctgttaaaaccatatgaaagcgtgatgaaggtgaaagcagaattatgtctgtagagttggaagagaattaaacgaaaatcattgttaannnnnnannnangaaaattgtgttactataatgccttattttacctcgagaattgttaccttaaattagtacagcactttcttcttcccatggtgctttcctgtttctcagtctcacatttctcaacaaggcaaaaacaaagagcgttgaagttgactctgctcttgcatagtaaatgtagttcatacttgatctctgttctttcaaggcatattttccagctgcctcaagtttagtccttttcacgtgttcatttgcttgtaaagtagcaagaaatttctggtcctgtcttctaaaagtgaatttgatctaggtctagcaaaataac

SEQ ID NO: 1215 - DNA, 560 bp, Homo sapiens
  misc_feature (199)..(224): n includes a, c, g, or t, or contains no nucleotide
  misc_feature (259)..(259): n includes a, c, g, or t, or contains no nucleotide
  misc_feature (276)..(276): n includes a, c, g, or t, or contains no nucleotide
  misc_feature (327)..(327): n includes a, c, g, or t, or contains no nucleotide
  misc_feature (498)..(513): n includes a, c, g, or t, or contains no nucleotide
  misc_feature (534)..(534): n includes a, c, g, or t, or contains no nucleotide
tttgcatttctgttggaatgatccgaactggactcacatcctgtatggtggatggactgtatattgagggttccattcttcgcgcagtttagacatctctgttttgattctttgttgttgtttttattttaaaaggcacaaactctagatattagttgaatgttgaggctttaactttttcggtgtctttctacaactnnnnnnnnnnnnnnnnnnnnnnnnnnttaatatcagtgcagactgtctcctctacgtgacngtataatgtttttctcntcttgtagtctctatggcgtgtctttatggtgtaataaggttctcacgggntcaatcttttgtgtttagagaggccacggttcagacaatggtatatatttttgttatcaggtgcatgtctgtctgatttctttttttttcctgttggactatgtttgtgaacataattgtcataagttatgtttcagatttttgaatttatttatatgtgttataatgaannnnnnnnnnnnnnnnggaaatatttctacatgtgcntatagttttccaagagtgtaccatta

SEQ ID NO: 1216 - DNA, 539 bp, Homo sapiens
  misc_feature (162)..(187): n includes a, c, g, or t, or contains no nucleotide
taactgatagatggtgcagcatgtctacatggttgtttgttgctaaactttatataatgtgtggtttcaattcagcttgaaaaataatctcactacatgtagcagtacattatatgtacattatatgtaatgttagtatttctgctttgaatccttgatatnnnnnnnnnnnnnnnnnnnnnnnnnntgtatttgatatgctagttattgtgtgcgatttaaactttttttgctttctccctttttttggttgtgcgctttcttttacaacaagcctctagaaacagatagtttctgagaattactgagctatgtttgtaatgcagatgtacttagggagtatgtaaaataatcattttaacaaaagaaatagatatttaaaatttaatactaactatgggaaaagggtccattgtgtaaaacatagtttatctttggattcaatgtttgtctttggttttacaaagtagcttgtattttcagtattttctacataatatggtaaaatgtagagcaattgcaatgcatcaataaaatgg

SEQ ID NO: 1217 - DNA, 249 bp, Homo sapiens
  misc_feature (58)..(97): n includes a, c, g, or t, or contains no nucleotide
gtgcagagactgatcaccaacgtggagtcccagctggcggagatccgcagtgacctgnnnnnnnnnnnnnnnnnnnnnnnnnnnnnnnnnnnnnnnngggcgcggctggagtgtgagatcaacacgtaccggagcctgctggagagcgaggactgcaagctcccctccaacccctgcgccacaaccaatgcatgtgacaagtccactgggccctgtatctctaatccctgtggcctacgtgctcggtgt

SEQ ID NO: 1218 - DNA, 433 bp, Homo sapiens
  misc_feature (145)..(167): n includes a, c, g, or t, or contains no nucleotide
  misc_feature (169)..(170): n includes a, c, g, or t, or contains no nucleotide
  misc_feature (326)..(327): n includes a, c, g, or t, or contains no nucleotide
tcttaggggtcattatcacttaaataatactgtacctaggtctttcaaattaaaattatacctgaatgaagttgtttgtatacataaaggatatttgtgtacaattaccttttttcccccacacttgttttctttgtttttgttnnnnnnnnnnnnnnnnnnnnnnntnnactatgggattcatttatgtctgtctttctatcataaagaattgatcaatatgtaaatatgtgatttgaaccatggttgacttacaagtgtcactacagctttttagaaaacatagccctaatatatgttaagcaggacccgggtgagccagtggnnttgcgctttatgtagagctggaagaaggccgtccatcctgtctcttgggcggacagtgtactttcctaatagggaagggaagcacaatggaaatacccctgaaccg

SEQ ID NO: 1219 - DNA, 526 bp, Homo sapiens
  misc_feature (26)..(26): n includes a, c, g, or t, or contains no nucleotide
  misc_feature (30)..(30): n includes a, c, g, or t, or contains no nucleotide
  misc_feature (188)..(202): n includes a, c, g, or t, or contains no nucleotide
  misc_feature (418)..(432): n includes a, c, g, or t, or contains no nucleotide
agtgacccaaagatgagatggaccgncagnccagctcctcgaccattcgtttgtcaaggtttgcacagatgaagaatgaagcctagtagaatatggacttggaaaattctcttaatcactactgtatgtaatatttacataaagactgtgctgagaagcagtataagcctttttaaccttccaagacnnnnnnnnnnnnnnntgacaagcgtcacttctcctgctgctcctgtttgtctgatgtggcaaaaggccctctggagggctggtggccacgaggttaaagaagctgcatgttaagtgccattactactgtacacggaccatcgcctctgtctcctccgtgtctcgcgcgactgagaaccgtgacatcagcgtagtgttttgacctttctaggttcaaaagaagttgtagtgnnnnnnnnnnnnnnntaccttgtttttaatctcctgtttgttgagtgcactgactgtgaaacctttaccttttttgttgttgttggcaagctgcaggtttgtaatgcaa

SEQ ID NO: 1220 - DNA, 384 bp, Homo sapiens
catggattcttttcaaatcaggaaagattagaaaaggaacccaaaaaaccctttaacagtgtgaatctttatagtatttgaaaatgagaagaagcagcagattgtaatttggtttattggatgtgatggacgttctgtaatagaaaacctgaaacgatgattgaatgggaaaaagagactacaaaatttgtcgtaggatgtatacagacttattttctttattacagtattataagaaaacatatgtatttgtaaaaatggtttcctgtgtcaagtatttgtgcagtcagagctgacttgtaaactattcttgtaatagctcattattttgaaagatttatatatgatgaattctggatatatgaccaataaaactgatgaagc

SEQ ID NO: 1221 - DNA, 235 bp, Homo sapiens
  misc_feature (115)..(130): n includes a, c, g, or t, or contains no nucleotide
  misc_feature (176)..(176): n includes a, c, g, or t, or contains no nucleotide
  misc_feature (189)..(189): n includes a, c, g, or t, or contains no nucleotide
gggccaacatgttccaacactacatccgacatcagaagagctaacaattgctggaatgacctttacaactttggatcttgtgggcacgagcaagcacgtcgcgtttggaaaaatnnnnnnnnnnnnnnnnatgggattgtctttctggtggactgtgcagatcattctcgcctcgnggaatccaaagtnggagcttaatgctttaatgactgatgaaacaatatccaatgtgcca

SEQ ID NO: 1222 - DNA, 397 bp, Homo sapiens
ttctccgaggtctggactttcttcattcacaccgagtagtgcatcgcgatctaaaaccacagaacattctggtgaccagcagcggacaaataaaactcgctgacttcggccttgcccgcatctatagtttccagatggctctaacctcagtggtcgtcacgctgtggtacagagcacccgaagtcttgctccagtccagctacgccacccccgtggatctctggagtgttggctgcatatttgcagaaatgtttcgtagaaagcctctttttcgtggaagttcagatgttgatcaactaggaaaaatcttggacgtgattggactcccaggagaagaagactggcctagagatgttgcccttcccaggcaggcttttcattcaaaatctgcccaacc

SEQ ID NO: 1223 - DNA, 506 bp, Homo sapiens
  misc_feature (28)..(28): n includes a, c, g, or t, or contains no nucleotide
  misc_feature (238)..(238): n includes a, c, g, or t, or contains no nucleotide
tttattggcaatacctagtgatacggantttagctaacaaaagatatgaagaactattatattgaggcctgtcctctacataccacacttaaaagatggtgaactgtgagtactacttaggttgacagcaacaaagcataagacaagccccaggtaaacgtctaaactgtttactcacattgtcctactccagccccttcaattatttcccatctccacaaatagtcgggggaaaaanttaaaattttcctttatgattcttactgttcttcgcagctcatcttttcctgcttagaattaaccattgctaatttaaaggagcagctagctgcttttctgtcagtctgaagcgtagtagtggaagaggtagtaagcaccagctgcctctttgctgctttgttttcctcctgattctcttaaatttgggttgcaaagctatcccgccccccaccctgccccatgaaacttgagcattcaaatgaagattcagcagtgtctgttcttca

SEQ ID NO: 1224 - DNA, 408 bp, Homo sapiens
gggaaactaccactcaaagaataattgttaaaaattaagcttttaggtattagaagctgttataaagtataaaattaagatataagcagatcacatgtaaatcattcctaaagcacaagaaaagaatgtgccttgatgtacatatattactaagttgcctctcccagtttactttaaaaatggctttaaggataaagaataaatgtgatagctgtgcatgcattatatatttgcatttgcaaatttcccattgttttaacagctgtgtggctgactttcaattttaagacgtgaattgacatacagcccataactttataatggctgctcatttatcttatctttcagttagtggaaaaacatttcaacctgactaaaatttggaattgtgtcttttatgttccatcc

SEQ ID NO: 1225 - DNA, 484 bp, Homo sapiens
  misc_feature (64)..(68): n includes a, c, g, or t, or contains no nucleotide
  misc_feature (70)..(81): n includes a, c, g, or t, or contains no nucleotide
  misc_feature (90)..(90): n includes a, c, g, or t, or contains no nucleotide
  misc_feature (92)..(92): n includes a, c, g, or t, or contains no nucleotide
  misc_feature (94)..(94): n includes a, c, g, or t, or contains no nucleotide
  misc_feature (98)..(99): n includes a, c, g, or t, or contains no nucleotide
  misc_feature (104)..(105): n includes a, c, g, or t, or contains no nucleotide
  misc_feature (107)..(108): n includes a, c, g, or t, or contains no nucleotide
  misc_feature (111)..(114): n includes a, c, g, or t, or contains no nucleotide
  misc_feature (116)..(214): n includes a, c, g, or t, or contains no nucleotide
  misc_feature (457)..(457): n includes a, c, g, or t, or contains no nucleotide
actgtggtgagctccaaggaagtgaataagtttcagatggcttattcaaacctccttagagctnnnnngnnnnnnnnnnnnaagagaganananagannaaaannannaannnnannnnnnnnnnnnnnnnnnnnnnnnnnnnnnnnnnnnnnnnnnnnnnnnnnnnnnnnnnnnnnnnnnnnnnnnnnnnnnnnnnnnnnnnnnnnnnnnnnnaagggcatacatttcctgctttcaccaattaaccactgaattgctattttttccttttggccagatagctaggtttctggttcccccacagtaggtgttttcacataagattagggtccttttggaaagaatagttgcagtgtttataggatagttgtggtaagaatctagtttattttgcatttggctaattggtctgtgctgcatggttatatactcctggattatagattaaaagtctcngtagacatctctgtgaagagcaagcta

SEQ ID NO: 1226 - DNA, 587 bp, Homo sapiens
  misc_feature (121)..(121): n includes a, c, g, or t, or contains no nucleotide
  misc_feature (219)..(419): n includes a, c, g, or t, or contains no nucleotide
  misc_feature (426)..(430): n includes a, c, g, or t, or contains no nucleotide
  misc_feature (432)..(432): n includes a, c, g, or t, or contains no nucleotide
  misc_feature (434)..(435): n includes a, c, g, or t, or contains no nucleotide
  misc_feature (437)..(438): n includes a, c, g, or t, or contains no nucleotide
  misc_feature (441)..(441): n includes a, c, g, or t, or contains no nucleotide
  misc_feature (444)..(447): n includes a, c, g, or t, or contains no nucleotide
  misc_feature (456)..(478): n includes a, c, g, or t, or contains no nucleotide
gtgctcagactggaaaagatcatggaaaacttgaagaatgcagagattgaaccagatgattactttatgagtcgctatgagaagaagctagaagaactcaaagctaaggagcagtcaggancccagataagaaagccatcctagtttttatctcaagatgtgtcataccgtctgtaatgaagcaggcatgccctctttaggctaacatattttagtggnnnnnnnnnnnnnnnnnnnnnnnnnnnnnnnnnnnnnnnnnnnnnnnnnnnnnnnnnnnnnnnnnnnnnnnnnnnnnnnnnnnnnnnnnnnnnnnnnnnnnnnnnnnnnnnnnnnnnnnnnnnnnnnnnnnnnnnnnnnnnnnnnnnnnnnnnnnnnnnnnnnnnnnnnnnnnnnnnnnnnnnnnnnnnnnnnnnnnnnnnaaagaannnnngnanncnnaanttnnnnactaaaaannnnnnnnnnnnnnnnnnnnnnnacaatgtttttgtcagtattatatttggacttcagggaacttaattatttaatgggagctttggacacctggcagatgggaggggctggatcttgtgttcaagtttaac

SEQ ID NO: 1227 - DNA, 359 bp, Homo sapiens
  misc_feature (298)..(321): n includes a, c, g, or t, or contains no nucleotide
gaacaagtcggtcaggaagcccgcgcgcaacagccatggcttttaaggataccggaaaaacacccgtggagccggaggtggcaattcaccgaattcgaatcaccctaacaagccgcaacgtaaaatccttggaaaaggtgtgtgctgacttgataagaggcgcaaaagaaaagaatctcaaagtgaaaggaccagttcgaatgcctaccaagactttgagaatcactacaagaaaaactccttgtggtgaaggttctaagacgtgggatcgtttccagatgagaattcacaagcgacnnnnnnnnnnnnnnnnnnnnnnnnagattgttaagcagattacttccatcagtattgagcca

SEQ ID NO: 1228 - DNA, 439 bp, Homo sapiens
  misc_feature (118)..(356): n includes a, c, g, or t, or contains no nucleotide
ccacagagagcctccactagagtgatgctaagtggaaatgtgaggtgcagctgccacagagggcccccaccagggaaatgtctagtgtctagtggatccaggccacaggagagagtgnnnnnnnnnnnnnnnnnnnnnnnnnnnnnnnnnnnnnnnnnnnnnnnnnnnnnnnnnnnnnnnnnnnnnnnnnnnnnnnnnnnnnnnnnnnnnnnnnnnnnnnnnnnnnnnnnnnnnnnnnnnnnnnnnnnnnnnnnnnnnnnnnnnnnnnnnnnnnnnnnnnnnnnnnnnnnnnnnnnnnnnnnnnnnnnnnnnnnnnnnnnnnnnnnnnnnnnnnnnnnnnnnnnnnnnnnnnnnnntcccacagataccttttctctcccatgaccctttaacagcatctgcttcattcccctcaccttcccaggctgatctgaggtaa

SEQ ID NO: 1229 - DNA, 451 bp, Homo sapiens
tcaaagcttactacacataagataattcatactggagagaaaccttacaagtgtgaagaatgtggcaaagcatttatatcatcctcaaccctaaatggacataagagaattcatactagagagaaaccctacaaatgtgaagaatgtggcaaagcatttagccaatcttcaaccctaactagacataagaggttgcacaccggagagaaaccctacaaatgtggagaatgtggcaaagcctttaaagagtcctcagctcttactaaacataagataattcacactggagagaaaccctacaaatgtgaaaaatgttgcaaagcctttaaccagtcttcaatccttactaaccataagaaaattcatactatcacacctgtaatcccactactttgggaggccgaggcgggcggatcacgaggtcaggagatggagaccatcctggctaaca

SEQ ID NO: 1230 - DNA, 523 bp, Homo sapiens
ctgctgtacaacctatttcctcttcctcttgaatgtctttccagtggctggaaaggtccctctgtggttatctgttagaacagtctctgtacacaattcctcctaaaaacatccttttttaaaaaaagaattgttcagccataaagaaagaacaagatcatgccctttgcagggacatggatggagctggaggccattatccttcataaactattgcaggaacagaaaaccaaacactccatattctcacttgtaagtgggagctaagtgagaacacgtggacacatagagggaaacaacacacactggggcctatgagagggcggaaggtgggaggagggagagatcaggaaaaataactaatggatacttagggtgatgaaataatctgtgtaacaaacccccatgacacacctttatgtatgtaacaaaccagcacttcctgcgcatgtacccctgaacttaaaagttaaaaaaaagttgaacttaaaaataacagattggcccatgccaatcaaagtat

SEQ ID NO: 1231 - DNA, 306 bp, Homo sapiens
  misc_feature (26)..(49): n includes a, c, g, or t, or contains no nucleotide
  misc_feature (51)..(53): n includes a, c, g, or t, or contains no nucleotide
tgagccttccatgtatcctcaatgcnnnnnnnnnnnnnnnnnnnnnnnncnnncagaagctaaaggatgatgaggttgctcagctcaagaaaagtgcagataccctgtgggacatccagaaggacctaaaagacctgtgactagtgagctctaggctgtagaaatttaaaaactacaatgtgattaactcgagcctttagttttcatccatgtacatggatcacagtttgctttgatcttcttcaatatgtgaatttgggctcacagaatcaaagcctatgcttggtttaatgcttgcaatctgag

SEQ ID NO: 1232 - DNA, 522 bp, Homo sapiens
  misc_feature (341)..(355): n includes a, c, g, or t, or contains no nucleotide
  misc_feature (412)..(413): n includes a, c, g, or t, or contains no nucleotide
  misc_feature (415)..(423): n includes a, c, g, or t, or contains no nucleotide
  misc_feature (425)..(427): n includes a, c, g, or t, or contains no nucleotide
cctgtttgatgctgtctatttgcattgagtgtaagtcatttgaactaatggtataactcctaaagctttctctgctccagttatttttattaaatatttttcacttggcttatttttaaaactgggaacataaagtgcctgtatcttgtaaaacttcatttgtttcttttggttcagagaagttcatttatgttcaaagacgtttattcatgttcaacaggaaagacaaagtgtacgtgaatgctcgctgtctgatagggttccagctccatatatatagaaagatcgggggtgggatgggatggagtgagccccatccagttagttggactagttttaannnnnnnnnnnnnnntttgtgtttttttgaaccatactgtttagtaaaataaatacaatgaatgttgagtannannnnnnnnnannngtcttctttagaggtgacactcacatgaaacaattttttcttctcataggaagcagtagctttaaactgtctgtggttcattattctcaatatga

SEQ ID NO: 1233 - DNA, 446 bp, Homo sapiens
  misc_feature (28)..(28): n includes a, c, g, or t, or contains no nucleotide
  misc_feature (30)..(30): n includes a, c, g, or t, or contains no nucleotide
  misc_feature (32)..(33): n includes a, c, g, or t, or contains no nucleotide
  misc_feature (40)..(40): n includes a, c, g, or t, or contains no nucleotide
  misc_feature (49)..(50): n includes a, c, g, or t, or contains no nucleotide
  misc_feature (52)..(53): n includes a, c, g, or t, or contains no nucleotide
  misc_feature (55)..(55): n includes a, c, g, or t, or contains no nucleotide
  misc_feature (60)..(61): n includes a, c, g, or t, or contains no nucleotide
  misc_feature (63)..(73): n includes a, c, g, or t, or contains no nucleotide
  misc_feature (86)..(86): n includes a, c, g, or t, or contains no nucleotide
  misc_feature (210)..(254): n includes a, c, g, or t, or contains no nucleotide
gagcaggcagctcagcttgagcagacantngnnggggggnggggggtgnntnngnggggnngnnnnnnnnnnncagcaaatgtttnttgggaggaagaagcctgatccatcaccatctgcttgactatgtagcttggattctcctttgtacctatccctttcgatttggctttaccttcatctatcttgatcctttcctggccaaatatnnnnnnnnnnnnnnnnnnnnnnnnnnnnnnnnnnnnnnnnnnnnnaaacatgcttcctgctatgtaattgctaacattcatattagatgatgtgctgtagcttgatcttccttagcctactgccactgaggcagtaggttttaggtggtatcgtagtgccttttgattaatttaagtatttaattttcatcttccttctttggatctatttggcctctcaaatgaactgagattcct

SEQ ID NO: 1234 - DNA, 375 bp, Homo sapiens
  misc_feature (77)..(97): n includes a, c, g, or t, or contains no nucleotide
atctctaatgaaaacaggttctagaataaaggagttgattagtctgaacagtactaattaactacaaaataaacgtnnnnnnnnnnnnnnnnnnnnnataaacaatgaccaattagacgtttccgtaattccatgtattatgtatagtacactctataaatgtaaatgtaatgcttgtctaaaaagtgcaatttattgtacattgtcccaacaaatgtttacttttataatcgttatgaacttgaattggattagtatcttgtttttatgtgtgaatgaagccttgtgaaataaacaaatgcaactgagaaggtaacaaggtgactgtttttgtgagccagtgatgttttcaatgctttgtgttgcccctttggc

SEQ ID NO: 1235 - DNA, 313 bp, Homo sapiens
gaagcccgactatgactacctgcggaagctcttcaccgacctcttcgaccgcagtggcttcgtgttcgactatgagtacgactgggccgggaagcccctgccgacccccatcggcaccgtccacaccgacctgccctcccagcctcagctccgggacaaaacccagccgcacagcaaaaaccaggcgttgaactccaccaacggggagctgaatgcggacgaccccacggccggccactccaacgccccgatcacagcgcctgcagaggtggaggtggccgatgaaaccaaatgctgctgtttcttcaagagg

SEQ ID NO: 1236 - DNA, 318 bp, Homo sapiens
  misc_feature (41)..(55): n includes a, c, g, or t, or contains no nucleotide
aactgtgcagtgctacaagtaaatcgacttaaatcagcccnnnnnnnnnnnnnnntgatatatcattgtaagcataagctttagaagtaaagcatttgcgtttacagtgcatcagatacattttatatttcttaaaatagaaatattatgattgcataaatctgaaaatgaattatgttatttgctctaatacaaaaattctaaatcaattattgaaataggatgcacacaattactaaagtacagacatcctagcatttgtgtcgggctcattttgctcaacatggtatttgtggttttcagcctttctaaaagttg

SEQ ID NO: 1237 - DNA, 498 bp, Homo sapiens
  misc_feature (326)..(326): n includes a, c, g, or t, or contains no nucleotide
  misc_feature (424)..(440): n includes a, c, g, or t, or contains no nucleotide
  misc_feature (457)..(472): n includes a, c, g, or t, or contains no nucleotide
catagataccatggacggcggtgtggcctgagttgtcagtctttaatcctgagtcatgtggctctcttttcatctttgatgtcagttccaattatttggcatcaaaaaccttcatggtaggtagagttttaggtaaaagtggatctagggttactttctttattaacatttcctaaataactgaattgagagacatactctgctactatgtcctcaggttaatttttgtctgatcttacgatgccctgccttttactagctactttagaaatagaaaatgtgaagagtgactatttacatgtatactcctttggctgctagaactnatctgtagtcctttattatttacactgaattccaatttcatttctgcttccgctaagtaagagcacctcattcctgtgttttctctactattgagctnnnnnnnnnnnnnnnnnctaattataaagcaaannnnnnnnnnnnnnnngggaaactaccccaatgttatgttgt

SEQ ID NO: 1238 - DNA, 507 bp, Homo sapiens
  misc_feature (135)..(153): n includes a, c, g, or t, or contains no nucleotide
  misc_feature (202)..(225): n includes a, c, g, or t, or contains no nucleotide
agacaatgtctgtaagtctaaatcagactgtaacacagttacagcagttgcttcaggcggtaaaccaacagctcacaaaggagaaagagcactaccaggtgttagagtgaagtaattgggaaactgttcatttgnnnnnnnnnnnnnnnnnnnattatattttgccaaattaaagccttatttatgttttcaccctttctannnnnnnnnnnnnnnnnnnnnnnnttttgtcttttctaatccttgttagactactgatttaaagaaggaaaaaaaaaagccaactctgtagacaccttcagagtttagttttataataaaaactgtttgaataattagacctttacattcctgaagataaacatgtaatcttttatcttattttgctcaataaaattgttcagaagatcaaagtggtaaagacaatgtaaaatttaacattttaatactgatgttgtacactgttttacttaacattttgggaagtaactgcctctgacttcaact

SEQ ID NO: 1239 - DNA, 437 bp, Homo sapiens
  misc_feature (287)..(287): n includes a, c, g, or t, or contains no nucleotide
  misc_feature (297)..(297): n includes a, c, g, or t, or contains no nucleotide
  misc_feature (315)..(315): n includes a, c, g, or t, or contains no nucleotide
  misc_feature (319)..(319): n includes a, c, g, or t, or contains no nucleotide
  misc_feature (340)..(340): n includes a, c, g, or t, or contains no nucleotide
ggtatctgtcatggatcacaattattattcatagtaagtcattgtgatacagaagtttgtttcttcacttccccttaagaagccaactatagtaatcatgcaaagttgaggagtatgtccttcagggatataaaaagaaaaacaaatctgttttttgagctaaaagagcacatccaaacaagaatttaactggctaaaatttagtaattactgttaagtaactatcaaacttgaaatcttacaagataaatggttaagatgtcttgagtatttgggatgggggcctngtgagtctgnattgagacatacattttnacanagtagcagcactggaaagggnctagtccaacctcccagcctctgcttgggtctccgctgccccagccacacacatcctaggaattcttgtaaacatatctgggctctgtgttaacagt

SEQ ID NO: 1240 - DNA, 563 bp, Homo sapiens
  misc_feature (125)..(125): n includes a, c, g, or t, or contains no nucleotide
  misc_feature (207)..(207): n includes a, c, g, or t, or contains no nucleotide
  misc_feature (225)..(225): n includes a, c, g, or t, or contains no nucleotide
  misc_feature (232)..(232): n includes a, c, g, or t, or contains no nucleotide
ctggagttcactttcccagagctggggcaggccgggcagtctgcgggcaagctccggggtctctgggtggagagctgacccaggaagggctgcagctgagctgggggttgaatttctccaggcantccctggagagaggacccagtgacttgtccaagtttacacacgacactaatctcccctggggaggaagcgggaagccagccnaggttgaactgtagcgangcccccnaggccgccaggaatggaccatgcagatcactgtcagtggagggaagctgctgactgtgattaggtgctggggtcttagcgtccagcgcagcccgggggcatcctggaggctctgctccttagggcatggtagtcaccgcgaagccgggcaccgtcccacagcatctcctagaagcagccggcacaggagggaaggtggccaggctcgaagcagtctctgtttccagcactgcaccctcaggaagtcgcccgccccaggacacgcagggaccaccctaagggctgggtggctgtctcaaggacacattgaatacgttgtgaccatccagaaa

SEQ ID NO: 1241 - DNA, 519 bp, Homo sapiens
  misc_feature (230)..(232): n includes a, c, g, or t, or contains no nucleotide
  misc_feature (234)..(236): n includes a, c, g, or t, or contains no nucleotide
  misc_feature (238)..(238): n includes a, c, g, or t, or contains no nucleotide
  misc_feature (240)..(251): n includes a, c, g, or t, or contains no nucleotide
  misc_feature (253)..(254): n includes a, c, g, or t, or contains no nucleotide
  misc_feature (376)..(376): n includes a, c, g, or t, or contains no nucleotide
  misc_feature (384)..(384): n includes a, c, g, or t, or contains no nucleotide
  misc_feature (436)..(436): n includes a, c, g, or t, or contains no nucleotide
  misc_feature (438)..(438): n includes a, c, g, or t, or contains no nucleotide
ttcttgccaggtagataaaactgacatagagaaaaggctggagagagattctgttgcatagactagtcctatggaaaaaaccaagcttcgttagaatgtctgccttactggtttccccagggaaggaaaaatacacttccacccttttttctaagtgttcgtctttagttttgattttggaaagatgttaagcatttatttttagttaaaaataaaaactaatttcatannnannnanannnnnnnnnnnnannttgcacttattgtcccctttttagttttttttgtttgcctcttgtggtgaggggtgtgggaagaccaaaggaaggaacgctaacaatttctcatacttagaaacaaaaagagctttccttcnccaggaanactgaacatgggagctcttgaaatatgtagtattaaaagttgcatttgaaantnttgactttcttatgggcacttttgtcttccaaattaaaactctaccacaaatatacttacccaagggctaatagtaatact

SEQ ID NO: 1242 - DNA, 482 bp, Homo sapiens
  misc_feature (40)..(40): n includes a, c, g, or t, or contains no nucleotide
  misc_feature (130)..(152): n includes a, c, g, or t, or contains no nucleotide
  misc_feature (170)..(222): n includes a, c, g, or t, or contains no nucleotide
  misc_feature (290)..(290): n includes a, c, g, or t, or contains no nucleotide
  misc_feature (296)..(320): n includes a, c, g, or t, or contains no nucleotide
ctgttttcactctatgaatgccgttactctgttttcttcnaatcattagcggttgtggaacaggaaatgaaaaaggactggctttttgcccctcattatcgatactatgtaagagaaatgagaattcatnnnnnnnnnnnnnnnnnnnnnnnatataggtcattaacccnnnnnnnnnnnnnnnnnnnnnnnnnnnnnnnnnnnnnnnnnnnnnnnnnnnnnctgtccaggtttattgctgccgggagactacactgcaaaatagataaagtgaatgaaatagtagaaanccaacnnnnnnnnnnnnnnnnnnnnnnnnnaccaagaaactatcaagaaaggagatctgctactaaacagagttcaaaaactttccagagtaattaatatgtaaagccatgtaactaacaaaggatttgctttagagataattatttggaatttttatagcttacttcacaatgtgcccaggtcagctgtat

SEQ ID NO: 1243 - DNA, 523 bp, Homo sapiens
ggaaccacagatttgtgcccattcctaatattttgttctgcaaattaatgtataatttgaggtgaaattcagttataaagtcaaggacgaatttgcacagtgatatatttctatgtgtatgcaagtacaagtatataatatgtcacctggcacattcattttctcagttgaagaagagaaaatttgaaaatgtccttatgcttttagagttgcaacttaagtatatttggtagggtgagtgtttccactcaaaatatgtcaacttaaaaaaaaataggccctttcataaaaaccaaactgtagcaagatgcaaatgcatggcaaatctgtcggtctccagttggttatctgaatagtgtcaccaattccaccaagacagtgctgagattggaaagggcactcatttggattgccttacttctcttgccttaaatatatcccatatatttaatatgtcaaaaagggcttgaggtgaatttcattaaatggaataatatgatgccactttgcagctaaaataagc

SEQ ID NO: 1244 - DNA, 530 bp, Homo sapiens
  misc_feature (26)..(58): n includes a, c, g, or t, or contains no nucleotide
  misc_feature (91)..(91): n includes a, c, g, or t, or contains no nucleotide
  misc_feature (95)..(95): n includes a, c, g, or t, or contains no nucleotide
  misc_feature (318)..(342): n includes a, c, g, or t, or contains no nucleotide
cctcttcaataagacatttcgggatnnnnnnnnnnnnnnnnnnnnnnnnnnnnnnnnngccacaaagtcagtaaaaactctcagaaaacgntccnagtaagatctacttccggaatccaatggcagagaactctaagtttttcaagaaacatggaattcgaaatgggattaaccctgccatgtaccagagtccaatgaggctccgaagttcaaccattcagtcttcatcaatcattctactagatacgcttctcctcactgaaaatgaaggtgacaaaactgaagagcaagttagttatgtatagcagaactggcagnnnnnnnnnnnnnnnnnnnnnnnnnagatgatgaatgagatgtaaatgtgccaagaatatattatataaagaattttatgtcatatatcaaatcatctctttaacctaagatgtaagtattaagaatatctaattttcctaatttggacaagattattccatgaggaaaataattttatatagctacaaatgaaaacaatccagcactctggt

SEQ ID NO: 1245 - DNA, 528 bp, Homo sapiens
  misc_feature (102)..(182): n includes a, c, g, or t, or contains no nucleotide
ggggcactctaaccatcacaatcaatcaatcaaattcccttaaatttgtatggcactggaactttggcaaagcacttttgacaagttgtgtctgattggagnnnnnnnnnnnnnnnnnnnnnnnnnnnnnnnnnnnnnnnnnnnnnnnnnnnnnnnnnnnnnnnnnnnnnnnnnnnnnnnnntgtgggactgtggatctcactggaagctatccaagagcccactgtcaccttctagaccacatgatagggctagacagctcagttcaccatgattctcttctgtcacctctgctggcacaccagtggcaaggcccagaatggcgacctctctttagctcaatttctgggcctgaggtgctcagactgcccccaagatcaaatctctcctggctgtagtaacccagtggaatgaatttggacatgccccaatgcttctatatgctaagtgaaatctgtgtctgtaatttgttggggggtggatagggtggggtctccatctactttttgtcaccatcatctgaaatgg

SEQ ID NO: 1246 - DNA, 539 bp, Homo sapiens
  misc_feature (26)..(26): n includes a, c, g, or t, or contains no nucleotide
  misc_feature (28)..(28): n includes a, c, g, or t, or contains no nucleotide
  misc_feature (165)..(165): n includes a, c, g, or t, or contains no nucleotide
  misc_feature (253)..(253): n includes a, c, g, or t, or contains no nucleotide
  misc_feature (256)..(256): n includes a, c, g, or t, or contains no nucleotide
  misc_feature (281)..(282): n includes a, c, g, or t, or contains no nucleotide
  misc_feature (395)..(395): n includes a, c, g, or t, or contains no nucleotide
  misc_feature (411)..(412): n includes a, c, g, or t, or contains no nucleotide
  misc_feature (421)..(421): n includes a, c, g, or t, or contains no nucleotide
  misc_feature (427)..(427): n includes a, c, g, or t, or contains no nucleotide
  misc_feature (434)..(434): n includes a, c, g, or t, or contains no nucleotide
  misc_feature (442)..(442): n includes a, c, g, or t, or contains no nucleotide
  misc_feature (454)..(455): n includes a, c, g, or t, or contains no nucleotide
  misc_feature (457)..(463): n includes a, c, g, or t, or contains no nucleotide
  misc_feature (492)..(492): n includes a, c, g, or t, or contains no nucleotide
acaggaattaactgccacatggcagngngcccaatcgacttttctcacctgtttgtcacatcatcatttgactggactgtcaaactgtggaccaccaagcacaacaagccgctctactcctttgaagacaatgcagactatgtgtacgatgtcatgtggtccccngtgcatcctgcgctttttgcctgcgtggacgggatggggcgcttggacctctggaacctcaacaatgacaccgaggttccaacagcangtngtggccattgagggggcatccgccnnaaaccgtgttcgttgggcccaagctggcaaagaagttgctgttggggactcggaaggccgtatttgggtctatgacgttggagagcttgcagttccccacaatgatgaatggnacccgatttgccaggnnccttgtggnaaattncgtgctnaacagagntgatagcgaggnngnnnnnnntgttgagttatctgcctagtgggaaatgnagccacccccactggcagcccccaccttttgtgttccttaggagctt

SEQ ID NO: 1247 - DNA, 428 bp, Homo sapiens
  misc_feature (27)..(27): n includes a, c, g, or t, or contains no nucleotide
  misc_feature (79)..(79): n includes a, c, g, or t, or contains no nucleotide
  misc_feature (110)..(110): n includes a, c, g, or t, or contains no nucleotide
  misc_feature (222)..(222): n includes a, c, g, or t, or contains no nucleotide
tacagtctcacaagcccggctatcagncccggatgacagtgacgaggagaactgagggcacgtggggtgcggcagcggnctagggcccagggcagcttgcccgtgctgcngtgcagttcttgcctccctcacggggcgtcacccccagcccagctccgttgtacataaatgccttgtggcagagctcccggtgaacttctggatcccgtttctgatgcagantcttgtcttgttctccacttgtgctgttagaactcactggcccagtggtgttctcactcctaccccacccaccccctgcctgtccccaaattgaagatccttccttgcctgtggcttgatgcggggcgggtaaagggtattttaacttaggggtagttcctgctgtgagtggttacagctgatcctcgggaagaacaaagctaaag

SEQ ID NO: 1248 - DNA, 447 bp, Homo sapiens
  misc_feature (346)..(346): n includes a, c, g, or t, or contains no nucleotide
  misc_feature (358)..(359): n includes a, c, g, or t, or contains no nucleotide
  misc_feature (363)..(375): n includes a, c, g, or t, or contains no nucleotide
  misc_feature (377)..(377): n includes a, c, g, or t, or contains no nucleotide
  misc_feature (379)..(379): n includes a, c, g, or t, or contains no nucleotide
  misc_feature (408)..(422): n includes a, c, g, or t, or contains no nucleotide
ttttggcttggacataaaagccaagccacccatttgcttttaatccaaagaacatgtatagtttttgtacccagagactatgatttatattgattgcacttgcctgccatgatttagataagattttttttgcatggtttttattctttcctaatggatcctgttttataatacttccaagcctgtccatggatatatcaaatgtcttcacttgtatattttcatggctaggtatttctaatgtttattcttccctgtgtacttctacacatagctatgcactatgaaaattaaatggaatgaatgatatgtatattactcaaaataaagtttctttcactttaanaaaaaaaaaaannaaannnnnnnnnnnnntntntgagtgaaaaatgcctctgcaactaagcnnnnnnnnnnnnnnngggcgatgtctccaaggataaaaat

SEQ ID NO: 1249 - DNA, 116 bp, Homo sapiens
ggagggtcttcctttggcatgggatggggatgaagtaaggagagggactgaccccctggaagctgattcactatggggggaggtgtattgaagtcctccagacaaccctcagattt

SEQ ID NO: 1250 - DNA, 524 bp, Homo sapiens
  misc_feature (36)..(36): n includes a, c, g, or t, or contains no nucleotide
  misc_feature (63)..(63): n includes a, c, g, or t, or contains no nucleotide
  misc_feature (76)..(76): n includes a, c, g, or t, or contains no nucleotide
  misc_feature (78)..(78): n includes a, c, g, or t, or contains no nucleotide
  misc_feature (89)..(89): n includes a, c, g, or t, or contains no nucleotide
  misc_feature (91)..(92): n includes a, c, g, or t, or contains no nucleotide
  misc_feature (101)..(102): n includes a, c, g, or t, or contains no nucleotide
  misc_feature (105)..(105): n includes a, c, g, or t, or contains no nucleotide
  misc_feature (107)..(108): n includes a, c, g, or t, or contains no nucleotide
  misc_feature (111)..(113): n includes a, c, g, or t, or contains no nucleotide
  misc_feature (117)..(143): n includes a, c, g, or t, or contains no nucleotide
  misc_feature (172)..(172): n includes a, c, g, or t, or contains no nucleotide
cttttagttgtatagccaaagacatttagtattttnccggttccttaaggtattactgtaccnttttgtaaaaggnanattattattantnnttttaattnnttngnnaannntttnnnnnnnnnnnnnnnnnnnnnnnnnnnaacttagataatgtcagaactaaggtganttttttttttttaattttgaaagcccagccaaaatgaggtgtgaatttgtcatactgttacattgaaattggtaacaaaatatatcccctcccatttggacttttagggtaaatgaaaattttattgtattttaaagtagtttctaagtgttagcaagactgactataattccagtttctgttttctatggacagacctgataaactggagaccctaaagcaggaatacccaaattatagtgtcaggattttagctgtaccagaggcctttatgtgctacacataatttgtataaaattttatatgtgcagattgggtacataaacagttctccatttttctaagggaatgc

SEQ ID NO: 1251 - DNA, 475 bp, Homo sapiens
  misc_feature (99)..(99): n includes a, c, g, or t, or contains no nucleotide
  misc_feature (106)..(106): n includes a, c, g, or t, or contains no nucleotide
  misc_feature (109)..(124): n includes a, c, g, or t, or contains no nucleotide
  misc_feature (195)..(224): n includes a, c, g, or t, or contains no nucleotide
  misc_feature (234)..(248): n includes a, c, g, or t, or contains no nucleotide
  misc_feature (284)..(284): n includes a, c, g, or t, or contains no nucleotide
  misc_feature (435)..(435): n includes a, c, g, or t, or contains no nucleotide
ccacagtttggagtaggagctgaaatctgtgccaggatcatggaaggtcctgcgttcaatttcctggatgctcctgctgttcgtgtcactggtgctgangtccctntgnnnnnnnnnnnnnnnntagaggacaactctatacctcaggtcaaagacatcatatttgcaataaagaaaacattaaatatttagttnnnnnnnnnnnnnnnnnnnnnnnnnnnnnntttgaaatannnnnnnnnnnnnnncctggatttgtactgcaagacctgactattcataanggaaaacgatttctaaagcaacagcaggtatttttgtacagggaagtttaaatgtgtttgtgtatggaaaactctccactctcctcccctagatgccatgcttccttttgtctgttacggttgccatgttctttgaataacaaattatatnacattttatcctctctcaccacaaggacaaagtatggatg

SEQ ID NO: 1252 - DNA, 571 bp, Homo sapiens
  misc_feature (26)..(86): n includes a, c, g, or t, or contains no nucleotide
  misc_feature (113)..(113): n includes a, c, g, or t, or contains no nucleotide
  misc_feature (115)..(115): n includes a, c, g, or t, or contains no nucleotide
  misc_feature (124)..(124): n includes a, c, g, or t, or contains no nucleotide
  misc_feature (194)..(194): n includes a, c, g, or t, or contains no nucleotide
  misc_feature (213)..(267): n includes a, c, g, or t, or contains no nucleotide
  misc_feature (270)..(284): n includes a, c, g, or t, or contains no nucleotide
  misc_feature (294)..(294): n includes a, c, g, or t, or contains no nucleotide
  misc_feature (313)..(313): n includes a, c, g, or t, or contains no nucleotide
  misc_feature (315)..(315): n includes a, c, g, or t, or contains no nucleotide
  misc_feature (317)..(318): n includes a, c, g, or t, or contains no nucleotide
  misc_feature (320)..(338): n includes a, c, g, or t, or contains no nucleotide
  misc_feature (343)..(343): n includes a, c, g, or t, or contains no nucleotide
  misc_feature (350)..(350): n includes a, c, g, or t, or contains no nucleotide
  misc_feature (353)..(353): n includes a, c, g, or t, or contains no nucleotide
  misc_feature (360)..(360): n includes a, c, g, or t, or contains no nucleotide
  misc_feature (362)..(362): n includes a, c, g, or t, or contains no nucleotide
  misc_feature (374)..(374): n includes a, c, g, or t, or contains no nucleotide
  misc_feature (384)..(384): n includes a, c, g, or t, or contains no nucleotide
  misc_feature (394)..(394): n includes a, c, g, or t, or contains no nucleotide
  misc_feature (398)..(398): n includes a, c, g, or t, or contains no nucleotide
  misc_feature (400)..(400): n includes a, c, g, or t, or contains no nucleotide
  misc_feature (402)..(403): n includes a, c, g, or t, or contains no nucleotide
  misc_feature (407)..(407): n includes a, c, g, or t, or contains no nucleotide
  misc_feature (414)..(414): n includes a, c, g, or t, or contains no nucleotide
  misc_feature (419)..(420): n includes a, c, g, or t, or contains no nucleotide
  misc_feature (428)..(428): n includes a, c, g, or t, or contains no nucleotide
  misc_feature (431)..(435): n includes a, c, g, or t, or contains no nucleotide
  misc_feature (437)..(437): n includes a, c, g, or t, or contains no nucleotide
  misc_feature (443)..(446): n includes a, c, g, or t, or contains no nucleotide
  misc_feature (449)..(452): n includes a, c, g, or t, or contains no nucleotide
  misc_feature (454)..(454): n includes a, c, g, or t, or contains no nucleotide
  misc_feature (460)..(461): n includes a, c, g, or t, or contains no nucleotide
  misc_feature (466)..(466): n includes a, c, g, or t, or contains no nucleotide
  misc_feature (471)..(471): n includes a, c, g, or t, or contains no nucleotide
  misc_feature (474)..(476): n includes a, c, g, or t, or contains no nucleotide
  misc_feature (480)..(482): n includes a, c, g, or t, or contains no nucleotide
  misc_feature (485)..(485): n includes a, c, g, or t, or contains no nucleotide
  misc_feature (490)..(492): n includes a, c, g, or t, or contains no nucleotide
  misc_feature (496)..(496): n includes a, c, g, or t, or contains no nucleotide
ctgaggcgactgtcccatggaggcannnnnnnnnnnnnnnnnnnnnnnnnnnnnnnnnnnnnnnnnnnnnnnnnnnnnnnnnnnnnctctctccccgaccatgagagcccctngncctggcccntgcacaccagtgggcccagaataaccgccacccttgccatcctgcaacagctggactcaagtttccaggnagtggagatgtgtttctannnnnnnnnnnnnnnnnnnnnnnnnnnnnnnnnnnnnnnnnnnnnnnnnnnnnnnttnnnnnnnnnnnnnnncctcctgggntccccacccccgctccccnantnncnnnnnnnnnnnnnnnnnnnatccnggttttntangaagggnanttgccatcaagnttcctgtacnaggcccacgncgtncntnngggnaagagcnacctnngggccccnggnnnnngnagccgnnnngannnncngccganngcccntcctnccnnnagtnnnttnccatnnncccngcatgcttctagggagcgcctcttttccgttcttgaggaatttctgttctggggcttgtccttcctttgcagctg

SEQ ID NO: 1253 - DNA, 201 bp, Homo sapiens
  misc_feature (54)..(68): n includes a, c, g, or t, or contains no nucleotide
  misc_feature (99)..(114): n includes a, c, g, or t, or contains no nucleotide
tggtaaagccttcatttccgcaggttaccttcggacacatgaaatcagatctcnnnnnnnnnnnnnnncccaccaatgtcaggaatgtgggaaaaaacnnnnnnnnnnnnnnnnccttcacagacatgaaagaactcatagtggaggaaaactctacgaatgtcaaaaatgtgccaaagtctttagatgtcccacgtccct

SEQ ID NO: 1254 - DNA, 275 bp, Homo sapiens
cccttgtggagattgggaactgcctgcccttggcctctttcctgtccatcttgtattatgaaaggctgtttctggcacacccgggctcctctgtgtggtttctgggaagtgactgagggtcaggggaatggagcccctctgcagccggccgctggtaccttccctattgaacccttctttaggcttgctcactctttttgatgggtgtctttccaaagctggctggggacctccctgattgagagacatggggccagttctgttgctgtggctac

SEQ ID NO: 1255 - DNA, 48 bp, Homo sapiens
agaccatcacggatgccgagcttcgggtaactctcacagtggaaggtt

SEQ ID NO: 1256 - DNA, 405 bp, Homo sapiens
  misc_feature (151)..(165): n includes a, c, g, or t, or contains no nucleotide
  misc_feature (331)..(331): n includes a, c, g, or t, or contains no nucleotide
  misc_feature (333)..(333): n includes a, c, g, or t, or contains no nucleotide
  misc_feature (359)..(359): n includes a, c, g, or t, or contains no nucleotide
gtctcatcttgagtaaaagagaacccagccaactatgaagttccttgtctttgccttcatcttggctctcatggtttccatgattggagctgattcatctgaagagaaatttttgcgtagaattggaagattcggttatgggtatggcccnnnnnnnnnnnnnnnagaacaaccactatacccacaaccataccaaccacaataccaacaatataccttttaatatcatcagtaactgcaggacatgattattgaggcttgattggcaaatacgacttctacatccatattctcatctttcataccatatcacactactaccactttttgnangaatcatcaaagagcaatgcaaatgnaaaacactataatttactgtatactctttgtttcaggatacttgcc

SEQ ID NO: 1257 - DNA, 559 bp, Homo sapiens
agctgcttgctcacagccacatttccatttgcatcattactgccttcacctgcatagtcactcttttgatgctggggaaccaaaatggtgatgatatatagactttatgtatagccacagttcatccccaaccctagtcttcgaaatgttaatatttgataaatctagaaaatgcattcatacaattacagaattcaaatattgcaaaaggatgtgtgtctttctccccgagctcccctgttccccttcattgaaaaccaccacggtgccatctcttgtgtatgcagggctatgcacctgcaggcacgtgtgtatgcactccccgcttgtgtttacacaagctgtggggtgttacgcatgcctgcttttttcacttaataatacagcttggagagatttttgtatcacattataaatcccactcgctctttttgatggccacataataactactgcataatatggatacgccttatttgatttaactagttccctaatgatggacttttaagttgtttcctttttttttcttttttgctactgcaaacgatgctataat

SEQ ID NO: 1258 - DNA, 429 bp, Homo sapiens
  misc_feature (154)..(154): n includes a, c, g, or t, or contains no nucleotide
  misc_feature (236)..(250): n includes a, c, g, or t, or contains no nucleotide
tgccagcagttcttgaagcttctttttcattcctgctactctacctgtatttctcagttgcagcactgagtggtcaaaatacatttctgggccacctcagggaacccatgcatctgcctggcatttaggcagcagagcccctgaccgtcccccnacagggctctgcctcacgtcctcatctcatttggctgtgtaaagaaatgggaaaagggaaaaggagagagcaattgaggcannnnnnnnnnnnnnnttttatttatttatttttaatttgtttttttctccaagtccaccagtctctgaaattagaacagtaggcggtatgagataatcaggcctaatcatgttgtgattctcttttcttagtggagtggaatgttctatccccacaagaaggattatatcttatagacttgtcttgttcagatt

SEQ ID NO: 1259 - DNA, 388 bp, Homo sapiens
  misc_feature (206)..(206): n includes a, c, g, or t, or contains no nucleotide
  misc_feature (223)..(231): n includes a, c, g, or t, or contains no nucleotide
  misc_feature (289)..(291): n includes a, c, g, or t, or contains no nucleotide
  misc_feature (304)..(304): n includes a, c, g, or t, or contains no nucleotide
  misc_feature (307)..(307): n includes a, c, g, or t, or contains no nucleotide
  misc_feature (312)..(313): n includes a, c, g, or t, or contains no nucleotide
  misc_feature (322)..(322): n includes a, c, g, or t, or contains no nucleotide
tggtccactttctccttggaccagcctccccgcaggctcactggcttggccagcacagggacccctgaagctggctgtcttcttctgtggagcgagggaaggtaacagtttagttccaacccatggtgggcagaggtcggtggaggtcagaggcatggggatggccactgctcggctaggaaatccctgtgcctggtgctggtgcncgtcatacagtctgctnnnnnnnnntttttttttttttttttttttttttgggacggtgactcagaatctttggttgaggccnnnttttgctttcttnttnttttnnttttttttntttgtctttttttctcttgtcggatttcttcttctccttcttgctctttgggttgctttgatctcc

SEQ ID NO: 1260 - DNA, 349 bp, Homo sapiens
ttgtacagccgaagtacgccaaagaacttaaaaacacgtgcaaagccgtgctggcgtgtgtgggagtctggataatgaccctgaccacgaccacccctctgctactgctctataaagacccagataaagactccactcccgccacctgcctcaagatttctgacatcatctatctaaaagctgtgaacgtgctgaacctcactcgactgacattttttttcttgattcctttgttcatcatgattgggtgctacttggtcattattcataatctccttcacggcaggacgtctaagctgaaacccaaagtcaaggagaagtccataaggatcatcatcacgctgctggt

SEQ ID NO: 1261 - DNA, 565 bp, Homo sapiens
  misc_feature (307)..(309): n includes a, c, g, or t, or contains no nucleotide
  misc_feature (314)..(314): n includes a, c, g, or t, or contains no nucleotide
  misc_feature (316)..(323): n includes a, c, g, or t, or contains no nucleotide
  misc_feature (479)..(502): n includes a, c, g, or t, or contains no nucleotide
agtctggttgacaggaagaaaccacaccatcaacaccaacaagtttctgtgttccttttacagcaaaagggactttttatataaccaaatgtggtgttttagtgactttttgataatgtacagttttttgtgaatttaaatttatttctttctatatttttaggaccaatctcatttttaataaggttaaaaagaaaaaaaaagtctagcgaaaaaactcctgtttttgccatgtgatgttccacaagtgcagctgtagaaaagtgcttgtcagttgttgaataaaaaaaccacatttgatagagannnaaaanannnnnnnnattcatcttcccttctacacacctgagggggagacggcgttgggataggtatgactggcttaagagaccacaggcaagggaacaacaggggctcctgttccataccctctgtgtggatggaaagggtcattagtgctcctgcctaaatgtctggcnnnnnnnnnnnnnnnnnnnnnnnntcagtgcatccaggtcctgccttgtgagatgtggccccagcttcctaagctgccacctctgtg

SEQ ID NO: 1262 - DNA, 497 bp, Homo sapiens
  misc_feature (31)..(46): n includes a, c, g, or t, or contains no nucleotide
  misc_feature (125)..(125): n includes a, c, g, or t, or contains no nucleotide
  misc_feature (127)..(143): n includes a, c, g, or t, or contains no nucleotide
tacgtattggtacttgaagattcctttcaannnnnnnnnnnnnnnntcctaattttagtacttaatttctctttttaatttaagtgatctttctaattcgaaagctgtgttctttttgaataccntnnnnnnnnnnnnnnnnnatgttaaaacagtttgcaataaaaaaaaatgaatcagcttaagtcatttaatcatttcaagtgcattctgcatcctttaaaaataagtttaagaaatttaagagaattgtgttttcattaagttttgcatatcttttgttatgccatgtaaattccctttttcgtatgattaaaggaaggttatgataaaatgattagttcatttacattcacttgtagcaattacatgagaatttgaattttgtcgtgtttgggtttgttcattcctgtgaatgatggtacagttaggtgagattttctgttatggtacccaaactcaccatttggtcctctttaatctttgagggtttcaat

SEQ ID NO: 1263 - DNA, 200 bp, Homo sapiens
  misc_feature (35)..(35): n includes a, c, g, or t, or contains no nucleotide
  misc_feature (51)..(84): n includes a, c, g, or t, or contains no nucleotide
  misc_feature (86)..(89): n includes a, c, g, or t, or contains no nucleotide
ttaaaatcagctattttgtgaagccatgagttccnagaaagtaaaggtgannnnnnnnnnnnnnnnnnnnnnnnnnnnnnnnnncnnnntataaggtgctctctttctgtcttctacagatgagtcacacctttgagcttaatctttgaaaggttagagaataaattgatttttataaatactgcaaatcaggcttttgt

SEQ ID NO: 1264 - DNA, 566 bp, Homo sapiens
  misc_feature (84)..(84): n includes a, c, g, or t, or contains no nucleotide
  misc_feature (109)..(109): n includes a, c, g, or t, or contains no nucleotide
  misc_feature (120)..(120): n includes a, c, g, or t, or contains no nucleotide
  misc_feature (140)..(140): n includes a, c, g, or t, or contains no nucleotide
  misc_feature (158)..(158): n includes a, c, g, or t, or contains no nucleotide
  misc_feature (171)..(171): n includes a, c, g, or t, or contains no nucleotide
  misc_feature (183)..(183): n includes a, c, g, or t, or contains no nucleotide
  misc_feature (262)..(262): n includes a, c, g, or t, or contains no nucleotide
  misc_feature (265)..(265): n includes a, c, g, or t, or contains no nucleotide
  misc_feature (269)..(269): n includes a, c, g, or t, or contains no nucleotide
  misc_feature (271)..(271): n includes a, c, g, or t, or contains no nucleotide
  misc_feature (368)..(409): n includes a, c, g, or t, or contains no nucleotide
  misc_feature (514)..(514): n includes a, c, g, or t, or contains no nucleotide
tgccctgtgagaaaggttcgattttcccaattttgatgaagtcttccctcatgaaaatcactcccagtcatcccaaacccctgnacattctctacagaagcatcagacngatactcaaantctcactttccccaaatcanatctcttaacttttcaangccctccaccctnagctccctgcanaattcatgggaggactcatttcttgccttgaataaccattttctaaacatcgagctcttcaccttccccaaggtggccnaanagcntncctggctgccatctttccttttgaccttatctttccccattagtccctggtggcacctactctcagcccacctccctcaccacagtttccccttagnnnnnnnnnnnnnnnnnnnnnnnnnnnnnnnnnnnnnnnnnntaggcgctggaatcagcatgcagcaagctcacagtgcccctagtctgggtgcccgctgtccccgacaaatgtaaccacctccctgcctagaatacacacacgtcntccggtgcatgcacaaccacccagcatctttctttgtgatgatgtagccaaa

SEQ ID NO: 1265 - DNA, 205 bp, Homo sapiens
caggatgggcaagtgtcgtggacttcgtactgctaggaagctccgtagtcaccgacgagaccagaagtggcatgataaacagtataagaaagctcatttgggcacagccctaaaggccaacccttttggaggtgcttctcatgcaaaaggaatcgtgctggaaaaagtaggagttgaagccaaacagccaaattctgccattagg

SEQ ID NO: 1266 - DNA, 288 bp, Homo sapiens
  misc_feature (26)..(27): n includes a, c, g, or t, or contains no nucleotide
  misc_feature (64)..(64): n includes a, c, g, or t, or contains no nucleotide
  misc_feature (66)..(66): n includes a, c, g, or t, or contains no nucleotide
  misc_feature (94)..(119): n includes a, c, g, or t, or contains no nucleotide
ctgggtcccttgtagcacaggagacnngggctaagggcccctcccagggaagggacaccatcangnctctggctgaggcagtagcatagaggannnnnnnnnnnnnnnnnnnnnnnnnngactagcaggaggcagccttgagaaaccggcagttcccaagccagcgcctggctgttctctcattgtcactgccctctccccaacctctcctctaacccactagagattgcctgtgtcctgcctcttgcctcttgtagaatgcagctctggccctcaataaatgcttcc

SEQ ID NO: 1267 - DNA, 438 bp, Homo sapiens
  misc_feature (26)..(26): n includes a, c, g, or t, or contains no nucleotide
  misc_feature (29)..(31): n includes a, c, g, or t, or contains no nucleotide
  misc_feature (33)..(34): n includes a, c, g, or t, or contains no nucleotide
  misc_feature (36)..(36): n includes a, c, g, or t, or contains no nucleotide
  misc_feature (39)..(39): n includes a, c, g, or t, or contains no nucleotide
  misc_feature (42)..(43): n includes a, c, g, or t, or contains no nucleotide
  misc_feature (45)..(46): n includes a, c, g, or t, or contains no nucleotide
  misc_feature (48)..(51): n includes a, c, g, or t, or contains no nucleotide
  misc_feature (54)..(56): n includes a, c, g, or t, or contains no nucleotide
  misc_feature (60)..(62): n includes a, c, g, or t, or contains no nucleotide
  misc_feature (66)..(70): n includes a, c, g, or t, or contains no nucleotide
  misc_feature (73)..(73): n includes a, c, g, or t, or contains no nucleotide
  misc_feature (75)..(75): n includes a, c, g, or t, or contains no nucleotide
  misc_feature (77)..(101): n includes a, c, g, or t, or contains no nucleotide
  misc_feature (185)..(199): n includes a, c, g, or t, or contains no nucleotide
  misc_feature (342)..(356): n includes a, c, g, or t, or contains no nucleotide
agtcctctgaggtctgtgcttgaaanccnnncnnangcnttnntnntnnnnttnnntttnnncccnnnnnccnangnnnnnnnnnnnnnnnnnnnnnnnnnaaaaaaccctcgacccgaaaccctcaccagataaactacagtttgtttaggaggccctgaccttcatggtgtctttgaagcccnnnnnnnnnnnnnnnttcggattttcctccctttgttcggggtttggtttggctcctctgtgtgtgtccgtatcttgttcggtgtcctcgaggttgagcttcactccactgcggcagaggcagcgtgcacactcggatttgctacgtttctatatatnnnnnnnnnnnnnnnatatatgagtagtttgccatgagataacacagtgtaaacagtagacacccagaaatcgtgacttctgtgttctctccatttg

SEQ ID NO: 1268 - DNA, 388 bp, Homo sapiens
tacgactgtagtgcaacaaatattttaaagcccccttttcttctttattttcattagttgtacattgatttcagtgtcaacacatttaaagattcattcatgttgcacagtggcttacatgaacgtgaaactgtgatataaggttttctttcatactcataattagcccaaaacagttgccaaactttgccattgtgctcctgcatttgtgtttgagctgctatatatttgtggaaattacactgaaagttgactaagagactattgaaaaagcatgaataattaaatatacatgtgagagacatctcatctgctgtattttacttagtgaatattgttcactcttccgtgtctgatgtcttgctgaatgctgtgactcatagtttac

SEQ ID NO: 1269 - DNA, 346 bp, Homo sapiens
tgtccaggctggaacaaagcgccagtgaactctgactgtatgagatgttaaatactttttaatatttgtttagatatgacatttattcaaagttaaaagcaaacacttacagaattatgaagaggtatctgtttaacatttcctcagtcaagttcagagtcttcagagacttcgtaattaaaggaacagagtgagagacatcatcaagtggagagaaatcatagtttaaactgcattataaattttataacagaattaaagtagattttaaaagataaaatgtgtaattttgtttatattttcccatttggactgtaactgactgccttgctaaaagattatagaa

SEQ ID NO: 1270 - DNA, 360 bp, Homo sapiens
  misc_feature (26)..(64): n includes a, c, g, or t, or contains no nucleotide
  misc_feature (69)..(109): n includes a, c, g, or t, or contains no nucleotide
  misc_feature (131)..(131): n includes a, c, g, or t, or contains no nucleotide
  misc_feature (155)..(155): n includes a, c, g, or t, or contains no nucleotide
ttcgcgagatgttctcaaatcgttgnnnnnnnnnnnnnnnnnnnnnnnnnnnnnnnnnnnnnnncttannnnnnnnnnnnnnnnnnnnnnnnnnnnnnnnnnnnnnnnntcagcctccaaaggagccagcntctccccagttcctgaaatcctgngtgttgcctgccagtcgccatgagaacttcctaccttctgctgtttactctctgcttacttttgtctgagatggcctcaggtggtaactttctcacaggccttggccacagatctgatcattacaattgcgtcagcagtggagggcaatgtctctattctgcctgcccgatctttaccaaaattcaaggcacctgttacagaggg

SEQ ID NO: 1271 - DNA, 446 bp, Homo sapiens
  misc_feature (131)..(131): n includes a, c, g, or t, or contains no nucleotide
  misc_feature (133)..(133): n includes a, c, g, or t, or contains no nucleotide
agacagtattcacctatgtattttgcataacgattatatcaagtctaggggcttcatgtcatgttattaaaatcagttaagcaatcttttatgtttctatattatttagaatatttgttgttgcaattttncnacataagaaaatttaacagttgtgtcatgttgtttctgtctgattttaattgctgtctaatgacggggaaagcacgacgaaaagatgtacaatcctgcatccttgcttatttcacaactaaagctttgtcatagacttcaaaatatatatgtatatattttatttaaatatatgttacatattatatttaaacatacatatttaacattttttacatatctatcaatatcagagatttgggtaaaagaatgggtaatgtttaaacatgtggaggcatgtggagctttatacaaacagggcagaaccacagaag

SEQ ID NO: 1272 - DNA, 369 bp, Homo sapiens
  misc_feature (43)..(58): n includes a, c, g, or t, or contains no nucleotide
  misc_feature (140)..(164): n includes a, c, g, or t, or contains no nucleotide
  misc_feature (197)..(200): n includes a, c, g, or t, or contains no nucleotide
tgtctacatcctttggctgtttgtaggatcacgttgtccttannnnnnnnnnnnnnnncagctgctgtaaattttttataaatgaatttcaaaatgttataatgggactgtaggttgtttttctacatcttcattatttnnnnnnnnnnnnnnnnnnnnnnnnnaaagtttatctttactctttctgaaattatgannnnctccagaaaaagaaaaaaaaaatacaagtcatggaatcagcaatctggtaagaaatgctgccaagaatgtggcagtagctgtcctgacagactccaactgtctttactatctgaagaatcctaggctccacatgagaggcagaaatggatcagtcttattcttttctag

SEQ ID NO: 1273 - DNA, 451 bp, Homo sapiens
aatggaaaagcacttgccatctctgtctaggggtcacaaattgaaatggctcctgtatcacataccggaggtcttgtgtatctgtggccaacagggagtttccttattcactctttatttgctgctgtttaagttgccaacctcccctcccaataaaaattcacttacacctcctgcctttgtagttctggtattcactttactatgtgatagaagtagcatgttgctgccagaatacaagcattgcttttggcaaattaaagtgcatgtcatttcttaatacactagaaaggggaaataaattaaagtacacaagtccaagtctaaaactttagtacttttcccatgcagatttgtgcacatgtgagagggtgtccagtttgtctagtgattgttatttagagagttggaccactattgtgtgttgctaatcattgactgtagtcccaaa

SEQ ID NO: 1274 - DNA, 467 bp, Homo sapiens
  misc_feature (45)..(59): n includes a, c, g, or t, or contains no nucleotide
gaaacaaagccatgcctgctcctgcctctctcccaacatgtttcnnnnnnnnnnnnnnncctgtgtgtgttttcccttgccttgtttcctgccttatatcttgtatttcgacttattacagagttgagggttcttgcttaatttagatcaagtataaaatttgtatgacttcaagtctcattttatctgaaaggtttttttctcatttaatctgatgtggcattttcgtcatctgaagcatgagtgacaagttgggaatgatgtggtgatttagaatgcagtattggccaagtccaagttgtcaacttaagcgtctgtttaccaaagaccgggaacaggggcccaaacatgtccagtcctcttcttccctctgctggaacctttggggacactcaagggtacagtttgacactgatctggtccatgaggctgcccagagaaagcactgcttctgtatgtctcttgtg

SEQ ID NO: 1275 - DNA, 404 bp, Homo sapiens
  misc_feature (93)..(109): n includes a, c, g, or t, or contains no nucleotide
gtggtttacctcgtgctgatagatggccacactctttagagtagttctcataagttctagaactggtagctcggtcgtttcgcacactaggtnnnnnnnnnnnnnnnnncaggtgttcatatccttgattttgagaatttcccctcaagtatgtggcagtaaatacaacaagacactctatgtattaatgtctccattgtcttaaccctgttccaaaacaaaattcacctcctttctttatgtgaatgtattctccataaaattccagtatttaaaaagcagtttactgttctgtactttctgttgtatcacaatcaggtaaaagtcactttaaactgaggaaacggcaaattgtgttttaaagctctttgtatttctccagtttctgaccttgtaaatttgta

SEQ ID NO: 1276 - DNA, 367 bp, Homo sapiens
  misc_feature (26)..(78): n includes a, c, g, or t, or contains no nucleotide
  misc_feature (88)..(129): n includes a, c, g, or t, or contains no nucleotide
gacactagctatgattctagaagtcnnnnnnnnnnnnnnnnnnnnnnnnnnnnnnnnnnnnnnnnnnnnnnnnnnnnncataggcatnnnnnnnnnnnnnnnnnnnnnnnnnnnnnnnnnnnnnnnnnncactaccactttttagaggaaattcactccctcgtaagcattggaaggtcaaattattttgaagtgatttttttaaaaaaaagtcttctgtttattaacaggaaaatttatttatttgacaggattttgagtaatgtaggaatacaaaaggtaaattagcagcacatataatttttttttaatttatgatccattttgtatggtctcaaagttggatgacctcattactaatatttgt

SEQ ID NO: 1277 - DNA, 397 bp, Homo sapiens
ccgccaaggccaccatcttgtgtacatcttatgtccagtttaaagaagatagccatccttttgatcttggactttacaatgaagctgtgaaaattatccatgacttccctcagttttatcctttagggattgtgcaacatgattgatcttgatggattttcatacgattgtaaatgagctatattaaagtctattaaaggaagcccttcttgtttgagggagagatttctgtgctttctcatatttaatttgctgtttttaagatattccaacctagagtttttgatggaactgatatattgacagttctcaccgaagcccttttataaagaattgctactccaatatatggtcagattagatgcaagaataaagcagttgtccgagtctaagtttc

SEQ ID NO: 1278 - DNA, 505 bp, Homo sapiens
  misc_feature (40)..(40): n includes a, c, g, or t, or contains no nucleotide
  misc_feature (42)..(56): n includes a, c, g, or t, or contains no nucleotide
  misc_feature (60)..(60): n includes a, c, g, or t, or contains no nucleotide
  misc_feature (205)..(205): n includes a, c, g, or t, or contains no nucleotide
  misc_feature (445)..(466): n includes a, c, g, or t, or contains no nucleotide
ttccttttaggaatattacagctgtaaattatatgagacntnnnnnnnnnnnnnnnattnggtttaaaaaaattattgcaatctcaagttaatggaatatttttaaatcccacattcagagtttaaaacactggttttcaatgtgttttttagtgttgtcacttgtttatagataaatatataaataacctgtttggatcctggncctttttaactgttccttggtaattctgagcatttatttgatgacttaatatttttcactacctttggagaacagatgaacattattcaccatgaatggatctatactgtgtggtcatgagttgtgtatacttccataacactgtatttttcttctgtcagtacccttaggatacactttaaaacaccttaaggtctgatgttatggcaacaaactactttttcaaacctaaataggaannnnnnnnnnnnnnnnnnnnnnttgaacagtttgcccacacttagtttgttggtcttatgt

SEQ ID NO: 1279 - DNA, 305 bp, Homo sapiens
  misc_feature (151)..(177): n includes a, c, g, or t, or contains no nucleotide
  misc_feature (263)..(280): n includes a, c, g, or t, or contains no nucleotide
agcagttaatgctgcccaggactccacagatctggttgcaaaattaagagcttttcataatgaggcccaggttaacccagaacgtaaaaatctaaaatggattggtcttgatttgagcaatggtaaacctcgagacaacaaacaagcaggnnnnnnnnnnnnnnnnnnnnnnnnnnntaagagtttgaaatttgcaacagaagctgcaatcaccattcttcgaattgatgatcttattaaattacatccagaaagtaaagatnnnnnnnnnnnnnnnnnngaagatgctgttcactctggagccc

SEQ ID NO: 1280 - DNA, 605 bp, Homo sapiens
  misc_feature (95)..(223): n includes a, c, g, or t, or contains no nucleotide
cctaccacaagaagcggaagtatgagttggggcgcccagctgccaacaccaagattggcccccgccgcatccacacagtccgtgtgcggggaggnnnnnnnnnnnnnnnnnnnnnnnnnnnnnnnnnnnnnnnnnnnnnnnnnnnnnnnnnnnnnnnnnnnnnnnnnnnnnnnnnnnnnnnnnnnnnnnnnnnnnnnnnnnnnnnnnnnnnnnnnnnnnnnnngaccctggtgaagaattgcatcgtgctcatcgacagcacaccgtaccgacagtggtacgagtcccactatgcgctgcccctgggccgcaagaagggagccaagctgactcctgaggaagaagagattttaaacaaaaaacgatctaaaaaaattcagaagaaatatgatgaaaggaaaaagaatgccaaaatcagcagtctcctggaggagcagttccagcagggcaagcttcttgcgtgcatcgcttcaaggccgggacagtgtggccgagcagatggctatgtgctagagggcaaagagttggagttctatcttaggaaaatcaaggcccgcaaaggcaaataaatccttgttttgtcttcacccatgtaataaaggtgt

SEQ ID NO: 1281 - DNA, 520 bp, Homo sapiens
  misc_feature (46)..(66): n includes a, c, g, or t, or contains no nucleotide
  misc_feature (162)..(246): n includes a, c, g, or t, or contains no nucleotide
  misc_feature (334)..(334): n includes a, c, g, or t, or contains no nucleotide
  misc_feature (393)..(393): n includes a, c, g, or t, or contains no nucleotide
  misc_feature (425)..(439): n includes a, c, g, or t, or contains no nucleotide
aggcaggcccaacaagctggagcgtgatgaggtggtccaggtcttnnnnnnnnnnnnnnnnnnnnnagagctgcagcagttctataacagccagggccggcttcctgacggcagggtggtgctgtgctttggggaagagtttccggatatggcccccttgcnnnnnnnnnnnnnnnnnnnnnnnnnnnnnnnnnnnnnnnnnnnnnnnnnnnnnnnnnnnnnnnnnnnnnnnnnnnnnnnnnnnnntgtgatgcaggcccccgaggagccgccgccagaccaggtcttccggatgtttccagatatttgtgcctcacaccagagatcatttttnagagaaaaccaacagatcaccgtctaagtgcgtcgcttgggcgccccaccccgtctgcntcctgcatccatctccctgttacagtggcccnnnnnnnnnnnnnnnaatgtggatccctctgtctggggtgggatgccttactttgcacttaatttaataagggcattctcggaggagtagacgttt

SEQ ID NO: 1282 - DNA, 429 bp, Homo sapiens
  misc_feature (269)..(269): n includes a, c, g, or t, or contains no nucleotide
tccgtctgagtctaccattttcttgctctccctccttccttgggcctgcctcagttccctttggcctccccctttacccagctcttggggtgtctctgttttttccatccccacttcctgccttctcgtggccctgtgtgagcacatgtgtacatctcagccttatctcaaggaggtgacaccttctctccttgtccccatctggccgtctctctgtgcttccctggccaggggcgtgcctgctggtcctatggggggaaggctactcngcatctcagccaccttcctcaggctcactccacctacatccccagtctgccacaccccatccctttgggcctcagccctgtccctttgatgtcctcctttccttcagcccctctgccctgtccctgcacacctccactgcctcccagcagatctgtggag

SEQ ID NO: 1283 - DNA, 373 bp, Homo sapiens
aattatcttaagtgagatgttaagcccactttgttcttttaatgtaatggagcttatgggtagaagaccatgtctactaattacaaaaaaaaaaaaaaaccatgattgctgcttttcctaccacttccagtaagaaaatgggtgttttgaagaaatcatttgccttgtctcacggaatctgattaagccctggcctcttgatgtatagagtcatggatattccagttacctagatattcccttgagattttgatacaatttgagggaggcagaagtctgcagttgaagaaaaaaaataagtctgtttgtcatatttaagtagcctgtgcgtatttttatactgattttgatatcatgttcttttcatagtcgt

SEQ ID NO: 1284 - DNA, 269 bp, Homo sapiens
  misc_feature (122)..(122): n includes a, c, g, or t, or contains no nucleotide
ggctctggaaggacaccaaactgttctgcttgttaccttccctccgtcttctcctcgcctttcacagtcccctcctgcctgctcctgtccagccaggtctaccacccaccccacccctcttnctccggctccctgcccctccagattgcctggtgatctattttgtttccttttgtgtttctttttctgttttgagtgtctttctttgcaggtttctgtagccggaagatctccgttccgctcccagcggctccagtgtaaattcccct

SEQ ID NO: 1285 - DNA, 163 bp, Homo sapiens
gagtagcctgcaacattcggccgtggttacgatgagtttacccctcaatcccaaacctttcctcaatggactaacaggaaagccagtgatggtgaaacttaagtggggaatggagtacaagggctatctggtatctgtagatggctacatgaacatgcagctt

SEQ ID NO: 1286 - DNA, 448 bp, Homo sapiens
  misc_feature (48)..(64): n includes a, c, g, or t, or contains no nucleotide
  misc_feature (146)..(146): n includes a, c, g, or t, or contains no nucleotide
  misc_feature (248)..(248): n includes a, c, g, or t, or contains no nucleotide
  misc_feature (250)..(265): n includes a, c, g, or t, or contains no nucleotide
  misc_feature (275)..(275): n includes a, c, g, or t, or contains no nucleotide
  misc_feature (278)..(278): n includes a, c, g, or t, or contains no nucleotide
  misc_feature (329)..(329): n includes a, c, g, or t, or contains no nucleotide
  misc_feature (363)..(384): n includes a, c, g, or t, or contains no nucleotide
cctgggcagtgtcaggtctacgaagatctacactccaggccggaaagnnnnnnnnnnnnnnnnngacccctcgccgcacgccagcccgctttggtctgtgagctgaggctgtccccagagaggatggcagcaggtattgggtcctnagccttctggcgggagccctgaggctgcggacaaagccctttcatctgaggactttcatctgtgcatatcacggccccccagggcagttcctgctggaccanannnnnnnnnnnnnnnnggtggagttnctnccatgcaggagcacggcatggcgggagcggggctgcagagtatccgaggtnctgccggggcagcgggaggtggctggacccatcnnnnnnnnnnnnnnnnnnnnnnacttggtgtatgcgtgacttggctgtggctgtcttttttaatccttgtgtaaagcagcaaaaaa

SEQ ID NO: 1287 - DNA, 64 bp, Homo sapiens
gaacttctcttggaggaatgaatgcaaccagtgtaaggcccctaaaccagatggcccaggaggg

SEQ ID NO: 1288 - DNA, 301 bp, Homo sapiens
  misc_feature (205)..(225): n includes a, c, g, or t, or contains no nucleotide
  misc_feature (228)..(228): n includes a, c, g, or t, or contains no nucleotide
ttgctggggacagtgacttggactctgatgaatgaggcttcctttgggcctccttggtcagccttccctgttctccagcctaggtggttcacctttccccaatttgttcatatttgtacagtatctgatcctgaaatcatgaaattaactaacaccttagcctttttaaaagtagtaagtaaatgataataaatcacctctcctnnnnnnnnnnnnnnnnnnnnnccntttgatttaaaacaaagcaaccccctttcccctaccactacggaaaagagcaagctcatttttccgtgtcctc

SEQ ID NO: 1289 - DNA, 475 bp, Homo sapiens
  misc_feature (220)..(220): n includes a, c, g, or t, or contains no nucleotide
  misc_feature (252)..(252): n includes a, c, g, or t, or contains no nucleotide
  misc_feature (259)..(313): n includes a, c, g, or t, or contains no nucleotide
taatcgatggggatgtgtagcccccccgtgtgaggatgacatcaccacatttctagtttcatggagctcaagatgtcttgtgtctgtgtggctagatggcctctgcttggtaatcttatttttaggcctaaaattcccacttaaatccaaagtaaaaatggttatactgaagcataaaccttgcctgtgtaattttaaaaaattaatagagctgtgcaanccctgttatttttgtaaaaaaaaaaaaaaatncatatcnnnnnnnnnnnnnnnnnnnnnnnnnnnnnnnnnnnnnnnnnnnnnnnnnnnnnnntaggggaggccctgggggatgacctcccagcctttatgatgcttttctctatgctgctggacttcattcttactggtccacgcagatgcaggcggcctgaggccagtgctgtaccaagtagaagacggttcctaaggacagagtttgtctgttttctaacaa

SEQ ID NO: 1290 - DNA, 529 bp, Homo sapiens
  misc_feature (313)..(335): n includes a, c, g, or t, or contains no nucleotide
  misc_feature (431)..(463): n includes a, c, g, or t, or contains no nucleotide
cggatcagcaggacagttgggctctcagactcatgaccactgagtttgcttgtgttgaaactgtggtttcatccaacatatgctattggacatgattattattccattcaaatggattacagacttcttgaggacaggacaaacttatctctcatggtgtttttttagaatacttttataaccaaggaagaaaccatgccagctgttaccattcaacttcttaagcagagattaagctttttcatatctgttcttatcctggacatcagtagtttttaattgcccagcatccgttccatcttgtaacaactcnnnnnnnnnnnnnnnnnnnnnnncttcctattttcagtctgtggtttggacagtctgacccaaccttgagctttgtgggtgaacatgtaattcagacctcatcaatcagcaaatccatnnnnnnnnnnnnnnnnnnnnnnnnnnnnnnnnnggtgctttagctttgtaggatgaaaacctcaaactaacagggcctaccatgtagagaatgaagcca

SEQ ID NO: 1291 - DNA, 553 bp, Homo sapiens
  misc_feature (49)..(117): n includes a, c, g, or t, or contains no nucleotide
  misc_feature (522)..(525): n includes a, c, g, or t, or contains no nucleotide
  misc_feature (527)..(528): n includes a, c, g, or t, or contains no nucleotide
caaggattcccaagaaatggatcttttcactggctgactctcccatatnnnnnnnnnnnnnnnnnnnnnnnnnnnnnnnnnnnnnnnnnnnnnnnnnnnnnnnnnnnnnnnnnnnnngatttggtgaagttcactgtattgctatatttttgtagataaataaaactcaataaattgttaatcattctctttttgctgtatagaattgcttatatcactctttctttcatgacattggttaacatttaaatgttcctcctgtacttgtgttgtctgtgaccgcttatagagttttattgttattggtgtttacctgaatacctatgcgtacacacacacatatttccttaatacttctgaactcattatcttttagaataataatactactacactttaccagcaattaacttctccctacccaaaatgtttttcttcctgtctgaaaatggaactaatttgtcttattcgtgcttatatctgtattaaatgcaataaagttagtttttgaaatgtaaaaannnnanngtgcaattcatatgtcagcaataaa

SEQ ID NO: 1292 - DNA, 495 bp, Homo sapiens
cctcaggtgtagctgagctgtgacattgctggtcatccttggtgctcttgcttttttgaaagatgctttttttttttttaactgacgtagaatgaagaactgcatgtggcttctctgtctctgtggaaaagccatctcaggttggcggcagacacattgtcatcagaggggagcagcggctctggtcctcggagctggttcctctctcccaccctaagggcagccctccatggtcctgtctgtccttctgaagtgtgtccatcctgacctgcgggtcctcagctgctcccacacttgtgccagcccggaggggactggtcccggtcaccgcggacgtgctggccttggtatgtgccaggcttgcctgggctgggcagccttgggggggctgcctttgtggtgggcgctggggaagtacgtcccagcggcctcagggtctaaggagcgctagtgccttgcccacaggtgcgggaccatctgatgtgatgtgaatac

SEQ ID NO: 1293 - DNA, 483 bp, Homo sapiens
  misc_feature (222)..(236): n includes a, c, g, or t, or contains no nucleotide
  misc_feature (361)..(375): n includes a, c, g, or t, or contains no nucleotide
  misc_feature (421)..(421): n includes a, c, g, or t, or contains no nucleotide
  misc_feature (424)..(425): n includes a, c, g, or t, or contains no nucleotide
  misc_feature (432)..(432): n includes a, c, g, or t, or contains no nucleotide
  misc_feature (434)..(444): n includes a, c, g, or t, or contains no nucleotide
  misc_feature (446)..(454): n includes a, c, g, or t, or contains no nucleotide
acgcggcaatggtctcatcaaggtgaacgggcggcccctggagatgattgagccgcgcacgctacagtacaagctgctggagccagttctgcttctcggcaaggagcgatttgctggtgtagacatccgtgtccgtgtaaagggtggtggtcacgtggcccagatttatgctatccgtcagtccatctccaaagccctggtggcctattaccagaaatatgnnnnnnnnnnnnnnnagaaggagatcaaagacatcctcatccagtatgaccggaccctgctggtagctgaccctcgtcgctgcgagtccaaaaagtttggaggccctggtgcccgcgctcgctaccagaaatcctaccgnnnnnnnnnnnnnnnctcaaaactcacttgtataataaacagtttttgagggattttaaanttnnaaaaaanannnnnnnnnnnannnnnnnnnattggatgtttaaccagacagaaatcagt

SEQ ID NO: 1294 - DNA, 319 bp, Homo sapiens
tgtgctgtcaaaacaagtttttctgtcaagaagatgatcagaccttggatcagatgaactcttagaaatgaaggcagaaaaatgtcattgagtaatatagtgactatgaacttctctcagacttactttactcatttttttaatttattattgaaattgtacatatttgtggaataatgtaaaatgttgaataaaaatatgtacaagtgttgttttttaagttgcactgatattttacctcttattgcaaaatagcatttgtttaagggtgatagtcaaattatgtattggtggggctgggtaccaatgctgcaggtca

SEQ ID NO: 1295 - DNA, 495 bp, Homo sapiens
  misc_feature (455)..(470): n includes a, c, g, or t, or contains no nucleotide
cttaggggcacaaggaggacaataatagctgatcttttgaaatttgaaaaacgtctttagatgaccaagcaaaaagactttaaaaaatggtaatgaaaatggaatgcagctactgcagctaataaaaaattttagatagcaattgttacaaccatatgcctttatagctagacattagaattatgatagcatgagtttatacattctattatttttcctccctttctcatgtttttataaataggtaataaaaaatgttttgcctgccaattgaatgatttcgtagctgaagtagaaacatttaggtttctgtagcattaaattgtgaagacaactggagtggtacttactgaagaaactctctgtatgtcctagaataagaagcaatgatgtgctgcttctgatttttcttgcattttaaattctcagccaacctacagccatgatctttagcnnnnnnnnnnnnnnnngacttcacagacatggtctagaatc

SEQ ID NO: 1296 - DNA, 229 bp, Homo sapiens
  misc_feature (28)..(28): n includes a, c, g, or t, or contains no nucleotide
  misc_feature (33)..(158): n includes a, c, g, or t, or contains no nucleotide
  misc_feature (175)..(175): n includes a, c, g, or t, or contains no nucleotide
tcattcaacattacgacatgacaggccntacannnnnnnnnnnnnnnnnnnnnnnnnnnnnnnnnnnnnnnnnnnnnnnnnnnnnnnnnnnnnnnnnnnnnnnnnnnnnnnnnnnnnnnnnnnnnnnnnnnnnnnnnnnnnnnnnnnnnnnnnnnnnntgtacagaggatctccnacgtcaaagtcaatcccaaaacagataagccctatgaggatgtcagcatcataa

SEQ ID NO: 1297 - DNA, 359 bp, Homo sapiens
  misc_feature (120)..(121): n includes a, c, g, or t, or contains no nucleotide
  misc_feature (124)..(131): n includes a, c, g, or t, or contains no nucleotide
  misc_feature (133)..(133): n includes a, c, g, or t, or contains no nucleotide
  misc_feature (135)..(138): n includes a, c, g, or t, or contains no nucleotide
  misc_feature (203)..(229): n includes a, c, g, or t, or contains no nucleotide
  misc_feature (235)..(235): n includes a, c, g, or t, or contains no nucleotide
cccttctctacttggctgctgttttaaagtttgcccttccccaaatttggatttttattacagatctaaagctctttcgattttatactgattaaatcagtactgcagtatttgattaannaannnnnnnnanannnngtgattcttgggacttttttgacgtaagaaatacttctttatttatgcatattcttcccacagtnnnnnnnnnnnnnnnnnnnnnnnnnnngccttnagggcttttataaaatagaaaattaggcattctgatatttctttagctgctttgtgtgaaaccatggtgtaaaagcacagctggctgctttttactgcttgtgtagtcacgagtccattgtaat

SEQ ID NO: 1298 - DNA, 448 bp, Homo sapiens
  misc_feature (139)..(139): n includes a, c, g, or t, or contains no nucleotide
  misc_feature (141)..(189): n includes a, c, g, or t, or contains no nucleotide
gtccggaaggacgacctgcacagaaagagactgcacaacacgatagcactggccgccctggtgtactgtgtaaagaagatttacgaactctatgccgtatgatttcagtagaacagggagcgaagcaaaaccacccggncnnnnnnnnnnnnnnnnnnnnnnnnnnnnnnnnnnnnnnnnnnnnnnnnngagcctgggcaggtgtttggcttagtatttgttatttttaaaaaataacagatcacgggtgtacccagggtttttcagctcattacactaagatgtggatttccataacccaagaggggggtctgaggctgtggaagtccgactgggcagtggaatgctgatggaggcagacgctgccgagggggtgtggacgtgctttgggggaggtctttaagtctattgtttaactgtaccatccagagcccaccagaagctattg

SEQ ID NO: 1299 - DNA, 374 bp, Homo sapiens
  misc_feature (33)..(47): n includes a, c, g, or t, or contains no nucleotide
  misc_feature (110)..(110): n includes a, c, g, or t, or contains no nucleotide
  misc_feature (148)..(148): n includes a, c, g, or t, or contains no nucleotide
gaggcctggtttctgggtaatgcctcccttggnnnnnnnnnnnnnnnaaccaaatgggccatcaggtacttcattagtcatggcagaaggaggggaaaagacttgttttnccagacagaaaatctactcccctgtccccagccatatnccctggataggaagggataggaagagactacttggtgccatggggtaggggtgagggtataagtagatcagagtgggaagacctcagccttgggtggcttgtctctgcttcttgccaggtgggagggcctgtccacaccctggatccccgtaccacagtgccagccatgcccttcccctgggctaccattgtccctttcctcacccagttggtagaggagtcagga

SEQ ID NO: 1300 - DNA, 601 bp, Homo sapiens
  misc_feature (69)..(88): n includes a, c, g, or t, or contains no nucleotide
  misc_feature (180)..(180): n includes a, c, g, or t, or contains no nucleotide
  misc_feature (259)..(390): n includes a, c, g, or t, or contains no nucleotide
  misc_feature (405)..(405): n includes a, c, g, or t, or contains no nucleotide
  misc_feature (456)..(456): n includes a, c, g, or t, or contains no nucleotide
  misc_feature (501)..(501): n includes a, c, g, or t, or contains no nucleotide
  misc_feature (526)..(526): n includes a, c, g, or t, or contains no nucleotide
  misc_feature (547)..(576): n includes a, c, g, or t, or contains no nucleotide
gatgtctctctttgccatttttggaggtatggaagagagacatgctcctgagtgtgatggcctatgacnnnnnnnnnnnnnnnnnnnnccctctatattgttcagccatctttaacccgtgtttctgtggcttcctagatttgttgtcttttttttttttttctcagtctttcagactcncagctgcacaacttgattgccttacaaatgacctgcttcaaggatgtggaaattcctaatttcttctgggaaccttctnnnnnnnnnnnnnnnnnnnnnnnnnnnnnnnnnnnnnnnnnnnnnnnnnnnnnnnnnnnnnnnnnnnnnnnnnnnnnnnnnnnnnnnnnnnnnnnnnnnnnnnnnnnnnnnnnnnnnnnnnnnnnnnnnnnnaagtataaaccttcnccacctgtgggtctcacctgtcagttgtttgctgattttatggaacaggcnttggagggtacctcggttcagatgtgtcatcttccccgagaaagngtgcagtggcctcagtgatgtacanggtggtcacccccatgctgannnnnnnnnnnnnnnnnnnnnnnnnnnnnnatatgaaaagtgtcctgcggcggcc

SEQ ID NO: 1301 - DNA, 503 bp, Homo sapiens
  misc_feature (72)..(72): n includes a, c, g, or t, or contains no nucleotide
  misc_feature (76)..(76): n includes a, c, g, or t, or contains no nucleotide
  misc_feature (154)..(154): n includes a, c, g, or t, or contains no nucleotide
  misc_feature (252)..(252): n includes a, c, g, or t, or contains no nucleotide
  misc_feature (400)..(400): n includes a, c, g, or t, or contains no nucleotide
  misc_feature (416)..(465): n includes a, c, g, or t, or contains no nucleotide
agaaggtcattctgtgcctgaaattaattcggataccgacaaatcagaaaccgaggaatccattgtaaccgnagangttaattgtagttacttcatatactctaggacaatgcagacagtctgaaaaagagaaaatggagcaaaaggccatttnccaaacgatttaaatttgaggaacctttgctacaagaaattccaggagaatttatctactgagcaatatttccctttagaacttcaagatttctacantgaaaatgttaatattatttatggacctctggccaaatggtacatgtactggaagtggataaccagtatcacttacacaaacaaaaataactttgtcaaatttgtggagttaggtggaagccagattttaaaagttgccaaccagganatttaacaggtacagnnnnnnnnnnnnnnnnnnnnnnnnnnnnnnnnnnnnnnnnnnnnnnnnnnttctacatcctgtttctccagaatgagaatttgtgtac

SEQ ID NO: 1302 - DNA, 453 bp, Homo sapiens
  misc_feature (85)..(124): n includes a, c, g, or t, or contains no nucleotide
  misc_feature (381)..(396): n includes a, c, g, or t, or contains no nucleotide
aacagctaggggaacctgatctctccgacaaggaccgaaaggacctggagggccggctaaaggctcgcgaggacctgctgctccnnnnnnnnnnnnnnnnnnnnnnnnnnnnnnnnnnnnnnnntgacacacccggccggatgctggagaagggcgtcatatctgacatcctggagtggaagaccgcacgcaccttcctgtattggcgtctgcgccgcctcctcctggaggaccaggtcaagcaggagatcctgcaggccagcggggagctgagtcacgtgcatatccagtccatgctgcgtcgctggttcgtggagacggagggggctgtcaaggcctacttgtgggacaacaaccaggtggttgtgcagtggctggaannnnnnnnnnnnnnnngggatggcccgcgctccaccatccgtgagaacatcacgtacctgaagcacgactctg

SEQ ID NO: 1303 - DNA, 354 bp, Homo sapiens
  misc_feature (33)..(33): n includes a, c, g, or t, or contains no nucleotide
  misc_feature (58)..(58): n includes a, c, g, or t, or contains no nucleotide
  misc_feature (90)..(90): n includes a, c, g, or t, or contains no nucleotide
  misc_feature (117)..(117): n includes a, c, g, or t, or contains no nucleotide
  misc_feature (226)..(245): n includes a, c, g, or t, or contains no nucleotide
cagtcctttcttcctggccgttgggtatcatangccacacatccccttcagatacccnaaggaatttcagaagttgtatcccttggagancatcaccctggcccccgatcccgaggntccctgatggcctaccccctgtggcctacaacccctggatggacatcaggcaacgggaagacgtccaagccttaaacatcagtgtgccgtatggtccaattcctgtggnnnnnnnnnnnnnnnnnnnncagagctactttgcctctgtgtcatatttggatacacaggtcggccgcctcttgagtgctttggacgatcttcagctggccaacagcaccatcattgcatttacctcgg

SEQ ID NO: 1304 - DNA, 445 bp, Homo sapiens
tcctggcaaaaggtcagagtctggatcaccttctgctggaggccacagcaaacctcctcacagcccactggtcctcaagaggtgccacgtctccacacatcagcacaactacgcagcgcctccctccactcggaaggactatcctgctgccaagagggtcaagttggacagtgtcagagtcctgagacagatcagcaacaaccgaaaatgcaccagccccaggtcctcggacaccgaggagaatgtcaagaggcgaacacacaacgtcttggagcgccagaggaggaacgagctaaaacggagcttttttgccctgcgtgaccagatcccggagttggaaaacaatgaaaaggcccccaaggtagttatccttaaaaaagccacagcatacatcctgtccgtccaagcagaggagcaaaagctcatttctgaagaggacttgttg

SEQ ID NO: 1305 - DNA, 517 bp, Homo sapiens
  misc_feature (49)..(51): n includes a, c, g, or t, or contains no nucleotide
  misc_feature (69)..(69): n includes a, c, g, or t, or contains no nucleotide
  misc_feature (132)..(146): n includes a, c, g, or t, or contains no nucleotide
  misc_feature (176)..(190): n includes a, c, g, or t, or contains no nucleotide
  misc_feature (197)..(197): n includes a, c, g, or t, or contains no nucleotide
  misc_feature (216)..(232): n includes a, c, g, or t, or contains no nucleotide
  misc_feature (411)..(411): n includes a, c, g, or t, or contains no nucleotide
  misc_feature (450)..(450): n includes a, c, g, or t, or contains no nucleotide
  misc_feature (454)..(454): n includes a, c, g, or t, or contains no nucleotide
  misc_feature (471)..(471): n includes a, c, g, or t, or contains no nucleotide
  misc_feature (479)..(479): n includes a, c, g, or t, or contains no nucleotide
  misc_feature (489)..(489): n includes a, c, g, or t, or contains no nucleotide
  misc_feature (492)..(492): n includes a, c, g, or t, or contains no nucleotide
ttcggcattggttccctttgctccaccccactcacagagacacagggcnnncaactgagaaaacgaaantgctctaagcacacggagacgtgatgaagggaggaggtgaactgtttccacattcaagattannnnnnnnnnnnnnncattttctgggttctgggtggttgcccttnnnnnnnnnnnnnnnaaaaagnaattccctggaccagatgnnnnnnnnnnnnnnnnnccaggaccgccaaagaatgccttgaagatattgtttggatcaaaatcacccatattcatgccctcctcatctaggtcctgtccactgtcatagcgagtctttttcttgggatcagagaggatagtaaaggcctctccaacttccttgaacttcttctcctcctccttctgaacctcagnactggctccactatgccgatctggatggtgcatcaaggnccgnttccgataagctttctngatctcgncctcagaggnatncttgtccactcctagaatcttgtag

SEQ ID NO: 1306 - DNA, 304 bp, Homo sapiens
aggtggacatgtcctgaaggacaaggaagtgaaagctgagacgtctaggaacacaccagagagagaagtggagcttctgagggatgcaggtggctgtgtgaacctggggctcccctgccccgcagagtgccaacccttcaatacccagggcctggtggctgggaggaccgcaggtgaccgtctttgttgaatgctgaggccgggccatgggcacatggagttgtcgtgtttcccttcactttggttcatgtttgaaatttccaaaattaaaaaaacagtgacttgttcagtaaattccaatatg

SEQ ID NO: 1307 - DNA, 549 bp, Homo sapiens
  misc_feature (78)..(92): n includes a, c, g, or t, or contains no nucleotide
  misc_feature (284)..(284): n includes a, c, g, or t, or contains no nucleotide
  misc_feature (411)..(411): n includes a, c, g, or t, or contains no nucleotide
ttcttcctctaaagagtgtacaaggtggggtatgccaaggtatcaaaacaatatatgtgagtgtaatttaaactgtgnnnnnnnnnnnnnnntatggacgtgtttgtatcatttagatgtcattttaaatatttacattttagcaagacttttaaaaaggactcatttcatttcaaagtgcaaattgtttgccaggcttctggcaaatggttctttcaactgtgaacttatcgtgtacatatctgtatatttataaatattatatatattcatacatccttcantttaaaggtacattgtacagtctgtagttaggaggtatagcctatagcttatgttaaatggttgaaatggttctttttatagaaagtcaaacacagatgttacaggattttgtgtttggtttgtcantttttttattttttattttgactattgcatgagtaattaattccagatcttttgtattcacttctgtattttatgtttggttgaggggtgcttttagttgtgtggcatttgtattcattgatctttcagtcatgtaag

SEQ ID NO: 1308 - DNA, 433 bp, Homo sapiens
gtgtctgctgctattctccgagcttcgcaatgccgcctaaggacgacaagaagaagaaggacgctggaaagtcggccaagaaagacaaagacccagtgaacaaatccgggggcaaggccaaaaagaagaagtggtccaaaggcaaagttcgggacaagctcaataacttagtcttgtttgacaaagctacctatgataaactctgtaaggaagttcccaactataaacttataaccccagctgtggtctctgagagactgaagattcgaggctccctggccagggcagcccttcaggagctccttagtaaaggacttatcaaactggtttcaaagcacagagctcaagtaatttacaccagaaataccaagggtggagatgctccagctgctggtgaagatgcatgaataggtccaaccagctgtacatttgg

SEQ ID NO: 1309 - DNA, 188 bp, Homo sapiens
atgtgccttgtgaagacaagttctcctttgtctgcaagttcaaaaactagaggcagctggaaaatacatgtctagaactgatccagcaattacaacggagtcaaaaattaaaccggaccatctctccaactcaactcaacctggacactctcttctctgctgagtttgccttgttaatcttcaatagt

SEQ ID NO: 1310 - DNA, 319 bp, Homo sapiens
tgcttaccaaatcctgcagggcaatggagatcttaaaagaaagtggacctgggcagtggaatggcttggagatgaacttgaaagaagaccatatactggcaatcctcagtacacttacaacaattggtctcccccagtgcaaagcaatgaaacgtccaatggttatttcttggagagatcacatagtgctaggatgacacttgcaaaagcttgtgaactctgtccagaggaggagccagatgaccaagatgctccagatgaacatgagtcgcctccacctgaagatgccccattgtacccccattcacctggatctcag

SEQ ID NO: 1311 - DNA, 433 bp, Homo sapiens
  misc_feature (38)..(38): n includes a, c, g, or t, or contains no nucleotide
  misc_feature (45)..(47): n includes a, c, g, or t, or contains no nucleotide
  misc_feature (57)..(58): n includes a, c, g, or t, or contains no nucleotide
  misc_feature (65)..(65): n includes a, c, g, or t, or contains no nucleotide
  misc_feature (108)..(109): n includes a, c, g, or t, or contains no nucleotide
  misc_feature (114)..(114): n includes a, c, g, or t, or contains no nucleotide
  misc_feature (120)..(120): n includes a, c, g, or t, or contains no nucleotide
  misc_feature (246)..(246): n includes a, c, g, or t, or contains no nucleotide
  misc_feature (324)..(325): n includes a, c, g, or t, or contains no nucleotide
  misc_feature (327)..(328): n includes a, c, g, or t, or contains no nucleotide
  misc_feature (332)..(334): n includes a, c, g, or t, or contains no nucleotide
  misc_feature (336)..(353): n includes a, c, g, or t, or contains no nucleotide
  misc_feature (380)..(380): n includes a, c, g, or t, or contains no nucleotide
  misc_feature (385)..(385): n includes a, c, g, or t, or contains no nucleotide
gaactctttcttacccagcatgggggctgtttctcttncaggctnnntcccgccctnnctgcccngccccaccgaggcctgagcacgttcccgggtgccgagcactgnnctccnggcttncccccaagaccacgcttagcggtggcttcttcgttgctgtaattgaacgggtcgagatgccgacgtgagtgagtgggggcatgcttgggaggcgcaggatggtactggcacatctaacatctacanttctctagctcagcctcacaggccaaagcatcagcaccagaacgcacacccagcccagccccaaagagaaagaagagnnannaaannncnnnnnnnnnnnnnnnnnnaccgccttgcacatagcagaggctccnggctnactccttcctggtgggaaaggaagatgcctgtcctctccgtggaggac

SEQ ID NO: 1312 - DNA, 190 bp, Homo sapiens
tcatcctgaagttaggaaacctgctgccctacagtgatcccagcgtggtgtttgtcttcctgtccgtgtttgctgtggtgacaatcctgcagtgcttcctgattagcacactcttctccagagccaacctggcagcagcctgtgggggcatcatctacttcacgctgtacctgccctacgtcctgtgtgt

SEQ ID NO: 1313 - DNA, 52 bp, Homo sapiens
cctcatggattggtgtgtttcgtaacagcagtcatcatccatgggtgacaat

SEQ ID NO: 1314 - DNA, 336 bp, Homo sapiens
ccatcctaaaaatgtgagtgtcaatttccaacctcccctgtacttacctgttttctcctcccccatccctacccttgtccacaggctcaacatttctacacgttgcccatcatcccttcttccatccttagagggacccttccaaggtcccgaccccatccctatccatagtcctggtccccagaaactccaacccctgcccttcctcttcccccttccaccctcacatccccatccccttctagcctttcctagcaccctatgatttattcccttgagaggagtgttccctgatccctgtgcctcttcccatctcaaccaggatcctgatgtatg

SEQ ID NO: 1315 - DNA, 517 bp, Homo sapiens
  misc_feature (26)..(26): n includes a, c, g, or t, or contains no nucleotide
  misc_feature (76)..(76): n includes a, c, g, or t, or contains no nucleotide
  misc_feature (79)..(79): n includes a, c, g, or t, or contains no nucleotide
  misc_feature (82)..(107): n includes a, c, g, or t, or contains no nucleotide
  misc_feature (222)..(222): n includes a, c, g, or t, or contains no nucleotide
gaaggctccccagaggcctctgtggnctccactccgggaaagccctctgcccacacccacaggcttcacattcccnccnccnnnnnnnnnnnnnnnnnnnnnnnnnnaagacactgtaaccacaagatgttatttattgagctggcgccgggacttgggcggggcctgccctacagtgagcagcccacacaggaacgctcctctcgcgagcggcccgggcanggaccctgtcccaacaccaacacctcctctccagcccaatcttctgggtccagacctgcttgtcccttttttagaaaacacttttaaactttttaaaaattttaaaccttttttcagcagatatggagagagctgacaatcaattcacattttttaagccattttagctaaactgtcattgtgcatctctgaggttccctcatggagctccacagatccatttttagggaagggattttggctcaaaacgatctgaccacctctgccctgtccaccaggataagtgacacctagg

SEQ ID NO: 1316 - DNA, 559 bp, Homo sapiens
agtatgcagtctacaccatgatcagcaggcaggaagaatccaccaagtacttcaactttgcaacctccgatgagaagaaaatgaaagaggctgagcatcgataccgtgtgaataacctcagccagcgagatctggccatcagcattaacttctgggttcctgtcctgctgaacggggtggctgtgtgggatgtggccatggaggccccatctcagagtctcccctgtgtttcagagagaaaacctccccagcattctgacttcctgacccagatttcaagaagtcccatgctggactgctccattgctgactgcctgcagttccgctgtgacgtcccctccttcagcgtccaggaggagctggatttcaccctgaagggcaatctcagtttcggctgggtccgcgagacattgcagaagaaggtgttggtcgtgagtgtggctgaaattacgttcgacacatccgtgtactcccagcttccaggacaggaggcatttatgagagctcagatggagatggtgctagaagaagacgaggtctacaatgccattcccatcat

SEQ ID NO: 1317 - DNA, 473 bp, Homo sapiens
  misc_feature (194)..(194): n includes a, c, g, or t, or contains no nucleotide
  misc_feature (228)..(278): n includes a, c, g, or t, or contains no nucleotide
agaccagcttctattcccagcctgaccatttgttccgcaagttccactacctgcccttcgtgccctcagccgaggacgtctatgactgccaggtggagcactggggcctggatgcgccactcctcaggcattgggagctccaggtgcctattccaccaccagatgccatggagaccctggtctgtgccctgggnctggccatcggcctggtgggcttcctcgtgggcnnnnnnnnnnnnnnnnnnnnnnnnnnnnnnnnnnnnnnnnnnnnnnnnnnntccttctgagagaaatgacttgtgggagacaccctgcagatcctcatgggtttgtgacagcccctgcgtgctcagtgccctttaagtgcatcccgctgtgctgactttgagtgggatcaacatctgtcctacgggtcccctcttttttggccccagtattcatggcagggtttgttggacacctactagcttccc

SEQ ID NO: 1318 - DNA, 486 bp, Homo sapiens
  misc_feature (348)..(373): n includes a, c, g, or t, or contains no nucleotide
actctgtttaaggttctgtgtctatgcatctctctctttcttttttcaaccttctcattctcctatccagggatttaatcagcagaattactttttgataggggaggtataaggtttggcctgtaaggttctaactgccttcttttttctcacagaggtggcttatggcagatttttcctccttcaaactccaaacataatttttaagactatgtgccagtggactcttcccttatatctctgcaccacaagttgttggatgtttcctcttcctcccttatgtctacctcaccaacctcgctcatcatttggcccttatccttccttgtacacctaccttcagatttnnnnnnnnnnnnnnnnnnnnnnnnnntattccccagtctgttcttactcctttgtcgcttatccagaatgatgctatgtgtagcatcttgctgtaaatcctgtacaatgattctgtgtaaatagctgtggcctatgcca

SEQ ID NO: 1319 - DNA, 572 bp, Homo sapiens
  misc_feature (53)..(87): n includes a, c, g, or t, or contains no nucleotide
  misc_feature (91)..(96): n includes a, c, g, or t, or contains no nucleotide
  misc_feature (98)..(100): n includes a, c, g, or t, or contains no nucleotide
  misc_feature (102)..(104): n includes a, c, g, or t, or contains no nucleotide
  misc_feature (106)..(106): n includes a, c, g, or t, or contains no nucleotide
  misc_feature (110)..(110): n includes a, c, g, or t, or contains no nucleotide
  misc_feature (150)..(164): n includes a, c, g, or t, or contains no nucleotide
  misc_feature (259)..(259): n includes a, c, g, or t, or contains no nucleotide
  misc_feature (405)..(420): n includes a, c, g, or t, or contains no nucleotide
  misc_feature (423)..(429): n includes a, c, g, or t, or contains no nucleotide
  misc_feature (431)..(439): n includes a, c, g, or t, or contains no nucleotide
gagtgttttcagcagctgctcctaaaccagtcctcctgccagaaaggaccagnnnnnnnnnnnnnnnnnnnnnnnnnnnnnnnnnnnaccnnnnnngnnncnnngngggnctcacctgaaggctcgaaggcactgcacacttgtatattnnnnnnnnnnnnnnnttagttggttgtcagtgaacaataactttattatatgagtttttgtagcatcttaagaattatacatatgtttgaaatattgaaactaagctacngtaccagtaattagatgtagaatcttgtttgtaggctgaattttaatctgtatttattgtcttttgtatctcagaaattagaaacttgctacagacttacccgtaatatttgtcaagatcatagctgactttaaaaacagttgtannnnnnnnnnnnnnnntannnnnnnannnnnnnnngtttttgatgtcataaatagaccttgtttaatagtcacaagccgttgggatatcatacccagctgaaaaagaacaaactgcttaacataagtatatgtatcgtaataagagttttttaccagctaagtgattc

SEQ ID NO: 1320 - DNA, 549 bp, Homo sapiens
  misc_feature (26)..(131): n includes a, c, g, or t, or contains no nucleotide
  misc_feature (152)..(152): n includes a, c, g, or t, or contains no nucleotide
  misc_feature (160)..(160): n includes a, c, g, or t, or contains no nucleotide
  misc_feature (195)..(195): n includes a, c, g, or t, or contains no nucleotide
  misc_feature (251)..(296): n includes a, c, g, or t, or contains no nucleotide
  misc_feature (367)..(367): n includes a, c, g, or t, or contains no nucleotide
  misc_feature (404)..(404): n includes a, c, g, or t, or contains no nucleotide
  misc_feature (479)..(479): n includes a, c, g, or t, or contains no nucleotide
ctaaagcatctgaatctcagctacgnnnnnnnnnnnnnnnnnnnnnnnnnnnnnnnnnnnnnnnnnnnnnnnnnnnnnnnnnnnnnnnnnnnnnnnnnnnnnnnnnnnnnnnnnnnnnnnnnnnnnnnnnnactcagtgccatcctgcctgncctgagcngctgctcccagctcaccaccttctactttggcagnaattgcatgtctattgacgccctgaaggacctgctgcgccacaccagtgggctgannnnnnnnnnnnnnnnnnnnnnnnnnnnnnnnnnnnnnnnnnnnnnttccttggttcgtgtcaattgggagatcttcaccccacttcgggctgagctgatgtgtacactgagggaantcaggcagcccaagaggatcttcattggccccacccnctgcccttcctgtggctcatcaccgtctgaggaactggagctccatctttgctgctagggaaggcgtgcccagtngggtagagaaatccaaagttctcttccaggcacttggacactaaaatctactatgtaggtgcaaactatt

SEQ ID NO: 1321 - DNA, 383 bp, Homo sapiens
  misc_feature (117)..(117): n includes a, c, g, or t, or contains no nucleotide
  misc_feature (234)..(250): n includes a, c, g, or t, or contains no nucleotide
ccagatgttgcttctctgaggcagcaggttgaggccttacagggacaagtacagcacctccaggctgctttctctcagtataagaaagttgagctcttcccaaatggccaaagtgtnggggagaagattttcaagacagcaggctttgtaaaaccatttacggaggcacagctgctgtgcacacaggctggtggacagttggcctctccacgctctgccgctgagaatgccgcnnnnnnnnnnnnnnnnntagctaagaacgaggctgctttcctgagcatgactgattccaagacagagggcaagttcacctaccccacaggagagtccctggtctattccaactgggccccaggggagcccaacgatgatggcgggtcaga

SEQ ID NO: 1322 - DNA, 583 bp, Homo sapiens
  misc_feature (547)..(549): n includes a, c, g, or t, or contains no nucleotide
  misc_feature (552)..(555): n includes a, c, g, or t, or contains no nucleotide
  misc_feature (557)..(558): n includes a, c, g, or t, or contains no nucleotide
ttgcgccagagaacagaaaacatagatataaaaaaatactgtgtacattatcttgaggatgtaggttcttttgaatacactcgtaatacccttaaagagcttgaagctaaagcctataaacagattgatgcacgtggtgggaaccctgagctagtagccttagtaaaacacttaagtaagatgttcaaagaagaaaatgaataatgttaagccattcttgattggacctcatagcttattttagttaatcttttttttgtcttttagccttaccaccttttaaaaaatttgttattctccagaaacagtaaataggtgagtaggggtggtgcaagtgaattcgttttcatttagaagcccctctgtacagataatcaaaattcaaagttgaaagaatcaaaagcagccacagttatgtaggtctgatttgaatgtcataattgcagtgacaggacattgccaccaactctatcctactaccatcaatgttgtgtttattccgtcaataaaaaagacttgcttccaggaaaaaaaaaaaaaaaaaaannnaannnnannatctgggcagttccaagccagtttc

SEQ ID NO: 1323 - DNA, 503 bp, Homo sapiens
  misc_feature (202)..(231): n includes a, c, g, or t, or contains no nucleotide
  misc_feature (237)..(267): n includes a, c, g, or t, or contains no nucleotide
ttacttggctgaggttgccgctggtgatgacaagaaagggattgtcgatcagtcacaacaagcataccaagaagcttttgaaatcagcaaaaaggaaatgcaaccaacacatcctatcagactgggtctggcccttaacttctctgtgttctattatgagattctgaactccccagagaaagcctgctctcttgcaaagacnnnnnnnnnnnnnnnnnnnnnnnnnnnnnntacatnnnnnnnnnnnnnnnnnnnnnnnnnnnnnnnaataatgcaattactgagagacaacttgacattgtggacatcggatacccaaggagacgaagctgaagcaggagaaggaggggaaaattaaccggccttccaacttttgtctgcctcattctaaaatttacacagtagaccatttgtcatccatgctgtcccacaaatagttttttgtttacgatttatgacaggtttatgttacttctatttgaatttctatatttcccatgtgg

SEQ ID NO: 1324 - DNA, 557 bp, Homo sapiens
ttcagcgaattcgataaacggtatacccatggccgggggttcattaccaaggccatcaacagctgccacacttcttcccttgccacccccgaagacaaggagcaagcccaacagatgaatcaaaaagactttctgagcctgatagtcagcatattgcgatcctggaatgagcctctgtatcatctggtcacggaagtacgtggtatgcaagaagccccggaggctatcctatccaaagctgtagagattgaggagcaaaccaaacggcttctagagggcatggagctgatagtcagccaggttcatcctgaaaccaaagaaaatgagatctaccctgtctggtcgggacttccatccctgcagatggctgatgaagaatctcgcctttctgcttattataacctgctccactgcctacgcaggcattcacataaaatcgacaattatctcaagctcctgaagtgccgaatcatccacaacaacaactgctaagcccacatccatttcatctatttctgagaaggtccttaatgatccgttccattgcaagcttcttt

SEQ ID NO: 1325 - DNA, 433 bp, Homo sapiens
ggcatccgacacgtactgctgaccatcaagtgcctgctgatccaccctaaccccgagtctgcactcaacgaggaggcgggccgcctgctcttggagaactacgaggagtatgcggctcgggcccgtctgctcacagagatccacgggggcgccggcgggcccagcggcagggccgaagccggtcgggccctggccagtggcactgaagcttcctccaccgaccctggggccccagggggcccgggaggggctgagggtcccatggccaagaagcatgctggcgagcgcgataagaagctggcggccaagaaaaagacggacaagaagcgggcgctgcgggcgctgcggcggctgtagtgggctctcttcctccttccaccgtgaccccaacctctcctgtcccctccctccaactctgtctctaagttattta

SEQ ID NO: 1326 - DNA, 499 bp, Homo sapiens
  misc_feature (126)..(126): n includes a, c, g, or t, or contains no nucleotide
  misc_feature (168)..(168): n includes a, c, g, or t, or contains no nucleotide
  misc_feature (211)..(211): n includes a, c, g, or t, or contains no nucleotide
  misc_feature (246)..(246): n includes a, c, g, or t, or contains no nucleotide
  misc_feature (250)..(440): n includes a, c, g, or t, or contains no nucleotide
  misc_feature (442)..(446): n includes a, c, g, or t, or contains no nucleotide
  misc_feature (449)..(464): n includes a, c, g, or t, or contains no nucleotide
cagttgcagccctcggttagtctcccagtggaaaaatcggttgtgcctccctgcttcccaccatagctgcctgaaaacatgacgctctcaagcttgtccttccttcaggaagatgtccactcatgncccacccatgagagggcttgccgtatgccctggcctttgggncatatttatgtagagttcctttctcctaagacgtgagtttctncatgggggatgtacgagtaaaaaggttaacttctnttcnnnnnnnnnnnnnnnnnnnnnnnnnnnnnnnnnnnnnnnnnnnnnnnnnnnnnnnnnnnnnnnnnnnnnnnnnnnnnnnnnnnnnnnnnnnnnnnnnnnnnnnnnnnnnnnnnnnnnnnnnnnnnnnnnnnnnnnnnnnnnnnnnnnnnnnnnnnnnnnnnnnnnnnnnnnnnnnnnnnnnnnnnnnnnnnannnnnaannnnnnnnnnnnnnnntttgctccacccgcttcagatagatcattgttaga

SEQ ID NO: 1327 - DNA, 473 bp, Homo sapiens
  misc_feature (244)..(244): n includes a, c, g, or t, or contains no nucleotide
ctagttacattcttatgatatggcattaaattatttccatatattatataataggtccttccactttttggagagtagcaaatctagcttttttgtacagacttagaaattatctaaagatttcatctttttacctcatatttcttaggaatttaatggttatatgttgtctttttttcctatgtcttttggctcaagcaacatgtatatcagtgttgactttttctttcttagatctagtttnaaaaaaaaaaaaaaccacataacaattctttgaagaaaggaagggattaaataatttttttccctaacactttcttgaaggtcaggggctttatctatgaaaaagtagtaaatagttctttgtaacctgtgtgaagcagcagccagccttaaagtagtccattcttgctaatggttagaacagtgaatactagtggaattgtttgggctgcttttagtttctcttaatc

SEQ ID NO: 1328 - DNA, 396 bp, Homo sapiens
gtcatcttgtaattctatgtgtaactttggaggaatttccaaactgttttctgcaatggctgcaccattttacattcctgtcagcaatgtacaggattccagtttctccatatccctgccaacacttggtattttcctttttttcagttagttactctagtgggtatgtggtggttgtcccattgctgtttgttttgattttcattgtccctaatgactaatgatattgagcatctaatatccagttgtcccagcaacatttgtttgaagagactattctttcctgtgtaaatggtcttggcatctttgttgaaaatcgattggcagccaggtgcagtagctcacacctgtaatcccagcactttgggaggctgcgctgggcagatcgcttaagct

SEQ ID NO: 1329 - DNA, 468 bp, Homo sapiens
  misc_feature (172)..(172): n includes a, c, g, or t, or contains no nucleotide
  misc_feature (196)..(196): n includes a, c, g, or t, or contains no nucleotide
  misc_feature (244)..(274): n includes a, c, g, or t, or contains no nucleotide
tcatgcttactgtaaagtggaagttgagattattttaaaacttcaagctcagtaattttgaacactgaaacattcatctaggacataataacaaagttcagtattgaccataactgttaaaacaatttttagctttcctcaagttagttatgttgtaggagtgtacctaagncagtaagcgtatttaggttaatgncagtttcacttatgttaaatgttgctcttataccacaaatacattgannnnnnnnnnnnnnnnnnnnnnnnnnnnnnnttctgtaaaactcaaatataggagctgtgtctacgattcaaagtgaaaacatttggcatgtttgttaattctagctttttggtttaatatcctgtaaggcacgtgagtgtacactttttttttttttaaggatacgggacaattttaagatgtaataccaatactttagaagtttggtcgtgtcgtttgtatga

SEQ ID NO: 1330 - DNA, 52 bp, Homo sapiens
gctattgaccggagatctgcagctcctgtgtcctgactgtcgcggaaactgc

SEQ ID NO: 1331 - DNA, 505 bp, Homo sapiens
  misc_feature (43)..(43): n includes a, c, g, or t, or contains no nucleotide
  misc_feature (109)..(134): n includes a, c, g, or t, or contains no nucleotide
  misc_feature (177)..(191): n includes a, c, g, or t, or contains no nucleotide
ccagcataggggtcttaggcatagggctgaacagtccttccangagccctcgttccaatccctgccgtccttgcccctgaggggccctgaccactgtgagcaggagggnnnnnnnnnnnnnnnnnnnnnnnnnntgccgctgggctttccgggactgtggagggagcacaggcgggnnnnnnnnnnnnnnnacagggcttggtggggcaggacatggctcccattttgaagggaggtctccatgtggtccgagtgaggtgagacggccctcgtcctggtgttcctgatcatcttgaaaggttcttctggaactcctgtccccttagtcatgagaacagaaagtgcaatatttcctttcacctggcaggggaggggggatttatttctgaaagaaaaatatataaacagatcttctacatttatatttttaatcttctgttaaatacactttccgatattgccttgccttttgagctcttgctacagtcgcctttgctactgcttt

SEQ ID NO: 1332 - DNA, 259 bp, Homo sapiens
gtgaacgcccgttctacggccgccttgtcaagtatatggcctccgggccggtggtggccatggtttggcaggggctggacgtggtgcgcacctcgcgggcgctcatcggagccacgaacccggccgacgccccgcccggcaccatccgcggggatttctgcatcgaggttggcaacctgattcacggcagcgactcggtggagagtgcccgccgcgagatcgctctctggttccgcgcagacgagctcctctgctggga

SEQ ID NO: 1333 - DNA, 533 bp, Homo sapiens
  misc_feature (131)..(152): n includes a, c, g, or t, or contains no nucleotide
  misc_feature (161)..(175): n includes a, c, g, or t, or contains no nucleotide
  misc_feature (258)..(259): n includes a, c, g, or t, or contains no nucleotide
  misc_feature (261)..(263): n includes a, c, g, or t, or contains no nucleotide
  misc_feature (271)..(272): n includes a, c, g, or t, or contains no nucleotide
  misc_feature (275)..(276): n includes a, c, g, or t, or contains no nucleotide
  misc_feature (279)..(280): n includes a, c, g, or t, or contains no nucleotide
  misc_feature (283)..(287): n includes a, c, g, or t, or contains no nucleotide
  misc_feature (289)..(297): n includes a, c, g, or t, or contains no nucleotide
  misc_feature (299)..(301): n includes a, c, g, or t, or contains no nucleotide
  misc_feature (304)..(304): n includes a, c, g, or t, or contains no nucleotide
  misc_feature (307)..(308): n includes a, c, g, or t, or contains no nucleotide
  misc_feature (312)..(359): n includes a, c, g, or t, or contains no nucleotide
  misc_feature (364)..(364): n includes a, c, g, or t, or contains no nucleotide
  misc_feature (374)..(374): n includes a, c, g, or t, or contains no nucleotide
  misc_feature (385)..(385): n includes a, c, g, or t, or contains no nucleotide
  misc_feature (395)..(395): n includes a, c, g, or t, or contains no nucleotide
ggcataaaacagctttggggtgtctttttttggtgattcaaatgggttttccacgctagggcggggcacagattggagagggctctgtgctgacatggctctggactctaaagaccaaacttcactctggnnnnnnnnnnnnnnnnnnnnnnactcgcttnnnnnnnnnnnnnnnttttttttttttttgaagggaggacgggagctggggagaggaaagagtcttcaacataacccacttgtcactgacacaaaggnngnnncccctccnnggnnccnnctnnnnncnnnnnnnnngnnncgnccnncccnnnnnnnnnnnnnnnnnnnnnnnnnnnnnnnnnnnnnnnnnnnnnnnntgtcnaaaagttggnactaaatgccntagtttttangtaatctgtacattttgttgtaaaaagaaaaaccactcccagtccccagcccttcacattttttatgggcattgacaaatctgtgtatattatttggcagtttggtatttgcggcgtcagtctttttctgttgtaact

SEQ ID NO: 1334 - DNA, 433 bp, Homo sapiens
ttcaggcagccttggagtattttaaaaggaaaacattctttacttttatatgacattcttatactgctgtctcaaatccaaaaacatttcagagctcttgtctcagagatgtgtgttctttttgtcagagatatggttgatgagaatcttaaatgcttgttttgcactatcacttagtacctgtttgaccaaggtgttaaggggatagtacctcccaattcaagcagagaaactgacctgactaaagttaatcgcagatgaactagaagtcacaggttaattaaatgtaagtagattgtagatactgttttatatcaaacaatgtttataatgtgtatatagaattgttcactgtaaaaaaaatggccaaaatgtgttttttttttaataagtaacttgactataaaataaagccgtccgtgggacgactgac

SEQ ID NO: 1335 - DNA, 524 bp, Homo sapiens
  misc_feature (132)..(169): n includes a, c, g, or t, or contains no nucleotide
  misc_feature (395)..(419): n includes a, c, g, or t, or contains no nucleotide
atgcattacttggtatacagacttattttcataatgcaaattaataaaatgacacttttactgcactatagaaatattcatgtatgttaaacttttctgattgaggctaactggaaaaagctggggtcgtannnnnnnnnnnnnnnnnnnnnnnnnnnnnnnnnnnnnncccagggctctgaaacagctctagccgcctaatgcacttcacaggtaactccccaaggtaaaactagactctcttgttggttcgcaaagaaaagttaggacttaacacttttttctaaaattttataattcaatttccaaaagtctactctattttatactgtttctacaaaatattccttataaaaacaaagaacaaaaattgaatatttaatgaattgacattnnnnnnnnnnnnnnnnnnnnnnnnnggtgggaatctttgatgccagaaatttataaagaggttctgtatcttcacaccttgaataagcataataccataaaaaatgacacttgacatgtcaatgtatttg

SEQ ID NO: 1336 - DNA, 539 bp, Homo sapiens
  misc_feature (218)..(285): n includes a, c, g, or t, or contains no nucleotide
  misc_feature (287)..(468): n includes a, c, g, or t, or contains no nucleotide
  misc_feature (481)..(481): n includes a, c, g, or t, or contains no nucleotide
tccttaataggcttttagctatgtgctttattgttttatcacaatgcagtttatttgtagtttctctcttttttcctcacacctatggtttttttacttccaaaattattttcaaataatccatttttggctttcatcattatccctactagatgttatgtgttcttttgcaattgtttctgcttatacctttactagcaaagggaaaaataacaatnnnnnnnnnnnnnnnnnnnnnnnnnnnnnnnnnnnnnnnnnnnnnnnnnnnnnnnnnnnnnnnnnnnnannnnnnnnnnnnnnnnnnnnnnnnnnnnnnnnnnnnnnnnnnnnnnnnnnnnnnnnnnnnnnnnnnnnnnnnnnnnnnnnnnnnnnnnnnnnnnnnnnnnnnnnnnnnnnnnnnnnnnnnnnnnnnnnnnnnnnnnnnnnnnnnnnnnnnnnnnnnnnnnnnnnnnnnnnnnnnnnnnnnnnattattaggactnccagaatattaaatttttaacgattaatggacatttccttccggtccatggacaaatg

SEQ ID NO: 1337 - DNA, 66 bp, Homo sapiens
  misc_feature (37)..(37): n includes a, c, g, or t, or contains no nucleotide
tgctgccaagaagttgctctgaagtcagtttctatcnttctgctctttgattcaaagcactgtttc

SEQ ID NO: 1338 - DNA, 575 bp, Homo sapiens
  misc_feature (169)..(170): n includes a, c, g, or t, or contains no nucleotide
  misc_feature (172)..(172): n includes a, c, g, or t, or contains no nucleotide
  misc_feature (174)..(176): n includes a, c, g, or t, or contains no nucleotide
  misc_feature (178)..(178): n includes a, c, g, or t, or contains no nucleotide
  misc_feature (180)..(187): n includes a, c, g, or t, or contains no nucleotide
  misc_feature (428)..(450): n includes a, c, g, or t, or contains no nucleotide
  misc_feature (454)..(476): n includes a, c, g, or t, or contains no nucleotide
ctttatgctggatattgtaaccatgagaacatgtaaaaaatggaggggaaaaaggccacagcaatctgtactacaatcaactttattttgaaatcatgtaaaataagatattagactgttttttgaataaaatatttttattgattgaaaaaaaaaaaaaaaaaaaaannanannnanannnnnnnnatctttcttgtgagacaagcttaaggacacaaaagaaacacaactttgtgataccactcttctgaaggctacttatagtaataacttcatagatgaacagcatgattcaggttactgattgtctattcattggcatataatatcccctgaattaagaagaatatgtacttttcagttacaaagtacctaccataatttctgctaagggaccaaatccaataacaactttgttgtcctggcnnnnnnnnnnnnnnnnnnnnnnncctnnnnnnnnnnnnnnnnnnnnnnngacagggctgagataatctctagctactgtaacctcaagattcatcagaggctccaaaacttgcttatcagctttcttcagagcctaaagaaattaaag

SEQ ID NO: 1339 - DNA, 520 bp, Homo sapiens
  misc_feature (29)..(29): n includes a, c, g, or t, or contains no nucleotide
  misc_feature (55)..(55): n includes a, c, g, or t, or contains no nucleotide
agaagtaaactcagccactttgctcaganaagtgtttgacatggtctgttcctanttacatgttggctgtaatgtatgttgagaagtcagtccaaggaggtatgttcttccacaacagccttctcagcctctgctatttcctttgaggaaggtagaagtgagtttccatgtttgcagagtatttaaatacctcagattttattaatgagaaatacagtacccctccctccactccatctggtaatttatggtaaaattgtggttctgtgaaccagctattagtctcatcttcttaactccctcaggcatcatcaaattctttgatcttctcttccacctctctggctctcatggaagaatcctttacacatgaaaacaatggaactggaaaatcttgtcttttagaaaagaaattaatcacaactatctctcttgcctaaaagataaatataggtaaacccaaggaaaggggaatttagtttctctacatgtcatttcggtctccaaactccctgttggc

SEQ ID NO: 1340 - DNA, 403 bp, Homo sapiens
  misc_feature (132)..(132): n includes a, c, g, or t, or contains no nucleotide
  misc_feature (260)..(274): n includes a, c, g, or t, or contains no nucleotide
tgctgtcattttttgaaccaaaagacaaacaggttaaaaggaaaaaaagtaatctgaatttcccaagtgcctacgctgcatattccccttgttagatcccattttcatgttactttgtagccttggccaganggctcaaaaaggacacaaccagtttggggaaggggtggctaaggaagatggtataggtgaaggcggctgtgtgaccactttcccccacccttcccaccctctagacaactctctcccttacctgtttnnnnnnnnnnnnnnnaggtatttttcctctgccccactccctgccatacctttatcctgggatcctattttgggcctggggtgggtatacctggggctggtcttaggagggtgctaggctgcagactgccttgtactccctgga

SEQ ID NO: 1341 - DNA, 339 bp, Homo sapiens
  misc_feature (145)..(159): n includes a, c, g, or t, or contains no nucleotide
ctccctggagactgggaaaaggccgcagggcagggggactgggcggtggtggctggtggtttaaaggttgaactttctctgaagctcctttccccttgctcttggtccctgccccgcaagcaaacctgccccctctgcctcccannnnnnnnnnnnnnnccctcccttggggcgactcctgatgaagcacaactccccgcagggcccccagcccacaggggtggccatatttgggcagttcccagtcctgtgggctcggctatctggggagcagattttgggtctggatctccctggggagtgggtcctgggcttggatctttccctagggggccctct

SEQ ID NO: 1342 - DNA, 191 bp, Homo sapiens
  misc_feature (69)..(111): n includes a, c, g, or t, or contains no nucleotide
cacccgctgcctgtgcttgctggagtcagaccagggagcccccgggccacagcatcagccctgcacttnnnnnnnnnnnnnnnnnnnnnnnnnnnnnnnnnnnnnnnnnnncacccgaccatccgctaccaccaccaccacgggcaggactcactgaaggagtttgtgcagtttgtgtgctcggatggctc

SEQ ID NO: 1343 - DNA, 598 bp, Homo sapiens
  misc_feature (67)..(98): n includes a, c, g, or t, or contains no nucleotide
  misc_feature (118)..(160): n includes a, c, g, or t, or contains no nucleotide
tccaacggtccctcaaaattttgtggtggtttccttataagacggaactttgtgctgacggctgctnnnnnnnnnnnnnnnnnnnnnnnnnnnnnnnntggagcccataacataacannnnnnnnnnnnnnnnnnnnnnnnnnnnnnnnnnnnnnnnnnntccgtcatccaaaatataacacttctactcttcaccacgatatcatgttactaaagttgaaggagaaagccagcctgaccctggctgtggggacactccccttcccatcacaattcaactttgtcccacctgggagaatgtgccgggtggctggctggggaagaacaggtgtgttgaagccgggctcagacactctgcaagaggtgaagctgagactcatggatccccaggcctgcagccacttcagagactttgaccacaatcttcagctgtgtgtgggcaatcccaggaagacaaaatctgcatttaagggagactctgggggccctcttctgtgtgctggggtggcccagggcatcgtatcctatggacggtcggatgcaaagccccctgctgtcttcacccgaatctcccattaccggccctggatcaaccaga

SEQ ID NO: 1344 - DNA, 113 bp, Homo sapiens
gaacctcgaaactctttgacctggcctcggtatcctcacatttaaaatgaggagttggcttatatgattggctggcatatttggctcatctcgaagactgtctattatagaag

SEQ ID NO: 1345 - DNA, 323 bp, Homo sapiens
  misc_feature (28)..(43): n includes a, c, g, or t, or contains no nucleotide
  misc_feature (54)..(54): n includes a, c, g, or t, or contains no nucleotide
  misc_feature (69)..(87): n includes a, c, g, or t, or contains no nucleotide
gggcatctgcagagggctcatttaagannnnnnnnnnnnnnnngtactttattnccacagtagtacacnnnnnnnnnnnnnnnnnnnaaatatttgtacaagtatgctcctcctagaataacacctgcaagcataaatgctagtccaaagcacatgcaccaacaccaggctcttctttggccaactggtaccacatcatctgggtccttgcagtccaccgcgacggcgtcgggggggatgatgagcgcctcctcgccgctcttgggctcgtccttcttggcctccttctgggccagagcggagttgaacgtcaccttcaccat

SEQ ID NO: 1346 - DNA, 527 bp, Homo sapiens
  misc_feature (139)..(156): n includes a, c, g, or t, or contains no nucleotide
  misc_feature (158)..(160): n includes a, c, g, or t, or contains no nucleotide
  misc_feature (258)..(258): n includes a, c, g, or t, or contains no nucleotide
  misc_feature (367)..(368): n includes a, c, g, or t, or contains no nucleotide
  misc_feature (398)..(398): n includes a, c, g, or t, or contains no nucleotide
  misc_feature (420)..(421): n includes a, c, g, or t, or contains no nucleotide
  misc_feature (446)..(448): n includes a, c, g, or t, or contains no nucleotide
  misc_feature (487)..(487): n includes a, c, g, or t, or contains no nucleotide
  misc_feature (489)..(493): n includes a, c, g, or t, or contains no nucleotide
ctgcctgcataggagtttggaggaagttggagttttgtttcctctgttcaaagctgcctgtccctaccccatggtgctaggaagaggagtggggtggtgtcagaccctggaggccccaaccctgtcctcccgagctccnnnnnnnnnnnnnnnnnncnnnagggctgggaggaaggacttccctgtgtagtttgtgctgtaaagagttgctttttgtttatttaatgctgtggcatgggtgaagaggaggggaagagncctgtttggcctctctgtcctctcttcctcttcccccaagattgagctctctgcccttgatcagccccaccctggcctagaccagcagacagagccaggagaggctcanntgcattccgcagcccccacccccaaggttntccaacatcacagcccagcccnncccactgggtaataaaagtggtttnnnggaaaaaaaaaaaaaaaaaaaaaaaaaaaaaaaaaaaanannnnnctgggggggtgatgggaaccgtcctgttcagctg

SEQ ID NO: 1347 - DNA, 516 bp, Homo sapiens
  misc_feature (74)..(102): n includes a, c, g, or t, or contains no nucleotide
  misc_feature (463)..(477): n includes a, c, g, or t, or contains no nucleotide
ggtgtttctagattccacatatctattttatataacaagttattatgttatgtgtgtgactcccttgtgtgtannnnnnnnnnnnnnnnnnnnnnnnnnnnntttccctctggccctgactctcactgactcaccgatgtgatgtgcaggcccacttcttaccccagatagcctcgggcgctgcctgtagtcatgctgacagctgtacagtagccgccaagactgctgacagctggagacggttctggtttcaactacggtatattgatatcggaagtattctagacagatcctcggttgggttttctagctacatgtttgtattgcacagatccccacctgccatcctatagtgttgtcttcctgtgtgttccggggcttctgggcagctgggcctgcccggggaagtccttgcaggtgggaggccatacagagacccactgtgtgccactgagcgtcccannnnnnnnnnnnnnntggaggactgcagggggcgccaggtgactctctcctttt

SEQ ID NO: 1348 - DNA, 594 bp, Homo sapiens
  misc_feature (27)..(27): n includes a, c, g, or t, or contains no nucleotide
  misc_feature (44)..(102): n includes a, c, g, or t, or contains no nucleotide
  misc_feature (198)..(219): n includes a, c, g, or t, or contains no nucleotide
  misc_feature (223)..(272): n includes a, c, g, or t, or contains no nucleotide
tatctgctatgtgttcctgtttggggnaaattcctctagatgannnnnnnnnnnnnnnnnnnnnnnnnnnnnnnnnnnnnnnnnnnnnnnnnnnnnnnnnnnatgcttttttcatctcgattggtgaaggggaaggtggcttatccacagctttttctaagcagaggctgccattgcattgtttccgtttgtgctcgnnnnnnnnnnnnnnnnnnnnnnatgnnnnnnnnnnnnnnnnnnnnnnnnnnnnnnnnnnnnnnnnnnnnnnnnnnggagctcccaacgggccgtggtctggttcatcatctgtaagaatggcttcaagaggctcgggcgagaattcccgtttgcttaagtgctggggtttgccttgcttgcggcgagacatggtgggctgcggggcgggcggcggcggcggcggcggcggcggcgggcggacgacggctcggttcacatcgggagagccgggttagaaagaaggagactccagagaaaatatcttcatcagtgccttttgacatccaaaataaattagaaataatacaaagatggcgcagggaagatgaattgtgggagagccgtcatggctttttt

SEQ ID NO: 1349 - DNA, 431 bp, Homo sapiens
  misc_feature (125)..(125): n includes a, c, g, or t, or contains no nucleotide
ggccacaaatggagggattgtcctttcaagcaccacagcttcagataaaattagtactttcaaatattgtccactttaacttaaaaaattctagagggattatattggagactcaactgcccttnggttttagtttataaaatggcctagtactgtggaattttaattttagaaagtcttagcatcagatcataaacattcattaaaagaactcacatcccatctgaaacttcccaggggagttgggattcttagtagattggtagaaaggggctcattttctactgcatttcccatttttggtatcttgttcagcatgttttatttttatttcttgtctgcagaacatcctatatttatgagaacattctttaagaagaccaccacatagaataccccttcctatcagctcgctctgatttagccttaat

SEQ ID NO: 1350 - DNA, 267 bp, Homo sapiens
  misc_feature (37)..(37): n includes a, c, g, or t, or contains no nucleotide
  misc_feature (39)..(59): n includes a, c, g, or t, or contains no nucleotide
gtaaggcattttcatctttccttcgggttggcaaaantnnnnnnnnnnnnnnnnnnnnnggtgaaccaggggtgttgatggtgataagggaggaatatagaatgaaagactgaatcttcctttgttgcacaaatagagtttggaaaaagcctgtgaaaggtgtcttctttgacttaatgtctttaaaagtatccagagatactacaatattaacataagaaaagattatatattatttctgaatcgagatgtccatagtcaaatttg

SEQ ID NO: 1351 - DNA, 321 bp, Homo sapiens
  misc_feature (73)..(88): n includes a, c, g, or t, or contains no nucleotide
tgattctgaggacgatgccgactctgatgatgaggacagaggacaggcccaaggtggcagtgacaatgattcnnnnnnnnnnnnnnnngggggtggccagcggagccggagccacagccgcagcgccagtcccttccccagtggcagcgagcactcggcccaggaggatggcagtgaagctgcagcttctgattccagtgaagctgatagtgacagtgactgagtcccagggcattcagggctggttcagacaccattattgtgagcagcaaagcacttttctagtggtctgtttgtgagcctttcacttgtttgttcccc

SEQ ID NO: 1352 - DNA, 339 bp, Homo sapiens
  misc_feature (47)..(47): n includes a, c, g, or t, or contains no nucleotide
  misc_feature (157)..(305): n includes a, c, g, or t, or contains no nucleotide
tttccctgcagtccatttgtctgtgtggcaggctggctggctggggncatctgcctgtctatgtgctgttggtgtgcctatgcctgggggaggtcagtagggccccctccccacatggccctcgctctgtctatgcagggccccaaagcccgcactnnnnnnnnnnnnnnnnnnnnnnnnnnnnnnnnnnnnnnnnnnnnnnnnnnnnnnnnnnnnnnnnnnnnnnnnnnnnnnnnnnnnnnnnnnnnnnnnnnnnnnnnnnnnnnnnnnnnnnnnnnnnnnnnnnnnnnnnnnnnnnnnnnnnngtgtctgtttgggggtctatctctccatccctct

SEQ ID NO: 1353 - DNA, 446 bp, Homo sapiens
  misc_feature (26)..(26): n includes a, c, g, or t, or contains no nucleotide
  misc_feature (31)..(34): n includes a, c, g, or t, or contains no nucleotide
  misc_feature (39)..(39): n includes a, c, g, or t, or contains no nucleotide
  misc_feature (48)..(48): n includes a, c, g, or t, or contains no nucleotide
  misc_feature (57)..(57): n includes a, c, g, or t, or contains no nucleotide
  misc_feature (61)..(61): n includes a, c, g, or t, or contains no nucleotide
  misc_feature (114)..(114): n includes a, c, g, or t, or contains no nucleotide
  misc_feature (129)..(173): n includes a, c, g, or t, or contains no nucleotide
  misc_feature (396)..(396): n includes a, c, g, or t, or contains no nucleotide
  misc_feature (419)..(419): n includes a, c, g, or t, or contains no nucleotide
  misc_feature (421)..(421): n includes a, c, g, or t, or contains no nucleotide
accgcctacttctgcagagacttggncaggnnnnttcanggcctgggncccccaccnaagnttccaggtaacactgaatttctgggaagagagccatggctccagccatactcnacagaatcttatcannnnnnnnnnnnnnnnnnnnnnnnnnnnnnnnnnnnnnnnnnnnnctccagagcagcaggcagccattctgtccctggtgtagagcctgggggacccatcttccacctcacctctttgttcttcctgtctcctttgaagtagactcattcttcacacgattgacctgtcctctttgtgataattctcagtagttgtccgtgataatcgtgtcctgaaaatcctcgcacacactggctggtggagaactcaaggctaattttttatccnttttttttttttaattttgagananacgccctctttcatctgtaagggac

SEQ ID NO: 1354 - DNA, 533 bp, Homo sapiens
  misc_feature (298)..(312): n includes a, c, g, or t, or contains no nucleotide
  misc_feature (428)..(442): n includes a, c, g, or t, or contains no nucleotide
agatgtccagctgcatttagagcgccagtggaacatgtggatcccaggatttggctctgaagaaatccgaccctacaaaaaagcttgcaccacagaagctcacaaacagagaatggcattgatccggaaaacaaccaagaaataacacacggaaaggtcagggaatggacagcaatgtatttggagatacttgagctgagaactcagccatctcatccttggatttttttttttaatgctttacagagaagcatatattttttattaacagtgcagcaatatctataatgactgagannnnnnnnnnnnnnnataaagcctcctaccccaacttccggtcccttttccctgccatctcaaagaggagcaatgtatcttccagagaagattttatttgtggtttattatataagtgactgaatatgggnnnnnnnnnnnnnnnctttttgggtaagacagtattagcaggatttgtaaagggttttgtttccttctcccttccccttttccctgtactttgtaatgtcagtgtt

SEQ ID NO: 1355 - DNA, 498 bp, Homo sapiens
  misc_feature (381)..(425): n includes a, c, g, or t, or contains no nucleotide
gccgatacatcaaatggcctttacttccacctaagaatattaaagacctcatggatcttgaagctgtccacgatgtcttggatctttacttgtggctaagctaccgatttatggatatgtttccagatgccagccttattcgagatctccagaaagaactagatggtattatccaagatggtgtgcacaatatcactaaattgattaaaatgtctgagacgcataagctgttgaatttggagggctttccatcagggagccagtcacgattgtcaggaaccttaaagagccaagctagaaggacacgcggcaccaaagctctagggagtaaagctactgagccacccagccccgatgcaggagagctgtcccttgcttccnnnnnnnnnnnnnnnnnnnnnnnnnnnnnnnnnnnnnnnnnnnnnctagaaaaagagtggatgacacaacaaactgaacacaacaaagaaaaaacagagtctgggactcatccaaaag

SEQ ID NO: 1356 - DNA, 106 bp, Homo sapiens
acagtgcttccttgggttgccagctgagtcccggtattagggaatagtttcagctctttcaaagtgcacagtgttacagtcgaatgggctcccatcctggaataat

SEQ ID NO: 1357 - DNA, 344 bp, Homo sapiens
tgaaaatggccttggagcattatctttagttacttgaagagtttctagtttttttaaaatacagtttatgttaaaataatttttattaatttagagaagacaatcaatgtctgtgagaaaacggactttcttttggattttctttttgtggtcattgtgagtgattgctttttccttttcttagtttcacattcttcctttgttctaaaacttagactgacatctagctttgacaatcatagtatgttttattttcctgagggggaataacttataatgctgtttagttttgtactattggtgtgttggtgaatttttaaactgtgtgctaactgcaataaatt

SEQ ID NO: 1358 - DNA, 404 bp, Homo sapiens
  misc_feature (57)..(57): n includes a, c, g, or t, or contains no nucleotide
  misc_feature (91)..(92): n includes a, c, g, or t, or contains no nucleotide
  misc_feature (94)..(94): n includes a, c, g, or t, or contains no nucleotide
  misc_feature (150)..(150): n includes a, c, g, or t, or contains no nucleotide
  misc_feature (175)..(175): n includes a, c, g, or t, or contains no nucleotide
  misc_feature (183)..(183): n includes a, c, g, or t, or contains no nucleotide
  misc_feature (229)..(229): n includes a, c, g, or t, or contains no nucleotide
  misc_feature (248)..(248): n includes a, c, g, or t, or contains no nucleotide
  misc_feature (256)..(256): n includes a, c, g, or t, or contains no nucleotide
  misc_feature (264)..(264): n includes a, c, g, or t, or contains no nucleotide
  misc_feature (273)..(273): n includes a, c, g, or t, or contains no nucleotide
  misc_feature (281)..(281): n includes a, c, g, or t, or contains no nucleotide
  misc_feature (284)..(284): n includes a, c, g, or t, or contains no nucleotide
  misc_feature (290)..(290): n includes a, c, g, or t, or contains no nucleotide
  misc_feature (366)..(366): n includes a, c, g, or t, or contains no nucleotide
gactattcaatgcagagctgttggaagcgctcctcaactattacatccttaacaccntctaccccaagttcaatgataagttggccgaagnntncccccttcctctgctgaagcgtgttcagctctacgaccttgggctgcagatccatnaaggacttcctgttcttgggtgccnaatgtccnaatacatgagagtttgaggacaagaaagatgaagcttggaggtcanagctggatctgcttgttgncatttccnagctgtgnagcacgtcntcagagantcnttgaanaatgaagacatttctgctctcagctccgggggtgaggtgtgcctggcctctgcctccaccctcctcctcttcaccnaggtgcatgcatgccctctctgagtctggactttgctt

SEQ ID NO: 1359 - DNA, 524 bp, Homo sapiens
  misc_feature (374)..(388): n includes a, c, g, or t, or contains no nucleotide
taatttatcatagctggtgtcctttcattgaaagttgtaatactgtctctaaggagggaggaaaagattattatataattttataactggcaacatttgagttagtattgactttgtctaaaagaggcttgacttcaactgggataaaaatgtcagtgaattttgttaaagtagtaaaaatgcagttgacttagtaggaacataaaattatttcctaataagataatattgcactcctaccaaataaacaggattttagtaatatctgagggattgttgatggtgagttagactgtatttggcatagaatttggaaatgtaacttgaatgtaaatatgctgcaaaatgttgaatgtatacatagaaagactttnnnnnnnnnnnnnnnatgcccgttgtaaatgaaccttaaatattacattcctcctttgcacaataatatttctttataacacttatgattttttcccccaggacaacaaactgcccttaagagtcatttccttgttatcacaggtgtcaat

SEQ ID NO: 1360 - DNA, 451 bp, Homo sapiens
attcttcagattgttcctcatgaatatcccccttcctctgcaattctccagagtggtaacagatgggtagaggcagctcaggtgaattacccagcttgcctctcaattcattcctcctcttcctctcaaaggctgaaggcagggcctttccagtcctcacaacctgtccttcacctagtccctcctgacccagggatggaggctttgagtcccacagtgtggtgatacagagcactagttgtcactgcctggctttatttaaaggaactgcagtaggcttcctctgtagagctctgaaaaggttgactatatagaggtcttgtatgtttttacttggtcaagtatttctcacatcttttgttatcagagtaccattccaatctcttaacttgcagttgtgtggaaaactgttttgtaatgaaagatcttcattgggggattgagcagcatt

SEQ ID NO: 1361 - DNA, 595 bp, Homo sapiens
gaaagaaacacagcaactgtagatgctcctgttcctggttcccgctttccacttccaaatccctcccctcaccttcccccactgccccccaagttccaggctcagtcttccagccgcctggggagtctctacctgggcccaagcaggtgtggggcctccttctgggcttttcttctgaatttagaggatttctagaacgtggtcaggaatagccattctaggcggggctggggccagggtggggggcagtcactgtgggaggtcccagctccagcccccctctggtttgctgcctcctctcccctctaaaaaagtcttccgcttgattttgcacaatcccggcgatactcctggcgatactgactagaagtcagggagctgggggagctgttcactttaggatacggggggatggaagggagcgttcacaccgccagcctcgggcctgggatttgaggagggccctagacctcctccactctccatcccctttcccttccactttgggttcactttgaattttctccgttttttggggcagtggctctgatccactcacccccccgccccgtaagttatagccactgtggaaagt

SEQ ID NO: 1362 - DNA, 577 bp, Homo sapiens
  misc_feature (26)..(26): n includes a, c, g, or t, or contains no nucleotide
  misc_feature (30)..(30): n includes a, c, g, or t, or contains no nucleotide
  misc_feature (170)..(170): n includes a, c, g, or t, or contains no nucleotide
  misc_feature (173)..(173): n includes a, c, g, or t, or contains no nucleotide
  misc_feature (271)..(319): n includes a, c, g, or t, or contains no nucleotide
  misc_feature (502)..(502): n includes a, c, g, or t, or contains no nucleotide
tggccatttattgtgacagatacggnccanggacctgaagtgccctccaccatggccccaaacccaatggccttcgccctcggggacttatcacatctgcacacagttgtgctttaggagctgagaggagttctgccagggaaccacaaggacctcaaagtcacagcgcnagnttctcctgctgcgcccctgctgccagggggcaagtggtgaggtcgacgtggtctccagtgaccctggtcttgcggcagtctgtgctccccatctccannnnnnnnnnnnnnnnnnnnnnnnnnnnnnnnnnnnnnnnnnnnnnnnngatgtgcgtgtctcggaagtagtagatgctgttgctgcccatgttgtagctggccacggccgcctgcgccgccttctgcacctgcgggtcgtcgggcgacaggtcccggagttctccgaccatgcgctcctgcggccgggcccgggcgtcgcgtggcagcgccaggaggcagaatgcgaccanggccaggcccagcgccagcgggaggttcgaacgcgccatggccgtcagtgccgtcggagccctcagagccgtgag

SEQ ID NO: 1363 - DNA, 523 bp, Homo sapiens
caaacagcagctaaaatatgccgttcagatttgtaaggggatggactatttgggttctcggcaatacgttcaccgggacttggcagcaagaaatgtccttgttgagagtgaacaccaagtgaaaattggagacttcggtttaaccaaagcaattgaaaccgataaggagtattacaccgtcaaggatgaccgggacagccctgtgttttggtatgctccagaatgtttaatgcaatctaaattttatattgcctctgacgtctggtcttttggagtcactctgcatgagctgctgacttactgtgattcagattctagtcccatggctttgttcctgaaaatgataggcccaacccatggccagatgacagtcacaagacttgtgaatacgttaaaagaaggaaaacgcctgccgtgcccacctaactgtccagatgaggtttatcagcttatgagaaaatgctgggaattccaaccatccaatcggacaagctttcagaaccttattgaaggatttgaagca

SEQ ID NO: 1364 - DNA, 397 bp, Homo sapiens
  misc_feature (26)..(26): n includes a, c, g, or t, or contains no nucleotide
  misc_feature (53)..(53): n includes a, c, g, or t, or contains no nucleotide
  misc_feature (226)..(226): n includes a, c, g, or t, or contains no nucleotide
  misc_feature (233)..(233): n includes a, c, g, or t, or contains no nucleotide
  misc_feature (242)..(258): n includes a, c, g, or t, or contains no nucleotide
ttgcttagcctgttgcctttgactangggcctgggtggcctcattaactctanggggtccctttgggctcttgattctccctgaaggagggatgcatttctctcttgctcttcctgtacccacatttgggggaagctgaggagggaggaacagtcagccacagctctcttccagcactgtcctctccaccccaagctttgaggaagagcatccccttcctcctttnccctggnccactgctnnnnnnnnnnnnnnnnnctctctgggcctgggaccctctccacagaggggatgtggtccctggtcatgacataacctagcagcagtaggaaaaactcccttctatgaaggggaagcagactgggccataaggaaacagcaggactggctcaagtgc

SEQ ID NO: 1365 - DNA, 553 bp, Homo sapiens
tggctcctgctgaggtcccctttccttctgggctgtgaattcctgtacatatttctctactttttgtatcaggcttcaattccattatgttttaatgttgtctctgaagatgacttgtgatttttttttcttttttttaaaccatgaagagccgtttgacagagcatgctctgcgttgttggtttcaccagcttctgccctcacatgcacagggatttaacaacaaaaatataactacaacttcccttgtagtctcttatataagtagagtccttggtactctgccctcctgtcagtagtggcaggatctattggcatattcgggagcttcttagagggatgaggttctttgaacacagtgaaaatttaaattagtaacttttttgcaagcagtttattgactgttattgctaagaagaagtaagaaagaaaaagcctgttggcaatcttggttatttctttaagatttctggcagtgtgggatggatgaatgaagtggaatgtgaactttgggcaagttaaatgggacagccttccatgttcatttgtctac

SEQ ID NO: 1366 - DNA, 468 bp, Homo sapiens
  misc_feature (114)..(173): n includes a, c, g, or t, or contains no nucleotide
  misc_feature (249)..(266): n includes a, c, g, or t, or contains no nucleotide
  misc_feature (275)..(275): n includes a, c, g, or t, or contains no nucleotide
  misc_feature (303)..(303): n includes a, c, g, or t, or contains no nucleotide
  misc_feature (306)..(306): n includes a, c, g, or t, or contains no nucleotide
  misc_feature (345)..(345): n includes a, c, g, or t, or contains no nucleotide
  misc_feature (403)..(403): n includes a, c, g, or t, or contains no nucleotide
  misc_feature (421)..(421): n includes a, c, g, or t, or contains no nucleotide
gaacaagtgtctgtcgtcatcaactttgatcttcccgtggacaaggacgggaatcctgacaatgagacctacctgcaccggatcgggcgcacgggccgctttggcaagaggggnnnnnnnnnnnnnnnnnnnnnnnnnnnnnnnnnnnnnnnnnnnnnnnnnnnnnnnnnnnngcattttaataagaagatagaaagattggacacagatgatttggacgagattgagaaaatagccaactgagaagcnnnnnnnnnnnnnnnnnncagccctgncactgcccctgcacaggagacaagtgcnttnagggcacaggccccgacatcaccccaaggacaacggcanaagtagagagaaactacctacctcacttcaaattatgtttggacttgacaaaaatgtntgcaaatgatgggggatngtagaaaaaaattatttacacaaccttggaagattaggcatgaatac

SEQ ID NO: 1367 - DNA, 506 bp, Homo sapiens
tatttactggaaacctagccagcttcacgattatgactaaagtaccagattataatgccagaatataatgtgcaggcaatcgtggatgtctctgacaaagtgtgtctcaaaaataatatacttttacattaaagaaatttaatgtttctctggagttggggctcttggctttcagagtttggttaatcagtgttgattctagatgatcaacataatggaccactcctgaatgagacttaattttgtctttcaaatttactgtcttaaatcagtttattaaatctgaattttaaaacatgctgtttatgacacaatgacacatttgttgcaccaattaagtgttgaaaaatatctttgcatcatagaacagaaatatataaaaatatatgttgaatgttaacaggtattttcacaggtttgtttcttgatagttactcagacactagggaaaggtaaatacaagtgaacaaaataagcaactaaatgagacctaataattggccttc

SEQ ID NO: 1368 - DNA, 77 bp, Homo sapiens
aattgtgatccatttctgatatgtcttgaactactgtgtctagtaggcaaatgtcattgttacctctgtgtgttaag

SEQ ID NO: 1369 - DNA, 186 bp, Homo sapiens
cccaaatggattctgttgtgagcaagagtttatatggcttcatggcagcaagggaacagtcaacttcagcatcatatgcaccagtcctcggagtgccctgtgaatcatattggtctttgggtcagtgtcatcattctcttcaagtctggggcttggggaaaaaattagatcagctacggcatataa

SEQ ID NO: 1370 - DNA, 525 bp, Homo sapiens
  misc_feature (71)..(93): n includes a, c, g, or t, or contains no nucleotide
  misc_feature (98)..(112): n includes a, c, g, or t, or contains no nucleotide
  misc_feature (253)..(278): n includes a, c, g, or t, or contains no nucleotide
tgatcaccagtattgtggctggaatggaagaagatcaccttggtgttccttgtttggaagattatttcctnnnnnnnnnnnnnnnnnnnnnnncagtnnnnnnnnnnnnnnngttgtattgaaacaatttaatgaaaatattaaatatttggtttcaaaaggcagatttatcttctcccaacattctgttatttctgatacttttgaaaaactaataaaaactaataaaagaagcgtaaaaaaaaaaaaaaannnnnnnnnnnnnnnnnnnnnnnnnntgctcatcactgataaatgctccctggccttaaaaactaccaacatataatatatatgctgtcttaaaagttaatgatccaagtggcacctctctgaacctactttggcttgggaggctgcccagttaaaacaaaaataagttaatggtacagaaagagaatgaaaaatgaaagcctccttttatcctatcatcctaattccttttcccagtaataatgactgctgtgttggattccttctgcaaat

SEQ ID NO: 1371 - DNA, 577 bp, Homo sapiens
  misc_feature (26)..(40): n includes a, c, g, or t, or contains no nucleotide
  misc_feature (99)..(99): n includes a, c, g, or t, or contains no nucleotide
  misc_feature (347)..(370): n includes a, c, g, or t, or contains no nucleotide
ctctgcaactacaaggccaagcaaannnnnnnnnnnnnnnagcacgtacgcaggcaccaccctgaccaagccgacccaaaccagggtgtgggcaaaganccccaccacccccacagtgcacctgcatgatgtgcagctggaggatcccagccctcctgctcctgccgctccccacactggacctgagggctgaaagcctgccccacctcctgtataggaagagggtatggtctgagatgtgcagactgggaccagcgctagcctgaggagctcagagcctaaggaaagactggcttttggggtacaagggtgactagaaccttcctgggactctggctatagtactnnnnnnnnnnnnnnnnnnnnnnnnagggacatggactataacgttgatttcttattgctgtacattgcgtttttaacctgcaagttctcagtttcttcaccatcactccatcaaagtccctggctataagatctggattttacccactccatcttctctttccttcttactgtgtcaattcctattttctttcagaatcttctaaaaacagttgtatctaaccgcatgtgc

SEQ ID NO: 1372 - DNA, 436 bp, Homo sapiens
  misc_feature (160)..(199): n includes a, c, g, or t, or contains no nucleotide
  misc_feature (240)..(248): n includes a, c, g, or t, or contains no nucleotide
  misc_feature (250)..(251): n includes a, c, g, or t, or contains no nucleotide
  misc_feature (253)..(254): n includes a, c, g, or t, or contains no nucleotide
  misc_feature (257)..(257): n includes a, c, g, or t, or contains no nucleotide
  misc_feature (377)..(377): n includes a, c, g, or t, or contains no nucleotide
tgcaccccaaagactaatggggagagggagggccgggaagccaggaaagcttggtgttttctctgggtacaccccaagcagcgtctccttttggatacagttattgatgaggcttggccactggatgttttcactaactacactctacaagtgaactccnnnnnnnnnnnnnnnnnnnnnnnnnnnnnnnnnnnnnnnngaatattccatctttgattaaaaaagtgaaatagtctccannnnnnnnnannannaantgagtttttcaaagaattccatatttaaagacacattttatttaactaataacaaaatgtattgcttttgtatatatttagttttcacacttggaaaatcttttcctacatcctcgaaancataaactcctctgtgagtgaaatgcttgtacgaagctctgccatatgtttgtagtgtt

SEQ ID NO: 1373 - DNA, 344 bp, Homo sapiens
  misc_feature (152)..(166): n includes a, c, g, or t, or contains no nucleotide
  misc_feature (280)..(299): n includes a, c, g, or t, or contains no nucleotide
taaagtgaacacacacaagggagcttgcttgcagatggtctgagttcttgtgtcctggtaattcctctccaggccagaataattggcatgtctcctcaacccacatggggttcctggttgttcctgcatcccgatacctcagccctggcccnnnnnnnnnnnnnnnggctctggttttctggtggggctgtcctgctgccctcccacagcctccttctgtttgtcgagcatttcttctactcttgagagctcaggcagcgttagggctgcttaggtctcnnnnnnnnnnnnnnnnnnnncacccaactgcagtttactattgctatcttttctggatgatcaga

SEQ ID NO: 1374 - DNA, 234 bp, Homo sapiens
  misc_feature (51)..(77): n includes a, c, g, or t, or contains no nucleotide
  misc_feature (88)..(88): n includes a, c, g, or t, or contains no nucleotide
gtctgggcaacgacagccgagacatgtacatggagtctgagggcggcgacnnnnnnnnnnnnnnnnnnnnnnnnnnnttgatggaggntgcgccggagtgaagaggtcgtcctctccatctgctgtgtttggacgcgttcctgcccagccccttgctgtcatcccctcccccaaccttggccacttgagtttgtcctccaagggtaggtgtctcatttgttctggccccttgga

SEQ ID NO: 1375 - DNA, 579 bp, Homo sapiens
  misc_feature (278)..(278): n includes a, c, g, or t, or contains no nucleotide
  misc_feature (288)..(288): n includes a, c, g, or t, or contains no nucleotide
  misc_feature (291)..(291): n includes a, c, g, or t, or contains no nucleotide
  misc_feature (295)..(295): n includes a, c, g, or t, or contains no nucleotide
  misc_feature (297)..(297): n includes a, c, g, or t, or contains no nucleotide
  misc_feature (302)..(303): n includes a, c, g, or t, or contains no nucleotide
  misc_feature (310)..(310): n includes a, c, g, or t, or contains no nucleotide
  misc_feature (322)..(322): n includes a, c, g, or t, or contains no nucleotide
  misc_feature (328)..(328): n includes a, c, g, or t, or contains no nucleotide
accagcgtgtccagcctgacggagcgcgcggacaccggcacctccatcctctcggtaacctccagcgactcggaatgtgatgtatgatagccaaggccgccctcctccctctccttcccctcctcccccactccttcccctccgcctcctagccctcctcctcttcctcctcttccttctcctcctccatccccagaacaaaccgaaatcaggatacccaaccatacacacatacaagtccacacacactcccaccccagccaaaaatatataaaaancaagaaaatnacnaatnanccgcnnactatcnacaacccccaanccaccntctaccactacggccaccccaaaggaccccgacgccaacagacagtcaaacgctgatgttgcgggcagaaaacataaaagaggtgacaattgtatactttctaggacaagcacggcttctcctttcggttcccatggacccggcaccccacctgcatgacgatttatttgtatctgggaaaatattctctctagttaaaaatgatttaaagagtcgactatacaaaaatcaatcaccaccacgaggacaag

SEQ ID NO: 1376 - DNA, 118 bp, Homo sapiens
ttttggaaatgctgaacccgatacattataacatcaccagcatcgtgcctgaagccatgcctgctgccaccatgccagtcctgctcctcactggcctttttctcttggtgtggaatta

SEQ ID NO: 1377 - DNA, 463 bp, Homo sapiens
  misc_feature (85)..(103): n includes a, c, g, or t, or contains no nucleotide
ttgacataagcgaacggcaggtgtctacagaagaagcccaagcttggtgcagggacaacggcgactatccttattttgaaacaannnnnnnnnnnnnnnnnnntgtggcagcagcctttgaggaagcggttcgaagagttcttgctaccgaggataggtcagatcatttgattcagacagacacagtcaatcttcaccgaaagcccaagcctagctcatcttgctgttgattgttagattgttgatgcattctaaccaactcacacatatacacaaaatcaacatggggatggagaagagaattagcgtttgcagcagtgtatcatctactaataaaattaaactaatgttgctgcttcattagttggtgggagaagggacacatccactcttggaggaatatatttactcaataatggcaccttacatttataaattgtaacagttgtctaataacgtttct

SEQ ID NO: 1378 - DNA, 561 bp, Homo sapiens
  misc_feature (201)..(201): n includes a, c, g, or t, or contains no nucleotide
  misc_feature (203)..(203): n includes a, c, g, or t, or contains no nucleotide
  misc_feature (217)..(218): n includes a, c, g, or t, or contains no nucleotide
  misc_feature (225)..(225): n includes a, c, g, or t, or contains no nucleotide
  misc_feature (227)..(227): n includes a, c, g, or t, or contains no nucleotide
  misc_feature (234)..(236): n includes a, c, g, or t, or contains no nucleotide
  misc_feature (240)..(240): n includes a, c, g, or t, or contains no nucleotide
  misc_feature (242)..(244): n includes a, c, g, or t, or contains no nucleotide
  misc_feature (263)..(264): n includes a, c, g, or t, or contains no nucleotide
  misc_feature (266)..(271): n includes a, c, g, or t, or contains no nucleotide
  misc_feature (275)..(351): n includes a, c, g, or t, or contains no nucleotide
  misc_feature (368)..(368): n includes a, c, g, or t, or contains no nucleotide
  misc_feature (411)..(464): n includes a, c, g, or t, or contains no nucleotide
atgtagaatcaaatcccgggatatttctccctccagggactcaggcagaattcaatctccgagacattccccagcctcatgcagagccctgggccttctctttggacctgggactcaagcaggcagcaggctcaggccacctccttgctcttgggacaccagagaacccatcttggctcagtctccacctccaagatcaanangtggtgttgtcttnngggtcgngnccagggnnngatntnnncctggtcttgggactcccnntnnnnnngaannnnnnnnnnnnnnnnnnnnnnnnnnnnnnnnnnnnnnnnnnnnnnnnnnnnnnnnnnnnnnnnnnnnnnnnnnnnncccctccttaacctctnggccaagcctcaagggcgtctcttcctgggggctttaccaggnnnnnnnnnnnnnnnnnnnnnnnnnnnnnnnnnnnnnnnnnnnnnnnnnnnnnngctggatgtggaccaggccctgaacagaagccatgagatctggactcacagctgcccccagagcccaggcaatggcactgacgcttcccattaaagc

SEQ ID NO: 1379 - DNA, 509 bp, Homo sapiens
  misc_feature (202)..(216): n includes a, c, g, or t, or contains no nucleotide
  misc_feature (431)..(445): n includes a, c, g, or t, or contains no nucleotide
gaatgcaggacatcccggaggagacggagagccgcgacggggagggctgtagctcgagagctaagggggcccctcccccctgccccgtgccccactgaagaacattactgagggggctaaccttggggactccaatttgccaatgatgagggaacatttgaaagaactgcaaattgtccttgccagctcttgggatccttgnnnnnnnnnnnnnnnttaagaagctaggggaattaggccacaacaccccctgggacatccgaaagctacaccacagatgccgtggttcatgccttcttcccgcaactttaggaaaatttatttatttattgtttattagttatggggggagaggggagatttaaaggaccagggacatgggaaccaagccatagggatcagagggcctgtccttgaacactactggggtnnnnnnnnnnnnnnncacgcagctgctgggttcttgcctaacggccctcccctgcaacatccgtcttggaggagaggct

SEQ ID NO: 1380 - DNA, 590 bp, Homo sapiens
  misc_feature (115)..(115): n includes a, c, g, or t, or contains no nucleotide
  misc_feature (245)..(259): n includes a, c, g, or t, or contains no nucleotide
  misc_feature (475)..(477): n includes a, c, g, or t, or contains no nucleotide
  misc_feature (551)..(551): n includes a, c, g, or t, or contains no nucleotide
  misc_feature (558)..(558): n includes a, c, g, or t, or contains no nucleotide
cagtctcaggttaagaaggaaatgcagcctcagtaacttccttttcaaagcagtggaggagcacacggcacctttccccagagccccagcatcccttgctcacacctgcagtagnggtgctgtcccaggtggcttccagatgaacccaactgtggagatgatgcagttggcccaacctcactgacggtggaaaaatgtttgccagggtccagaaactttttttggtttatttctcatacagtgtnnnnnnnnnnnnnnnacaccagaatttataaactccaccagtcctactttagtgagataaaaagcacactcttaatcttcttccttgttgctttcaagtagttagagttgagctgttaaggacagaataaaatcatagttgaggacagcaggttttagttgaattgaaaatttgactgctctgccccctagaatgtgtgtattttaagcatatgtagctaatctcttgtgnnnttaaactataactgtttcatatttttcttttgacaaagtagccaaagacaatcagcagaaagcattttctgcanaataaangcaatatgcaaaatgtgattcgtccagttatt

SEQ ID NO: 1381 - DNA, 549 bp, Homo sapiens
  misc_feature (230)..(234): n includes a, c, g, or t, or contains no nucleotide
  misc_feature (236)..(242): n includes a, c, g, or t, or contains no nucleotide
  misc_feature (244)..(244): n includes a, c, g, or t, or contains no nucleotide
  misc_feature (246)..(250): n includes a, c, g, or t, or contains no nucleotide
  misc_feature (252)..(252): n includes a, c, g, or t, or contains no nucleotide
  misc_feature (254)..(254): n includes a, c, g, or t, or contains no nucleotide
  misc_feature (284)..(284): n includes a, c, g, or t, or contains no nucleotide
  misc_feature (293)..(293): n includes a, c, g, or t, or contains no nucleotide
  misc_feature (302)..(302): n includes a, c, g, or t, or contains no nucleotide
  misc_feature (306)..(306): n includes a, c, g, or t, or contains no nucleotide
  misc_feature (316)..(316): n includes a, c, g, or t, or contains no nucleotide
  misc_feature (330)..(330): n includes a, c, g, or t, or contains no nucleotide
cttctcttgtggttgttagatctaaaactgaagatcatgaagaagcagggcctctacctacaaaagtgaatcttgctcattctgaaatttaagcatttttcttttaaaagacaagtgtaatagacatctaaaattccactcctcatagagcttttaaaatggtttcattggatataggccttaagaaatcactataaaatgcaaataaagttactcaaatctgtgaaaannnnnannnnnnnanannnnnantnggtattgtttttgtagtaatttaagaggtnggatgtttngggattgtnattnattattttanctaatatctgtagnctattttgttttttgctttggttattgtttttttcccttttcttagctatgagctgatcattgctccttctcacctcctgccatgatactgtcagttaccttagttaacaagctgaatatttagtagaaatgatgcttctgctcaggaatggcccacaaatctgtaatttgaaatttagcaggaaatgacctttaatgacactacattttcaggaactg

SEQ ID NO: 1382 - DNA, 535 bp, Homo sapiens
ttaaaaatcttgtacctagcacagtattgttatagaatatacatgtaacattttatatggtagtttaagtctgtcagtttcttaattgtggacaaattaacagttggctctggccttttgctgtaacatgcctgtgtcactcacttagccttggcatttgtgcagacataccattttcagttctgctgtcacttggaagttcaggctcagcatgaatttttggcaggtagctctaatacctggagttttctttgtttttttttcttttttttagttgaagtttatgagggaaataccagtgttcagttttgaactataatagtttgtatattcaacatttgaagtatattctattttgttgtactcttgtttcaaagtgtattcaagtaggttttctgaaatatagaaatgaaatttatcttctgttttggtctctggtgatattttaaacaatatttaaaagtcagtatagaagtgttttagttaggaagtgataaaacatctctcttctccttcccaactactgcatgaagaa

SEQ ID NO: 1383 - DNA, 259 bp, Homo sapiens
agtgtccggcaggagggccaacgcccgctgttcggtttgcgacacgcagcagggaggtgggcggcagcgtcgccggcttccagacaccaatgggaatcccaatggggaagtcgatgctggtgcttctcaccttcttggccttcgcctcgtgctgcattgctgcttaccgccccagtgagaccctgtgcggcggggagctggtggacaccctccagttcgtctgtggggaccgcggcttctacttcagcaggcccgcaag

SEQ ID NO: 1384 - DNA, 253 bp, Homo sapiens
cctgcggagccttaaacaacgcagtgagacagacatctatcatcccattttacaggggaggatactgaggcacacagaggggagtcaccagccagaggatgtatagcctggacacagaggaagttggctagaggccggtcccttccttgggcccctctcattccctccccagaatggaggcaacgccagaatccagcaccggccccatttacccaactctgaacaaagcccttgcccccatgaaattgtttat

SEQ ID NO: 1385 - DNA, 475 bp, Homo sapiens
  misc_feature (384)..(443): n includes a, c, g, or t, or contains no nucleotide
gttacctagataatgccaaagtcagcatttgtcctgggttcccttgtgtgatctgtttggactatgttttcttttcttctcccacttgctcagcagcttgggcttccattctagttcttttaccaagatttttgtgtgaccatgttgacttcatttggattgccctctttcaatttccttgtgaaaacacccttaactttctctttacccttagctgaaatgtttacatagcttctggtgatatcttttcatgattttatatctcttaaaatggtgatggatgtgacacctcataaaagtgagctttgaactgtagataactcttaaagaaaatgtcattttagacaattaaaatatttgtgctcaactgcttgaaaaaaaaannnnnnnnnnnnnnnnnnnnnnnnnnnnnnnnnnnnnnnnnnnnnnnnnnnnnnnnnnnntcacaagagacagaacagttctgtcacatgga

SEQ ID NO: 1386 - DNA, 168 bp, Homo sapiens
tgcttcaaagctgaagaatctaaatgtcgtctttgactcaagtaccaaataataataatgctatacttaaattacttgtgaaaaacaacacattttaaagattacgtgcttcttggtacaggtttgtgaatgacagtttatcgtcatgctgttagtgtgcattctaaa

SEQ ID NO: 1387 - DNA, 185 bp, Homo sapiens
  misc_feature (29)..(53): n includes a, c, g, or t, or contains no nucleotide
  misc_feature (72)..(72): n includes a, c, g, or t, or contains no nucleotide
  misc_feature (122)..(122): n includes a, c, g, or t, or contains no nucleotide
aggtcttaatgaacacatatgaattcacnnnnnnnnnnnnnnnnnnnnnnnnnatgtggaaatgactttgcngaattctcaagccttaccaaacacatcagaaatctcactggagagaaacngtatgaatgtagagaatctgggaatacctttctgaatcccacaaaccttaatgtgtgtatgtg

SEQ ID NO: 1388 - DNA, 414 bp, Homo sapiens
  misc_feature (140)..(156): n includes a, c, g, or t, or contains no nucleotide
  misc_feature (171)..(208): n includes a, c, g, or t, or contains no nucleotide
ccgcgggaccctgtcagatgagcatgctggagtgatatctgttctagcccagcaagcagctaagctaacctctgaccccactgatattcctgtggtgtgtctagaatcagataatgggaacattatgatccagaaacacnnnnnnnnnnnnnnnnngcagtgcacaaaatnnnnnnnnnnnnnnnnnnnnnnnnnnnnnnnnnnnnnntcataggaactggatcctacctatgttaattaccttatagaactactaaagttccagtagttaggccattcatttaatgtgcattaggcacttttctgtttatttaagagtcaattgctttctaatgctctatggaccgactatcaagatattagtaagaaaggatcatgttttgaagcagcaggtccaggtcactttgtatatag

SEQ ID NO: 1389 - DNA, 430 bp, Homo sapiens
  misc_feature (76)..(118): n includes a, c, g, or t, or contains no nucleotide
aagtgctgtcttactaagtcttgtttattaactctcctttattctatatggaaataaaaaggaggcagtcatgttnnnnnnnnnnnnnnnnnnnnnnnnnnnnnnnnnnnnnnnnnnnttccctgtcgatcccttctgaggtatggcccatccaagacttttaggccattcttgatggaaccagatccctgccctgactgtccagctatcctgaaagtggatcagattataaactggattacatgtaactgttttggttgtgttctatcaaccccaccagagttccctaaacttgcttcagttatagtaactgactggtatattcattcagaagcgccataagtcagttgagtatttgatccctagataagaacatgcaaatcagcaggaactggtcatacagggtaagcaccagggacaataaggattt

SEQ ID NO: 1390 - DNA, 493 bp, Homo sapiens
  misc_feature (337)..(351): n includes a, c, g, or t, or contains no nucleotide
  misc_feature (434)..(449): n includes a, c, g, or t, or contains no nucleotide
cagagaccaaagaacccaagaaggcaaaaaggtcatccaaggaggaagccgagatggcctacaaagacttcctgctccagtccagcaccgtggccgccgaggcccaggacggcccccaggaagcctagacggtgtcgccgcctgctccctgcacccatgacaatcaccttcagaatcatgtcgatcctgggggccctcagctcctggggaccccactccctgctctaacacctgcctaggtttttcctactgtcctcagaggcgtgctggtcccctcctcagtgacatcaaagcctggcctaattgttcctattggggatgagggtggcatgaggannnnnnnnnnnnnnnttctttctgttgagagaacctcaggtacggagaagaatagaggtcctcatgggtcccttgaaggaagagggaccagggtgggnnnnnnnnnnnnnnnnaggagagacgtgcagcgcccctctgcacccttatcatgggatgt

SEQ ID NO: 1391 - DNA, 568 bp, Homo sapiens
  misc_feature (195)..(219): n includes a, c, g, or t, or contains no nucleotide
tgcctttaaatgtgccacttctctgaacctcatcaatgataacagccattccctcatagtctttttcactccagtaatatgtgcatttaggcagaaagcatgttcacctacattttctctctgcaggtgctttactccatgaactgtctaatgacggtgctcataagcagtttgatcactacctcgaagagctcnnnnnnnnnnnnnnnnnnnnnnnnnccaagaaaggagaacgagagtgccacattgttgtgctgacggatgaggattctgtggactgggatgaagaccaccctccaccaatgggggaggaatattcccaaagtaggagcttctggcatggcgtagatgttttcagcaagaaacttgctacctggagtagcagcttgatcctagaaccaatgtgaatatcaatgttgagcctgtgatgagcacactcacctggatgacaaatccctagtgatgcaggtctagcctttatgctggggaacacagtgaatgttgttcaccattcactctttctctggtgtctcgtactgtgtaagatactgaggcagcacattaaatg

SEQ ID NO: 1392 - DNA, 535 bp, Homo sapiens
taactggattgcagactgttcttactgtaactacttcctgattaggaatatgaccatttgactgttcaatgattatttgtatttacagtttccagagtttgtcattataataggaacaatctttgctgtatacttttaaaaaatactctgctatttctcttgctggaactgttgaaagaaaatatatagaatgatctattgctcatcagctttattttttaaacatacgacttattttgttgaaattgtcaaagactgtatttagatctcataatgctttgttaaatgtttacaagtaaatagtttgaattcagtaaatattattggttgttgtattgatcaatgcatgttacccattcaaccattttatagactaccaatttcttttatgttaactagaatgcttttgttaaaagttatttgttcattatttgtgctacccctttgattatgcagacaacctcatcagctgcctaacttatccatctttgaacttctgactacttgttgtatctgctggatatttagttcaact

SEQ ID NO: 1393 - DNA, 404 bp, Homo sapiens
  misc_feature (147)..(167): n includes a, c, g, or t, or contains no nucleotide
  misc_feature (170)..(185): n includes a, c, g, or t, or contains no nucleotide
  misc_feature (225)..(303): n includes a, c, g, or t, or contains no nucleotide
  misc_feature (353)..(353): n includes a, c, g, or t, or contains no nucleotide
ctgagacaaacctatgtgtaatgggagagaacagaccaaaatgtgggcagagtcttaggtcctagctaatggcagagccagggttctagggggtcagctgtcccgggccaggtgatctgagggctgacctgtttcttcctaaccatnnnnnnnnnnnnnnnnnnnnnttnnnnnnnnnnnnnnnnacagtcttgacaaggtatggcatgggcttggcctggtgtnnnnnnnnnnnnnnnnnnnnnnnnnnnnnnnnnnnnnnnnnnnnnnnnnnnnnnnnnnnnnnnnnnnnnnnnnnnnnnngctgggccctcccggtcttcagacacccaggctctcacattctacttgtngtgcttcttaagatcttcttcttccatggttccctcttatttccttgaggg

SEQ ID NO: 1394 - DNA, 441 bp, Homo sapiens
  misc_feature (253)..(253): n includes a, c, g, or t, or contains no nucleotide
  misc_feature (272)..(273): n includes a, c, g, or t, or contains no nucleotide
  misc_feature (275)..(275): n includes a, c, g, or t, or contains no nucleotide
  misc_feature (278)..(278): n includes a, c, g, or t, or contains no nucleotide
  misc_feature (281)..(281): n includes a, c, g, or t, or contains no nucleotide
  misc_feature (284)..(288): n includes a, c, g, or t, or contains no nucleotide
  misc_feature (290)..(291): n includes a, c, g, or t, or contains no nucleotide
  misc_feature (293)..(293): n includes a, c, g, or t, or contains no nucleotide
gccccaaggaaacactgaaaacacatatcacgccaatgccgtgtggttttgtttgaatataaaattggtgaaagtgttggtttttttaaggcagtaatttttttgtttgtttttttgcgatttcattccattcttgaccaaagcttctctttaagtagtttattatggaaaattgtcacactaacttaaaagacagggtgagggagatatgtaaattgtccactagaaaattaaataaaagaactgaatgtgnaaaaaaaaaaaaaaaaaannanaanaanaannnnnannanaaaaatatgagcgaattcttcattcgattcagttttttttaggcaaaatcttagatccttggtttcttaaattgtaccattctatacaaccttgaaccaaaaagcaccatttagtgaggggtgagagagaaccgtttctgaacattgc

SEQ ID NO: 1395 - DNA, 394 bp, Homo sapiens
  misc_feature (129)..(129): n includes a, c, g, or t, or contains no nucleotide
  misc_feature (131)..(134): n includes a, c, g, or t, or contains no nucleotide
  misc_feature (140)..(141): n includes a, c, g, or t, or contains no nucleotide
  misc_feature (143)..(145): n includes a, c, g, or t, or contains no nucleotide
  misc_feature (147)..(204): n includes a, c, g, or t, or contains no nucleotide
  misc_feature (316)..(316): n includes a, c, g, or t, or contains no nucleotide
aagtagcacattagcattgatggctgttcatttcacccagtataagcaagtgcagtgtacaaagaagtatattctgaatacattatttccattcatttagcacaaataaatcatttggtttcactttgnannnnaaaaannannnannnnnnnnnnnnnnnnnnnnnnnnnnnnnnnnnnnnnnnnnnnnnnnnnnnnnnnnnnactttggtagtgaagtgatttttaccacctgtgtttgcatatttatatatgctgtggatgaaaataacttactagagaatgtatattttatgacaagaatgtgtatctgttnggatataatcagagaactgaaaagtaatttatcagtaatttttaagagtccatgttttgtgacaaccatctctaatag

SEQ ID NO: 1396 - DNA, 514 bp, Homo sapiens
  misc_feature (134)..(134): n includes a, c, g, or t, or contains no nucleotide
  misc_feature (161)..(184): n includes a, c, g, or t, or contains no nucleotide
  misc_feature (286)..(286): n includes a, c, g, or t, or contains no nucleotide
  misc_feature (288)..(288): n includes a, c, g, or t, or contains no nucleotide
  misc_feature (411)..(435): n includes a, c, g, or t, or contains no nucleotide
ctctgcctccagtgctgaaagccaagaaaaagaaactgaaagtgtctgcctgaggataaaatattttccccatcttttagagctgttaatagaaattatatagcagattctttgttgggaagactgaaaaaaanaaagataggtataggataatttttaannnnnnnnnnnnnnnnnnnnnnnntcccaaacatccttttcatcctgtgcttctggaggactgatttgtttgagggaatcattctatgcattatatcctaaaatattctatgactggtttctgtcnangtttgtggctttcatttttttaatgggatgactattagtcaaagtcagcttgtcatgactcatcataggctttctaacctactccctgaatccgggtcctcattgtgaaatgcatgccatacnnnnnnnnnnnnnnnnnnnnnnnnnagggactatttgtggagtaatggcattaatcaacatagaacatcttatttgaatcaacagttaacttcagtagtcatgt

SEQ ID NO: 1397 - DNA, 398 bp, Homo sapiens
  misc_feature (120)..(120): n includes a, c, g, or t, or contains no nucleotide
  misc_feature (133)..(133): n includes a, c, g, or t, or contains no nucleotide
  misc_feature (175)..(175): n includes a, c, g, or t, or contains no nucleotide
  misc_feature (195)..(195): n includes a, c, g, or t, or contains no nucleotide
  misc_feature (237)..(237): n includes a, c, g, or t, or contains no nucleotide
  misc_feature (270)..(270): n includes a, c, g, or t, or contains no nucleotide
  misc_feature (281)..(281): n includes a, c, g, or t, or contains no nucleotide
  misc_feature (304)..(304): n includes a, c, g, or t, or contains no nucleotide
  misc_feature (322)..(322): n includes a, c, g, or t, or contains no nucleotide
  misc_feature (326)..(326): n includes a, c, g, or t, or contains no nucleotide
  misc_feature (330)..(330): n includes a, c, g, or t, or contains no nucleotide
  misc_feature (334)..(334): n includes a, c, g, or t, or contains no nucleotide
  misc_feature (336)..(336): n includes a, c, g, or t, or contains no nucleotide
  misc_feature (358)..(358): n includes a, c, g, or t, or contains no nucleotide
  misc_feature (368)..(368): n includes a, c, g, or t, or contains no nucleotide
ttttccagcaagtcttggtttgttctgatgagcagctgcttctcttcaacccacttggaatcctgtcccttctcaaccagtaacttctccaaatcttcgatttgggcctgacacctcagnagatcagcttgtngctgctcccgagtccgggcctccctctcagagtccagcgtgnctcccacctgctcctggagnagggcgtaggcgcgttgcagggcctggtactcccggatcagntgggagaagcgcaggtcagcctcccctcggggntgtgggatcgnccaagtcttcttcgggaggtggntggggtcctggtcttgtnctgncttntgtngnaggatggtttcgggaaaacggnttcttgagtncaaaagagtcctcaacaagttccaagaaaa

SEQ ID NO: 1398 - DNA, 58 bp, Homo sapiens
taccccgtcggtcattctgttcctgccgtcctgtgaggagccccaagccaacaaggcc

SEQ ID NO: 1399 - DNA, 462 bp, Homo sapiens
  misc_feature (64)..(64): n includes a, c, g, or t, or contains no nucleotide
  misc_feature (67)..(67): n includes a, c, g, or t, or contains no nucleotide
ttacccaaaataggagattctgttcatctcatatctagtattaattagaaaaataactacatanaangaaggaagctaagaaggcactcactcagccataaattctctaaaccctctctaccttggaatccgtgaatggaatctggtatgttttttgcaggattttcctattgtaaattgtggcaaatacagggctcccttcatttgcttttcatctcttatgcatcaaagtcaaaaacatttctgtatcaagataatctagaagagaaaaaaggaggaaaaggaaaagagaaagcagaagggacaaataaaagcaattggcaaaaactgtcaataatagtttatacacttaactatatcaataatcacattatatgtaaatagtctaaacaatccaattattttttacttctacttatgttatatttttacttctacatttgttaaaggttccacgctaca

SEQ ID NO: 1400 - DNA, 553 bp, Homo sapiens
  misc_feature (28)..(29): n includes a, c, g, or t, or contains no nucleotide
  misc_feature (100)..(119): n includes a, c, g, or t, or contains no nucleotide
  misc_feature (180)..(180): n includes a, c, g, or t, or contains no nucleotide
  misc_feature (195)..(196): n includes a, c, g, or t, or contains no nucleotide
  misc_feature (233)..(233): n includes a, c, g, or t, or contains no nucleotide
tggctgtccggatcgccgcactgcagtnnatgcatgctctcactcgcctgcccacccctgtgctgctgccgtacaaaccacaggtgattcgggccttagnnnnnnnnnnnnnnnnnnnngaagagactggtgcgcaaggaagcagtgtcagccagaggggagtggtttctgttggggagnccctggcagctgagnnccctcagtcctggcctagactgttctgacaatctaancctgggattactaactgttgagccatcttccccaaagcagggaaaccactggtctctgactgcctttcccacagacacagcacaaatgctaggcctctgttgcatggctgtacaaagaacataagagtccatatttctagtggatttgtaaaataagtgtgtgtgagacacttgcgtttgaagaaagatctagggtcctgggtctcttgcatttatatgtcagaaaaggggcgatatgctgctgaggggtgagtgcatatgagtgtggccctgaggaccagggctggcagatgttgtctacctgctgaagaataaagatt

SEQ ID NO: 1401 - DNA, 492 bp, Homo sapiens
  misc_feature (194)..(194): n includes a, c, g, or t, or contains no nucleotide
  misc_feature (255)..(269): n includes a, c, g, or t, or contains no nucleotide
  misc_feature (407)..(407): n includes a, c, g, or t, or contains no nucleotide
acagttattttactagcaccttgtgaagtgtttccgtgttttgtgatgctgtaatttattaatgtttgtagctttttatatttgtacatttcttatgagctttgtttatatacccattacctggatgtttttgtccactgggagaggcagcttggtggaggccttatccactcccacttgtcctgtttggaggnacgcagtccctagggcccgagactgggtgggagagggggagtctcacggggccccaggctnnnnnnnnnnnnnnntttttaaagtttcctttaccctgcccttgttgaacatttatataatctaacctggacatcaagctgttctctctctctcttttttttaattttattattattattttggcaacatgtacatttctaacaaagtttatngtggctattaaagtgttttatttcccaattcatattactcttgtatcgagtccatgaggtctaaggcaacttagatcaaagtttt

SEQ ID NO: 1402 - DNA, 610 bp, Homo sapiens
  misc_feature (225)..(225): n includes a, c, g, or t, or contains no nucleotide
  misc_feature (290)..(305): n includes a, c, g, or t, or contains no nucleotide
tgcttgggagttttgaatgttaagaattgaccatctgcttttattaaatttgttgacaaaattttctcattttcttttcacttcgggctgtgtaaacacagtcaaaataattctaaatccctcgatatttttaaagatctgtaagtaacttcacattaaaaaatgaaatattttttaatttaaagcttactctgtccatttatccacaggaaagtgttatttttnaaggaaggttcatgtagagaaaagcacacttgtaggataagtgaaatggatactacatctttaannnnnnnnnnnnnnnntgtgtatggaaaaaccatttgaagtgtacctgtgtacataactctgtaaaaacactgaaaaattatactaacttatttatgttaaaagattttttttaatctagacaatatacaagccaaagtggcatgttttgtgcatttgtaaatgctgtgttgggtagaataggttttcccctcttttgttaaataatatggctatgcttaaaaggttgcatactgagccaagtataattttttgtaatgtgtgaaaaagatgccaattattgttacacattaagtaatcaataaagaaaacttccatagct

SEQ ID NO: 1403 - DNA, 336 bp, Homo sapiens
  misc_feature (33)..(33): n includes a, c, g, or t, or contains no nucleotide
  misc_feature (76)..(77): n includes a, c, g, or t, or contains no nucleotide
  misc_feature (83)..(83): n includes a, c, g, or t, or contains no nucleotide
  misc_feature (130)..(130): n includes a, c, g, or t, or contains no nucleotide
  misc_feature (234)..(277): n includes a, c, g, or t, or contains no nucleotide
atgtatgcgcttttcctatggaaaagggccctngtcaaacctacatgacgcgatggtttttcaactttgaaactgnngaatgngagttatttgcttacggaggctgcggaggcaacagcaacaacttttngaggaaagaaaaatgtgagaaattctgcaagttcacctgattttctaacaagaacacagccctccatggattcgggattgctctgagggccatagaaggcattnnnnnnnnnnnnnnnnnnnnnnnnnnnnnnnnnnnnnnnnnnnnccacatttattctccctgatgtgctcctacaagtgcttcatctctgtgcctgaaattct

SEQ ID NO: 1404 - DNA, 583 bp, Homo sapiens
  misc_feature (112)..(112): n includes a, c, g, or t, or contains no nucleotide
  misc_feature (167)..(167): n includes a, c, g, or t, or contains no nucleotide
  misc_feature (183)..(183): n includes a, c, g, or t, or contains no nucleotide
  misc_feature (192)..(192): n includes a, c, g, or t, or contains no nucleotide
  misc_feature (200)..(200): n includes a, c, g, or t, or contains no nucleotide
  misc_feature (207)..(207): n includes a, c, g, or t, or contains no nucleotide
  misc_feature (225)..(225): n includes a, c, g, or t, or contains no nucleotide
  misc_feature (235)..(235): n includes a, c, g, or t, or contains no nucleotide
  misc_feature (253)..(253): n includes a, c, g, or t, or contains no nucleotide
  misc_feature (271)..(274): n includes a, c, g, or t, or contains no nucleotide
  misc_feature (276)..(318): n includes a, c, g, or t, or contains no nucleotide
  misc_feature (455)..(474): n includes a, c, g, or t, or contains no nucleotide
  misc_feature (543)..(558): n includes a, c, g, or t, or contains no nucleotide
tcccatgtgttactggcagctcctccaggacaccagttgcaccgggcgcactacgacctgcgccacaccttcatgggtgtggtctcattggggtcaccctcaggagaagtgntcgcacccccggaaaacacgcacagtggtgcagcctagtgttggtgctgctgctngggccagtggttcctnccatgtccnggggaggnatcagancacttcaaggtctaggcntagacatggncagagatgaggaggtttnggcacagaaaacatagcnnnncnnnnnnnnnnnnnnnnnnnnnnnnnnnnnnnnnnnnnnnnnnngctggccacgcaagtgtcacatgcgatctacattaatatcaagtcttgactccctacttcccgtcattcctcacaggacagaagcagagtgggtggtggttatgtttgacagaaggcattaggttgacaacttgtcnnnnnnnnnnnnnnnnnnnnaccatgattgtgttctctgcctctggttgaccttacaaaaaccattggaactgtgactttgaaaggtgnnnnnnnnnnnnnnnnatgtgcctgttaatgaaagtgcctg

SEQ ID NO: 1405 - DNA, 529 bp, Homo sapiens
  misc_feature (39)..(39): n includes a, c, g, or t, or contains no nucleotide
  misc_feature (83)..(83): n includes a, c, g, or t, or contains no nucleotide
  misc_feature (90)..(91): n includes a, c, g, or t, or contains no nucleotide
  misc_feature (121)..(123): n includes a, c, g, or t, or contains no nucleotide
  misc_feature (125)..(125): n includes a, c, g, or t, or contains no nucleotide
  misc_feature (204)..(233): n includes a, c, g, or t, or contains no nucleotide
  misc_feature (266)..(266): n includes a, c, g, or t, or contains no nucleotide
  misc_feature (315)..(315): n includes a, c, g, or t, or contains no nucleotide
  misc_feature (325)..(325): n includes a, c, g, or t, or contains no nucleotide
  misc_feature (345)..(345): n includes a, c, g, or t, or contains no nucleotide
  misc_feature (348)..(404): n includes a, c, g, or t, or contains no nucleotide
  misc_feature (437)..(438): n includes a, c, g, or t, or contains no nucleotide
  misc_feature (447)..(447): n includes a, c, g, or t, or contains no nucleotide
  misc_feature (474)..(474): n includes a, c, g, or t, or contains no nucleotide
  misc_feature (491)..(491): n includes a, c, g, or t, or contains no nucleotide
tgggattgttccagccctagactatctttatagacctcnagcggaggagattgcacaagctccctcagtctcccatgcctgtntctaacnnccctcacggtcagtaagtttcctctgatgnnngncccaaattccttttgttaaaaagtttaaatccatttcctttggagattttattttgtgttgtacacttatgctctaccnnnnnnnnnnnnnnnnnnnnnnnnnnnnnnctgaataaatgttttgttgaatgaatgtatggngcttggaagagaaaacaactcttggagacagttgagagttgtacttcancctgtttgtnctgggcgagggaaagacaanctnnnnnnnnnnnnnnnnnnnnnnnnnnnnnnnnnnnnnnnnnnnnnnnnnnnnnnnnngaaacaccctggatggctactctctgcttgagnngtttggagnggagggcactctgtgtcttgacagggngattattgagccaggantgtgcctaccccttaattgctcacattttgccccagag

SEQ ID NO: 1406 - DNA, 209 bp, Homo sapiens
  misc_feature (45)..(62): n includes a, c, g, or t, or contains no nucleotide
  misc_feature (159)..(173): n includes a, c, g, or t, or contains no nucleotide
taatggacatcatcggctggacctgggatctgatgaatcccacannnnnnnnnnnnnnnnnnagaacagatgccctgatcaccaaggacttggtactgatttagagagaagagagcagctcctagcagcatcaacatctatttgtcgcttatttgcccnnnnnnnnnnnnnnngcctttccttctcccatcctttttctggatatgccg

SEQ ID NO: 1407 - DNA, 277 bp, Homo sapiens
  misc_feature (129)..(132): n includes a, c, g, or t, or contains no nucleotide
  misc_feature (137)..(138): n includes a, c, g, or t, or contains no nucleotide
  misc_feature (148)..(175): n includes a, c, g, or t, or contains no nucleotide
  misc_feature (238)..(238): n includes a, c, g, or t, or contains no nucleotide
gtacagcctgtgtgacttctctgtatgtgtgtgtgtgtcgtgaccagcctaagtagttagcataactcaagatgctgatgtgcagtcacccatcagagaaaataaaaatggaaaccacgttcacagcannnnaaaannttttactttnnnnnnnnnnnnnnnnnnnnnnnnnnnnacatagtaaatcattttaaaagtacaaaaagtatgaagaagtttgtcttaaaaaaaaaaaaanttattcctccaactagagaccactctgatgtttcgacgt

SEQ ID NO: 1408 - DNA, 613 bp, Homo sapiens
  misc_feature (239)..(306): n includes a, c, g, or t, or contains no nucleotide
  misc_feature (541)..(541): n includes a, c, g, or t, or contains no nucleotide
  misc_feature (566)..(568): n includes a, c, g, or t, or contains no nucleotide
  misc_feature (570)..(571): n includes a, c, g, or t, or contains no nucleotide
gaagcctaactttttacacagtggttacatttcacatttcactaatgttgatatttggctgatggttgagcagtttctgaaatacacatttagtgtatggaaatacaagacagctaaagggctgtttggttagcatctcatcttgcattctgatcaattggcaagaaagggagatttcaaaattatatttcttgatggtatcttttcaattaatgtatctgtaaaagtttctttgtaannnnnnnnnnnnnnnnnnnnnnnnnnnnnnnnnnnnnnnnnnnnnnnnnnnnnnnnnnnnnnnnnnnnaacgtgagagtctggtaggcaaagcagtctgagaaagaaataggaaatgcagaaataggttttgtctggttgcatataatctttgctctttttaagctctgtgagctctgaaatatatttttgggttacttcagtgtgtttgacaagacagcttgatatttctatcaaacaaatgactttcatattgcaacaatctttgtaagaaccactcaaataaaagtctcttaaaaaggcnaaaaaaaaaaaaaaaaaaaaaaaannnanntctgcatttcctatttctttctcagactgtttgcctaccaga

SEQ ID NO: 1409 - DNA, 569 bp, Homo sapiens
  misc_feature (92)..(92): n includes a, c, g, or t, or contains no nucleotide
  misc_feature (499)..(499): n includes a, c, g, or t, or contains no nucleotide
  misc_feature (501)..(508): n includes a, c, g, or t, or contains no nucleotide
  misc_feature (510)..(514): n includes a, c, g, or t, or contains no nucleotide
tttcagaaaagatgccccttgccattttcgttaatttttcagtcttttcttagacacacccccagcctaagaccttgttcgaggagtttatngtgtctgtcttttcttaacatactgcactgttcttaagcatcatattgtgttgtttttatttagccactattaacatgaaggtttattcaggtagatttgatttcctttgcttcgtttcttctcctgctctgtcaactgtacttatcttaaagggccactctaaaaacaagggagatgtcgtaatctgaaacctttggggagatgtactctgtactgcataacatctccagtgaggtttgtgacaggacctcaactaaatatatgaatttgtgcaagttcatatattaaagtttctgcagcagagtgaaaattgttacagtaaatgtggtagaaactgttaatcgcttaatgccagtttaaatcatgttttgtaaccaagcttcagtaaaaggctttagattgtcanannnnnnnnannnnnagaattgtatatataaagaattagacattaaacaggcatattctagtgtctgaaa

SEQ ID NO: 1410 - DNA, 504 bp, Homo sapiens
  misc_feature (28)..(101): n includes a, c, g, or t, or contains no nucleotide
  misc_feature (118)..(132): n includes a, c, g, or t, or contains no nucleotide
  misc_feature (251)..(265): n includes a, c, g, or t, or contains no nucleotide
  misc_feature (303)..(348): n includes a, c, g, or t, or contains no nucleotide
  misc_feature (433)..(458): n includes a, c, g, or t, or contains no nucleotide
cctggagcgctatgtagagacgcaggcnnnnnnnnnnnnnnnnnnnnnnnnnnnnnnnnnnnnnnnnnnnnnnnnnnnnnnnnnnnnnnnnnnnnnnnnnnagaccacggtcaccgcnnnnnnnnnnnnnnnggccctcaccaacttgccgcacacagacttcaccctgtgcaagtgcatgatcgaccaggcacatcaagaagaacggccaatccgacagattttgtacctcggggacctgctggagaccnnnnnnnnnnnnnnnttctggcaagccctggatgaaaacatggacctcttggnnnnnnnnnnnnnnnnnnnnnnnnnnnnnnnnnnnnnnnnnnnnnntgttgtgggtatcacttaccagcacattgaccgctggctgctggccgagatgctcggggatctgtcggacagccagctaaaggtnnnnnnnnnnnnnnnnnnnnnnnnnnccgacgagtcggggcagatcttcatctgtagccaagaagagagcat

SEQ ID NO: 1411 - DNA, 140 bp, Homo sapiens
tcctggagacgaattcctattggggtggcctccctgtctgcacactcaacacaatccatgggtgcctgggtaacaactaagtctgttcaccatttctgtgagtacctgggattcaaagtcaacttttttcatgaagacag

SEQ ID NO: 1412 - DNA, 446 bp, Homo sapiens
  misc_feature (26)..(43): n includes a, c, g, or t, or contains no nucleotide
gccatggccgctgtaaacactacatnnnnnnnnnnnnnnnnnnatagtatcaaagtgcattactggtggagttttacagtctgtgaagcttactggataaggagagaatagcttttatgtactgacttcataaaagccatctcagagccattgatacaagtcaatcttactatatgtaacttcagacaaagtggaactaagcctgctccagtgtttcctcatcattgattattgggctagctgtggatagcttgcattaattgtatattttggattctgtttgtgttgaattttttaatcattgtgcacagaagcatcattggtagcttttatatgcaaatggtcatttcagatgtatggtgtttttacactacaaagaagtcccccatgtggatatttcttatactaattgtatcataaagccgtttattcttccttgtaagaat

SEQ ID NO: 1413 - DNA, 578 bp, Homo sapiens
cactaacgtgcttgaggacaacattggctacttgaggtttgacatgtttggggacggtgagctgctcacccaggtctccaggctgctggtggagcacatctggaagaagatcatgcacacggatgccatgatcatcgacatgaggttcaacatcggtggccccacatcctccattcccatcttgtgctcctacttctttgatgaaggccctccagttctgctggacaagatctacagccggcctgatgactctgtcagtgaactctggacacacgcccaggttgtaggtgaacgctatggctccaagaagagcatggtcattctgaccagcagtgtgacggccggcaccgcggaggagttcacctatatcatgaagaggctgggccgggccctggtcattggggaggtgaccagtgggggctgccagccaccacagacctaccacgtggatgacaccaacctctacctcactatccccacggcccgttctgtgggggcctcggatggcagctcctgggaaggggtgggggtgacaccccatgtggttgtccctgcagaagaggctctcgccagggcca

SEQ ID NO: 1414 - DNA, 503 bp, Homo sapiens
  misc_feature (136)..(172): n includes a, c, g, or t, or contains no nucleotide
  misc_feature (223)..(223): n includes a, c, g, or t, or contains no nucleotide
  misc_feature (284)..(284): n includes a, c, g, or t, or contains no nucleotide
  misc_feature (329)..(354): n includes a, c, g, or t, or contains no nucleotide
  misc_feature (451)..(475): n includes a, c, g, or t, or contains no nucleotide
taatatgggctgcaagtacacctgcaaataaaactactagaatactgctagttaaaataagtgctctatatgcataatatcaaatatgaagatatgctaatgtgttaatagcttttaaaagaaaagcaaaatgccnnnnnnnnnnnnnnnnnnnnnnnnnnnnnnnnnnnnntgagttgaaaactgcaaataaaagtttgtcacttgagcttatgtacagaangctatatgagaaacacttttagaatggatttatttttcatttttgccagttatttttattntcttttacttttctacataaacataaacttcaaaaggtttgtaannnnnnnnnnnnnnnnnnnnnnnnnnttgccagaatatactataaaaagttaaaaaaaaaaacttactttgtgggttgcaatacaaactgctcttgacaatgactattccctgacagttattnnnnnnnnnnnnnnnnnnnnnnnnnaaatcttcccaaatgttgtggaaaactg

SEQ ID NO: 1415 - DNA, 118 bp, Homo sapiens
  misc_feature (26)..(26): n includes a, c, g, or t, or contains no nucleotide
aggaaagtgccatatcagggtaccgntaccggaaagctcacatctcagccaggggccatgccccacttcccctgaccccagctgtctaagtctccactctgtgaaacccacaggggat

SEQ ID NO: 1416 - DNA, 462 bp, Homo sapiens
  misc_feature (169)..(255): n includes a, c, g, or t, or contains no nucleotide
  misc_feature (272)..(272): n includes a, c, g, or t, or contains no nucleotide
  misc_feature (292)..(292): n includes a, c, g, or t, or contains no nucleotide
  misc_feature (368)..(435): n includes a, c, g, or t, or contains no nucleotide
ctagcccttcagaaggactggacctctgtgtcccttcagtgggaagccaccttggacacacgcagtcattcaggtggacataaggccactcttctcgcccttgaccttgaggaactcagccatgctggagaaatacttctggttggcctcagccaccttcttctctgcnnnnnnnnnnnnnnnnnnnnnnnnnnnnnnnnnnnnnnnnnnnnnnnnnnnnnnnnnnnnnnnnnnnnnnnnnnnnnnnnnnnnnnncttcccgccatatacgncgctctgcttctgcagggtncgctgcagcgtcttggagatcctggccttggtggcctcgtttacctgtgtctgccgcacacgcccactgcccgacnnnnnnnnnnnnnnnnnnnnnnnnnnnnnnnnnnnnnnnnnnnnnnnnnnnnnnnnnnnnnnnnnnnncatacggttggcctgcttccggatctc

SEQ ID NO: 1417 - DNA, 160 bp, Homo sapiens
tgtcagcctctctagttccccttggcctgcatgtacaaacttctaccctagaagctctctgccatcgatgtattctaatagatttgtaaggctattaatttgaagcaactccttgctcacagtgattcttgcttctctgagacctgctcccagtcgatac

SEQ ID NO: 1418 - DNA, 439 bp, Homo sapiens
  misc_feature (26)..(26): n includes a, c, g, or t, or contains no nucleotide
  misc_feature (50)..(50): n includes a, c, g, or t, or contains no nucleotide
atgctactctgaaaaatctcgtgaangctgtaggaaaagggagaatcttnccatgttggtgtttttcctgtaaagatcagtttggggtatgatataagcaggtattaataaaaataacacaccaaagagttacgtaaaacatgttttattaattttggtccccacgtacagacattttatttctattttgaaatgagttatctattttcataaaagtaaaacactattaaagtgctgttttatgtgaaataacttgaatgttgttcctataaaaaatagatcataactcatgatatgtttgtaatcatggtaatttagatttttatgaggaatgagtatctggaaatattgtagcaatacttggtttaaaattttggacctgagacactgtggctgtctaatgtaatcctttaaaaattctctgcattgtcagtaaatg

SEQ ID NO: 1419 - DNA, 253 bp, Homo sapiens
  misc_feature (28)..(28): n includes a, c, g, or t, or contains no nucleotide
  misc_feature (48)..(48): n includes a, c, g, or t, or contains no nucleotide
  misc_feature (53)..(53): n includes a, c, g, or t, or contains no nucleotide
  misc_feature (55)..(55): n includes a, c, g, or t, or contains no nucleotide
  misc_feature (120)..(120): n includes a, c, g, or t, or contains no nucleotide
caggctttggggttgctccctgttctgncccgaggccggggacgcagnggcancncacgcctccgtgggctccattctgtagcattgccagcgttctcttcacgtctctaacaatccttngcttttcctcactcacgtggaaatgtgaactgtcccggctctgtcttcatttttatttttaagccatcgttcccctcctgaacggttgccccttatttaatgctgtaaagttggactgttgttcaataaacca

SEQ ID NO: 1420 - DNA, 503 bp, Homo sapiens
gtccccagcacataataacttggacctgcagccagttacctactgcgagccggccttctggtgctccatctcctactacgagctgaaccagcgcgtcggggagacattccacgcctcgcagccatccatgactgtggatggcttcaccgacccctccaattcggagcgcttctgcctagggctgctctccaatgtcaacaggaatgcagcagtggagctgacacggagacacatcggaagaggcgtgcggctctactacatcggaggggaggtcttcgcagagtgcctcagtgacagcgctatttttgtccagtctcccaactgtaaccagcgctatggctggcacccggccaccgtctgcaagatcccaccaggatgcaacctgaagatcttcaacaaccaggagttcgctgccctcctggcccagtcggtcaaccagggctttgaggctgtctaccagttgacccgaatgtgcaccatccgcatgagcttcgtcaaaggct

SEQ ID NO: 1421 - DNA, 526 bp, Homo sapiens
  misc_feature (106)..(107): n includes a, c, g, or t, or contains no nucleotide
  misc_feature (109)..(110): n includes a, c, g, or t, or contains no nucleotide
  misc_feature (112)..(129): n includes a, c, g, or t, or contains no nucleotide
  misc_feature (440)..(440): n includes a, c, g, or t, or contains no nucleotide
  misc_feature (476)..(479): n includes a, c, g, or t, or contains no nucleotide
  misc_feature (481)..(483): n includes a, c, g, or t, or contains no nucleotide
  misc_feature (485)..(486): n includes a, c, g, or t, or contains no nucleotide
  misc_feature (488)..(491): n includes a, c, g, or t, or contains no nucleotide
  misc_feature (493)..(499): n includes a, c, g, or t, or contains no nucleotide
  misc_feature (501)..(501): n includes a, c, g, or t, or contains no nucleotide
ttggaacaggtttcattctgtttctagatttatgttgttgtagttgaacagcaactgtttttttccctcagtgttaacgaaaggataaagactacctgtattgttnngnntnnnnnnnnnnnnnnnnnnccggtgattcatgtttgtgaattggagtttaaatgtttgcaggattactgtacttccaaagacccactagaatgtcagctgtactctgtactctccactgagaaaatgaacaaaatcctatgtcttaacagttatgctctaactttttgaaagctttttgatgtaaataataggttagaaactaaaagccttttaatcttacaaaatacaatttgaacgatggaaggttgttcagatactggctttctgtaaaaacatcattgtgttagattgtttgtaatgtactatcaataaaattggctgcttgggcngttttagttaccaccttaaaaaaaaaaaaaaaaaannnnannnannannnnannnnnnnanttgctcattgtggttgctctttgga

SEQ ID NO: 1422 - DNA, 474 bp, Homo sapiens
  misc_feature (40)..(40): n includes a, c, g, or t, or contains no nucleotide
  misc_feature (45)..(45): n includes a, c, g, or t, or contains no nucleotide
  misc_feature (111)..(111): n includes a, c, g, or t, or contains no nucleotide
  misc_feature (114)..(116): n includes a, c, g, or t, or contains no nucleotide
  misc_feature (118)..(125): n includes a, c, g, or t, or contains no nucleotide
  misc_feature (127)..(127): n includes a, c, g, or t, or contains no nucleotide
  misc_feature (129)..(131): n includes a, c, g, or t, or contains no nucleotide
  misc_feature (133)..(135): n includes a, c, g, or t, or contains no nucleotide
  misc_feature (137)..(143): n includes a, c, g, or t, or contains no nucleotide
  misc_feature (145)..(154): n includes a, c, g, or t, or contains no nucleotide
  misc_feature (156)..(157): n includes a, c, g, or t, or contains no nucleotide
  misc_feature (159)..(164): n includes a, c, g, or t, or contains no nucleotide
  misc_feature (166)..(195): n includes a, c, g, or t, or contains no nucleotide
  misc_feature (197)..(199): n includes a, c, g, or t, or contains no nucleotide
  misc_feature (257)..(258): n includes a, c, g, or t, or contains no nucleotide
  misc_feature (262)..(263): n includes a, c, g, or t, or contains no nucleotide
  misc_feature (325)..(325): n includes a, c, g, or t, or contains no nucleotide
  misc_feature (327)..(328): n includes a, c, g, or t, or contains no nucleotide
ccatcgtgagctaagagaaggttaggaggcctgaggggcngggcnttgtgtcccctcctccccctccacagcccctgaggtggagcttccctcacagaccccatctggtcnagnnnannnnnnnncngnnnannntnnnnnnngnnnnnnnnnnannannnnnngnnnnnnnnnnnnnnnnnnnnnnnnnnnnnncnnnccctaccttggagtcggcagagaagcagcaataagcattaggcgaatgattgaaaggnngctnntgcgccaagaggccttcagtccccttaacgtggctttccaacttcctgacgaggctacaaangnnccgctcacaaaagaaagccaataatgtaaataaatagaaaacgaagcctccacgcgtggtttttaaagggggatgatgaatgtgacaccacccacagaatgcattagaatctggtttttctgtgctttgtcattttactctgatag

SEQ ID NO: 1423 - DNA, 366 bp, Homo sapiens
aaatgggtggcaagtaccgccttatggagtatacgggcaaccatggaatcaacaaggatttggagtagatcaatcaccttctgctgcttggatgggtggatttggtgctcagcctccccaaggacaagctcctccccctgtaatacctcctcctaaccaagccggatatggtatggcaagttaccaaacacagtgagccgggactctaaaaaaaaattgtaattcatgataggcttcgatttcctgtgacactctgaagacatgaaagtagacatcggaaaatgaaaatatttattttaaaaattgaaatgtttggaacctttagcacagatttgctttggtgaaggacacgtgtcttctagttct

SEQ ID NO: 1424 - DNA, 470 bp, Homo sapiens
  misc_feature (294)..(321): n includes a, c, g, or t, or contains no nucleotide
cctactcttccttccgagggagtcaggatgggacagacacccattttccaaaaggctccttgcctccttccctggcccacctgaagccaagtcccaggtgtcctggctgctctcctgggcggggtgggatttttgcataagcactttgctgccctccagtggctgcttgaggaaacgcagggcctggtttgggagagtcaccgagggcccatgtggctggaggttgggggcaggatctggcccgagctctcctcagacctccccagacctgtcttctcatcagccaccgctgtnnnnnnnnnnnnnnnnnnnnnnnnnnnnctcggacacagtgtaccccctcccaagccctccctgagccgttctcctgagtccctgagggcagacacagctccagggacccaggccggctgccacacccccgacactcctgctgtccactggccttagctcctgcaagttccccagtg

SEQ ID NO: 1425 - DNA, 355 bp, Homo sapiens
gtcaccatagaattagttggtactatgccatctttcactctttcacaagtcagtgatggaacctgctttatgaccaagattcatcctcaaataagccacatgtacccttctgacaaagctgtgtaaagtattagaatctgatgctctagaaagatcctagttgcctttgtgtatatttactgcctgcttgagtgtttctatgtgtgggttttccctgtatcttgtagaaatgttggggtgttttcctctgccatatggctcgtggcctgcgagccaactatttcagctgtattttaccttcatttttgatgaggtgatttaaattttgtttcactttgtgtagtgaattccacag

SEQ ID NO: 1426 - DNA, 43 bp, Homo sapiens
tccagggttccaaggtctgctctctaccaatctaggagaatat

SEQ ID NO: 1427 - DNA, 554 bp, Homo sapiens
  misc_feature (40)..(40): n includes a, c, g, or t, or contains no nucleotide
  misc_feature (98)..(99): n includes a, c, g, or t, or contains no nucleotide
  misc_feature (105)..(119): n includes a, c, g, or t, or contains no nucleotide
  misc_feature (132)..(136): n includes a, c, g, or t, or contains no nucleotide
  misc_feature (140)..(202): n includes a, c, g, or t, or contains no nucleotide
  misc_feature (411)..(428): n includes a, c, g, or t, or contains no nucleotide
agattggttttccagagacaacagaagaggagctagaagnaaattgcttcagagaattcagattgcatctttccttcagctcctgatgttaaggcctnngcgtcnnnnnnnnnnnnnnnttagtatacaacnnnnnaaannnnnnnnnnnnnnnnnnnnnnnnnnnnnnnnnnnnnnnnnnnnnnnnnnnnnnnnnnnnnnngtaaataatgaggaaaatgaattagctccagtgctggaacaactaactaacttggtgttacctgtaagtgaaaactcaagtgtcagatgaagggaggtggagttatcctcttatagtacagtggcctgttatctttttaatgaatatatacaagccaacatccaatttctattattacaattagggttcttgtagctgtttatgttaannnnnnnnnnnnnnnnnnattggctgattttttctgatcttaaagcagaatgccttttctttttttgcttcagttgtaaagaagagggaatacatgataaagtaactggtttgatttctcgttcattgtacactgcctctgaac

SEQ ID NO: 1428 - DNA, 550 bp, Homo sapiens
  misc_feature (32)..(32): n includes a, c, g, or t, or contains no nucleotide
  misc_feature (35)..(35): n includes a, c, g, or t, or contains no nucleotide
  misc_feature (37)..(38): n includes a, c, g, or t, or contains no nucleotide
  misc_feature (40)..(40): n includes a, c, g, or t, or contains no nucleotide
  misc_feature (51)..(51): n includes a, c, g, or t, or contains no nucleotide
  misc_feature (112)..(112): n includes a, c, g, or t, or contains no nucleotide
  misc_feature (128)..(151): n includes a, c, g, or t, or contains no nucleotide
ttgagcacgctgctgtccagcctctcgcgctnctncnncnggggagccccnagctcccctgccactggtgtcctcccctcgccgcagggcaagtccacctctctctccaaanccagccctgagagtcnnnnnnnnnnnnnnnnnnnnnnnnaggcgtttgtccggcatatgcaaagatagggcagtgctgttctgcccacctacccctctccaccagcctacactgcaccctggctggcaggggtgctgctggctgctagggcctatacaatggagggcacctcctgtcacccccctcccggagtagccacgactccagccaccacccactgacgttatttttatactagatgaagaggtcaacagcaggcatggggagccgagtcttctgtgctcaggtcctcacgctgcagacgccccctagaggaactttccttcctttccagcattccccacagcactgccggccaggggagaggcggcagcccagcagagggctctatgcacgggtttcaaacctgttttccacactctgtctttgcagttttgg

SEQ ID NO: 1429 - DNA, 221 bp, Homo sapiens
ttttactgggttcttaaccagatggttgtgtatgggtagcactactaaaagtttagaacttgcagtgtctttcggaatttttaaaataaactgtaaactaataggctggggtttttgttttgttttggggttttgttttgtttggttttacattttagttactgaagccttacaaggttatgtagagagataccatcttctgtaccaaaaatagacaagag

SEQ ID NO: 1430 - DNA, 147 bp, Homo sapiens
  misc_feature (68)..(68): n includes a, c, g, or t, or contains no nucleotide
  misc_feature (70)..(70): n includes a, c, g, or t, or contains no nucleotide
ataatatcaaggagtgtcctcttgctcctcttccaccctcagtggatgataatctgaaggagtgtctncntggtccctcttccaccctctcctcttccaccctcagtggatgataatctgaaggactgtctctttgtccctcttcca

SEQ ID NO: 1431 - DNA, 585 bp, Homo sapiens
  misc_feature (172)..(175): n includes a, c, g, or t, or contains no nucleotide
  misc_feature (178)..(178): n includes a, c, g, or t, or contains no nucleotide
  misc_feature (181)..(181): n includes a, c, g, or t, or contains no nucleotide
  misc_feature (183)..(191): n includes a, c, g, or t, or contains no nucleotide
  misc_feature (193)..(267): n includes a, c, g, or t, or contains no nucleotide
  misc_feature (269)..(271): n includes a, c, g, or t, or contains no nucleotide
  misc_feature (274)..(274): n includes a, c, g, or t, or contains no nucleotide
  misc_feature (280)..(280): n includes a, c, g, or t, or contains no nucleotide
  misc_feature (287)..(287): n includes a, c, g, or t, or contains no nucleotide
  misc_feature (292)..(292): n includes a, c, g, or t, or contains no nucleotide
  misc_feature (312)..(312): n includes a, c, g, or t, or contains no nucleotide
  misc_feature (318)..(318): n includes a, c, g, or t, or contains no nucleotide
  misc_feature (337)..(337): n includes a, c, g, or t, or contains no nucleotide
  misc_feature (350)..(350): n includes a, c, g, or t, or contains no nucleotide
  misc_feature (360)..(360): n includes a, c, g, or t, or contains no nucleotide
  misc_feature (373)..(373): n includes a, c, g, or t, or contains no nucleotide
  misc_feature (391)..(391): n includes a, c, g, or t, or contains no nucleotide
  misc_feature (410)..(410): n includes a, c, g, or t, or contains no nucleotide
  misc_feature (418)..(418): n includes a, c, g, or t, or contains no nucleotide
  misc_feature (443)..(443): n includes a, c, g, or t, or contains no nucleotide
  misc_feature (460)..(497): n includes a, c, g, or t, or contains no nucleotide
ggggactccatctctcagggaccctcccagctcccaagctgctgccctgcctttcctgggggcaaaaggggcaggtggcagtttttttttcagcctcagaactggttttcctcaatcctggggggtccttggacctagaagggaacaactgatggggataaacccagccccnnnnccnccngnnnnnnnnntnnnnnnnnnnnnnnnnnnnnnnnnnnnnnnnnnnnnnnnnnnnnnnnnnnnnnnnnnnnnnnnnnnnnnnnnnnntnnnagntggggncccacgnaggcnaggcaggtggactctggcanaggggnccttggtttctgggggcanggggttggggaantcttggtcgnccagtttacctgnccataggtcccttttcanccctgcctcccccaagttnccatcaanacaaactcccagggggtcctccatncctggcctggccctctnnnnnnnnnnnnnnnnnnnnnnnnnnnnnnnnnnnnnntggcctctgaggggccatggtgcttgcggggcttcccctatcccccaggtctgcccaaggggactctcaataaactctagctgaaggc

SEQ ID NO: 1432 - DNA, 70 bp, Homo sapiens
ttctgaaattgtgaaccatgagtctagtacttaatgatctgcttatctgctgccgtcaactagaacatga

SEQ ID NO: 1433 - DNA, 533 bp, Homo sapiens
  misc_feature (234)..(234): n includes a, c, g, or t, or contains no nucleotide
  misc_feature (237)..(237): n includes a, c, g, or t, or contains no nucleotide
  misc_feature (265)..(265): n includes a, c, g, or t, or contains no nucleotide
ggcagttctaccataaaaagtactctatttttctaatttctaggatttttaaaataacatttctgtaagtctgacatactaatagtcactcaagcagtaccatttattttagtttgcatatattttcactgtttttaatttaatgtattgagtctaatagactgttttgcaataattagaataaagatttatttcttctaatcaaagatgcataacagctattatctagggganccnccaaatgtgatttcaaaattttgttaanctattacaaatgtaatccttatatagaaattttaattttgtaaagtagtgtataatattgtaatattaaattcttgttcttaaattcaaatatgtattgatcttcaatgtgctgtgttaaatcttgcttctctgaaaagttggagacaagatttgtcttcctttttacagtttgtaattttcactgttttattcctgttaaaaaaaaaaaaaagtcatttgtaacccatgcagaccattgtttgatctatgctaacttatcaacttgg

SEQ ID NO: 1434 - DNA, 416 bp, Homo sapiens
  misc_feature (126)..(145): n includes a, c, g, or t, or contains no nucleotide
ccataattgtttagccatgtgagtttcaggttggtacacgttcagacagaactgctgtatcacattccaattttgaatagccagtgagcaatcaagtgtagagaaatgataaatggcctaagaagnnnnnnnnnnnnnnnnnnnnatgctcttcctagtagcttaataggccacaagctagtttctgttgcactctgaaataaaatatgctttaaaaatgtagggaacagtgcttagaaaagcaaaaactaggtgtgtcattgaaataataggcataaaaattaaatgttacataagaacactatttggaaagagggtccttttaaaaactgaatttgtactaaatcagatttgccatgtccagtacagaataatttgtacttagtatttgcagcagggtttgtctttgtgaattc

SEQ ID NO: 1435 - DNA, 337 bp, Homo sapiens
  misc_feature (54)..(54): n includes a, c, g, or t, or contains no nucleotide
cgtgcatgtcgactcctgcggtgcggggctggctgtctggctggcgaggagctnctgcgcttccttcacatgctcttgttttccagctgctttcctgggggatcagactgtgaagcaggaagacagatataataaatatactgcatctttttaagatgtgcaattttattctgaggaaacataaattatgttttgtattatatgactttaagagcccacattaggttttatgattcatttgccaggtttttaaatgttttcacaaaactgttacgggacttcaactagaaataaaatggtgtaaataaagaccttgctatctctaaattatggatgt

SEQ ID NO: 1436 - DNA, 468 bp, Homo sapiens
  misc_feature (47)..(47): n includes a, c, g, or t, or contains no nucleotide
  misc_feature (297)..(312): n includes a, c, g, or t, or contains no nucleotide
  misc_feature (400)..(400): n includes a, c, g, or t, or contains no nucleotide
  misc_feature (402)..(402): n includes a, c, g, or t, or contains no nucleotide
gaagtcactcctccaatgtctgggacttgccagctcagcccgttagnatgagggtgctgagaggaaacaggaaacaagactgcgaatggcgctcaggcagggagcagggagtggcgtttggcttgcacgttcccatgtggccagatgctggggccactttccttctgtctgctggtgactgcagtgttccccctcctcctcaccacggggctcctgtgagtctggggggcacctctttctggcctgtgcacctctctctggcttataaaggtgcctggcctgtgccagcccctcctnnnnnnnnnnnnnnnnggggaccaggtgagccggctctcccacgtggttgtcccgggaaagctgccccacagcctcagcatcttcagcacttaccgatccagancntcccggccttctccggtgtcctgtaccaactcttctatttaagagaacctcagatgatgtacctga

SEQ ID NO: 1437 - DNA, 313 bp, Homo sapiens
gaacactgaagcaacctcaagcatctctttattttgatgatatatttttgtaaggaaaatattcagatgatcaggaatgtatataactgaaatcaagaaaaagaacagtatgcatttaaaaagacagaattatgaaattatatgagtgcttagaatggggctaagggaagtgctgaaatagagcaaaggatggaagataatatagactaccacccactgtaaatgtttgcaagtggctgtgttttaaatgggattattacagttgatctctatgaatgtcagagccctaactttcaggctttgcattttgtat

SEQ ID NO: 1438 - DNA, 519 bp, Homo sapiens
tgggctatggggaccggaccagcacattctgtgggaccccggagttcctggcccctgaggtgctgacggacacgtcgtacacgcgagctgtggactggtggggactgggtgtgctgctctacgagatgctggttggcgagtccccattcccaggggatgatgaggaggaggtcttcgacagcatcgtcaacgacgaggttcgctacccccgcttcctgtcggccgaagccatcggcatcatgagaaggctgcttcggaggaacccagagcggaggctgggatctagcgagagagatgcagaagatgtgaagaaacagcccttcttcaggactctgggctgggaagccctgttggcccggcgcctgccaccgccctttgtgcccacgctgtccggccgcaccgacgtcagcaacttcgacgaggagttcaccggggaggcccccacactgagcccgccccgcgacgcgcggcccctcacagccgcggagcaggcagccttcctggacttcgacttcgtgg

SEQ ID NO: 1439 - DNA, 585 bp, Homo sapiens
  misc_feature (88)..(161): n includes a, c, g, or t, or contains no nucleotide
  misc_feature (220)..(220): n includes a, c, g, or t, or contains no nucleotide
  misc_feature (255)..(336): n includes a, c, g, or t, or contains no nucleotide
  misc_feature (413)..(413): n includes a, c, g, or t, or contains no nucleotide
cggctcatcttcacagtgggcacgtccagcaccacgggtgagacggacaccgtggtatggaacgagatccaccacaagacagagatgnnnnnnnnnnnnnnnnnnnnnnnnnnnnnnnnnnnnnnnnnnnnnnnnnnnnnnnnnnnnnnnnnnnnnnnnnngggggtgaccgaggactgcctggagcagcagtgacctcgcaccccagcacgcccgcctntggtggccaccccgctgccccatggctggctgggnnnnnnnnnnnnnnnnnnnnnnnnnnnnnnnnnnnnnnnnnnnnnnnnnnnnnnnnnnnnnnnnnnnnnnnnnnnnnnnnnntccccctgcctgcctctctctcctcctcccctctgggaattgggcagccctgggcagttgtactcatgggggcttangatgcagctacctcagtgcgcagggcccgtctgtcctctgggggctgcttcgggcccgcggtgctcggggcctggtgtggggcgagtagagacttccccagcctggacgggcgtgggttctgggtcagcttcttttacctcaattttgtttgcaataaatgctctatagcca

SEQ ID NO: 1440 - DNA, 551 bp, Homo sapiens
  misc_feature (71)..(117): n includes a, c, g, or t, or contains no nucleotide
  misc_feature (136)..(154): n includes a, c, g, or t, or contains no nucleotide
tacccagaatgaacagtgtccacaagtctcctttcatcaggccatatctgtatcagtggagacagaaaaannnnnnnnnnnnnnnnnnnnnnnnnnnnnnnnnnnnnnnnnnnnnnnaaacttcaggagtctaggnnnnnnnnnnnnnnnnnnnaaggaaggtgtccccaaatctagggaatccataaataagaaccgttctgtcactgtaacctcagctaaaacatccaatcagttacactgcaccttaggtgtagaaatttcacccaaacttttagcaggtgaggaggatgcactcaatcagacttctgagcaaactaagtctttgtcatccaatttcatattggttaaagacttaggtcagggcatacagaattcagtaacagacaggcctgaaaccagagaaaatgtctgtcctgatgcttcgaggccattacttgaatatgaaccacctaccagccatccatcatcaagtcctgccattcttccaccattgatttttcctgccacagatattgaccgcattctccgtgctggctttactttgcagg

SEQ ID NO: 1441 - DNA, 579 bp, Homo sapiens
  misc_feature (42)..(55): n includes a, c, g, or t, or contains no nucleotide
  misc_feature (57)..(61): n includes a, c, g, or t, or contains no nucleotide
  misc_feature (63)..(68): n includes a, c, g, or t, or contains no nucleotide
  misc_feature (72)..(72): n includes a, c, g, or t, or contains no nucleotide
  misc_feature (86)..(86): n includes a, c, g, or t, or contains no nucleotide
  misc_feature (90)..(90): n includes a, c, g, or t, or contains no nucleotide
  misc_feature (93)..(93): n includes a, c, g, or t, or contains no nucleotide
  misc_feature (466)..(482): n includes a, c, g, or t, or contains no nucleotide
gcatgggcaccacatttcttatattaaaagaattagtgtttnnnnnnnnnnnnnncnnnnngnnnnnngatncaggggttaatggnatcncanaaatgatattctgcaagaatttcttttaaataaaaagtttgggggtgcaatataagaagtttatataatatgcagtacattatccaaaagagaaggtagttaatgcagtagaaagtagtggtaataattcctttttaaaaaaatttcggtagtcatatagtaacattttgctatatgaaaactttggtatattctgtggttacaactaagattgtgtctggcagctcttttttggggatgtgtgtgtgtgatttttaacagaggtattaaaggctagcctaactgttgtctaaaaagattgtacagtatttaagggattttccttttagcttttcatctccagtggcattaaacataaaaagaccctggcatnnnnnnnnnnnnnnnnntccctaaatgcacctgtctttcactttttgagacagactgaatatatctaaaatttccagcaataaaaaaaaaagcatttaacttgcaccaagcaag

SEQ ID NO: 1442 - DNA, 563 bp, Homo sapiens
  misc_feature (31)..(31): n includes a, c, g, or t, or contains no nucleotide
  misc_feature (54)..(54): n includes a, c, g, or t, or contains no nucleotide
  misc_feature (126)..(126): n includes a, c, g, or t, or contains no nucleotide
  misc_feature (435)..(475): n includes a, c, g, or t, or contains no nucleotide
gccatactatacaggggtcccgggcctcccnagcaccttccagtatgggcctgntgtgttccctgtggctcctacctcttccaagcagcatggtgtgaatgtcagtgtgaatgcatcggccacccntttccaacagccgagtggatatgggtctcatggatacaacactggaagaaaatatccacccccttacaagcatttctggacggctgagagctaatttggcccaaggctgggggctgtgttttgtgtgtgtgtataaatttgcactgaagtcttgtttcagaaaccagaccactgaggagagcctgctgagctgaggccatggcctgcgtggcttggggaaatgagttggtggataccttctgggcttttgaacttgcccctcccccatttccctctcccccatgtgtctgaccctgtcttacccatttnnnnnnnnnnnnnnnnnnnnnnnnnnnnnnnnnnnnnnnnncacctgctgttgcttttgatttctggaaggcatgtagtttcaacttgtaacaaaaatatttgtagtcttcaataaactgtggtatttc

SEQ ID NO: 1443 - DNA, 341 bp, Homo sapiens
  misc_feature (37)..(37): n includes a, c, g, or t, or contains no nucleotide
  misc_feature (48)..(48): n includes a, c, g, or t, or contains no nucleotide
  misc_feature (67)..(67): n includes a, c, g, or t, or contains no nucleotide
  misc_feature (113)..(113): n includes a, c, g, or t, or contains no nucleotide
  misc_feature (119)..(119): n includes a, c, g, or t, or contains no nucleotide
  misc_feature (127)..(127): n includes a, c, g, or t, or contains no nucleotide
  misc_feature (148)..(148): n includes a, c, g, or t, or contains no nucleotide
  misc_feature (162)..(162): n includes a, c, g, or t, or contains no nucleotide
  misc_feature (177)..(177): n includes a, c, g, or t, or contains no nucleotide
  misc_feature (179)..(179): n includes a, c, g, or t, or contains no nucleotide
  misc_feature (183)..(183): n includes a, c, g, or t, or contains no nucleotide
  misc_feature (198)..(199): n includes a, c, g, or t, or contains no nucleotide
  misc_feature (207)..(207): n includes a, c, g, or t, or contains no nucleotide
  misc_feature (222)..(222): n includes a, c, g, or t, or contains no nucleotide
  misc_feature (227)..(227): n includes a, c, g, or t, or contains no nucleotide
gtggccctgcacaggcccgatgtctacttgctgccanccagcccgggnagcagctgaacctgcgggnagtcggccaccatcacgtgcctggtgacgggcttctctcccgcggnacgtcnttcgtgcnagtggatgcagagggggcagncccttgtccccggnagaagtatgtgaccnangcgnccccaatgcctgagnnccccaggnccccaggccggtacnttcgncccacagcatcctgaccgtgtccgaagaggaatggaacacgggggagacctacacctgcgtggtggcccatgaggccctgcccaacagggtcaccgagaggaccgtggacaagt

SEQ ID NO: 1444 - DNA, 493 bp, Homo sapiens
  misc_feature (287)..(340): n includes a, c, g, or t, or contains no nucleotide
tactgtgacatactcgagtataaagacatgtagcaataacggggagtggggggggagtctcacagtgcctttggaagggcccgaacttgccttaaatcttcctcaaccaaataagtattttattagtgcttgagagaatctgaatgtaggatgggttcaactgcacaaaaggaaaagatttttaccactttttttatatagatataaagtgaagcaaccgccttagtgctgaaatatgtagtacatgaatatgccttgtttaattacagaaaattccaaaacttgtnnnnnnnnnnnnnnnnnnnnnnnnnnnnnnnnnnnnnnnnnnnnnnnnnnnnnnagcagatgaatgagcggtagctttagtttgtacgtaggtacagttggagcactatatgtactctctggactactttggacagaagtaggtttttgaatgtaacaagataagtcaacttgagttgtaatatattttggggaatcagctcactac

SEQ ID NO: 1445 - DNA, 591 bp, Homo sapiens
  misc_feature (60)..(84): n includes a, c, g, or t, or contains no nucleotide
  misc_feature (122)..(146): n includes a, c, g, or t, or contains no nucleotide
  misc_feature (182)..(200): n includes a, c, g, or t, or contains no nucleotide
  misc_feature (453)..(478): n includes a, c, g, or t, or contains no nucleotide
  misc_feature (495)..(536): n includes a, c, g, or t, or contains no nucleotide
  misc_feature (540)..(554): n includes a, c, g, or t, or contains no nucleotide
ctggagagccagtgcccatggcccgctgcgtctccacagggggtcgcccgccagcccaannnnnnnnnnnnnnnnnnnnnnnnnggatgcccaatacgagccaggtgccagggttcctgtcnnnnnnnnnnnnnnnnnnnnnnnnntggatattggtgccctcaagccaggtggacggcaannnnnnnnnnnnnnnnnnngagcacgagagctttgagaagcctcagctgctgactgtgaacctcaccgtgtactaccccccagaggtatccatctctggctatgataacaactggtaccttggccagaatgaggccaccctgacctgcgatgctcgcagcaacccagagcccacaggctataattggagcacgaccatgggtcccctgccaccctttgctgtggcccagggcgcccagctcctgatccgtcctgtggacaaaccaatcaacnnnnnnnnnnnnnnnnnnnnnnnnnntgccctaggagctcgcnnnnnnnnnnnnnnnnnnnnnnnnnnnnnnnnnnnnnnnnnnagcnnnnnnnnnnnnnnncatgtctcctattcagctgtgagcagagagaacagct

SEQ ID NO: 1446 - DNA, 520 bp, Homo sapiens
  misc_feature (26)..(36): n includes a, c, g, or t, or contains no nucleotide
  misc_feature (38)..(42): n includes a, c, g, or t, or contains no nucleotide
  misc_feature (44)..(44): n includes a, c, g, or t, or contains no nucleotide
  misc_feature (54)..(54): n includes a, c, g, or t, or contains no nucleotide
  misc_feature (121)..(121): n includes a, c, g, or t, or contains no nucleotide
  misc_feature (125)..(125): n includes a, c, g, or t, or contains no nucleotide
  misc_feature (141)..(141): n includes a, c, g, or t, or contains no nucleotide
  misc_feature (155)..(155): n includes a, c, g, or t, or contains no nucleotide
  misc_feature (169)..(169): n includes a, c, g, or t, or contains no nucleotide
gtgataagccgtcaagcattgctgannnnnnnnnnntnnnnngncccacaagcntccgcggattcagcatgcacagcatcgggccacagagcgaaggagactacctaggtggagaagcgtnactngggccggcggcctgcnacctctacaccccnattacctttccggnccaggccagggtggctttggagaacttttccgaacacacttctttctcaacgcaggaaacctctgcaacctcaactatggggagggccccaaagctcatattcgtaagctggctgagtgcatccgctggtcgtacggggccgggattgtcctcaggcttggcaacatcgctcggttggaacttaattactgcgtccccatgggagtacagacaggcgacaggatatgtgatggcgtccagtttggagctgggataaggttcctgtagccgacacccctacaggagaagctctgggactggggcagcagcaaggcgcccatgccacacaccgtctctcgaggaaacgcggtt

SEQ ID NO: 1447 - DNA, 155 bp, Homo sapiens
  misc_feature (62)..(88): n includes a, c, g, or t, or contains no nucleotide
aatagttaggtctttctctccaggaaacctaacttgtcattcagcggttaccatgcatgggnnnnnnnnnnnnnnnnnnnnnnnnnnncagactttcatgtttgagcattcagattgggctttatttctcaaggcatgtggcaaacctcacaatg

SEQ ID NO: 1448 - DNA, 292 bp, Homo sapiens
  misc_feature (73)..(73): n includes a, c, g, or t, or contains no nucleotide
  misc_feature (225)..(225): n includes a, c, g, or t, or contains no nucleotide
ccacagtgacagagattggcaaagatgtgattggtttaaggatcagtcctctgcagtttcgctaaggcccccntttgtgtgcatgggtcagtcaccatatgttccccccagagaatgtgtctatatcctccttctaacagcaccttccccctgcagctactcttcagatctggctctctgtaccctaaaacctagtatctttttctcttctatggaaaatccganggtctaaacttgacttttttgaggtcttctcaacttgactacagttgtgctcataattgtccttgcc

SEQ ID NO: 1449 - DNA, 604 bp, Homo sapiens
  misc_feature (228)..(247): n includes a, c, g, or t, or contains no nucleotide
  misc_feature (495)..(498): n includes a, c, g, or t, or contains no nucleotide
  misc_feature (500)..(501): n includes a, c, g, or t, or contains no nucleotide
ccatagcacttgtaaatcaggaattaataattgaatcagatttaagggctctgtcctgttatacatatttaaggcagaaaaaaagttacatgtcgattaggtacttatcaagaatggtcaagctgagattttggttaatagagtaagcttacatatctagagaaacaacatagtggaaaaccgaaaaaaaaaaacagaaaaatctaccggtaatttcccaatagcttnnnnnnnnnnnnnnnnnnnnttattacttgagagaaagactggaagacctgaaagccacttctgctttctaaccccagttccttaaatattgaaatcttgtacattttgtgaaattccagtatgttttgcttaaggtgttaataaaattagtttgcatcatgtagtcattgagtgagggggagatataagccaaggattttaaattgacccttagctatagagaatttgctataagctagtcttgtttgtaaaaaaaaaaaaaaaaannnnanngaaaaaagtgtattttactgttttctgtattaagtaattctgataacgcatggcagtcttttttttcttaaataaatatagttgttactggtcctgttgtagc

SEQ ID NO: 1450 - DNA, 513 bp, Homo sapiens
  misc_feature (87)..(87): n includes a, c, g, or t, or contains no nucleotide
  misc_feature (90)..(90): n includes a, c, g, or t, or contains no nucleotide
  misc_feature (93)..(95): n includes a, c, g, or t, or contains no nucleotide
  misc_feature (98)..(99): n includes a, c, g, or t, or contains no nucleotide
  misc_feature (101)..(103): n includes a, c, g, or t, or contains no nucleotide
  misc_feature (106)..(109): n includes a, c, g, or t, or contains no nucleotide
  misc_feature (111)..(111): n includes a, c, g, or t, or contains no nucleotide
  misc_feature (127)..(144): n includes a, c, g, or t, or contains no nucleotide
cacctgggcattttcaaagaggacattttgaagaatttgcatattcagatttttaaaatgcacttaacatacttcattacagatttnttnggnnnggnngnnnggnnnngnccagggatgggatggnnnnnnnnnnnnnnnnnnaactaatccgaatcatttacctttctgtattaaccttggcctgtcctaaaaagagaacgactgtttcatcatgagttgctctgagttttgttaatgtttgtgttggtggattgacggttaaatgaagcatttagctggaatatgaactttgggagttttcatgttgtcctggatttctctttgtaaacctttaaaccttagcccctggttgattgtgttaaacccattatgagaatgttatttaaagttgtattataattgcaacctccactaattattcagtactgtagcagcaaagtattatttgtaagaatttggttatttttatacttatatccactctaagtctggcgttctagtcagtaaaat

SEQ ID NO: 1451 - DNA, 457 bp, Homo sapiens
  misc_feature (60)..(60): n includes a, c, g, or t, or contains no nucleotide
  misc_feature (66)..(66): n includes a, c, g, or t, or contains no nucleotide
agtccaatcatagtacagtgatgtggtggtagatgctatgaatttcttcattgtaaaatncggatncatttgtattttggggtgataaaatagttcaccatgggtatgagatatttattctttaaatcaaagtaaattagaatttttaaaaagcacaaaactgcaggacagtttatgaaataggtggcactattagggaatcttcctttaaagcaagaaatcatgttatttagaaagaaaaactaatcttaaacatactatttctaataaatatttatatttttatgaaataaagaggtatgtggaaattaatatttggtgatgttggacagtggaaaagtatctagagtttttacctgccttatctgaattcttcttgaaacttgagcttaaactctaatagctgtttccctttctattctgaacaactgtctccatttttcaagtgtgagagata

SEQ ID NO: 1452 - DNA, 225 bp, Homo sapiens
gataagaagcctctacagcacccctgccccctaatttatacagaaaccggacccactaatcctctgggattggccgactgtgagctgcagataaggctatcagccaccaaagagcaatgaacaatggaaacttcagagagctgaagaaagggggaggcctgtgttcttggcctgcccctgagtcttctggctgggggcaggttgcctgggcaagaactgcttctt

SEQ ID NO: 1453 - DNA, 585 bp, Homo sapiens
ttgatttgccaaatgaacaagcaagattagacatactgaaaatccatgcaggtcccattacaaagcatggtgaaatagattatgaagcaattgtgaagctttcggatggctttaatggagcagatctgagaaatgtttgtactgaagcaggtatgttcgcaattcgtgctgatcatgattttgtagtacaggaagacttcatgaaagcagtcagaaaagtggctgattctaagaagctggagtctaaattggactacaaacctgtgtaatttactgtaagatttttgatggctgcatgacagatgttggcttattgtaaaaataaagttaaagaaaataatgtatgtattggcaatgatgtcattaaaagtatatgaataaaaatatgagtaacatcataaaaattagtaattcaacttttaagatacagaagaaatttgtatgtttgttaaagttgcatttattgcagcaagttacaaagggaaagtgttgaagcttttcatatttgctgcgtgagcattttgtaaaatattgaaagtggtttgagatagtggtataagaaagcatttcttatgacttattttg

SEQ ID NO: 1454 - DNA, 466 bp, Homo sapiens
  misc_feature (56)..(56): n includes a, c, g, or t, or contains no nucleotide
  misc_feature (125)..(125): n includes a, c, g, or t, or contains no nucleotide
  misc_feature (135)..(135): n includes a, c, g, or t, or contains no nucleotide
  misc_feature (138)..(138): n includes a, c, g, or t, or contains no nucleotide
  misc_feature (142)..(142): n includes a, c, g, or t, or contains no nucleotide
  misc_feature (144)..(163): n includes a, c, g, or t, or contains no nucleotide
  misc_feature (213)..(213): n includes a, c, g, or t, or contains no nucleotide
  misc_feature (265)..(284): n includes a, c, g, or t, or contains no nucleotide
gatatgtcacttctgttcctccctgcttgcattttttaaaaactagacattgtggncttgagaatttatcaatcatctttccgaaatgaccacattgtgcttttagtttgtatgtttaagtggtncaagcaaggnctnctangnnnnnnnnnnnnnnnnnnnnccttaaacacatctgcaggagctcacaaaatgggagcaaaagaggcattnccagaaagaagagtagttaagcagatgtgggggcagggcaagaggagacagnnnnnnnnnnnnnnnnnnnntacacaaaggtgtgatggacactgatgctctattaagaagcttttgtggtgtgtgtggtagagaataattaaggcttctgataagacaggaaagggatatttcatcatgactgttaagaaaaggtaactgggttgtttaatgttttaattgataattgtcactgatcgtatttctacttgtt

SEQ ID NO: 1455 - DNA, 565 bp, Homo sapiens
ttaacacagcagctgacttctctaggcaaggaaaactcccctcagacgctttgctgcctggcctcctgccagcaacaagcaggagctgaaaactagaagctgaggcatgagtttggtcactccgtagtgtgcacttggtgagggcagcagctggccacagctgccagccgtctgtccattcgcccatctgtccatctggcagcccgctgttcagacctgtctgtctgtccgcccatctgtaagcccatctctgtcccattgtctatctgaccatctttctcttactgtcctctttgtctagctatctggcctgtctgtcgatccatcttcgtgtctgtcttcagcccccacctgtttgtccatctgtccaattacctgtgagtctatctatgcatcttcttgtccattcatctgcccacccatctgtccctccgtctgcccaccggcctcccctctccttctgggccgcagagccacggcccaggactgcagagccatggttggcctggtcctgctggggctggggctggcgctggctgtcattgtgctggctgtggtcctctct

SEQ ID NO: 1456 - DNA, 534 bp, Homo sapiens
  misc_feature (256)..(256): n includes a, c, g, or t, or contains no nucleotide
  misc_feature (320)..(320): n includes a, c, g, or t, or contains no nucleotide
  misc_feature (338)..(340): n includes a, c, g, or t, or contains no nucleotide
  misc_feature (342)..(342): n includes a, c, g, or t, or contains no nucleotide
  misc_feature (346)..(346): n includes a, c, g, or t, or contains no nucleotide
  misc_feature (351)..(359): n includes a, c, g, or t, or contains no nucleotide
  misc_feature (361)..(361): n includes a, c, g, or t, or contains no nucleotide
agaaccagcacaaatgagtggcagttgctggagcataactgcttcaataaatcttcatcttggggtaattacaggcaagtcattttcacatcctcttgaggttcagagcatcagaatgaactctatgaatacatgtgtaagtgccagacagctgaatctttatcaggtattgtaaagatacacatatgatatgtttattaaaattgaaataatgtaaaacacatgaataaatttgcaaaaccaagatcacagtacnccatatgcactctggtaccttaatttttttttataaataataaaagtgaatattgaagcttctnaaaaaaaaaaaaaaaaannnanaaanaaaannnnnnnnnanaacagaaataatacattaaatacatagacaaaaaaagttaaacataagataatctattttacagtgtttcttataggcttacaattatttgaatgtatttccagttcttgtatgattaacttttgtgcatatctaactttttattatttttatctttggctactgcacgtgca

SEQ ID NO: 1457 - DNA, 480 bp, Homo sapiens
  misc_feature (314)..(328): n includes a, c, g, or t, or contains no nucleotide
agcaggatggctggaacactgtactgaggaatgaatagaaaggcttccagatgtctaaaagattctttaaactactgaactgttacctaggttaacaaccctgttgagtatttgctgtttgtccagttcaggaatttttgttttgttttgtctatatgtgcggcttttcagaagaaatttaatcagtgtgacagaaaaaaaaatgttttatggtagcttttactttttatgaaaaaaaaattatttgccttttaaattcttttcccccatccccctccaaagtcttgatagcaagcgttattttgggggtagannnnnnnnnnnnnnnagcctctttgtgtttttgttgttgttgttgttgttgttttatataatgcatgtattcactaaaataaaatttaaaaaactcctgtcttgctagacaaggttgctgttgtgcagtgtgcctgtcactactggtctgtactccttggatttgca

SEQ ID NO: 1458 - DNA, 295 bp, Homo sapiens
aaacgacgacagcccagaaataatcatcacgtcactctctgatcagattatggaggattcccctccaggagtggttgttgccctcttcaaaacacgggaccaagactcaggggaaaatggggaagtcaggtgtagcttaagtagaggtgttccatttaagattcattcttcttctaataattactacaagctagtaacagatgaggccctgggtcgggagcagaccccagagtacaacgtcaccatcgtagccacagacaggggcaagcctccgttattcttcagcaaaaccata

SEQ ID NO: 1459 - DNA, 281 bp, Homo sapiens
  misc_feature (208)..(209): n includes a, c, g, or t, or contains no nucleotide
  misc_feature (211)..(216): n includes a, c, g, or t, or contains no nucleotide
  misc_feature (218)..(223): n includes a, c, g, or t, or contains no nucleotide
  misc_feature (226)..(226): n includes a, c, g, or t, or contains no nucleotide
  misc_feature (228)..(234): n includes a, c, g, or t, or contains no nucleotide
  misc_feature (240)..(240): n includes a, c, g, or t, or contains no nucleotide
  misc_feature (253)..(253): n includes a, c, g, or t, or contains no nucleotide
tgaggacccttcagagccaccctttctagtttgcatttcctggtgcacacatttaaggcataacagcacattcatccctttggtttgggatctcaggaatacagtcccatgcaaagattctctggttttatggcttttttccctttctttacaccatcctctcccataagcacccatgtctttgaatatgaatgtatttgtaaaatannannnnnnannnnnnaanannnnnnnttactngtacatagtgctnattgtgcaataggtcttatgctgttttc

SEQ ID NO: 1460 - DNA, 547 bp, Homo sapiens
atggtcctcttaccaacatctggtcttccaggcactcaaaagctgggaaccacgatctcagcgccacgtctaccagttctcgttttgggccagaggcagcctctgcactcccacgcctgtcctcctggaagggacctggttggactaacggctaacctggacctggaactgtagggccaggggattgtctcagggccgacgttccacctggggcttccctccccacccacccccactccaggctttcccttttttcttttgttcaacattgtaagaacaatcaatgctgttattactgttcccaccatgattgatgtggggtaaatattaaggagatggcctcatgggaatttgaccttgactagaaatagagactgagagtgagcaaccagctggaaggtactatgccagtcctagcagaaaaatgtgttaggcctggcccaaagcagtgttggttgcttacagtgttgattgattttgttcttttttcttaccacctcttttctttccctctcatggtacctgctcatggttatgaagctttcaa

SEQ ID NO: 1461 - DNA, 202 bp, Homo sapiens
  misc_feature (66)..(84): n includes a, c, g, or t, or contains no nucleotide
gaacccacatcttcgatcttgggcttttcttcatcatctttatcttcctcttctttctcacctttnnnnnnnnnnnnnnnnnnntcactaatttccttctctcgttccttctccaaataaagggtgatgggatagcctatgaactgagaatgcttcttcactacttcttggacccgcctctcttctaggtactctgtctgat

SEQ ID NO: 1462 - DNA, 476 bp, Homo sapiens
  misc_feature (95)..(95): n includes a, c, g, or t, or contains no nucleotide
  misc_feature (105)..(140): n includes a, c, g, or t, or contains no nucleotide
  misc_feature (145)..(145): n includes a, c, g, or t, or contains no nucleotide
cccattttgatattttgctgtaggtggccagttttgtttctcatagggaaatctgacccacctgtcatgttggctcctaaggaactgctgttgtnaagcggctcnnnnnnnnnnnnnnnnnnnnnnnnnnnnnnnnnnnnggaantatggaaaaggaagaaagccacaggactgcccattcagtcttgggaagattgggatgattctgcacaagcaaaaatgactgaagtttatgtatagacacacctctaccaatccatcttcagctgactgaatgttgtatgatagcccttctccaaagcagaggtagaatgttcaggtttcaccatggattttctacttatttcgtttttggaatcaccttacagattccaggtcccttttgtatatattctttattcttttgcttttttaaaaaataattttgtttcatatttaaagcacttgtattagtcaatgtttcgtgttccgcatta

SEQ ID NO: 1463 - DNA, 587 bp, Homo sapiens
  misc_feature (302)..(316): n includes a, c, g, or t, or contains no nucleotide
  misc_feature (412)..(439): n includes a, c, g, or t, or contains no nucleotide
ggtctttacccacagcgcaaacacaatgcccaccttggggctctgttgtttgagttgcccacatactgcagttattctgttaggaatgattccctgggtgcctgaaagtgctctgacacgacacttgttactttgcaggccatctgtgatggcaaggaaaaagcaactatgttcacagtgaaatattcgtggaataggttaggccatttcagtagacattgcagttagttagcaagaaccacattgtctctttatttgttagcattaaacaaatttttttttgcaaattggttttatttttnnnnnnnnnnnnnnnaactctgtccaaaaaggtttagtttgtactcggaaaccacaaagtagtctcaaagtattttagagggaatcgatattgatggcaaaagaaaatttnnnnnnnnnnnnnnnnnnnnnnnnnnnnccctctctgtgaaacattatttttggtgatctaaagaaagcattgcctttcttatttgagattttacagctatactttgttgtgtaatgttatggttccctttctgtaaaatgttatttttggtgatctaaataaagcctgtcttgtt

SEQ ID NO: 1464 - DNA, 541 bp, Homo sapiens
  misc_feature (114)..(139): n includes a, c, g, or t, or contains no nucleotide
  misc_feature (197)..(197): n includes a, c, g, or t, or contains no nucleotide
  misc_feature (271)..(272): n includes a, c, g, or t, or contains no nucleotide
  misc_feature (306)..(350): n includes a, c, g, or t, or contains no nucleotide
gacacctacctggatacacaggtggtgggacagacaggtgtcatccgcagtgtcacggggggcatgtgctctgtgtacctgaaggacagtgagaaggttgtcagcatttccagnnnnnnnnnnnnnnnnnnnnnnnnnnccaagaacaacaaggtgaaagtgatcctgggcgaggatcgggaagccacgggcgtccntactgagcattgatggtgaggatggcattgtccgtatggaccttgatgagcagctcaagatcctcaacctccgnnttcctggggaagctcctggaagcctgaagcaggnnnnnnnnnnnnnnnnnnnnnnnnnnnnnnnnnnnnnnnnnnnnnccctggcccttggctgtgacacaagatcctcctgcagggctaggcggattgttctggatttccttttgtttttccttttagttttccatcttttccctccctggtgctcattggaatctgagtagagtctgggggagggtccccaccttcctgtacctcctccccacagcttgcttttgttgtaccgtctt

SEQ ID NO: 1465 - DNA, 552 bp, Homo sapiens
  misc_feature (26)..(27): n includes a, c, g, or t, or contains no nucleotide
  misc_feature (38)..(50): n includes a, c, g, or t, or contains no nucleotide
  misc_feature (67)..(83): n includes a, c, g, or t, or contains no nucleotide
  misc_feature (437)..(497): n includes a, c, g, or t, or contains no nucleotide
gtgtgtccttctccatctacacggcnnggggcgagcannnnnnnnnnnnncatgaaactcgacgcgnnnnnnnnnnnnnnnnnggggccctgggcggcctcttgctgctgggggtcgggacgttcgtggtcctgcgcttctggggttgctccggggccaggttctcctatttcctgaactcagctgaggccttgccttgaaggggcagctgtggcctaggctacctcaagactcacctcatccttaccgcacatttaaggcgccattgcttttgggagactggaaaagggaaggtgactgaaggctgtcaggattcttcaaggagaatgaatactgggaatcaagacaagactataccttatccataggcgcaggtgcacagggggaggccataaagatcaaacatgcatggatgggtcctcacgcagacacacccnnnnnnnnnnnnnnnnnnnnnnnnnnnnnnnnnnnnnnnnnnnnnnnnnnnnnnnnnnnnnatgtggtgatggccctaagttaagcaaaatgcttctgcacacaaaactctctggt

SEQ ID NO: 1466 - DNA, 525 bp, Homo sapiens
  misc_feature (36)..(36): n includes a, c, g, or t, or contains no nucleotide
  misc_feature (62)..(62): n includes a, c, g, or t, or contains no nucleotide
  misc_feature (82)..(82): n includes a, c, g, or t, or contains no nucleotide
  misc_feature (111)..(111): n includes a, c, g, or t, or contains no nucleotide
  misc_feature (114)..(114): n includes a, c, g, or t, or contains no nucleotide
  misc_feature (122)..(122): n includes a, c, g, or t, or contains no nucleotide
  misc_feature (142)..(142): n includes a, c, g, or t, or contains no nucleotide
  misc_feature (144)..(144): n includes a, c, g, or t, or contains no nucleotide
  misc_feature (150)..(150): n includes a, c, g, or t, or contains no nucleotide
  misc_feature (178)..(178): n includes a, c, g, or t, or contains no nucleotide
  misc_feature (180)..(181): n includes a, c, g, or t, or contains no nucleotide
  misc_feature (183)..(184): n includes a, c, g, or t, or contains no nucleotide
  misc_feature (186)..(187): n includes a, c, g, or t, or contains no nucleotide
  misc_feature (280)..(285): n includes a, c, g, or t, or contains no nucleotide
  misc_feature (292)..(292): n includes a, c, g, or t, or contains no nucleotide
  misc_feature (294)..(294): n includes a, c, g, or t, or contains no nucleotide
  misc_feature (301)..(301): n includes a, c, g, or t, or contains no nucleotide
  misc_feature (307)..(307): n includes a, c, g, or t, or contains no nucleotide
  misc_feature (344)..(344): n includes a, c, g, or t, or contains no nucleotide
  misc_feature (362)..(367): n includes a, c, g, or t, or contains no nucleotide
  misc_feature (369)..(370): n includes a, c, g, or t, or contains no nucleotide
  misc_feature (380)..(384): n includes a, c, g, or t, or contains no nucleotide
  misc_feature (387)..(422): n includes a, c, g, or t, or contains no nucleotide
  misc_feature (428)..(428): n includes a, c, g, or t, or contains no nucleotide
  misc_feature (430)..(434): n includes a, c, g, or t, or contains no nucleotide
  misc_feature (488)..(488): n includes a, c, g, or t, or contains no nucleotide
  misc_feature (500)..(500): n includes a, c, g, or t, or contains no nucleotide
ccatatactctcctatcctcaatacctccctctacnacccattattctgttctggatctcanacatgctttctttactattnctttgcacccttcatcccagcctctcttngcnttcacttngactgaccctgacacccatnangctcancaaattacctgggctgcactgccacaangnntnnanngacagcccccattacttcagtgaagcccaaatttcatcctcatctgttagtcatactcccgttcaccgttctcaactactcatacatgccctnnnnnncttcttnanactgccnggtttncactgtttctccaagacatcacagctgatatctcctnggtgctatccccaaactnnnnnncnnaaactcttgnnnnnaannnnnnnnnnnnnnnnnnnnnnnnnnnnnnnnnnnnccttangnnnnncttctaatcaggatatccctaagggcgtcccaatttcttaagaccttttaatanccctggttttcntccttcctggttaattccaattaag

SEQ ID NO: 1467 - DNA, 466 bp, Homo sapiens
  misc_feature (207)..(225): n includes a, c, g, or t, or contains no nucleotide
acgccgtctactggaaccgcagcaaccccaggttccacgcaggcgcgggggacgacggcgggggctacacggtggaggtgagcatcaatgactacctggacatctactgcccgcactatggggcgccgctgccgccggccgagcgcatggagcactacgtgctgtacatggtcaacggcgagggccacgcctcctgcgaccaccgcnnnnnnnnnnnnnnnnnnngggagtgcaaccggcccgcggcgcccggggggccgctcaagttctcggagaagttccagctcttcacgcccttctccctgggcttcgagttccggcccggccacgagtattactacatctctgccacgcctcccaatgctgtggaccggccctgcctgcgactgaaggtgtacgtgcggccgaccaacgagaccctgtacgaggctcctgagcccatcttcaccagcaataactcgtgtag

SEQ ID NO: 1468 - DNA, 584 bp, Homo sapiens
  misc_feature (224)..(229): n includes a, c, g, or t, or contains no nucleotide
  misc_feature (232)..(232): n includes a, c, g, or t, or contains no nucleotide
  misc_feature (234)..(235): n includes a, c, g, or t, or contains no nucleotide
  misc_feature (237)..(241): n includes a, c, g, or t, or contains no nucleotide
  misc_feature (249)..(250): n includes a, c, g, or t, or contains no nucleotide
  misc_feature (278)..(301): n includes a, c, g, or t, or contains no nucleotide
  misc_feature (327)..(328): n includes a, c, g, or t, or contains no nucleotide
  misc_feature (355)..(356): n includes a, c, g, or t, or contains no nucleotide
gctagaaatccagtagcatgatttttaaataacctgtctttgtttttgatgttaaacagtaaatgccagtagtgaccaagaacacagtgattatatacactatactggagggatttcatttttaattcatctttatgaagatttagaactcattccttgtgtttaaagggaatgtttaattgagaaataaacatttgtgtacaaaatgctaaaaaaaaaaaaannnnnnaanannannnnnaaaatgcnnaactttgataaagtattggtttatgtgnnnnnnnnnnnnnnnnnnnnnnnnctgtcacatggtttatagaaagtagnnagctgaataaaaactatataaagtganngcatctttgtcaaaattccattgttgtgttaataatgacagcaagaagagtagcctcaggggatgttcccctcaaactagcacaaccattccatcatcgtagaaaagtagcacttttgctaaactgtcttgaatattttgtacttacatagcgcctttcatctcttgatttctcaaaatgctttatgaacacatttaaagaaagtggtttaagtcttgtcccaacact

SEQ ID NO: 1469 - DNA, 454 bp, Homo sapiens
  misc_feature (240)..(266): n includes a, c, g, or t, or contains no nucleotide
  misc_feature (284)..(337): n includes a, c, g, or t, or contains no nucleotide
  misc_feature (376)..(380): n includes a, c, g, or t, or contains no nucleotide
  misc_feature (399)..(399): n includes a, c, g, or t, or contains no nucleotide
  misc_feature (422)..(422): n includes a, c, g, or t, or contains no nucleotide
gctgccgccaaggtgctcggtccttccgaggaagctaaggctgcgttggggtgaggccctcacttcatccggcgactagcaccgcgtccggcagcgccagccctacactcgcccgcgccatggcctctgtctccgagctcgcctgcatctactcggccctcattctgcacgacgatgaggtgacagtcacggaggataagatcaatgccctcattaaagcagccggtgtaaatgttgagnnnnnnnnnnnnnnnnnnnnnnnnnnngccctggccaacgtcaannnnnnnnnnnnnnnnnnnnnnnnnnnnnnnnnnnnnnnnnnnnnnnnnnnnnntgctgcaccagcaggaggtcctgccccctccactgctgnnnnnccagctgaggagaagaaantggaagcaaagaaagaagaatcngaggagtctgatgatgacatgggctttggtct

SEQ ID NO: 1470 - DNA, 304 bp, Homo sapiens
  misc_feature (115)..(115): n includes a, c, g, or t, or contains no nucleotide
tggtacatttcaaaacttctaggtcctccaaagattgaaagcttaataatctcctacctaaaaagataaaattaattgcaatctaccatatcttaagtataggaaatttggtgtnccaacctggagatgattatatatttgaaatatttcctagagaatagtaaccaggttttgtttttaactttaaaacctaattacttttgtgcctctcagccgttgattgtaactttaaagtcccatggttttggagtgttattaatagattttgttatcggtgggcatgcactgcaagaattaagtatct

SEQ ID NO: 1471 - DNA, 327 bp, Homo sapiens
accagccgggcctgaggttgaactggggtgaaccgatgcactggcacctagacatgtacaacaggaaccgtgtggatacatcccccacacctgtttcttggcatgtcatgtgtatgcagctcttcggtttcctggctttcatgatattcatgtgctgggtgggggacgtgtaccctgtctaccagcctgtgggaccaaagcagtatccttacaataatctgtacctggaacgaggcggtgatccctccaaagaaccagagcgggtggttcactatgagatctgaggaggcttcgtgggcttttgggtcctctaactaggactccctc

SEQ ID NO: 1472 - DNA, 389 bp, Homo sapiens
  misc_feature (82)..(131): n includes a, c, g, or t, or contains no nucleotide
  misc_feature (238)..(288): n includes a, c, g, or t, or contains no nucleotide
atggattgattcctgcctttattcttgtaataatagcttcttttacttcttttttcttcacacatcgaatacccaaattttnnnnnnnnnnnnnnnnnnnnnnnnnnnnnnnnnnnnnnnnnnnnnnnnnntctctgcagtcttttccaactaaatcatgaggatgaggtttatatgggtcattctttgttactaatgtaattctcacttttccttttccataatagttcataatctnnnnnnnnnnnnnnnnnnnnnnnnnnnnnnnnnnnnnnnnnnnnnnnnnnntgcctgctgatcgcccttcacatttgtatctaaaacgcattcccctctgcctgggttgttcaattatctctatatacgggttatacgcaccggaggccatg

SEQ ID NO: 1473 - DNA, 445 bp, Homo sapiens
cagaagcattgcctggactgaccacaccaaccagcttcatctatccgactcttctcttcctagatctgcaggctgcacctctggctagagccgaggggagagagggactcaagggaaaggcaagcttgaggccaagatggctgctgcctgctcatggccctcggaggtccagctgggcctcctgcctccgggcagcaaggtttacactgcggaacgcaaaggcagctaagatagaaagctggactgaccaaagactgcagaacccccaggtggccctgcgtcttttttctcttccctttcccagaccaggaaaggcttggctggtgtatgcacagggtgtggtatgagggggtggttattggactccaggcctgaccagggggcccgaacaggacttgttagagagcctgtcaccagagcttctctgggctgaatgtatgtcagt

SEQ ID NO: 1474 - DNA, 477 bp, Homo sapiens
  misc_feature (119)..(119): n includes a, c, g, or t, or contains no nucleotide
  misc_feature (197)..(234): n includes a, c, g, or t, or contains no nucleotide
  misc_feature (260)..(274): n includes a, c, g, or t, or contains no nucleotide
agaactcagtagaagcttcactatttactccagcgtgtgtaaattgtacttactctattctcagagtatatttactgtccttaccattgattctttccctttgctaatttttttttttngttaatggtagctgcgactttaggtggggtatattttcttctcctaagagaatagacagtttttccagattcatcatnnnnnnnnnnnnnnnnnnnnnnnnnnnnnnnnnnnnnnccctcaatgcagttgatggcctgtcnnnnnnnnnnnnnnnacttggcctgatgcccatgtaaattcaagctttggcttgtggtaacaaccacaagaagacaagcatctgtggtgcggaggcaagcaggctaactaggagttgacaagctaagaaagtgaaactgttctttcttagttaactgtctttctctggagctctgttattttgagtataatatttccacgacacttagtaaatgcaag

SEQ ID NO: 1475 - DNA, 487 bp, Homo sapiens
  misc_feature (38)..(52): n includes a, c, g, or t, or contains no nucleotide
ctttgtggggctgcaaaggacttttaagtcctgcctgnnnnnnnnnnnnnnncccacctgactgagcagactcttcctgttcctttctctaccacccttgccttcccaggactgcacggtttaacacagcagagtacagaagggtgaagaagtgagcagaggcttatgaagatattcagatactcttctatgccaggaagcacaaagactttgttgagatttgcctcagttcagtagatcttccttggcagccagccataggttgtttctttgtcttccgggtcctaaagagcacagagaaaatggaggtccccagtctaggtaggaagctgattggatgaggacttctttttttccgacagcaggatggggctcttgggctccacacaccagatgctttggttttctacaactgttgctatgtgtagagggtgctcagagcgtggcatgagagcaaggagaccatggctactctttgaaatggatg

SEQ ID NO: 1476 - DNA, 554 bp, Homo sapiens
  misc_feature (48)..(48): n includes a, c, g, or t, or contains no nucleotide
  misc_feature (58)..(58): n includes a, c, g, or t, or contains no nucleotide
  misc_feature (66)..(66): n includes a, c, g, or t, or contains no nucleotide
  misc_feature (70)..(70): n includes a, c, g, or t, or contains no nucleotide
  misc_feature (75)..(76): n includes a, c, g, or t, or contains no nucleotide
  misc_feature (82)..(82): n includes a, c, g, or t, or contains no nucleotide
  misc_feature (87)..(87): n includes a, c, g, or t, or contains no nucleotide
  misc_feature (111)..(111): n includes a, c, g, or t, or contains no nucleotide
  misc_feature (124)..(124): n includes a, c, g, or t, or contains no nucleotide
  misc_feature (134)..(134): n includes a, c, g, or t, or contains no nucleotide
  misc_feature (142)..(142): n includes a, c, g, or t, or contains no nucleotide
  misc_feature (158)..(158): n includes a, c, g, or t, or contains no nucleotide
  misc_feature (161)..(162): n includes a, c, g, or t, or contains no nucleotide
  misc_feature (168)..(168): n includes a, c, g, or t, or contains no nucleotide
  misc_feature (184)..(184): n includes a, c, g, or t, or contains no nucleotide
  misc_feature (188)..(188): n includes a, c, g, or t, or contains no nucleotide
  misc_feature (196)..(196): n includes a, c, g, or t, or contains no nucleotide
  misc_feature (208)..(208): n includes a, c, g, or t, or contains no nucleotide
  misc_feature (217)..(217): n includes a, c, g, or t, or contains no nucleotide
  misc_feature (336)..(336): n includes a, c, g, or t, or contains no nucleotide
  misc_feature (338)..(354): n includes a, c, g, or t, or contains no nucleotide
  misc_feature (417)..(453): n includes a, c, g, or t, or contains no nucleotide
tttaactcccctaatggtgtgtctataattgttaaatctaagtgcttncctctcagtnaaagcctncctnggcannccaggnccttncctgctcgactgaaaaaaattttnctctttgaaaatnccccttttanctcatggncccacagtagaatatnccnnaaaacngccttggctttcaggncctnggcctttncctacagggagnctcagtaancctggacggctctaaggctggaatgaccacataggtaggtatggtgagttcaaccatttttgctcttgaattgatgcccttcgatgtatgccatttagtgaaagtgctaagtcttaagntnnnnnnnnnnnnnnnnnttcatatttttggacttaacaaagttgtgaatagcacagtcgaggaaaattgatacctgcagnnnnnnnnnnnnnnnnnnnnnnnnnnnnnnnnnnnnnggtattgtgattatattgttttatattaaaaaagaaaagaaaagaattttttttaattttatttttccccgtcttgcaaagtatagtgacccctgtttcca

SEQ ID NO: 1477 - DNA, 420 bp, Homo sapiens
gtagcccacctgcatgaggacggccagtgttaacaatatttttgttctgatcttcttccccatttttgtttcctcaaacaggtttttaggagagtggagatttaaagtcaggatgtggcctttttattttaattatatacttaattcttagaacaagtagaatgggaaaggagtgactgataaatctaagattcaaaatagtcccgtcgaaacttaaaggccagattattgctttggagctttctataggtactagccatcccgtcgttaaatgttttcatggatatttgaaaagaagaccatgtacctttaataactgttcttttctcgagtttctgcctcgtgctttgacctggattgcattattattgtttatgcgaagtaaaaaaaaaaaaggaaagcacaagcttttcctgtata

SEQ ID NO: 1478 - DNA, 256 bp, Homo sapiens
tgaatctttgcacctgtggtttctctctttcctcatttaataattattatctgttgttttaccaactactcaatttctcttataagggactaaatatgtagtcatcctaaggcgcataaccatttataaaaatcatccttcattctattttaccctatcatcctctgcaagacagtcctccctcaaacccacaagccttctgtcctcacagtcccctgggccatggtaggagagacttgcttccttgttttcccct

SEQ ID NO: 1479 - DNA, 514 bp, Homo sapiens
  misc_feature (489)..(489): n includes a, c, g, or t, or contains no nucleotide
caccctgctttcgtacaaggaagggggacgatgggaaatcatggacttgtaagttgtatttaaacataaaaatgaacttggtaacttctgggtttagtagagcctcagtgtcgctttaacttagtttactttttttttatttttaaagcagcaatggatggttttaaaggagtattatgattgtaaaattgctaaatatgactgtaacacagctttgtggtagctgtgacacagttcacttgggcaaaggagtggtgatggactcgttaaaatcatatatacttgaatagtccattgaccgaaactctttatagactattgtgtaaatgtggaatcacagactgttaacattgcctggacttcagcagagtcctggagctgctgggacctctcctatcatgatgaacttggacttttttttttgatttctggttttaaaaaacataaaattatagaatccagataattcgctggagtcattctgatccnccatgtagatctgtatttagtatca

SEQ ID NO: 1480 - DNA, 557 bp, Homo sapiens
  misc_feature (99)..(138): n includes a, c, g, or t, or contains no nucleotide
tgccgtggaatatcgtgttattgctgggtggtggctatgccctggccaagggcagtgagcgatcgggcctgtcagagtggctgggaaacaagctgaccnnnnnnnnnnnnnnnnnnnnnnnnnnnnnnnnnnnnnnnntctccctcctggtggccaccttcaccgagtgcactagcaacgtggccaccactacgatcttcctgcccatcctagcctccatggcccaggccatctgcctccaccctctctacgtcatgctcccctgcactctggccacctccctggccttcatgttgcctgtggccaccccgcccaatgccatcgtcttctctttcggggacctcaaagtgttggatatggcccgggcaggattcctcctcaacatcattggagtcctgatcatcgcactggccatcaacagctggggcatccccctcttcagcctgcactctttcccctcctgggcacagtccaacaccacagcccagtgcctgccaagcctggccaacaccaccacaccaagcccctaggctggggcacagcctggccatgcccag

SEQ ID NO: 1481 - DNA, 325 bp, Homo sapiens
ccttgggtgctgctgctactcagactagctctaagtaatgtgattcttctaaagcaaagtcattggatgggaggaggaagaaaaagtcccataaaggaacttttgtagtcttatcaacatataatctaatcccttagcatcagctcctccctcagtggtacatgcgtcaagatttgtagcagtaataactgcaggtcacttgtatgtaatggatgtgaggtagccgaagtttggttcagtaagcagggaatacagtcgttccatcagagctggtctgcacactcacattatcttgctatcactgtaaccaactaatgccaaaaga

SEQ ID NO: 1482 - DNA, 52 bp, Homo sapiens
cgtgatcacacttaccgagcttactttgatctgtttgtcaatagcatgcaaa

SEQ ID NO: 1483 - DNA, 414 bp, Homo sapiens
  misc_feature (337)..(358): n includes a, c, g, or t, or contains no nucleotide
tttctggagctgtccggcctgagccaggccctcatccaaagtctcgccaatatccaccttccacacatggagccaatatgcgaacagaatttcgttccctatgtgagcaccctcaccgacatgtactccaaccaggccccggagaacaaggacctcctggagagcatcaagcaggctgtgaggggcatccaggtctaggccgtgtggtacccagaagtgtcccagcccaccacaccgtttacctccctcgccctgccccgcaccgtggggatgcccaactcacagtgacttcccgtttggggcccggtgtggcgcgggcgggtttatccaaagggannnnnnnnnnnnnnnnnnnnnnacgaggctccctccaggcttggccgtggtggccctatctgtgtgcataggggcact

SEQ ID NO: 1484 - DNA, 475 bp, Homo sapiens
tcaggcatgtgtcccttccaagctgtgttaactgttcaaactcaggcctgtgtgactccattggggtgagaggtgaaagcataacatgggtacagaggggacaacaatgaatcagaacagatgctgagccataggtctaaataggatcctggaggctgcctgctgtgctgggaggtataggggtcctgggggcaggccagggcagttgacaggtacttggagggctcagggcagtggcttctttccagtatggaaggatttcaacattttaatagttggttaggctaaactggtgcatactggcattggccttggtggggagcacagacacaggataggactccatttctttcttccattccttcatgtctaggataacttgctttcttctttcctttactcctggctcaagccctgaatttcttcttttcctgcaggggttgagagctttctgccttagcctaccatgtgaaac

SEQ ID NO: 1485 - DNA, 517 bp, Homo sapiens
tgttgctctatgagatgctctgtggtcacgcgccttttgaggcagagaatgaagatgacctctttgaggccatactgaatgatgaggtggtctaccctacctggctccatgaagatgccacagggatcctaaaatctttcatgaccaagaaccccaccatgcgcttgggcagcctgactcagggaggcgagcacgccatcttgagacatcctttttttaaggaaatcgactgggcccagctgaaccatcgccaaatagaaccgcctttcagacccagaatcaaatcccgagaagatgtcagtaattttgaccctgacttcataaaggaagagccagttttaactccaattgatgagggacatcttccaatgattaaccaggatgagtttagaaacttttcctatgtgtctccagaattgcaaccatagccttatggggagtgagagagagggcacgagaacccaaaggaatagagattctccaggaatttcctctatcggaccttcccagcatcagc

SEQ ID NO: 1486 - DNA, 525 bp, Homo sapiens
  misc_feature (97)..(97): n includes a, c, g, or t, or contains no nucleotide
  misc_feature (192)..(192): n includes a, c, g, or t, or contains no nucleotide
gtatacacagggaggccaggcagcctggagttagtcgaccgttgcgagacgttgagctgcggcagatgagtccaaagccgagagcctcgggacctcnggccaaggccaaggagacaggaaagaggaagtcctcctctcagccgagccccagtggcccgaagaagaagactaccaaggtggccgagaaggganaagcagttcgtggagggagacgcgggaagaaaggggctgcgacaaagatggcggccgtgacggcacctgaggcggagagcgggccagcggcacccggccccagcgaccagcccagccaggagctccctcagcacgagctgccgccggaggagccagtgagcgaggggacccagcacgaccccctgagtcaggagagcgagctggaggaaccactgagtaaggggcgcccatctactcccctatctccctgagcagcaactaagtttaggcccagctgccagacctcagagatctcaccagcagggtgcttcccatgttgatgacaataaaatg

SEQ ID NO: 1487 - DNA, 532 bp, Homo sapiens
  misc_feature (26)..(26): n includes a, c, g, or t, or contains no nucleotide
  misc_feature (28)..(28): n includes a, c, g, or t, or contains no nucleotide
  misc_feature (38)..(38): n includes a, c, g, or t, or contains no nucleotide
  misc_feature (62)..(62): n includes a, c, g, or t, or contains no nucleotide
  misc_feature (70)..(70): n includes a, c, g, or t, or contains no nucleotide
  misc_feature (87)..(87): n includes a, c, g, or t, or contains no nucleotide
  misc_feature (123)..(125): n includes a, c, g, or t, or contains no nucleotide
  misc_feature (179)..(246): n includes a, c, g, or t, or contains no nucleotide
  misc_feature (251)..(251): n includes a, c, g, or t, or contains no nucleotide
  misc_feature (329)..(329): n includes a, c, g, or t, or contains no nucleotide
  misc_feature (338)..(338): n includes a, c, g, or t, or contains no nucleotide
  misc_feature (391)..(391): n includes a, c, g, or t, or contains no nucleotide
  misc_feature (460)..(460): n includes a, c, g, or t, or contains no nucleotide
  misc_feature (465)..(465): n includes a, c, g, or t, or contains no nucleotide
  misc_feature (467)..(467): n includes a, c, g, or t, or contains no nucleotide
  misc_feature (469)..(475): n includes a, c, g, or t, or contains no nucleotide
  misc_feature (477)..(480): n includes a, c, g, or t, or contains no nucleotide
  misc_feature (482)..(482): n includes a, c, g, or t, or contains no nucleotide
  misc_feature (484)..(484): n includes a, c, g, or t, or contains no nucleotide
  misc_feature (507)..(507): n includes a, c, g, or t, or contains no nucleotide
agcacctattttctgtgcacatgggnantgctccactncctagcagagcagagggaagtctntgccaggntacccacgccacaggcntcaggatggctttttgtctgagggcctcattaggcnnngactgctgctgctggtaccagtctcctgagacactgcctccctggagcccatgnnnnnnnnnnnnnnnnnnnnnnnnnnnnnnnnnnnnnnnnnnnnnnnnnnnnnnnnnnnnnnnnnnnntgggnaggcttcacaacccctgctttcctgacttcctcttctgcccaacactgggtgccccttcccagtttcccagcaggggnttcatgggncaccgtcagtgggtctgggcctgccagagtcgtcttgctcttcctcttgcttntaggcaaccacacttggcaagttaaatgtcccaagcaccttgtctcccttcccaagaacaaaccatttntgtgnanannnnnnnannnnanangagctccttgcagagggccagantaagtgcaagtcatggagtgcaggc

SEQ ID NO: 1488 - DNA, 521 bp, Homo sapiens
  misc_feature (160)..(160): n includes a, c, g, or t, or contains no nucleotide
  misc_feature (343)..(365): n includes a, c, g, or t, or contains no nucleotide
gtagcctctaaccagcattcccagacacctgaggcagatagatggatgggctggtgggcaggggggtggctggggctgggccatcaccattccagagacaaggccagtgtatatgcaaactgggggactctcctcccttctctccccagttctggtcctngccaggccatgctacactaacccctgcccccactctcctcccctcttttccttccttcctacccccttctccctctcccttcccctgactgttccacccaggaggaggaaacttcacatagccgtgctcacagttttttattttaaaggaatttggctggggagctgaacagggctccctgtnnnnnnnnnnnnnnnnnnnnnnnttgtcctcacaaccacctcagtcctccctccctgtcctcccctgtctcctttcctcctcctgggttcatgttgtaataaaagaagattgttggtgtgtaattaatttgttcaaaagaaaaaaaaaagcaaaacaagaaacttggttccaactgaag

SEQ ID NO: 1489 - DNA, 279 bp, Homo sapiens
  misc_feature (147)..(161): n includes a, c, g, or t, or contains no nucleotide
  misc_feature (182)..(198): n includes a, c, g, or t, or contains no nucleotide
tccaaatctgagaaagggaggctagcatgtgttcaaggttagcacgcaacagaatttcctaaaatcagaagaattggaagatcctccccttttgaaatggccctgctgtgtcagtttccctgtggccttttgaactgtacatctcannnnnnnnnnnnnnntggccactgggaaatcattannnnnnnnnnnnnnnnntatttgccgagcctctactgtataccaggggctaactcaccaagcacattctaggaattgggccctgctcatgaggagcct

SEQ ID NO: 1490 - DNA, 232 bp, Homo sapiens
gggctttgagaacctgtgggccaccgcctccaccttcatcgtcctcttcctcctgagcctcttctacagtaccaccgtcaccttgttcaaggtgaaatgatcccaacagaagaacatcggagaccagagagaggaactcaaagggcgcagctccgggtctggggtcctgcctgcgtggcctgttggcacgtgtttctcttccccgcccggcctccagttgtgtgctctcaca

SEQ ID NO: 1491 - DNA, 206 bp, Homo sapiens
tacacctcctgtgtggttacaagttaactttgtaagtagcgtaccttccttccttaaaatatctagcttcctgtgccctttcatagatattcgattaatttttacattttaaacaagttgactatttcctttaggggttttgtttcaaacttttctgtcatctgtctctactacctcagaaactgcagcttggttctgatgataga

SEQ ID NO: 1492 - DNA, 519 bp, Homo sapiens
gaatcacatgttctgtgttcattatccctacacatgtaaattaattattttatcaatactagatagagttcacatgctgactccctggatacctacagttgagaagaaaatgacagacaattatttttcctttaggtcaaaataatgtcactgctatctggataaattataagttcatatatttgaaataagatcctggaaacgaatttaaatggtgtcaaactgcagagcaacagggcttcagtatattcacatctaataggttaatatgtacatttggatgatgatttttcttgataacattaacattaattttattttttcagacatactgtaatttaaaaattaatgtgagcgtttgttttaagttcacagaaaacttaataattcaaattctcaggaattaaggactcaccataacattgtcagttctaatgaaattttgtaaaagatggcaagtttgttacctcacttgagtggggttttccttttcccccaattctaagagaatataatgtg

SEQ ID NO: 1493 - DNA, 469 bp, Homo sapiens
tgagctcatacagtctcaacagatcaccccccaacttgcccttcaagttctacttcagtttgataaggctataaatgcagcactggctcagagggtcaggaacagagtcaatttcaggggctctctaaatacgtacagattctgcgataatgtgtggacttttgtactgaatgatgttgaattcagagaggtgacagaacttattaaagtggataaagtgaaaattgtagcctgtgatggtaaaaatactggctccaatactacagaatgaatagaaaaaatatgacttttttacaccatcttctgttattcattgcttttgaagagaagcatagaagagactttttatttattctagaattgcagaaatgactacactgtgctataccagagaattccagtagaaagaaacttgtaactctgtagcctcttacatcacctttattatacagcatgaaaaaccataact

SEQ ID NO: 1494 - DNA, 535 bp, Homo sapiens
  misc_feature (85)..(85): n includes a, c, g, or t, or contains no nucleotide
  misc_feature (88)..(91): n includes a, c, g, or t, or contains no nucleotide
  misc_feature (93)..(134): n includes a, c, g, or t, or contains no nucleotide
  misc_feature (360)..(379): n includes a, c, g, or t, or contains no nucleotide
aagcagctctaaatctagtagagcagactttctaacatacctagttttgtgtattggctttgctggagtatgatagcaaaatgangannnntnnnnnnnnnnnnnnnnnnnnnnnnnnnnnnnnnnnnnnnnnntaatactaaacttggaaaattgtttaagtatgttttatcaagcagtctgggttttgttttttaatatactttttaatggatatgtgaaaactgaaggaaatgttaaaggttttttaatggtgcaagtgaaggtgccagttgctatttgatatcacactctacaaaagcttcattactttatttgatggtggttgctaagcagccattgcacagagcataagtctannnnnnnnnnnnnnnnnnnngaggctgatgctgcactgttgatgtcatgtgaggaaataatgcacatgctctaactgctcaacaggaaatgaacctagaaacagaaaatgaaaaggttgattgaaataaaacttgatcaacgcgactgtattttgaaacattccaggaaggttact

SEQ ID NO: 1495 - DNA, 451 bp, Homo sapiens
  misc_feature (61)..(80): n includes a, c, g, or t, or contains no nucleotide
  misc_feature (399)..(413): n includes a, c, g, or t, or contains no nucleotide
ctgccaggaagagtgctgccaaacacaagtttcctggcttccctcgagtggagccagacannnnnnnnnnnnnnnnnnnnatagtgaagctccagaaggaggtggaagagtgtgcaaacctttcgagactcctcaagcatgaaaggaaaaacatctccatctttaagcgagaacagaaagcagccaccaccctggggatcatcgtcggggcctttaccgtgtgctggctgccatttttcctcctctcgacagccagacccttcatctgtggcacttcctgcagctgcatcccactgtgggtggagaggacatttctgtggctaggctatgcaaactctctcattaacccttttatatatgccttcttcaaccgggacctgaggaccacctatcgcagcnnnnnnnnnnnnnnntaccggaatatcaaccggaagctctcagctgcaggcat

SEQ ID NO: 1496 - DNA, 601 bp, Homo sapiens
tgcacactttggttcagtcccggtgcccctgccaagatgtggaaggggccgggtgaagacaggcttgagggccgccccagcaggctctgggtatgacctgcctctggccctggtcctgggcggggcctgtgggtggagtagtacccccaggccctgccctgggtgacagactgggaggaaaccaggctggacctgggcaggcgggatgtgttggccacagggagaggcggaccggcacccggtgggacctcctaggactgggccttcttccagggggcccctggcagcagctggggtgtcgggcagaatgtgacttgtggccttaccatggacttgaatgggacttggctggcctcaggatcttgtgcctggaaatagcctgaggtggctcaggaagcggagaaagggtgccagaccattctctggcggggaccagggcccaaggccagggctggaaggagaccaaggggcagcccctggaggacatcagtgcttcctcttccacccaattcccccacgcggttccatgttttcccaccagcctgttgggcgaagttgctgctccggcattcagtcctgcttcttccagagaaataaagtt

SEQ ID NO: 1497 - DNA, 358 bp, Homo sapiens
  misc_feature (31)..(31): n includes a, c, g, or t, or contains no nucleotide
  misc_feature (95)..(96): n includes a, c, g, or t, or contains no nucleotide
  misc_feature (103)..(103): n includes a, c, g, or t, or contains no nucleotide
  misc_feature (213)..(214): n includes a, c, g, or t, or contains no nucleotide
  misc_feature (216)..(231): n includes a, c, g, or t, or contains no nucleotide
  misc_feature (319)..(319): n includes a, c, g, or t, or contains no nucleotide
tgtggcttaggtgagcatgtgaccaggcctnggcctcctgagtcccacagcttcctagccacagtgataaaagaatgggtatataacttaagccnnggctaanggaaagcccttaacagaacttctgctggaactactggaaagaaggctttatggagatcccaggaaccaaggaccatgtaagcctgaatttgtgccatgtggagagagtcnntnnnnnnnnnnnnnnnnggatgctagcagaaatggaaagagaactaagttctgatgtcatttttctggaggccctagatccagctgtgcctaaagcctgccctanctccggactttaaagttttgtgagccaataaagtccctt

SEQ ID NO: 1498 - DNA, 405 bp, Homo sapiens
  misc_feature (41)..(41): n includes a, c, g, or t, or contains no nucleotide
  misc_feature (46)..(46): n includes a, c, g, or t, or contains no nucleotide
  misc_feature (380)..(380): n includes a, c, g, or t, or contains no nucleotide
tacagtgtgctcaaaagaagcattttctcttggggaagatnagtanacagtcagcacagtaagcaccactctgggatcaggcccaccctgcagagcctggcgccatcactgctgcatgttgttgataatcgccaggatgctcatcttctcctgggcagagtccacatcctcattctgcttctgggccactcctgtgcctaagccatagagccgcccacagtacttggcatcatcaatgctgtcctcaaaaaacaactctttcatcctaaagaaagccattcctgtcagcagtgagtcttgagcctgcctggtgctgccttccaatcctctgcaaatccaactgatccagcaacttcctgaagacctcccttaagattttnggaggtcttcatcaggtatttcaca

SEQ ID NO: 1499 - DNA, 482 bp, Homo sapiens
  misc_feature (29)..(29): n includes a, c, g, or t, or contains no nucleotide
  misc_feature (65)..(66): n includes a, c, g, or t, or contains no nucleotide
  misc_feature (72)..(105): n includes a, c, g, or t, or contains no nucleotide
  misc_feature (230)..(245): n includes a, c, g, or t, or contains no nucleotide
  misc_feature (420)..(434): n includes a, c, g, or t, or contains no nucleotide
agtactaccaggtgccaaggaaggggatncaggccaaagaggtgctgaaaaaatatttggagtcnnaggagnnnnnnnnnnnnnnnnnnnnnnnnnnnnnnnnnncactctcagaaaaggaaaaagcgattgaagtggaacgtataaaggctgaatctgcagaagctgcaaagaaaatgttggaggaaatacaaaagaagaatgaggagatgatggaacagaaagagaannnnnnnnnnnnnnnngtgaaacaattgactgagaagatggagagggacagggcccagttaatggcagagcaagagaagaccctcgctcttaaacttcaggaacaggaacgccttctcaaggagggattcgagaatgagagcaagagacttcaaaaagacatatgggatatccagatgagaagcaaatcannnnnnnnnnnnnnnaacatactctaaaagtccaaggagcaaaatttgcctgtccagctccct

SEQ ID NO: 1500 - DNA, 387 bp, Homo sapiens
  misc_feature (101)..(130): n includes a, c, g, or t, or contains no nucleotide
  misc_feature (233)..(271): n includes a, c, g, or t, or contains no nucleotide
gagccgcttatttctgcattccacaaagttgagaaatttgctaaggaactgcaaggcaaaacagacaatcaaaatgaccctgaaggggaccaagaaaattnnnnnnnnnnnnnnnnnnnnnnnnnnnnnnccttatgttcctgagttatgatccttgagtaatgctttgattttaatagttggttctgtgttgcaacatatatctttagtgctgacactaactttgtccaacnnnnnnnnnnnnnnnnnnnnnnnnnnnnnnnnnnnnnnnatattagagctgaaaacacatttgttgatatttgtcttgtccacattgtgatgttcagtatttgagcttatagtgaactgagcaatcataaataagccacccttctgattgtcgtt

SEQ ID NO: 1501 - DNA, 518 bp, Homo sapiens
  misc_feature (33)..(67): n includes a, c, g, or t, or contains no nucleotide
  misc_feature (205)..(205): n includes a, c, g, or t, or contains no nucleotide
  misc_feature (207)..(208): n includes a, c, g, or t, or contains no nucleotide
  misc_feature (211)..(211): n includes a, c, g, or t, or contains no nucleotide
  misc_feature (213)..(213): n includes a, c, g, or t, or contains no nucleotide
  misc_feature (219)..(241): n includes a, c, g, or t, or contains no nucleotide
  misc_feature (267)..(267): n includes a, c, g, or t, or contains no nucleotide
ccatgtttatcatcagtgttttgtatttttgtnnnnnnnnnnnnnnnnnnnnnnnnnnnnnnnnnnnacattcctgttctgttgtgaagagaacattcccagaccctggcaccctcctgagccggcgtgtgccggtccagccctccgagatgccacaattccttggatgggggagaagttcaaggaatttctgctcggccacgcngnnggnanccccgnnnnnnnnnnnnnnnnnnnnnnngtctcagtcgtgctaggcatcgggcngcagcgccgacagcccttccctcgccagtgcccctcggccactcctgggttggagcccgattttatttgtaaagttgacagtcgagcaaatgttcctattttcgtgggatctgcacacgtctttgtcagttgtggtcatgatcttagtcacctgctaattatttttacaatgattacaacatttcctcactgcgggatatttctgacccgctttagaacttaagacctgattctagcaataaacgtgtccg

SEQ ID NO: 1502 - DNA, 504 bp, Homo sapiens
  misc_feature (26)..(28): n includes a, c, g, or t, or contains no nucleotide
  misc_feature (228)..(228): n includes a, c, g, or t, or contains no nucleotide
  misc_feature (375)..(423): n includes a, c, g, or t, or contains no nucleotide
aacactgtttgaatactgtgaattcnnnattacgaagaatgttcgagagaaagcaggggtctaatccaaaagaaatgtcattaaccaatactccaagtccttgagttttgttatatctgaactagttgaactgtgactgacaggtaatcctaatatatccaaatccaactgaataccaaattgagatggcaaatttttgtttgatataagttagcttgttagcatatnccctagagggcctccatccctgtattctaatgtttttactcaaagctctagcctttaggataggtgaatatgtaaatcttttatcactttctcaaattcaaactaaaggggaaagatcaaaccccttcccttcctacctgttttctnnnnnnnnnnnnnnnnnnnnnnnnnnnnnnnnnnnnnnnnnnnnnnnnnttcctgtaaatgttttgacttgttgcagaaattcctatctactttattaagcagtattgatctgactgtggaaacatcctc

SEQ ID NO: 1503 - DNA, 438 bp, Homo sapiens
  misc_feature (71)..(71): n includes a, c, g, or t, or contains no nucleotide
  misc_feature (178)..(207): n includes a, c, g, or t, or contains no nucleotide
  misc_feature (209)..(210): n includes a, c, g, or t, or contains no nucleotide
  misc_feature (311)..(333): n includes a, c, g, or t, or contains no nucleotide
ttcctgggctctctgtgttgcctccctctggcttcttcctcccgtgccctctccccgtgtgccccaggggnatcagggatcctcaccctcctgaggcccagtggggaagaatgaacatggcttcatccaggttaactgatgctgccatttgcccagcctcttccatcccagccctgtnnnnnnnnnnnnnnnnnnnnnnnnnnnnnntnncaggatgcctgtagtagggaactctggaagtgtattgggctgaggtgggattttccctccccacagtgcactgagcaatggagggtggtgagggagccatnnnnnnnnnnnnnnnnnnnnnnntccccattatgtaaaatggggtgttgggtagggcagactctgcttgggtttggttgtaagataaacctggaggagaagcacagttgtcccattgaattatttgag

SEQ ID NO: 1504 - DNA, 510 bp, Homo sapiens
  misc_feature (293)..(366): n includes a, c, g, or t, or contains no nucleotide
  misc_feature (369)..(369): n includes a, c, g, or t, or contains no nucleotide
ctttctgcttagaatctaaagatgtgtttagaacctcttgtttaaaaataatagactgcttatcataaaatcacatctcacacatttgaggcagtggtcaaacaggtaaagcctatgatgtgtgtcattttaaagtgtcggaatttagcctctgaataccttctccattgggggaaagatattcttggaaccactcatgacatatcttagaaggtcattgacaatgtataaactaattgttggtttgatatttatgtaaatatcagtttaccatgctttaattttgcacattnnnnnnnnnnnnnnnnnnnnnnnnnnnnnnnnnnnnnnnnnnnnnnnnnnnnnnnnnnnnnnnnnnnnnnnnnnttnacatttaccttatcaaacctagaatgtgtatatttataaatgtatgtcttcattgctaggtactaatttgcagatgtctttacatatttcaatacagaaactataacattcaatagtgtgctgtcaaagtgtgcttagctc

SEQ ID NO: 1505 - DNA, 447 bp, Homo sapiens
cctggccactaaagcttcagactcaagtacccattctgttttcccccagcaacgcccctccaaacctccagcctccctgtctccagctgcctgggcccggaagggctttggttccttctctgggtctgattttctcactgaactccaccgaccaactgccctaagcccccagggcctccagggcccaggttcgagacccaaacccccaaaatccaaaacttctcttgaaaagttcagggaccgtccaggggagatggggaggagatatggagtgagtcacctgctccagaagatgccagcttctctctccagggtgcttagttggctttgcccacccctcactccccagggagctccggggacagcttcctcacacccctgtcccacccacacagctgccctagctgaccccgagaagtgctcttggctgacccctctggtgtgtgg

SEQ ID NO: 1506 - DNA, 570 bp, Homo sapiens
  misc_feature (80)..(80): n includes a, c, g, or t, or contains no nucleotide
  misc_feature (110)..(110): n includes a, c, g, or t, or contains no nucleotide
  misc_feature (132)..(132): n includes a, c, g, or t, or contains no nucleotide
  misc_feature (142)..(142): n includes a, c, g, or t, or contains no nucleotide
  misc_feature (162)..(162): n includes a, c, g, or t, or contains no nucleotide
  misc_feature (176)..(176): n includes a, c, g, or t, or contains no nucleotide
  misc_feature (187)..(191): n includes a, c, g, or t, or contains no nucleotide
cctgaactaacttttgggtcattattcctttttcttacagaatatcttgtttatatccatgtagctctattggcccatcntgtggattctcagaagtctgacatccttcnttcattttgtcccatctctgtncgaatcagtncaagctagcagcatttcctntggtataaaggtcntcaaaaacttnnnnncatgtgatccatgtgggtcaaagccaccagacaaaagaattctccacagatctttccttgataatcttatttttattactggcttctgctgagagggctgaatggatccataaaccacacacctgatctgtttagcaaatggttgtccagtgtggatattctccccagaataatgctttctcatttttttttgcagtatgtatagcctgaaaatttttctgtatcttcaagctctggttcctttttgcttaacaaatcctttttgaatttatctctctcctctcacattttcatattagagagaaatcaggctatggtttcaattctttggttagaaacttcctcaggtaaatatatccaattttgttgtttgcaagtc

SEQ ID NO: 1507 - DNA, 371 bp, Homo sapiens
  misc_feature (82)..(133): n includes a, c, g, or t, or contains no nucleotide
ttttccagtctcacggttctgtgtacctctccaaacccctcaatcttctaatcattttgtgtattatttataggaaaagagnnnnnnnnnnnnnnnnnnnnnnnnnnnnnnnnnnnnnnnnnnnnnnnnnnnntttgtcttagtctttactgaagactgaattgtatcattaagactttcttctaagtcctgttattttgactttttgactcactctgtgccctctgatacataaagtagcaataatttgtacaatgagccattgtatttgttcacgagaaattcttcctgttcctcacatttctattcattttcctaaaggtatgtatttgaaaacttgaaaaattgcctggcccggttatagtttaatg

SEQ ID NO: 1508 - DNA, 445 bp, Homo sapiens
actttgactttgatggggctcagaaaaagctgagggaatgtgaatcagtgcttgtgaatgacttcttcttggtggcttgtcttgaggatttcattgaaaatgcccgtctcttcatatttgagactttctgtcgcatccaccagtgtatcagcattaacatgttggcagataaattgaacatgactccagaagaagctgaaaggtggattgtaaatttgattagaaatgcaagactggatgccaagattgattctaaattaggtcatgtggttatgggtaacaatgcagtctcaccctatcagcaagtgattgaaaagaccaaaagcctttcctttagaagccagatgttggccatgaatattgagaagaaacttaatcagaatagcaggtcagaggctcctaactgggcaactcaagattctggcttctactgaagaaccataaa

SEQ ID NO: 1509 - DNA, 523 bp, Homo sapiens
  misc_feature (27)..(27): n includes a, c, g, or t, or contains no nucleotide
  misc_feature (36)..(37): n includes a, c, g, or t, or contains no nucleotide
  misc_feature (111)..(111): n includes a, c, g, or t, or contains no nucleotide
  misc_feature (172)..(172): n includes a, c, g, or t, or contains no nucleotide
  misc_feature (375)..(422): n includes a, c, g, or t, or contains no nucleotide
tctaggatgcaggtggcttgaagcagnatgccacanntgcaagttgattagaactgcctttcttcccaggcttgacataggtattaagtcaaaattacatgaaacccagtnggtaaaaaagcctctgaaagctgtaacaccctcagtaataacaaaagggatttttatttcncagctaaagggaaaataggtggagaagttaaaaaataatgtctgatcctgttcctaagttccaaactatagccaacactctgatgctgctctttttcttgtaggaccaaccgtcccagtttgcctgggactttctcatttttacagagtcccaaatcctaggaaactggagcaactggtacaactggtcacctactcttgccnnnnnnnnnnnnnnnnnnnnnnnnnnnnnnnnnnnnnnnnnnnnnnnnggaaaagttataaccactattcccctataacataatgctaatgattgtacttagtacatttttatacttttatgatattttactgattggaaatgtcatcc

SEQ ID NO: 1510 - DNA, 437 bp, Homo sapiens
  misc_feature (41)..(70): n includes a, c, g, or t, or contains no nucleotide
  misc_feature (72)..(73): n includes a, c, g, or t, or contains no nucleotide
  misc_feature (75)..(75): n includes a, c, g, or t, or contains no nucleotide
  misc_feature (78)..(78): n includes a, c, g, or t, or contains no nucleotide
  misc_feature (80)..(82): n includes a, c, g, or t, or contains no nucleotide
  misc_feature (84)..(85): n includes a, c, g, or t, or contains no nucleotide
  misc_feature (90)..(90): n includes a, c, g, or t, or contains no nucleotide
  misc_feature (92)..(99): n includes a, c, g, or t, or contains no nucleotide
  misc_feature (103)..(112): n includes a, c, g, or t, or contains no nucleotide
  misc_feature (116)..(116): n includes a, c, g, or t, or contains no nucleotide
  misc_feature (118)..(118): n includes a, c, g, or t, or contains no nucleotide
  misc_feature (120)..(121): n includes a, c, g, or t, or contains no nucleotide
  misc_feature (266)..(297): n includes a, c, g, or t, or contains no nucleotide
tgtccaattagctgtgtatcgctcttcccagagttgttaannnnnnnnnnnnnnnnnnnnnnnnnnnnnntnntntgntnnntnngaagnannnnnnnngccnnnnnnnnnncgangncnngcatggttttaggtttatcttccttcacatccagaaattctgttggacactcacttccaccccaaactcctcaaatcaaaagccttcaaaacacgaggcactcttggatctaccctgagtatcctccaaactgtggatacagttnnnnnnnnnnnnnnnnnnnnnnnnnnnnnnnnattctctctgttggtggcaaaccacttcatagcaccaacagagatgtaggaaaaattcctcaaagtatttgtcatttctgagtcgcctgcattatcccattcttattctcctcaaacctgtgcatatatgacatgaaatg

SEQ ID NO: 1511 - DNA, 460 bp, Homo sapiens
  misc_feature (83)..(83): n includes a, c, g, or t, or contains no nucleotide
  misc_feature (260)..(276): n includes a, c, g, or t, or contains no nucleotide
  misc_feature (338)..(353): n includes a, c, g, or t, or contains no nucleotide
  misc_feature (362)..(376): n includes a, c, g, or t, or contains no nucleotide
  misc_feature (421)..(421): n includes a, c, g, or t, or contains no nucleotide
ggattctccttgcactttacctgttcttttccagagctgacagcacgggctccggcgcagtgtgcctggcttggcttcccttnccccatggctgggggctggggtaggactcacccattctaatttattttgtcttttggcttctcagtagctaaggggaaggctgatgtcaggagagggagagggggctgaggaggtagtgctgtaggcccagggggtcagggaaagggaggggggcatgtgagggatggaaatgaccnnnnnnnnnnnnnnnnncccacccaaggccccctgccccagcactgaatcccagcgctgccctgaggcccccagccacnnnnnnnnnnnnnnnngttcaccannnnnnnnnnnnnnngaccccattgtctgtctgcttcccacctgccctccccaccccctncccctcgggcaccagcctgcatatgtgttcacttttatt

SEQ ID NO: 1512 - DNA, 542 bp, Homo sapiens
  misc_feature (27)..(43): n includes a, c, g, or t, or contains no nucleotide
  misc_feature (48)..(48): n includes a, c, g, or t, or contains no nucleotide
  misc_feature (52)..(52): n includes a, c, g, or t, or contains no nucleotide
  misc_feature (58)..(58): n includes a, c, g, or t, or contains no nucleotide
  misc_feature (65)..(65): n includes a, c, g, or t, or contains no nucleotide
  misc_feature (71)..(71): n includes a, c, g, or t, or contains no nucleotide
  misc_feature (75)..(75): n includes a, c, g, or t, or contains no nucleotide
  misc_feature (78)..(78): n includes a, c, g, or t, or contains no nucleotide
  misc_feature (92)..(185): n includes a, c, g, or t, or contains no nucleotide
  misc_feature (278)..(279): n includes a, c, g, or t, or contains no nucleotide
  misc_feature (440)..(454): n includes a, c, g, or t, or contains no nucleotide
aagttcagtgccatgaagtatgagcannnnnnnnnnnnnnnnnagggncccnaaccgntccaccnccgtgncgcntcntgtgcgggaaagannnnnnnnnnnnnnnnnnnnnnnnnnnnnnnnnnnnnnnnnnnnnnnnnnnnnnnnnnnnnnnnnnnnnnnnnnnnnnnnnnnnnnnnnnnnnncccaccgaagacgaccatgacgagctctagctggatgggcgcagagaacctcaagaaggcatgaagccagcccctgcagtgccgtccacccgnncccctctgggcctgcctgtggctctgttgccctcctctgtggcggcaggacctttgtggggcttcgtgccctgctctggggcccaggcggggctggtccacattcccaggccccaacagccttcaaagatgggtaaaggagcttgccctccctgggccccnnnnnnnnnnnnnnngccccaccacccccagccctgtccctgccacccctcctagtggggactagtgaatgacttgacctgtgacctcaatacaataaatgtg

SEQ ID NO: 1513 - DNA, 153 bp, Homo sapiens
tgaatgcagtgatttgaggtctcacctggggttctaaaccccaggtctcatcacccgcccctggtctctttgtggagggggttgtgggggttcctctttcttcagtgatcttatataagaacaataattctaggctcaaaagggtcgtagaac

SEQ ID NO: 1514 - DNA, 247 bp, Homo sapiens
gtgaaacgtcccacactttgaagcaaatacaattcacagcacagtacacacaaaaaccttggcataagacagagaaggttcttcttattttgtgggctggttgctgtagaaacacataacaaagggcagccctccacttctggtataattgtgtagccccttttctttgggcttgacacctgtcttgaataagagtgattagagctgcataatgtccctctcttggctattgaccatgtggttcacg

SEQ ID NO: 1515 - DNA, 403 bp, Homo sapiens
  misc_feature (236)..(294): n includes a, c, g, or t, or contains no nucleotide
attccaggagagttgatgaccttcatttaaagtccaactaaaatcagtagtagaaacataagaaaacatctttgcaatatttacttttgtttctgtttgccgtaaatagtaacattgtttttttttattttgtgtttgttataaaacagttgcattcacaatattattggcctgagatattgatgatattgtgatggtatgaaaatgtgtacattccctgtgcaacatcagatttnnnnnnnnnnnnnnnnnnnnnnnnnnnnnnnnnnnnnnnnnnnnnnnnnnnnnnnnnnnaggagtgaactattttcttttggaaatttctttttaatttttattattaaagtattttatttttagggccttttgggttttattgaatagttcatttcacctgtttaag

SEQ ID NO: 1516 - DNA, 465 bp, Homo sapiens
  misc_feature (26)..(27): n includes a, c, g, or t, or contains no nucleotide
  misc_feature (30)..(31): n includes a, c, g, or t, or contains no nucleotide
  misc_feature (33)..(34): n includes a, c, g, or t, or contains no nucleotide
  misc_feature (36)..(36): n includes a, c, g, or t, or contains no nucleotide
  misc_feature (38)..(40): n includes a, c, g, or t, or contains no nucleotide
  misc_feature (42)..(46): n includes a, c, g, or t, or contains no nucleotide
  misc_feature (48)..(48): n includes a, c, g, or t, or contains no nucleotide
  misc_feature (50)..(80): n includes a, c, g, or t, or contains no nucleotide
cagatctgtgtcaagttcaatgtgannccnngnnangnnngnnnnntnannnnnnnnnnnnnnnnnnnnnnnnnnnnnnntgtatatgggctgcactcacgcatatacgagttggtttatctttgtgtacatgactataacccagtgatgctgaggtcatgtgctggaatgctgtatttggaccacacatttcaaagttgccctatggaaatgaatcctacttagtgacaagtcatcaaatgtttgtcacatgtgatgaagacaaatatgtatacctggcatagagaaaaatatatacctggtacattggagaaaaataattacactttcaaagagaattccctttgcaattttatgtttggatcaccactgtaagcacactttatttgcatttgatctgtatttgtatatgctgatgcaatgataaaaatcactgtaatacttcattgtgttgtactggatgca

SEQ ID NO: 1517 - DNA, 46 bp, Homo sapiens
ccgctgcctttctttcctcagttggagctgatcacaacccaggcca

SEQ ID NO: 1518 - DNA, 570 bp, Homo sapiens
  misc_feature (40)..(40): n includes a, c, g, or t, or contains no nucleotide
  misc_feature (57)..(57): n includes a, c, g, or t, or contains no nucleotide
  misc_feature (68)..(68): n includes a, c, g, or t, or contains no nucleotide
  misc_feature (85)..(85): n includes a, c, g, or t, or contains no nucleotide
  misc_feature (133)..(133): n includes a, c, g, or t, or contains no nucleotide
  misc_feature (141)..(141): n includes a, c, g, or t, or contains no nucleotide
  misc_feature (150)..(150): n includes a, c, g, or t, or contains no nucleotide
  misc_feature (156)..(156): n includes a, c, g, or t, or contains no nucleotide
  misc_feature (232)..(233): n includes a, c, g, or t, or contains no nucleotide
  misc_feature (247)..(247): n includes a, c, g, or t, or contains no nucleotide
  misc_feature (260)..(260): n includes a, c, g, or t, or contains no nucleotide
  misc_feature (262)..(262): n includes a, c, g, or t, or contains no nucleotide
  misc_feature (264)..(267): n includes a, c, g, or t, or contains no nucleotide
  misc_feature (269)..(269): n includes a, c, g, or t, or contains no nucleotide
  misc_feature (278)..(329): n includes a, c, g, or t, or contains no nucleotide
  misc_feature (333)..(334): n includes a, c, g, or t, or contains no nucleotide
gagtgttgagcatccctgtctaacctgctctttctctttnggtgccccttatctcanccccttccttnggaatttaataagtctncaggcatttccaattgtagactaaaaccactcttagcatctcctctangtattttnccatgtatncagganagaggtgtcttatgtagggagggggcaagtatgaagtaaggtaattatatactactctcattcaggattcttgctnncccatgctgctgtncccttcaggctcncntnnnncncacatgcannnnnnnnnnnnnnnnnnnnnnnnnnnnnnnnnnnnnnnnnnnnnnnnnnnncagnngctagttagaaaggtttggagggatgacttttagtaaatcatggggattttattgatttattttcacttttgggattttgtggggtgggagtggggagcaggaattgcactcagacatgacatttcaattcatctctgctaatgaaaagggttctttctcttgggggaaatgtgtgtgtcagttctgtcagctgcaagttcttgtataatgaagtcaatgccatcaggccaaggaa

SEQ ID NO: 1519 - DNA, 584 bp, Homo sapiens
  misc_feature (40)..(54): n includes a, c, g, or t, or contains no nucleotide
  misc_feature (75)..(75): n includes a, c, g, or t, or contains no nucleotide
  misc_feature (79)..(79): n includes a, c, g, or t, or contains no nucleotide
  misc_feature (83)..(83): n includes a, c, g, or t, or contains no nucleotide
  misc_feature (88)..(88): n includes a, c, g, or t, or contains no nucleotide
  misc_feature (90)..(90): n includes a, c, g, or t, or contains no nucleotide
  misc_feature (97)..(97): n includes a, c, g, or t, or contains no nucleotide
  misc_feature (105)..(105): n includes a, c, g, or t, or contains no nucleotide
  misc_feature (202)..(202): n includes a, c, g, or t, or contains no nucleotide
  misc_feature (209)..(209): n includes a, c, g, or t, or contains no nucleotide
  misc_feature (213)..(213): n includes a, c, g, or t, or contains no nucleotide
  misc_feature (221)..(222): n includes a, c, g, or t, or contains no nucleotide
  misc_feature (234)..(234): n includes a, c, g, or t, or contains no nucleotide
  misc_feature (259)..(259): n includes a, c, g, or t, or contains no nucleotide
  misc_feature (261)..(261): n includes a, c, g, or t, or contains no nucleotide
  misc_feature (263)..(263): n includes a, c, g, or t, or contains no nucleotide
  misc_feature (266)..(266): n includes a, c, g, or t, or contains no nucleotide
  misc_feature (269)..(269): n includes a, c, g, or t, or contains no nucleotide
  misc_feature (281)..(281): n includes a, c, g, or t, or contains no nucleotide
  misc_feature (388)..(388): n includes a, c, g, or t, or contains no nucleotide
  misc_feature (398)..(398): n includes a, c, g, or t, or contains no nucleotide
agagagccccagcttctcggcaggggacaaccctcccgtnnnnnnnnnnnnnnncttccgcatctctggggcacnaganaagnacganancgagagncgcctggnatctgagaggaggctgctgggccttcggggtgagcccccagagctggacctgagctattctcactcggacctggggaaacggcccaccaaggacagntacacgntganggaggagnnagctgagtatgntgaaatccgggtcaagtgaaggagntngnggnagnctgcgtggctgncccccctcaggaccctcgctggcccccactggctgtgggctcccttcctcccaaaagtatcgggggctggggcaggaggggagtgaggcaggtgacagtgaggtccntgggggcctnacctccccctccttcccagctgcccctccctgccagcacccccacgccctcattacggctcctctctaacctcctttaccctcatctgtctggaggggagctctgtctgtccgtgttatttattgctacttcctgcctggtctcctgcccccacacctggccctggggcctgtacaaaagggacat

SEQ ID NO: 1520 - DNA, 412 bp, Homo sapiens
  misc_feature (55)..(85): n includes a, c, g, or t, or contains no nucleotide
  misc_feature (98)..(98): n includes a, c, g, or t, or contains no nucleotide
  misc_feature (102)..(150): n includes a, c, g, or t, or contains no nucleotide
  misc_feature (158)..(158): n includes a, c, g, or t, or contains no nucleotide
  misc_feature (351)..(351): n includes a, c, g, or t, or contains no nucleotide
  misc_feature (375)..(375): n includes a, c, g, or t, or contains no nucleotide
tctccggcatagcaaggaggaacgggaggacctggatgctgatgagcagcaaggnnnnnnnnnnnnnnnnnnnnnnnnnnnnnnngagagtgccatgnagannnnnnnnnnnnnnnnnnnnnnnnnnnnnnnnnnnnnnnnnnnnnnnnntctggttntgtggaatgagcagaggtggggtgggcagtcctccgccccttacccaggaggaggcagcggcagcagccaggcggctggaggacatcagcgaggacccgagctgggcccgtgtggtcaacctcaatgccctgctcatgatggcagtggccgtgttcctctggggcttctatgcctaagaccaactgcgttggncaccataagccacagcctcacagnaagtgggggtgaggagcctgcggtgctccccagaaaa

SEQ ID NO: 1521 - DNA, 451 bp, Homo sapiens
  misc_feature (176)..(176): n includes a, c, g, or t, or contains no nucleotide
  misc_feature (261)..(263): n includes a, c, g, or t, or contains no nucleotide
  misc_feature (265)..(282): n includes a, c, g, or t, or contains no nucleotide
  misc_feature (294)..(320): n includes a, c, g, or t, or contains no nucleotide
  misc_feature (352)..(366): n includes a, c, g, or t, or contains no nucleotide
ggcagtgtagccataactttctgatgttagtaaaaacaaaattggcgacttgaaattaaatcatgccaaggttttgatacacttgtcttaagatattaatgaaacacttcaaaacactgatgtgaagtgtccagattctcagatgtttgttgtgtggattttgtttagttgtgtgnttttttttttttttcagtgaatgtctggcacattgcaatcctcaaacatgtggttatctttgttgtattggcataatcagtgacnnntnnnnnnnnnnnnnnnnnnatttgagcaagnnnnnnnnnnnnnnnnnnnnnnnnnnnaataaggtttcaaaaatcatgtaaggatttannnnnnnnnnnnnnnaagattgaacctcaagtcactgtagctttagtaattgcttattgtattagtttagatgctagcactgcatgtgctgtgcatattc

SEQ ID NO: 1522 - DNA, 480 bp, Homo sapiens
  misc_feature (328)..(370): n includes a, c, g, or t, or contains no nucleotide
  misc_feature (388)..(449): n includes a, c, g, or t, or contains no nucleotide
ctctgatctacgttgataaggaaattggagaaccaggcacccgtgtggctgccaaggatgtgctgaagctggagtctagaccttcaatcaaagcattagatgggatatctcaagttttaacaccacgttttggcaaaacatacgatgctccatcagccttacctaaagctaccagaaaggctttgggcactgtcaacagagctacagaaaagtcagtaaagaccaatggacccagaaaacaaaaacagccaagcttttctgccaaaaagatgaccgagaagactgttaaaacaaaaagttctgttcctgcctcagatgacgcctatcnnnnnnnnnnnnnnnnnnnnnnnnnnnnnnnnnnnnnnnnnnngagttttgacctgcctgnnnnnnnnnnnnnnnnnnnnnnnnnnnnnnnnnnnnnnnnnnnnnnnnnnnnnnnnnnnnnnggagagcttgaaaagctgtttcagctgggcc

SEQ ID NO: 1523 - DNA, 456 bp, Homo sapiens
  misc_feature (175)..(175): n includes a, c, g, or t, or contains no nucleotide
cgcctttccaatctttattggaagtctctccctgcctacttcctaatttattcttatttgacagagggtatggaagacttgcaatttgaaaactggggaccagttccaaagtcagtaattgtgttaaccacgtgtataacagctctgctggacacccaagaaagccatgggaacnccaactggaaaggtccccttccccaggggagcctgcgaaggagaggttctgtagaatccaagcccacatttccaaagtcacccccaacgcgtcctctcacaccgtccactgtgcgtttgtatgtgtctgggatccagggcaatgtgaattttctttttatttgggagattgttcacggaaaacagatcttcttctctcttgtccacctattaattgtttacaatatttgtacatctatgcaaaatacttgaatgggccatggtgccttttttccttgttag

SEQ ID NO: 1524 - DNA, 359 bp, Homo sapiens
caagatcatactaaggactggaaatattttgttctatggaatcaaatttctcacaatgctgtatgatactatttaaatttggaggacaacttatcttcactaagctgaatcaggtggagaaagtaatctccttgcaatcatgtggacaccaatcacaaaagtaaagccctggtgttgtgttttcatgtcttttttcagccctctcagatccaaatgttattatgcactttttaatgtttgtaaacttttactaataattagtgtgaattgcattctgatacaataatgattatcattagaagctaacaaaattctcattaatactgtgtttgatggcctctgctgtgttttaacatcgt

SEQ ID NO: 1525 - DNA, 539 bp, Homo sapiens
  misc_feature (26)..(26): n includes a, c, g, or t, or contains no nucleotide
  misc_feature (216)..(216): n includes a, c, g, or t, or contains no nucleotide
  misc_feature (243)..(258): n includes a, c, g, or t, or contains no nucleotide
  misc_feature (448)..(479): n includes a, c, g, or t, or contains no nucleotide
gccacaggtggttctgatggctttgnaaatatttgggatccatttaacaaaaagcgactgtgccaattccatcggtaccccacgagcatcgcatcacttgccttcagtaatgatgggactacgcttgcaatagcgtcatcatatatgtatgaaatggatgacacagaacatcctgaagatggtatcttcattcgccaagtgacagatgcagaaacnaaaacccaagtccacctaatcatcctnnnnnnnnnnnnnnnntatggaaagctttgtttgcttcctacaaatacatgcttattccttaagggatgtgttagagttactgtggatttctctgttttctgtcttacaagaaacttgtctatgtaccttaatactttgtttaggatgaggagtctttgtgtccctgtacagtagtctgacgtatttccccttctgtcccctagtnnnnnnnnnnnnnnnnnnnnnnnnnnnnnnnntctttttgtaatatactctaaacctgttatttctgtgctaataaacgagatgcagaaccc

SEQ ID NO: 1526 - DNA, 325 bp, Homo sapiens
  misc_feature (59)..(74): n includes a, c, g, or t, or contains no nucleotide
  misc_feature (158)..(172): n includes a, c, g, or t, or contains no nucleotide
agttcttcaatatatagatatattttagtaaaaaaggaacatgacgttgatcatttggnnnnnnnnnnnnnnnngagaagagcatttattgtgttttggaacattaattgtgagatgggatttttcaattttattattttatttttgtttttttccannnnnnnnnnnnnnnaaatttgggaacttttgatacgatcttgtgaaaacactgtattttcgactgaaaattccactttcttcatcttgttttttagctaaaaagagggactgttaaatacaatgtatgataccatgacaaaaatctttcctgaattgtctttgtaaa

SEQ ID NO: 1527 - DNA, 178 bp, Homo sapiens
tttgggagctcctccatctccaatggctgggatttgtggcagggattccactcagaacctctctggaatttgtgcctgatgtgccttccactggattttggggttcccagcaccccatgtggattttgggggtcccttttgtgtctcccccgccattcaaggactcctctctttcttc

SEQ ID NO: 1528 - DNA, 597 bp, Homo sapiens
  misc_feature (318)..(318): n includes a, c, g, or t, or contains no nucleotide
atgagccagccgagagcccatcggagaccccaggcccccgcccggcaggacctgcaggggacgagccagccgagagcccatcggagaccccaggcccccgcccggcaggacctgcaggggacgagccagccgagagcccatcggagaccccaggccccagcccggcaggacctacaagggatgagccagccaaggcgggggaggcagcagagttgcaggacgcagaggtggagtcttctgccaagtctgggaagccttaaggaaaggagtgcccgtcggcgtcttggtcctcctgtccctgctgcaggggctggggcntccggagctgctgcgggctcccctcaggctctgcttcgtgacccgtgacccatgacccacagtgctggcctcctgtggggccactatagcagccaccagaagccgcgaggccctcagggaagcccaaggcctgcagaagcctcctggcctggctgtgtcttccccacccagctctcccctgcgcccctgtctttgtaaattgacccttctggagtggggggcggcgggcagggctgcttttcttagtctgataccaagcaaggccttttctgaataaat

SEQ ID NO: 1529 - DNA, 365 bp, Homo sapiens
taaaccaagaggagttcattgctattatgactggtgacatttaaagaattacaaggataaacactaagaatgttgcagttaccatcttatattctatttttgtgcctggagccatgtgaaaaaaaccaacttagttcttttatcctaaaggaccaaaaataagcatcttatatatctgtattttactactgttaagtttctttgtatgaactgtgttgttagtactcagatagtttagctttgtatttataatagagcttttatataaagttttaaaaattgaatgtgtgatatgtgttctttgaaggttttttaatttaacatttatagtcactttttagtgcacacattttccagactttcgt

SEQ ID NO: 1530 - DNA, 526 bp, Homo sapiens
  misc_feature (215)..(215): n includes a, c, g, or t, or contains no nucleotide
tgttgggtccagtcgtgcttgattggaaattgttgtttctaaatctatatgagaattgacaataagtatttttattataactcagcccatacatatatactatgtatgcagtgcatctgcatagaacagttccttatccttggccttctgttttattgtttttttctttgctgttttccctttgcttctaatattacagttttgtattttgtaancaaaaatcaaataatgcatatcagaatctttatatggaagaaatcctttattgcctttcctttgtttccttgtaaaggcaccctgttctgttatggtttttcattatataaaattattatatctatatatgacatatgctaaaatttcttggagagtgttaatcttttctgtgactaaatagcaataataagtggaaaattagaaattatttccaggtattatatttgtcacaggccattgtaaataccaagtatattgtgtctgccataatttttaaaaatacattcattgtcttcagtcatacagcaag

SEQ ID NO: 1531 - DNA, 500 bp, Homo sapiens
gccctcataagcagcgaccttgtggcatcgtcagaaggaagggattggtttggcaagaacttgtttacaacatttttgcaaatctaaagttgctccatacaatgactagtcacctgggggggttgggcgggcgccatcttccattgccgccgcgggtgtgcggtctcgattcgctgaattgcccgtttccatacagggtctcttccttcggtcttttgtatttttgattgttatgtaaaactcgcttttattttaatattgatgtcagtatttcaactgctgtaaaattataaacttttatacttgggtaagtcccccaggcgagttcctcgctctgggatgcaggcatgcttctcaccgtgcagagctgcacttggcctcagctggctgtatggaaatgcaccctccctcctgcgctcctctctagaacctgggctgtgctgcttttgagcctcagaccccagggcagcatctcggttctgcgccacttcctttgtgtt

SEQ ID NO: 1532 - DNA, 320 bp, Homo sapiens
  misc_feature (76)..(90): n includes a, c, g, or t, or contains no nucleotide
  misc_feature (130)..(130): n includes a, c, g, or t, or contains no nucleotide
  misc_feature (132)..(132): n includes a, c, g, or t, or contains no nucleotide
  misc_feature (238)..(259): n includes a, c, g, or t, or contains no nucleotide
acaacatgatcatcgcctacgtgctcttctacctcttcgcctccctcaccagcgacctaccctgggagcactgtgnnnnnnnnnnnnnnncagaactctgcctggagcacagagtctccaaggacggtcnanagccctgcccctcaacctcacctgcaccgtcagccccagcgaggagtactggagccgctacgtcctccacatccaaggcagccagggcatcggcagccctggggannnnnnnnnnnnnnnnnnnnnntgcctgctgctggcctgggtcatcgtgttcctctgtatcctcaagggtgtgaagtcttcgg

SEQ ID NO: 1533 - DNA, 524 bp, Homo sapiens
  misc_feature (26)..(26): n includes a, c, g, or t, or contains no nucleotide
  misc_feature (28)..(28): n includes a, c, g, or t, or contains no nucleotide
  misc_feature (33)..(33): n includes a, c, g, or t, or contains no nucleotide
  misc_feature (35)..(35): n includes a, c, g, or t, or contains no nucleotide
  misc_feature (38)..(40): n includes a, c, g, or t, or contains no nucleotide
  misc_feature (42)..(44): n includes a, c, g, or t, or contains no nucleotide
  misc_feature (46)..(65): n includes a, c, g, or t, or contains no nucleotide
  misc_feature (170)..(170): n includes a, c, g, or t, or contains no nucleotide
  misc_feature (281)..(299): n includes a, c, g, or t, or contains no nucleotide
  misc_feature (301)..(301): n includes a, c, g, or t, or contains no nucleotide
  misc_feature (411)..(425): n includes a, c, g, or t, or contains no nucleotide
atttctcagcgtcttctctggtagananagctntnaannngnnncnnnnnnnnnnnnnnnnnnnntgcaatgcttcctttttattttcataaacatagatcctttcatttctcgctgggacgtcctcatacactggacacaccccatagtacaggggcggctccttagangcagtcgctccagctctgtaggtgtcggtgtcactagggggcaccgagcaggtcttggatgtcacagcttcctcctctggaggattcaggcccacactgtaaccaaaatcnnnnnnnnnnnnnnnnnnngncctgatcagttgggttcccttcagctggcttcaaaatcctttgtgggtcctggctgagagctgtgacacctgcctcatggtggtagaaagaagacagccttcctccttgnnnnnnnnnnnnnnnagccaattttttctcaaaaatgaaccttgtagttgatgtaatgggtccacatttcaatccggctttgacgatttcttctctaaggtcatctggattcag

SEQ ID NO: 1534 - DNA, 586 bp, Homo sapiens
  misc_feature (171)..(265): n includes a, c, g, or t, or contains no nucleotide
  misc_feature (288)..(288): n includes a, c, g, or t, or contains no nucleotide
  misc_feature (291)..(291): n includes a, c, g, or t, or contains no nucleotide
  misc_feature (293)..(293): n includes a, c, g, or t, or contains no nucleotide
  misc_feature (296)..(299): n includes a, c, g, or t, or contains no nucleotide
  misc_feature (305)..(305): n includes a, c, g, or t, or contains no nucleotide
gaagaacctctcacttcaccctggagcccatccagtctcccaacttgtattaaagacagaggcagaagtttggtggtggtggtgttggggtatggtttagtaatatccaccagaccttccgatccagcagtttggtgcccagagaggcatcatggtggcttccctgcgccnnnnnnnnnnnnnnnnnnnnnnnnnnnnnnnnnnnnnnnnnnnnnnnnnnnnnnnnnnnnnnnnnnnnnnnnnnnnnnnnnnnnnnnnnnnnnnnataaaattagaatatatttatanaananaannnnaaaaancactgttgagtaaggaaaaaaaggcatgctgctgaatgatgggtatggaactttttaaaaaagtacatgcttttatgtatgtatattgcctatggatatatgtataaatacaatatgcatcatatattgatataacaagggttctggaagggtacacagaaaacccacagctcgaagagtggtgacgtctggggtggggaagaagggtctgggggagggttggttaaagggagatttggctttcccataatgcttcatcatttttcccaaaaggagagtga

SEQ ID NO: 1535 - DNA, 385 bp, Homo sapiens
ccgatctcctactacaagcccgagttctacacgccggttgatgggggcactgctcacctgtctgtcgtcgcagaggacggcagtgctgtgtccgccaccagcaccatcaacctctactttggctccaaggtccgctccccggtcagcgagatcctgttcaatgatgaaatggatgacttcagctctcccaacatcaccaacgagtttggggtgcccccctcacctgccaatttcatccagccagggaagcagccgctctcgtcaatgtgcccgacgatcatggtgggccaggacggccaggtccggatggtggtgggagctgctgggggcacacagatcaccacagccactgcactggccatcatctacaacctctggttcggct

SEQ ID NO: 1536 - DNA, 238 bp, Homo sapiens
  misc_feature (47)..(47): n includes a, c, g, or t, or contains no nucleotide
  misc_feature (52)..(52): n includes a, c, g, or t, or contains no nucleotide
  misc_feature (86)..(86): n includes a, c, g, or t, or contains no nucleotide
tgccaaaaccaagattttgaaggaaatgagtggccagcgccagggcnccagnccatgtggcctgcccagcctcaatgtcacttggnggcggggtggggtgggggtgggcagcagcatcccagccttgagatgcttcactttccttctctgtaaccagactttgaaaaattgttcgtttcatcaggctctgttcctcaatggccttttgctacgtgcctcccgagaaatttgtcttttt

SEQ ID NO: 1537 - DNA, 583 bp, Homo sapiens
  misc_feature (26)..(119): n includes a, c, g, or t, or contains no nucleotide
  misc_feature (150)..(186): n includes a, c, g, or t, or contains no nucleotide
  misc_feature (213)..(213): n includes a, c, g, or t, or contains no nucleotide
  misc_feature (288)..(288): n includes a, c, g, or t, or contains no nucleotide
  misc_feature (302)..(302): n includes a, c, g, or t, or contains no nucleotide
  misc_feature (307)..(307): n includes a, c, g, or t, or contains no nucleotide
  misc_feature (317)..(325): n includes a, c, g, or t, or contains no nucleotide
  misc_feature (415)..(415): n includes a, c, g, or t, or contains no nucleotide
  misc_feature (421)..(421): n includes a, c, g, or t, or contains no nucleotide
  misc_feature (477)..(477): n includes a, c, g, or t, or contains no nucleotide
  misc_feature (522)..(522): n includes a, c, g, or t, or contains no nucleotide
  misc_feature (531)..(531): n includes a, c, g, or t, or contains no nucleotide
cttggccagttttaccaggaggtgcnnnnnnnnnnnnnnnnnnnnnnnnnnnnnnnnnnnnnnnnnnnnnnnnnnnnnnnnnnnnnnnnnnnnnnnnnnnnnnnnnnnnnnnnnnnnnnccaggaggggcccccgggagtggagatttcnnnnnnnnnnnnnnnnnnnnnnnnnnnnnnnnnnnnnctgtgcccaccctgtacacttggcttncccctgcaactgcagggccgcttctggggcctggaccaccatggggaggaagagtcccactcattacaaataaanaaaggtggtgtgancctgngaaaaaaaannnnnnnnntccatgtggccaaatcctagggcctcaacctcgcatcctgaaccttagcatcgtggaacacagaagcttccactgtcagctctcaagagnccatgnccaggaaggcccatgctgagctttcagtccagccccttcattttacaaacaagganactgagctcgaaccacccatttgagatgtcactgtggcccccagntagaggccnagggctgggagcattctccaggagcagaggttcagtctgcttcatggtctct

SEQ ID NO: 1538 - DNA, 520 bp, Homo sapiens
  misc_feature (58)..(58): n includes a, c, g, or t, or contains no nucleotide
  misc_feature (61)..(61): n includes a, c, g, or t, or contains no nucleotide
  misc_feature (73)..(73): n includes a, c, g, or t, or contains no nucleotide
  misc_feature (82)..(82): n includes a, c, g, or t, or contains no nucleotide
  misc_feature (85)..(85): n includes a, c, g, or t, or contains no nucleotide
  misc_feature (87)..(87): n includes a, c, g, or t, or contains no nucleotide
  misc_feature (105)..(105): n includes a, c, g, or t, or contains no nucleotide
  misc_feature (112)..(112): n includes a, c, g, or t, or contains no nucleotide
  misc_feature (116)..(116): n includes a, c, g, or t, or contains no nucleotide
  misc_feature (146)..(146): n includes a, c, g, or t, or contains no nucleotide
  misc_feature (161)..(161): n includes a, c, g, or t, or contains no nucleotide
  misc_feature (216)..(216): n includes a, c, g, or t, or contains no nucleotide
  misc_feature (218)..(218): n includes a, c, g, or t, or contains no nucleotide
  misc_feature (223)..(223): n includes a, c, g, or t, or contains no nucleotide
  misc_feature (225)..(225): n includes a, c, g, or t, or contains no nucleotide
  misc_feature (241)..(269): n includes a, c, g, or t, or contains no nucleotide
  misc_feature (474)..(493): n includes a, c, g, or t, or contains no nucleotide
agccaccaaggaaagggcctggagtggattgggtacattattacagtgggagcacctnctncaaccgtccctncaagagtcnagntnccatatcagtagacacgncaagaancagnttctccctgaagctgagctctgtgactgcngcagacacggccgtngtattactgtgccagagacacaatgaggggaggtgagtgtgagcccagacacaancntcccngncagggaggcggagggnnnnnnnnnnnnnnnnnnnnnnnnnnnnnagggggtgcgcggggcccacagagcatgaggccgggtcaggagcaggtgcagggagggcggggcttcctcatctgctcagtgctctccctcctcgccagcacctcagctgtccccagggctcctctttctttattatctgtggttctgcttcctcacatccttgtggtaggaaaggaaagaggaaggcaaattttcctcttagannnnnnnnnnnnnnnnnnnntaggaactttcctacaagttcctgaat

SEQ ID NO: 1539 - DNA, 295 bp, Homo sapiens
  misc_feature (166)..(180): n includes a, c, g, or t, or contains no nucleotide
  misc_feature (229)..(251): n includes a, c, g, or t, or contains no nucleotide
aactaggaccgacagtgacttcaccagcttgctaggtcagaatgagagactggtgggtctgtctacctgtttcttctacaagatccctatttgactgtaaaagtagctaatactcacatgttctccaatcccaggtagccatggtagagttgggtagagttgagcnnnnnnnnnnnnnnncaaatgtggtgtctgaaatggaaagaactaaggcaaccaggaaggcacnnnnnnnnnnnnnnnnnnnnnnnatctgaaagtcaggcctgctgcaggacaggatcccccagagacc

SEQ ID NO: 1540 - DNA, 556 bp, Homo sapiens
gaacccagggctctgccccagtcgttagaatataggtctcttctcccagaatcccagccggccaatggaaacctcacgctgggtcctaattaccagtctttaaaggcccagcccctagaaacccaagctcctcctcggaaccgctcacctagagccagaccaacgttactcagggctcctcccagcttgtaggagctgaggtttcacccttaacccaagggagcacaggtcccacctccagcccggggagcctaggaccactcagcccctaggagtatatttccgcacttcagaattccatatcttgcgaatccaagctccctgccccaaataacttcagtcctgcttccagaatttggaaatcctagtttcctctccttcgtatcccgagtctgggacacaaaactccgcccccagcctatgagcatcctgagccccgccctcttcctgacgaaactggccccggatcagagcaggacctcccttccgaccctctgggaacctcccagaggtccagcccatctcggagcatcccggaggaaatctgcagaggggt

SEQ ID NO: 1541 - DNA, 429 bp, Homo sapiens
  misc_feature (116)..(133): n includes a, c, g, or t, or contains no nucleotide
  misc_feature (400)..(400): n includes a, c, g, or t, or contains no nucleotide
aaatcagtgacctgaagcaagaaatcttgccttttaatgtatcattaattagggctgctgtgatattgtcagcttgcattaacaattagaagatagagaacccgccatcagggtgnnnnnnnnnnnnnnnnnngactacacttggtagttttccaccatttaaagaactggtaaatatgaaacatttgttgagttaccagaattgccattaacagtgttttctttcccatattccatgctttctgcctctgtgtatatatataatatatatgtatatgactgtgctgtgtatttatcgaagctagtaagcaataatttatatgtaaaaatggccaagcaatataaggttaaaacttatataagtaacccttaccttatcttgtattttcaattttttttnaaaactgcttttccaaatatgagactatg

SEQ ID NO: 1542 - DNA, 517 bp, Homo sapiens
  misc_feature (215)..(215): n includes a, c, g, or t, or contains no nucleotide
ctactatagcgtcttatgtatggtttaaaggaaatttatcaggtgagagagatgagcaacgttgtcttttctctcaaagctgtaatgtgggttttgttttactgtttatttgtttgttgttgtatccttttctccttgttatttgcccttcagaatgcacttgggaaaggctggttccttagcctcctggtttgtgtcttttttttttttttttnaaacacagaatcactctggcaattgtctgcagctgccactggtgcaaggccttaccagccctagcctctagcacttctctaagtgccaaaaacagtgtcattgtgtgtgttcctttcttgatacttagtcatgggaggatattacaaaaaagaaatttaaattgtgttcatagtctttcagagtagctcactttagtcctgtaactttattgggtgatattttgtgttcagtgtaattgtcttctctttgctgattatgttaccatggtactcctaaagcatatgcctcacctggttaaaaa

SEQ ID NO: 1543 - DNA, 527 bp, Homo sapiens
  misc_feature (32)..(47): n includes a, c, g, or t, or contains no nucleotide
  misc_feature (76)..(109): n includes a, c, g, or t, or contains no nucleotide
cagctcagacgcaaccccgggaggagcagttnnnnnnnnnnnnnnnntcagtcagtgaacttcccatcatgcaccnnnnnnnnnnnnnnnnnnnnnnnnnnnnnnnnnnggtcaacagtgcagctttccctgcccccatcgagaaaaccatctccaaaaccaaaggcagaccgaaggctccacaggtgtacaccattccacctcccaaggagcagatggccaaggataaagtcagtctgacctgcatgataacagacttcttccctgaagacattactgtggagtggcagtggaatgggcagccagcggagaactacaagaacactcagcccatcatggacacagatggctcttacttcgtctacagcaagctcaatgtgcagaagagcaactgggaggcaggaaatactttcacctgctctgtgttacatgagggcctgcacaaccaccatactgagaagagcctctcccactctcctggtaaatgatcccagtgtccttggagccctctggtccatcaggactct

SEQ ID NO: 1544 - DNA, 565 bp, Homo sapiens
  misc_feature (30)..(30): n includes a, c, g, or t, or contains no nucleotide
  misc_feature (61)..(85): n includes a, c, g, or t, or contains no nucleotide
  misc_feature (275)..(277): n includes a, c, g, or t, or contains no nucleotide
  misc_feature (279)..(279): n includes a, c, g, or t, or contains no nucleotide
  misc_feature (281)..(283): n includes a, c, g, or t, or contains no nucleotide
  misc_feature (285)..(285): n includes a, c, g, or t, or contains no nucleotide
  misc_feature (289)..(289): n includes a, c, g, or t, or contains no nucleotide
  misc_feature (293)..(294): n includes a, c, g, or t, or contains no nucleotide
  misc_feature (296)..(296): n includes a, c, g, or t, or contains no nucleotide
  misc_feature (298)..(298): n includes a, c, g, or t, or contains no nucleotide
  misc_feature (300)..(301): n includes a, c, g, or t, or contains no nucleotide
  misc_feature (490)..(504): n includes a, c, g, or t, or contains no nucleotide
gtcttggagtttggaactctaccctggtanggaaagcaccgcagcatgtggggaagcaagnnnnnnnnnnnnnnnnnnnnnnnnnctatggggggaggggggagggctgcctgaaaaccatccatctgtggaaatgacagcggggaaggtttttatgtgcctttttgtttttgtaaaaaaggaacacccggaaagactgaaagaatacattttatatctggatttttacaaataaagatggctattataatggaaaaaaaaaaaaaaaaaaaaannnanannnanaaanaaanngngncnnctgccccagtagaagatagatatctctttgagccactgcacaatggtgagaactgtagtgatgtaatagatgcactatggccctgaagaacagccaaaggtgcacaggttcgaagacaccagactcggatcattttatcacaacttccagctgctatcatggtattctcatagtttacagccatgtctnnnnnnnnnnnnnnntgtcctcttaaggtagctaacaacctcccatcatctgttgcccatattttcacaagacagt

SEQ ID NO: 1545 - DNA, 503 bp, Homo sapiens
  misc_feature (314)..(339): n includes a, c, g, or t, or contains no nucleotide
gttgcctactcttctgtccagggagctcacgctgattgatgataagccatactgtgcagagaaaaaggcaactccaattaaactcatatggtccctggtggccttaattttcaccttttttgtccctttgttgagcattgtgacctgctactgttgcattgcaaggaagctgtgtgcccattaccagcaatcaggaaagcacaacaaaaagctgaagaaatctataaagatcatctttattgtcgtggcagcctttcttgtctcctggctgcccttcaatactttcaagttcctggccattgtctctgggttgnnnnnnnnnnnnnnnnnnnnnnnnnntattcttcagcttggtatggaggtgagtggacccttggcatttgccaacagctgtgtcaaccctttcatttactatatcttcgacagctacatccgccgggccattgtccactgcttgtgcccttgcctgaaaaactatgactttgggagtagcactgagacat

SEQ ID NO: 1546 - DNA, 335 bp, Homo sapiens
  misc_feature (137)..(155): n includes a, c, g, or t, or contains no nucleotide
  misc_feature (175)..(212): n includes a, c, g, or t, or contains no nucleotide
  misc_feature (215)..(215): n includes a, c, g, or t, or contains no nucleotide
  misc_feature (254)..(254): n includes a, c, g, or t, or contains no nucleotide
ctgttgtgtgcctgctgaataacttctatcccagagaggccaaagtacagtggaaggtggataacgccctccaatcgggtaactcccaggagagtgtcacagagcaggacagcaaggacagcacctacagcctcagnnnnnnnnnnnnnnnnnnnaaagcagactacgagaaacnnnnnnnnnnnnnnnnnnnnnnnnnnnnnnnnnnnnnnagntcgcccgtcacaaagagcttcaacaggggagagtgttanagggagaagtgcccccacctgctcctcagttccagcctgaccccctcccatcctttggcctctgaccctttttccacaggg

SEQ ID NO: 1547 - DNA, 481 bp, Homo sapiens
ctgacgttttgctttttcatatgccaattaaacccggtctaaatccaaatgcttctccagccatccaggagtggctgtccttttcagtcttgtcttttatataggtagctgagggggaagatttagaagccttgcactcactaaatagattaaacagagcaggcttgtttgttgaattgctccaaagtccaacagacacacactgagcaggtgttttacactcacattccctttttgccccttaaatagaaagtgcaggtaaaggtttatacaacaagaaagcacattgaaaataatttgatactctaacaatccattaacatgtgtaggggttacggtgaggatcatgtgttgtattcgaaaaacggggagagggatgcttaattggccctcgcttgctatttttttctcatttcttcacaataggaccgtctttggcagcagcaaaatgtatttcagtatggcagtctttcctctctta

SEQ ID NO: 1548 - DNA, 329 bp, Homo sapiens
ttctctcacacgtgtccggcctgggctggctggcctcctacctgccctccttcctccgtgtgcccaagtggattattgccctctacactagcaagttctaaccctcctggtctgacactacgtctctgcttgtcttctcatttggacttggtggttcgtcctgtctcagtgaaacagcagcctttcttgtttacccatacccttgatatgaagagaagccctctgctgtgtgtccgtggtgagttctggggtgcgcctaggtcccttctttgtgccttggttttccttgtccttctttttactttttgccttagtattgaaaaatgctc

SEQ ID NO: 1549 - DNA, 117 bp, Homo sapiens
gtaaaagctactatgtactgccttagtgctgatgcctgtgtactgccttaaatgtacctatggcaatttagctctcttgggttcccaaatccctctcacaagaatgtgcagaagaaa

SEQ ID NO: 1550 - DNA, 268 bp, Homo sapiens
  misc_feature (28)..(28): n includes a, c, g, or t, or contains no nucleotide
  misc_feature (30)..(30): n includes a, c, g, or t, or contains no nucleotide
  misc_feature (36)..(37): n includes a, c, g, or t, or contains no nucleotide
  misc_feature (40)..(40): n includes a, c, g, or t, or contains no nucleotide
  misc_feature (45)..(59): n includes a, c, g, or t, or contains no nucleotide
  misc_feature (62)..(62): n includes a, c, g, or t, or contains no nucleotide
  misc_feature (106)..(106): n includes a, c, g, or t, or contains no nucleotide
  misc_feature (117)..(117): n includes a, c, g, or t, or contains no nucleotide
  misc_feature (134)..(134): n includes a, c, g, or t, or contains no nucleotide
  misc_feature (138)..(138): n includes a, c, g, or t, or contains no nucleotide
  misc_feature (156)..(157): n includes a, c, g, or t, or contains no nucleotide
  misc_feature (180)..(180): n includes a, c, g, or t, or contains no nucleotide
  misc_feature (191)..(191): n includes a, c, g, or t, or contains no nucleotide
  misc_feature (210)..(210): n includes a, c, g, or t, or contains no nucleotide
  misc_feature (218)..(232): n includes a, c, g, or t, or contains no nucleotide
gaatgatgtcgtcagtaatgcctggaangntgatgnntcntatgnnnnnnnnnnnnnnncancctgccttaccgccaggagtaaatagtatggatgtagcagcagntacagcatctngtgcaaaatcaatgtgnactnaacataaatcacctgatnnaaggacttactactacaacactnaaaccaaacantctacctgggagaaaccanatgatctnnnnnnnnnnnnnnngcaactcttatctaaatgcccctggaaggaatacaa

SEQ ID NO: 1551 - DNA, 188 bp, Homo sapiens
caatggatggtcgtgcggaactgctccagtttcctgatcaagaggaataagcagacctacagcactgagcccaataacttgaaggcccgcaattccttccgctacaacggactgattcaccgcaagactgtgggcgtggagccggcagccgacggcaaaggtgtcgtggtggtcattaagcggagatc

SEQ ID NO: 1552 - DNA, 531 bp, Homo sapiens
  misc_feature (66)..(143): n includes a, c, g, or t, or contains no nucleotide
  misc_feature (275)..(278): n includes a, c, g, or t, or contains no nucleotide
  misc_feature (286)..(286): n includes a, c, g, or t, or contains no nucleotide
  misc_feature (290)..(290): n includes a, c, g, or t, or contains no nucleotide
  misc_feature (292)..(300): n includes a, c, g, or t, or contains no nucleotide
  misc_feature (302)..(303): n includes a, c, g, or t, or contains no nucleotide
  misc_feature (467)..(478): n includes a, c, g, or t, or contains no nucleotide
  misc_feature (496)..(496): n includes a, c, g, or t, or contains no nucleotide
ccatgactctttaggtgtgtatgtgtacctttcagcatcctaggaatttttatactaaaagcaaannnnnnnnnnnnnnnnnnnnnnnnnnnnnnnnnnnnnnnnnnnnnnnnnnnnnnnnnnnnnnnnnnnnnnnnnnnnnnaatttgagaaaaatattacccagtaacattgaatgtagatggctaaacgattcttactcagtgtgatgtataatgatgcaacagggacccttgtaaattgtcatacgccaataaaatgtcacaagtaataannnnaaaaaaanaaanannnnnnnnnanntcacacatcttatttctgtggcctattttagaatatcagcgcatctgttaggaagattactggtgtggtaaggcttgataaatgctttataaactccctcaaacctttctttactgtttttttgttttgtcttgtttttgtttttgtttttgtttttgtttttnnnnnnnnnnnncccttgtctcccctgggnaaatgggaaattttacagttggtaaatctaagcca

SEQ ID NO: 1553 - DNA, 561 bp, Homo sapiens
  misc_feature (26)..(41): n includes a, c, g, or t, or contains no nucleotide
  misc_feature (112)..(112): n includes a, c, g, or t, or contains no nucleotide
  misc_feature (294)..(334): n includes a, c, g, or t, or contains no nucleotide
  misc_feature (364)..(466): n includes a, c, g, or t, or contains no nucleotide
gcttccaagggcagcagtacattctnnnnnnnnnnnnnnnnccaagctgggatgcctggggcggcaacacggcctaccccgccgagaggctcacctccttccggcctgcggnctgtgctaaccaccgtgactcgaggctgacaatcttcgagcaagagaacttcctgggcaagaaaggagagctgagcgatgactatccttccctccaggccatgggatgggaaggcaatgaagtagggtccttccacgtccactctggggcctgggtttgctcccagtttccgggctaccgannnnnnnnnnnnnnnnnnnnnnnnnnnnnnnnnnnnnnnnnctacaaacatttccgggagtggggctctcnnnnnnnnnnnnnnnnnnnnnnnnnnnnnnnnnnnnnnnnnnnnnnnnnnnnnnnnnnnnnnnnnnnnnnnnnnnnnnnnnnnnnnnnnnnnnnnnnnnnnnnggaggctgtggtgtgttctctccttctgcctccccctgtaacctgtgtgaacccagcacccatgtgaactggtccgtgcacagtcagcacaaaaa

SEQ ID NO: 1554 - DNA, 447 bp, Homo sapiens
  misc_feature (93)..(98): n includes a, c, g, or t, or contains no nucleotide
  misc_feature (107)..(108): n includes a, c, g, or t, or contains no nucleotide
  misc_feature (110)..(110): n includes a, c, g, or t, or contains no nucleotide
  misc_feature (113)..(113): n includes a, c, g, or t, or contains no nucleotide
  misc_feature (116)..(116): n includes a, c, g, or t, or contains no nucleotide
  misc_feature (120)..(120): n includes a, c, g, or t, or contains no nucleotide
  misc_feature (132)..(132): n includes a, c, g, or t, or contains no nucleotide
  misc_feature (134)..(134): n includes a, c, g, or t, or contains no nucleotide
  misc_feature (136)..(136): n includes a, c, g, or t, or contains no nucleotide
  misc_feature (140)..(145): n includes a, c, g, or t, or contains no nucleotide
  misc_feature (148)..(148): n includes a, c, g, or t, or contains no nucleotide
  misc_feature (152)..(152): n includes a, c, g, or t, or contains no nucleotide
  misc_feature (156)..(156): n includes a, c, g, or t, or contains no nucleotide
  misc_feature (161)..(161): n includes a, c, g, or t, or contains no nucleotide
  misc_feature (164)..(164): n includes a, c, g, or t, or contains no nucleotide
  misc_feature (169)..(189): n includes a, c, g, or t, or contains no nucleotide
aggagagccggatctccgtgcccgtccattcttttgcctccttaaatataaagacgactgtgcctgaggtggagcctccccaggacagccacnnnnnnaagacggtnntnatncangacnattgagacccgnantngggnnnnnntgntganagantcccnganggagnnnnnnnnnnnnnnnnnnnnntcttctgcccacagttactgaaccccttggtccggagccttgactctgccctaggcctgctcaaagcccaaaccctaagaccactcctgaattgtctcctctccctctgcatgtgtctaaaaggtggtaccaggcatccctttcctggcttatggccaagccctacccggccagcagtcgctgggcctctccctgccctgacacttgatgtgacctatgtgcttcccttttcatgtcccgataagaagccaatgatcc

SEQ ID NO: 1555 - DNA, 511 bp, Homo sapiens
  misc_feature (26)..(26): n includes a, c, g, or t, or contains no nucleotide
  misc_feature (28)..(28): n includes a, c, g, or t, or contains no nucleotide
  misc_feature (30)..(30): n includes a, c, g, or t, or contains no nucleotide
  misc_feature (32)..(32): n includes a, c, g, or t, or contains no nucleotide
  misc_feature (34)..(34): n includes a, c, g, or t, or contains no nucleotide
  misc_feature (38)..(38): n includes a, c, g, or t, or contains no nucleotide
  misc_feature (61)..(61): n includes a, c, g, or t, or contains no nucleotide
  misc_feature (63)..(63): n includes a, c, g, or t, or contains no nucleotide
  misc_feature (65)..(65): n includes a, c, g, or t, or contains no nucleotide
  misc_feature (72)..(73): n includes a, c, g, or t, or contains no nucleotide
  misc_feature (75)..(75): n includes a, c, g, or t, or contains no nucleotide
  misc_feature (79)..(85): n includes a, c, g, or t, or contains no nucleotide
  misc_feature (102)..(106): n includes a, c, g, or t, or contains no nucleotide
  misc_feature (111)..(111): n includes a, c, g, or t, or contains no nucleotide
  misc_feature (115)..(116): n includes a, c, g, or t, or contains no nucleotide
  misc_feature (118)..(118): n includes a, c, g, or t, or contains no nucleotide
  misc_feature (126)..(126): n includes a, c, g, or t, or contains no nucleotide
  misc_feature (142)..(142): n includes a, c, g, or t, or contains no nucleotide
  misc_feature (147)..(147): n includes a, c, g, or t, or contains no nucleotide
  misc_feature (151)..(151): n includes a, c, g, or t, or contains no nucleotide
  misc_feature (173)..(173): n includes a, c, g, or t, or contains no nucleotide
  misc_feature (186)..(186): n includes a, c, g, or t, or contains no nucleotide
  misc_feature (190)..(190): n includes a, c, g, or t, or contains no nucleotide
  misc_feature (208)..(225): n includes a, c, g, or t, or contains no nucleotide
  misc_feature (314)..(314): n includes a, c, g, or t, or contains no nucleotide
tgctcctgctacaacttgtcggcgancnangnantccncaatcctagataaggtgatcttncncnagctcannangctnnnnnnnctggcgcggtccagacnnnnngcagncatnngngctgtccntgcagagagccacatntaccncgangggctgcgcgcagggcctccanaagtggctgcacnacanccttatttccatagtggnnnnnnnnnnnnnnnnnngcctactcgagctcgggttcatgacgctctcgatattcctgtgcagaaacctggaccacgtctacaaccggctcgctcgataccgttangccccgccctccccaaagtcccgccccgcccccgtcacgtgcgctgggcacttccctgctgcctgtaaatatttgtttaatccccagttcgcctggagccctccgccttcacattcccctggggacccacgtggctgcgtgcccctgctgctgtcacctctcccacgggacctggggctttcgtccacagcttcctg

SEQ ID NO: 1556 - DNA, 294 bp, Homo sapiens
  misc_feature (51)..(65): n includes a, c, g, or t, or contains no nucleotide
  misc_feature (116)..(116): n includes a, c, g, or t, or contains no nucleotide
  misc_feature (240)..(240): n includes a, c, g, or t, or contains no nucleotide
gtaggccagcccatggtgttgtgtacactgtggagtcgacaggggcctacnnnnnnnnnnnnnnnctgccagggggctctgaactagtgcctgctacccaggacacccgggccatncccctggctgggcagcctggcacaagtgaagaagaaggcagtgggaaaactgggtttatctcaaggcagcagcctgagcccaggagcagaggacccagttgttataaggcgctgggagaggatnggcagctcccactgccccagagcggagctcgaagcacccaggttgcccacggaa

SEQ ID NO: 1557 - DNA, 498 bp, Homo sapiens
  misc_feature (294)..(295): n includes a, c, g, or t, or contains no nucleotide
  misc_feature (298)..(298): n includes a, c, g, or t, or contains no nucleotide
  misc_feature (304)..(305): n includes a, c, g, or t, or contains no nucleotide
  misc_feature (308)..(310): n includes a, c, g, or t, or contains no nucleotide
  misc_feature (428)..(448): n includes a, c, g, or t, or contains no nucleotide
atacaggcaccacatactgatgacaataatctatactttgaaccaaaagttgcagagtggtggaatgctatgttttaggaatcagtccagatgtgagttttttccaagcaacctcactgaaacctatataatggaatacatttttctttgaaagggtctgtataatcattttctagaaagtatgggtatctatactaatgtttttatatgaagaacataggtgtctttgtggttttaaagacaactgtgaaataaaattgtttcaccgcctggtaaaaaaaaaaaaaaaaaaannaanaaaaannaannntatatagtagtctgggattacaactggtcatttgcctaattaaattgccttatttttagtgatggagaaaaataatacctcttatctgtcatagccttataacagttctccagtgtannnnnnnnnnnnnnnnnnnnncatggagatttggtttagaatacaaatttcagggttcaaccgtgggtgat

SEQ ID NO: 1558 - DNA, 556 bp, Homo sapiens
  misc_feature (132)..(132): n includes a, c, g, or t, or contains no nucleotide
  misc_feature (134)..(135): n includes a, c, g, or t, or contains no nucleotide
  misc_feature (137)..(137): n includes a, c, g, or t, or contains no nucleotide
  misc_feature (140)..(140): n includes a, c, g, or t, or contains no nucleotide
  misc_feature (142)..(143): n includes a, c, g, or t, or contains no nucleotide
  misc_feature (145)..(148): n includes a, c, g, or t, or contains no nucleotide
  misc_feature (150)..(153): n includes a, c, g, or t, or contains no nucleotide
  misc_feature (155)..(160): n includes a, c, g, or t, or contains no nucleotide
  misc_feature (163)..(181): n includes a, c, g, or t, or contains no nucleotide
  misc_feature (183)..(184): n includes a, c, g, or t, or contains no nucleotide
  misc_feature (188)..(188): n includes a, c, g, or t, or contains no nucleotide
  misc_feature (191)..(242): n includes a, c, g, or t, or contains no nucleotide
ttctcacgtgattcttgtgagactctttttggttataattactatttaatatttagactattttactgagcagactttataaatgagatatctacaaggcacttaaagtgttacagatgttttaccttaagnannanttnanntnnnntnnnntnnnnnnagnnnnnnnnnnnnnnnnnnnanntgtngtnnnnnnnnnnnnnnnnnnnnnnnnnnnnnnnnnnnnnnnnnnnnnnnnnnnncaacagtcctcaaatacactgatgtatgaaactattcatacatcaagcagcatttttttcactctccttagaattggaactatgcagttaaggcagataaaatgtacagatgtttcatatattacaggttacatatataaatcaaaatttcctatataaaactgatttgggatttggggtggaaatattttgaatattaatttatttttaaagatgcaagataggactttgtgcaatgtatttttgtaaatgcttttcaaaatatctgtctttggtagtgcttctgctgctgccaccaaattgataagatgcta

SEQ ID NO: 1559 - DNA, 320 bp, Homo sapiens
tccaccatcgtcttcttggccatgggaggcctttccctaagccagctgcccccagagccacagttcccctatgtggaagtggggcgggcttcatagagacttgggaatgagctgaaggtgaaacattttctccctggatttttaccagtctcacatgattccagccatcaccttagaccaccaagccttgattggtgttgccagttgtcctccttccggggaaggattttgcagttctttggctgaaaggaagctgtgcgtgtgtgtgtgtgtatgtgtgtgtgtgtatgtgtatctcacactcatgcattgtcctcttt

SEQ ID NO: 1560 - DNA, 523 bp, Homo sapiens
  misc_feature (81)..(81): n includes a, c, g, or t, or contains no nucleotide
gccagcatgtgtgtccacacatacataggatggctggctctgcacctgtaggatattggaatgcacagggcaattgagggnctgagccagaccttcggagagtaatgccaccagatcccctaggaaagaggaggcaaatggcactgcaggtgagaaccccgcccatccgtgctatgacatggaggcactgaagcccgaggaaggtgtgtggagattctaatcccaacaagcaagggtctccttcaagattaatgctatcaatcattaaggtcattactctcaaccacctaggcaatgaagaatataccatttcaaatatttacagtacttgtcttcaccaacactgtcccaaggtgaaatgaagcaacagagaggaaattgtacataagtacctcagcatttaatccaaacaggggttcttagtctcagcactatgacattttgggctgactacttatttgttaggcgggagctctcctgtgcattgtaggataattagcagtatccctggtggctacccaat

SEQ ID NO: 1561 - DNA, 267 bp, Homo sapiens
  misc_feature (28)..(28): n includes a, c, g, or t, or contains no nucleotide
  misc_feature (64)..(65): n includes a, c, g, or t, or contains no nucleotide
tacctcacaagcacccgaagcttgtctnccaatgtctggactttttggttccatctgggccccnncaaagcgatgtgtatgaaaattgctgccccatcaaccccaccacggaacattcgacccacatggaaaaccaagcggtcgtgtgcaaggaatactacccggggttcaacccgtttcgcgcctatatgaacctggacatatggactaccacagcgaataggaatgcaaatttcccactgtctagagactcgagttactgtggga

SEQ ID NO: 1562 - DNA, 529 bp, Homo sapiens
ctagctcaacaatactatcttgtgtaccaagaacccattcctacagctcagctggtacagagagtagcttctgtgatgcaagaatatactcagtcaggtggtgttcgtccatttggagtttctttacttatttgtggttggaatgagggacgaccatatttatttcagtcagatccatctggagcttactttgcctggaaagctacagcaatgggaaagaactatgtgaatgggaagactttccttgagaaaagatataatgaagatctggaacttgaagatgccattcatacagccatcttaaccctaaaggaaagctttgaagggcaaatgacagaggataacatagaagttggaatctgcaatgaagctggatttaggaggcttactccaactgaagttaaggattacttggctgccatagcataacaatgaagtgactgaaaaatccagaatttcagataatctatctacttaaacatgtttaaagtatgttttgttttgcagactttttgcatacttatttcta

SEQ ID NO: 1563 - DNA, 248 bp, Homo sapiens
  misc_feature (65)..(80): n includes a, c, g, or t, or contains no nucleotide
  misc_feature (194)..(196): n includes a, c, g, or t, or contains no nucleotide
ctctctgtgaagaaagattgccttctgcaagtcaaacagagagaactgctttctcccacctgctnnnnnnnnnnnnnnnnagttattcctagtgcttaaatgtgtattttctctctaccacctggactttcccaaagagtttttcctgtagctactccagatcttccactaaagtagtaactttttaatgacannntgctgtggtgtgattgatgcctgtcaccgaagagcacagagcctccttacag

SEQ ID NO: 1564 - DNA, 351 bp, Homo sapiens
  misc_feature (120)..(214): n includes a, c, g, or t, or contains no nucleotide
ggtcatctggattctcccacttctctactccattatttctctacttttccttccagcaaacctgaaacgtgagggagatggattaatgtgagtaacaggaatgtgtctttaaaaagctannnnnnnnnnnnnnnnnnnnnnnnnnnnnnnnnnnnnnnnnnnnnnnnnnnnnnnnnnnnnnnnnnnnnnnnnnnnnnnnnnnnnnnnnnnnnnnttctttaaagctagtcatttcaaaagcatattgtatttttttgaatgactacagtatggacaatttcaaaaaccaaaacccactttggattggtggaagtaaaaactggtaactcactcaagtgaatgaatggtctt

SEQ ID NO: 1565 - DNA, 360 bp, Homo sapiens
  misc_feature (171)..(187): n includes a, c, g, or t, or contains no nucleotide
  misc_feature (189)..(189): n includes a, c, g, or t, or contains no nucleotide
  misc_feature (192)..(192): n includes a, c, g, or t, or contains no nucleotide
  misc_feature (194)..(194): n includes a, c, g, or t, or contains no nucleotide
  misc_feature (196)..(201): n includes a, c, g, or t, or contains no nucleotide
  misc_feature (203)..(210): n includes a, c, g, or t, or contains no nucleotide
  misc_feature (212)..(214): n includes a, c, g, or t, or contains no nucleotide
  misc_feature (216)..(216): n includes a, c, g, or t, or contains no nucleotide
  misc_feature (220)..(224): n includes a, c, g, or t, or contains no nucleotide
accgtttctgctctgttctggatctgccccctttactcctcggggaacccaaggccccactctcgctctggattccatttgggtcagcctggctggtccccaaggcattaggatgggggagcaaaaagcaacttatgtattttcttccacccccaccccaaattaaaatgnnnnnnnnnnnnnnnnntnaananannnnnnannnnnnnnannnanaaannnnntgctgtccctaagaaggagccttgggggtgtgatgtggggaagagctattgtaggctccccctcctctgacttatgtaatcaaagccacttttgtgtgtgtctattttttcttgacatttaaactcagctgatctg

SEQ ID NO: 1566 - DNA, 570 bp, Homo sapiens
  misc_feature (461)..(461): n includes a, c, g, or t, or contains no nucleotide
aggggctttgacattgggaaccatttttgtgagtgggtttatgattatactcacgaggaatggcctttctacaaagcaaggcccacagactaccccactcaagaacagcagttgcattttattcgtcattacctggcagaggcaaagaaaggtgagaccctctcccaagaggagcagagaaaactggaagaagatttgctggtagaagtcagtcggtatgctctggcatcccatttcttctggggtctgtggtccatcctccaggcatccatgtccaccatagaatttggttacttggactatgcccagtctcggttccagttctacttccagcagaaggggcagctgaccagtgtccactcctcatcctgactccaccctcccactccttggatttctcctggagcctccagggcaggaccttggagggaggaacaacgagcagaaggccctggcgactnggctgagcccccaagtgaaactgaggttcaggagaccggcctgttcctgagtttgagtaggtccccatggctggcaggccagagccccgtgctgtgtatgtaacacaat

SEQ ID NO: 1567 - DNA, 341 bp, Homo sapiens
  misc_feature (44)..(44): n includes a, c, g, or t, or contains no nucleotide
  misc_feature (61)..(62): n includes a, c, g, or t, or contains no nucleotide
  misc_feature (106)..(106): n includes a, c, g, or t, or contains no nucleotide
  misc_feature (171)..(187): n includes a, c, g, or t, or contains no nucleotide
  misc_feature (224)..(224): n includes a, c, g, or t, or contains no nucleotide
  misc_feature (237)..(237): n includes a, c, g, or t, or contains no nucleotide
  misc_feature (271)..(271): n includes a, c, g, or t, or contains no nucleotide
  misc_feature (281)..(281): n includes a, c, g, or t, or contains no nucleotide
  misc_feature (284)..(284): n includes a, c, g, or t, or contains no nucleotide
  misc_feature (287)..(287): n includes a, c, g, or t, or contains no nucleotide
  misc_feature (298)..(298): n includes a, c, g, or t, or contains no nucleotide
  misc_feature (308)..(308): n includes a, c, g, or t, or contains no nucleotide
  misc_feature (310)..(310): n includes a, c, g, or t, or contains no nucleotide
tcttttagtttctgccaagtcaagtcaaaaggtagatttctganaaatatctggttgcctnnggagcctattctctctctcattccgcttcccattggacccgatnaaaatcctcgatccatatcgatgctcctttccagtatagctcctatacctggtcccattctatcnnnnnnnnnnnnnnnnnggtccagtcccatccccattcctccagtcacactgtncatgctacccatnccaccacttattccagatcctactggaccatgtnagaagatccnatnctncctgtaatccntccaatcatngnactgccaagtctaccaaaggaatcttcaaag

SEQ ID NO: 1568 - DNA, 170 bp, Homo sapiens
ttttgctggacctcgcctacgcaatatggcttccctctacggacagctggatacaaccaagaaactcagagatttctttacagtcacagacctgaggataaggctgttaagaccagccgttggggaaatatttgtagatgagctacacttggcacgctacttttacgcga

SEQ ID NO: 1569 - DNA, 537 bp, Homo sapiens
  misc_feature (27)..(37): n includes a, c, g, or t, or contains no nucleotide
  misc_feature (417)..(455): n includes a, c, g, or t, or contains no nucleotide
ctgatttacatatgcagatgctatttnnnnnnnnnnngataccaagggctttttaaatgtcatgggggggaaaaacccaacttggtgaactcccagctaaacaaccaagacttcactgaagatttattccaattctagaattgttcttttttatttttattttttcaactgactaacttcattaccttaaagcctagaacattattctgctttatttatatggctttctcacttttattttgtagcatgggttgcatcgacttttttactagagaattttactagatatttgtcattcaagttttcatctgctttataattgatacaccttgagggtcacttttctaatacttttactataatgtggtaccacctcagccctaataaataatatttttacctaatgtcaaatctttnnnnnnnnnnnnnnnnnnnnnnnnnnnnnnnnnnnnnnntaaatatgcatgtaaatagttctgttaataacccactgttttacatttggtacatctgtgtctgctaatacagttagctttc

SEQ ID NO: 1570 - DNA, 172 bp, Homo sapiens
agtgacagctttctgggatgtcacagtccaaccagaaacgcccctctgtctaggactgcagtgtggagttcaccttggaagggcgttctaggtaggaagagcccgcacgatgcagacctcatgcccagctctctgacgcttgtgacagtgcctcttccagtgaacattccca

SEQ ID NO: 1571 - DNA, 472 bp, Homo sapiens
  misc_feature (40)..(40): n includes a, c, g, or t, or contains no nucleotide
  misc_feature (44)..(59): n includes a, c, g, or t, or contains no nucleotide
  misc_feature (259)..(273): n includes a, c, g, or t, or contains no nucleotide
  misc_feature (277)..(277): n includes a, c, g, or t, or contains no nucleotide
  misc_feature (279)..(279): n includes a, c, g, or t, or contains no nucleotide
  misc_feature (281)..(299): n includes a, c, g, or t, or contains no nucleotide
ctgtgatttactgtcactagaattagaagattcctctttngaannnnnnnnnnnnnnnnacctttggggttgaaggtgagacaagtcaatggtagtatcaggataatttaatgtctcttccccttcatccttcatttcaccaacagaatcctgatcttttctaacctcttcatattctccttcgtcttcagagctttcttcctgaatgagctcctcatttagttcatctctgccactctgaagagtgatatcctcttgnnnnnnnnnnnnnnngagntntnnnnnnnnnnnnnnnnnnngttcttctttatcctcatcactgctcgtgtcacctccatctaattgttccatttcttctgatatgagttcacttgtacaacttgccagtgtctccatgtcttcatcctgtactctgacttttcgttcaccctgatgtctccaaacacaagactcatctaccttaaaaaggaag

SEQ ID NO: 1572 - DNA, 559 bp, Homo sapiens
  misc_feature (38)..(38): n includes a, c, g, or t, or contains no nucleotide
  misc_feature (61)..(61): n includes a, c, g, or t, or contains no nucleotide
  misc_feature (77)..(77): n includes a, c, g, or t, or contains no nucleotide
  misc_feature (90)..(106): n includes a, c, g, or t, or contains no nucleotide
  misc_feature (376)..(379): n includes a, c, g, or t, or contains no nucleotide
  misc_feature (382)..(382): n includes a, c, g, or t, or contains no nucleotide
  misc_feature (384)..(385): n includes a, c, g, or t, or contains no nucleotide
  misc_feature (387)..(391): n includes a, c, g, or t, or contains no nucleotide
  misc_feature (393)..(396): n includes a, c, g, or t, or contains no nucleotide
  misc_feature (502)..(502): n includes a, c, g, or t, or contains no nucleotide
agggccagcagaacgagcagtgacaagacaggtggggncctggctccccacccgccagctnccaggactgccccttncctgggccaactnnnnnnnnnnnnnnnnngagcccccaactccaacaggattattttcccaggaggagttacagatgcagccacagattgatcatctgccttaacgtgatcggagatgctttgtaatctactgtccagctgaaagcactcatgttacgaggaagaaactacaagtgatgttcaaatctattttgggtcatttttatgtacctttgggttcaggcattatttggggggttttgtttccaaaggaactaaataaagtcatattgcttataaaaaaaaaaaaaaaaaaaaannnnaanannannnnnannnncttcctcgtaacatgagtgctttcagctggacagtagattacaaagcatctccgatcacgttaaggcagatgatcaatctgtggctgcatctgtaactcctcctgngaaaataatcctgttggagttgggggctcttcccagttgtttggttagttggcccag

SEQ ID NO: 1573 - DNA, 591 bp, Homo sapiens
  misc_feature (73)..(73): n includes a, c, g, or t, or contains no nucleotide
  misc_feature (457)..(471): n includes a, c, g, or t, or contains no nucleotide
attgtcaaaaaccagaattaggtcaagttcatagtttctgtaattggcttttgaatcaaagaatagggagacnaatctaaaaaatatcttaggttggagatgacagaaatatgattgatttgaagtggaaaaagaaattctgttaatgttaattaaagtaaaattattccctgaattgtttgatattgtcacctagcagatatgtattacttttctgcaatgttattattggcttgcactttgtgagtattctatgtaaaaatatatatgtatataaaatatatattgcataggacagacttaggagttttgtttagagcagttaacatctgaagtgtctaatgcattaacttttgtaaggtactgaatacttaatatgtgggaaacccttttgcgtggtccttaggcttacaatgtgcactgaatcgtttcatgtaagaatccaaagtggacaccnnnnnnnnnnnnnnnaaatatgcatgtactttatattttctatatttgtaactttgcatgttcttgttttgttatataaaaaaattgtaaatgtttaatatctgactgaaattaaacgagcgaagatgagcacca

SEQ ID NO: 1574 - DNA, 312 bp, Homo sapiens
  misc_feature (202)..(216): n includes a, c, g, or t, or contains no nucleotide
agaggccctagagagcctcatggattgtaactaaagaagaaacggttcctttttgtttttttaaaaatgatttttaaataccgttttttacaccgttctctcggtactttttttaagctaagtcagcattgtcttccagtgttaaaggcatccctcacctctgcattgaacttacgtatccatgccaaggaatggaatttcnnnnnnnnnnnnnnncagttaggtgtcaattgatactattttaattttttatgcaatctgatgagatgagctcagatttaaaaatctcaaaagcacgtttattgtaacaag

SEQ ID NO: 1575 - DNA, 105 bp, Homo sapiens
  misc_feature (33)..(47): n includes a, c, g, or t, or contains no nucleotide
aaacgttgtcagtctgcttgtggcttccctccnnnnnnnnnnnnnnntgtgtgatgtctggagaagtatctatccacttcatgtgaatgagcactccaatatcag

SEQ ID NO: 1576 - DNA, 570 bp, Homo sapiens
  misc_feature (45)..(48): n includes a, c, g, or t, or contains no nucleotide
  misc_feature (55)..(56): n includes a, c, g, or t, or contains no nucleotide
  misc_feature (60)..(60): n includes a, c, g, or t, or contains no nucleotide
  misc_feature (65)..(65): n includes a, c, g, or t, or contains no nucleotide
  misc_feature (86)..(86): n includes a, c, g, or t, or contains no nucleotide
  misc_feature (125)..(125): n includes a, c, g, or t, or contains no nucleotide
  misc_feature (270)..(270): n includes a, c, g, or t, or contains no nucleotide
caacaggccgcactgcagaaatgatgttttatgaaaaccaatgannnnctgctgnnactnccagncaagggaaataatgcagtttncctgtcttatttaagaaaaagagaaggctctcttttctncccttgtcattgccgttcttttccttacacgcaaagattttttaactattgcagattttcatcccattctactgcttgattgaccatcaactccatcctatcgagatttatttaagaatgaagaacataattttctgctgatgcngtaccctcacccttttcagcaaagaatagtggagagtaggaaactgtactttatctcggcatcctcttgaatgatagtgcaagtttctccagttgggatgttgtctctgcccggttggacctcctccctttgttgaatgtggtgtgcagcctctcatctcacactgtgagtccagcggcgcagggtggtaccaggaaagaggatattctaggctttgcgtgctgctagctgggttcaggcttcacccactggaaagaaccaccatctgctctaaccatgtagacttattgcggcctggtt

SEQ ID NO: 1577 - DNA, 376 bp, Homo sapiens
agctctggtctgagatcctcatgactggtggtgcagcctctgtgaagcagcaccattcaagtgcccataacaaagatattgctttaggggtatttgatgtggtggtgacggacccctcatgcccagcctcggtgctgaagtgtgctgaagcattgcagctgcctgtggtgtcacaagagtgggtgatccagtgcctcattgttggggagagaattggattcaagcagcatccaaaatataaacacgattatgtttctcactaaagatacttggtcttactggttttattccctgctatcgtggagattgtgttttaaccaggttttaaatgtgtcttgtgtgtaactggattccttgcatggatcttgtatatagt

SEQ ID NO: 1578 - DNA, 591 bp, Homo sapiens
  misc_feature (97)..(97): n includes a, c, g, or t, or contains no nucleotide
  misc_feature (102)..(132): n includes a, c, g, or t, or contains no nucleotide
  misc_feature (138)..(138): n includes a, c, g, or t, or contains no nucleotide
  misc_feature (141)..(143): n includes a, c, g, or t, or contains no nucleotide
  misc_feature (148)..(148): n includes a, c, g, or t, or contains no nucleotide
  misc_feature (151)..(151): n includes a, c, g, or t, or contains no nucleotide
  misc_feature (162)..(162): n includes a, c, g, or t, or contains no nucleotide
  misc_feature (168)..(168): n includes a, c, g, or t, or contains no nucleotide
  misc_feature (172)..(172): n includes a, c, g, or t, or contains no nucleotide
  misc_feature (174)..(175): n includes a, c, g, or t, or contains no nucleotide
  misc_feature (178)..(178): n includes a, c, g, or t, or contains no nucleotide
  misc_feature (182)..(183): n includes a, c, g, or t, or contains no nucleotide
  misc_feature (193)..(193): n includes a, c, g, or t, or contains no nucleotide
  misc_feature (197)..(197): n includes a, c, g, or t, or contains no nucleotide
  misc_feature (204)..(204): n includes a, c, g, or t, or contains no nucleotide
  misc_feature (211)..(211): n includes a, c, g, or t, or contains no nucleotide
  misc_feature (221)..(221): n includes a, c, g, or t, or contains no nucleotide
  misc_feature (229)..(229): n includes a, c, g, or t, or contains no nucleotide
  misc_feature (323)..(341): n includes a, c, g, or t, or contains no nucleotide
  misc_feature (542)..(542): n includes a, c, g, or t, or contains no nucleotide
  misc_feature (545)..(559): n includes a, c, g, or t, or contains no nucleotide
gagtcatgcgacttcgtgcgggccatggtggacccggcccagacggtggaacagaggctgaagttgttcaagttggcgtctgagaagcatcagcatnatgtnnnnnnnnnnnnnnnnnnnnnnnnnnnnnnnattcgntcnnnacctnttncttgcctttancgtggntgtntnnaantatnntcgctgtggnagtnccctttnccttaanggaagttttnatctgagncttggagattatcaacaagccagacccctcagcagcaagtggagctgtttgacttggagaataacccagagtacgtgtccagcggagggggctnnnnnnnnnnnnnnnnnnncggctatggtgtgtcgtacatccttgtgggagagaacctcatcaatttccacatttcttccaagttctcttgccctgagacggattctcatcgctttggaaggcacctgaaagaagcaatgactgacatcatcactttgtttggtctcagttctaattccaaaaagtaattccactggagctgctgggaaggaaaacgagntcnnnnnnnnnnnnnnnaatgaaaaataggcattaatcctgaccttagc

SEQ ID NO: 1579 - DNA, 557 bp, Homo sapiens
  misc_feature (30)..(44): n includes a, c, g, or t, or contains no nucleotide
  misc_feature (78)..(78): n includes a, c, g, or t, or contains no nucleotide
  misc_feature (239)..(239): n includes a, c, g, or t, or contains no nucleotide
  misc_feature (388)..(388): n includes a, c, g, or t, or contains no nucleotide
  misc_feature (456)..(456): n includes a, c, g, or t, or contains no nucleotide
  misc_feature (462)..(462): n includes a, c, g, or t, or contains no nucleotide
  misc_feature (465)..(465): n includes a, c, g, or t, or contains no nucleotide
aacgaggtctgcttctacagcctccgccgnnnnnnnnnnnnnnncaaggagatctgtgttcgtacagtgtgtgcccangaggagctcctccgagctgacctctgtcgggacaagttctccaaatgtggcgtgatggccagcagcggcctgtgccaatccgtggcggcctcctgtgccaggagctgtgggagctgctagggtggtgctggcatcctgagtcctggccctcctgggatctngggccctcgggccctgcctgacctggtgcttttttccccatccccatgttccttttattctgtaaaaagttagtggactgcagccctgggggttgcaggctgcggtgcctcaggcccctccttcagcctgtggccacctctggggcacnatgggggctccccactgcccagtctgcccctcgggttgggggagtatcccaggcctctctgtgggacnctgggnccntgacgggccttctcagcccgttttgaggacagacagtcccccgaggtaggctacatccccccaccccagctggtctgcttggatttcctaca

SEQ ID NO: 1580 - DNA, 494 bp, Homo sapiens
  misc_feature (33)..(33): n includes a, c, g, or t, or contains no nucleotide
  misc_feature (35)..(35): n includes a, c, g, or t, or contains no nucleotide
  misc_feature (45)..(54): n includes a, c, g, or t, or contains no nucleotide
  misc_feature (168)..(168): n includes a, c, g, or t, or contains no nucleotide
  misc_feature (203)..(257): n includes a, c, g, or t, or contains no nucleotide
  misc_feature (304)..(304): n includes a, c, g, or t, or contains no nucleotide
  misc_feature (306)..(306): n includes a, c, g, or t, or contains no nucleotide
  misc_feature (348)..(362): n includes a, c, g, or t, or contains no nucleotide
  misc_feature (427)..(427): n includes a, c, g, or t, or contains no nucleotide
gaagaaggggccatcacaggatgccacccctgncntgggttgggnnnnnnnnnncacgaccagccccttcctgggtatttattctctatttattggggataggagaagaggcatcctgcctgggtgggacagccccttcagccccttctcccctccccgcctggccanggcagggccaccccactctacctccttagctttcnnnnnnnnnnnnnnnnnnnnnnnnnnnnnnnnnnnnnnnnnnnnnnnnnnnnnnnagagctgacgggaggccccagctctgaggggagggggtccgtggtanangcctggggccggtagaggctccccagggctcccttatgtccnnnnnnnnnnnnnnngggtgtggatgtaattagctctggggggcagttgggtagatgggtgggggctcctggtggccttntgctgcccaggccacagccgcctttgggttccatcttgctaataaacactggctctgggactagaaa

SEQ ID NO: 1581 - DNA, 216 bp, Homo sapiens
tttgttgagtctctgaacatcctaaatattggtttgttattcttttccagaaagaaaatgaatttgactggttcacctgtgtactgagtattgataaactttgaatttttttaattgccttcaattgggagagaaagctttatatttgtgtgaggacttctgcatcttacagtcagcacagaacacactgagacttgaatcaagtcagcaacagag

SEQ ID NO: 1582 - DNA, 279 bp, Homo sapiens
cttctacaggcttttgggaagtagggtggatgtgggtagggctgggaggagggggccacagcttaggtttggagctctggatgtacatacataagtaggagcagtgggacgtgtttctgtcataatgcaggcatgaagggtggagtgaagtcaggtcataagtttcatgtttgcttttgttttgttttgtttttaatgtatgtagcagatgttacagtcttagggatccgggatgggagaccccactttagaaagggtcgtcactcctttaatcctcta

SEQ ID NO: 1583 - DNA, 505 bp, Homo sapiens
  misc_feature (447)..(456): n includes a, c, g, or t, or contains no nucleotide
  misc_feature (467)..(470): n includes a, c, g, or t, or contains no nucleotide
  misc_feature (472)..(477): n includes a, c, g, or t, or contains no nucleotide
gagaagctcctgagcagtgagagcaagctgaagcaggccatgcttaccttagaactggagcggtcggccctgctgcagacggtggaggagctgcggcggcggagcgcagagcccagcgaccgggagcctgagtgcacgcagcccgagcccacgggcgactgacagctctgcaggagagattgcaacaccatcccacactgtccaggccttaactgagagggacagaagacgctggaaggagagaaggaagcgggaagtgtgcttctcagggaggaaaccggcttgccagcaagtagattcttacgaactccaacttgcaattcagggggcatgtcccagtgttttttttgttgtttttagatactaaatcgtcccttctccagtcctgattactgtacacagtagctttagatggcgtggacgtgaataaatgcaacttatgttttnnnnnnnnnnaaaaaaaaaannnnannnnnnttgtaaagagcattcacaatacggtgga

SEQ ID NO: 1584 - DNA, 464 bp, Homo sapiens
  misc_feature (423)..(424): n includes a, c, g, or t, or contains no nucleotide
  misc_feature (428)..(430): n includes a, c, g, or t, or contains no nucleotide
  misc_feature (433)..(433): n includes a, c, g, or t, or contains no nucleotide
  misc_feature (435)..(435): n includes a, c, g, or t, or contains no nucleotide
  misc_feature (438)..(439): n includes a, c, g, or t, or contains no nucleotide
agttgcttaaacttgacactgttgacatttgggctggataaaacccctgtggtggggtctgtgctgtgcattgcaggatggtgagcagcgtccctctcatgtgacacccacagttatgccggatgttgccagatgcccctaggggacagagtcaacccccaactgaggaccactgtcctacagagtcaggaaatattgtagggagaaaaaaataacaacaacaaaggcctgtgttaatgttaaatagatgagattatggaatgtgtatattaatgttaaaaattgtaccttgatcaatgtactttttataaacttgccatagatatctcagatttgaaacctcaagacagatttattattcttaaatgctgtatgataatgaagaaaaataaaaatttatttcttgcaaagttaaaaaaaaannaaannnaananaannactcatttatggttaactttgggca

SEQ ID NO: 1585 - DNA, 603 bp, Homo sapiens
ccaaccatctgaatttactattgaaagcttggaaaacactgcagttgacttgtttggagctgggacagagacgacaagcacaaccctgagatatgctctccttctcctgctgaagcacccagaggtcacagctaaagtccaggaagagattgaacgtgtgattggcagaaaccggagcccctgcatgcaagacaggagccacatgccctacacagatgctgtggtgcacgaggtccagagataccttgaccttctccccaccagcctgccccatgcagtgacctgtgacattaaattcagaaactatctcattcccaagggcacaaccatattaatttccctgacttctgtgctacatgacaacaaagaatttcccaacccagagatgtttgaccctcatcactttctggatgaaggtggcaattttaagaaaagtaaatacttcatgcctttctcagcaggaaaacggatttgtgtgggagaagccctggccggcatggagctgtttttattcctgacctccattttacagaactttaacctgaaatctctggttgacccaaagaaccttgacaccactccagttgtcaatggttttgcctc

SEQ ID NO: 1586 - DNA, 244 bp, Homo sapiens
cagctcattgctggggaagcaatataaatgtcaccctgggcgcccacaatatccagagacgggaaaacacccagcaacacatcactgcgcgcagagccatccgccaccctcaatataatcagcggaccatccagaatgacatcatgttattgcagctgagcagaagagtcagacggaatcgaaacgtgaacccagtggctctgcctagagcccaggagggactgagacccgggacgctgtgcac

SEQ ID NO: 1587 - DNA, 427 bp, Homo sapiens
  misc_feature (85)..(99): n includes a, c, g, or t, or contains no nucleotide
  misc_feature (363)..(363): n includes a, c, g, or t, or contains no nucleotide
  misc_feature (399)..(402): n includes a, c, g, or t, or contains no nucleotide
gacgactacatatcattccggcaccatgtgtataagaagacagaccaccgcaacgtggagctcactgaggtcgggccccgctttnnnnnnnnnnnnnnnatgatccgtctgggcacgctggagcaggaggccacagcagacgtggagtggcgctggcacccttacaccaataccgcacgcaagagagtcttcctgagcaccgagtgagcacactcaccactcagtcaggacatggacttggaactcaggatggggctgtcatagacagacccaccagtaggaactgtcacagaatggcctgctgaactgggatgtggaactgtggcgggtggagaggtctgaataaaccgtctgtgtcatggnaaaaaaaaaaaaaaaaaaaaaaaaaaaaaaaaaaannnnaaagcccatgggatccctttgggtg

SEQ ID NO: 1588 - DNA, 585 bp, Homo sapiens
  misc_feature (94)..(94): n includes a, c, g, or t, or contains no nucleotide
  misc_feature (184)..(184): n includes a, c, g, or t, or contains no nucleotide
tcagctgtacttagaaagttatctgttgtgtagaataatgatgtagagtttactaatcagtgaggatgtcttgtttttattttctgcaaactcngcctcactttaaaatgcattataacaatacctaattaaagataattttggctctgaaagttaccttattttttgttgagttagtgacttncatttttcttgccacaatataagcttttgagggatttttttaaattggtgcttttaataagcaaataaatcccagggttttattttcttcagtgatacccctatagaaactcttaaatgtatttgcgcatatatatatatatattttcttatgcatgctcgatgcattttcgtcctgagaaaaatgttctctacagaaactacccgtgtgtaaaaagaagattggcttaaaatggctactgtgatgggaacagtgtcttagggagatgcagcttggacttgaggtaaattgaatactttacaactgtggtttagagtttgctttaatgacattgtatgtaaaaggtcacatgattgctgtaattttgtattcattatggtttcctcaataaatgtacattg

SEQ ID NO: 1589 - DNA, 476 bp, Homo sapiens
  misc_feature (50)..(78): n includes a, c, g, or t, or contains no nucleotide
  misc_feature (85)..(87): n includes a, c, g, or t, or contains no nucleotide
  misc_feature (89)..(181): n includes a, c, g, or t, or contains no nucleotide
  misc_feature (188)..(189): n includes a, c, g, or t, or contains no nucleotide
  misc_feature (192)..(192): n includes a, c, g, or t, or contains no nucleotide
  misc_feature (196)..(198): n includes a, c, g, or t, or contains no nucleotide
  misc_feature (363)..(377): n includes a, c, g, or t, or contains no nucleotide
  misc_feature (382)..(383): n includes a, c, g, or t, or contains no nucleotide
  misc_feature (400)..(400): n includes a, c, g, or t, or contains no nucleotide
gtgccagtaccttcctgcatctcagcaccaacagtttccgcctagtgccnnnnnnnnnnnnnnnnnnnnnnnnnnnnngacctgnnngnnnnnnnnnnnnnnnnnnnnnnnnnnnnnnnnnnnnnnnnnnnnnnnnnnnnnnnnnnnnnnnnnnnnnnnnnnnnnnnnnnnnnnnnnnnnnaccatanncangcannnggaggtgccagcgaggcctgggctgggtcccacctcaccagtctgctggctctggcagccctggcctttacctggaccttgtaggggtctcctgcctagctgcctagcaagctggcctctaccacaagggctctcttaggcatgtaggaccctgcagggggtggnnnnnnnnnnnnnnngagtnngcagagcccccaggaancccaggagggcatccataccagctcgcacccccctgttctaagggggaggggaagtccctgggaggccccttctct

SEQ ID NO: 1590 - DNA, 186 bp, Homo sapiens
  misc_feature (66)..(82): n includes a, c, g, or t, or contains no nucleotide
agccatggatgtaaccacaacctccaccaggattggcaagtttgaggccaggttcttccatttggnnnnnnnnnnnnnnnnnttggaagagtcaagggtcactttggacctatcaacagtgttgccttccatcctgatggcaagagctacagcagcggcggcgaagatggttacgtccgtatccat

SEQ ID NO: 1591 - DNA, 439 bp, Homo sapiens
  misc_feature (105)..(105): n includes a, c, g, or t, or contains no nucleotide
  misc_feature (118)..(118): n includes a, c, g, or t, or contains no nucleotide
  misc_feature (130)..(130): n includes a, c, g, or t, or contains no nucleotide
  misc_feature (146)..(146): n includes a, c, g, or t, or contains no nucleotide
  misc_feature (152)..(153): n includes a, c, g, or t, or contains no nucleotide
  misc_feature (155)..(156): n includes a, c, g, or t, or contains no nucleotide
  misc_feature (158)..(217): n includes a, c, g, or t, or contains no nucleotide
  misc_feature (251)..(251): n includes a, c, g, or t, or contains no nucleotide
  misc_feature (299)..(300): n includes a, c, g, or t, or contains no nucleotide
  misc_feature (302)..(303): n includes a, c, g, or t, or contains no nucleotide
  misc_feature (352)..(366): n includes a, c, g, or t, or contains no nucleotide
  misc_feature (400)..(404): n includes a, c, g, or t, or contains no nucleotide
  misc_feature (406)..(406): n includes a, c, g, or t, or contains no nucleotide
tccacccgaacgtgggcgccaatggcgagatctgcgtcaacgtgctcaagagggactggacggctgagctgggcatccgacacgtactgctgaccatcaagtgcntgctgatccaccntaaccccgagtntgcactcaacgaggangcgggnncnncnnnnnnnnnnnnnnnnnnnnnnnnnnnnnnnnnnnnnnnnnnnnnnnnnnnnnnnnnnnngggggcgccggcgggcccagcggcagggccgaanccggtcgggccctggccagtggcactgaagcttcctccaccgaccctnngnncccagggggcccgggaggggctgagggtcccatggccaagaagcatgcnnnnnnnnnnnnnnngaagctggcggccaagaaaaagacggacaagaannnnngngggcgctgcggcggctgtagtgggctctcttcc

SEQ ID NO: 1592 - DNA, 44 bp, Homo sapiens
gaaagcatgtctgctgggtgtgaccatgtttcctctcaataaag

SEQ ID NO: 1593 - DNA, 494 bp, Homo sapiens
  misc_feature (423)..(455): n includes a, c, g, or t, or contains no nucleotide
tgtgacccatcctgatcactatcagaggtttgacatgaaggcttttgcctttgtatcagaagcccacgtgctctctagcctggtctacttccactgcagtgccttaatctgtaatcgactctcccctgactccccactgtgttctgtgacctgccctgtgtcctctaggcacaggcgagccacaggggccactgaagcagagaaaatgacagtcagcctcccaggacccattctcctgttgtcagatgactcctcattcagaggtgtcggctcatctgatctaaaagcaagtgggagcagtggggagaagagtaggagtgaaacaggggaggaggttggctcacgaggtgctatggacaccaaagggcacaagactgctggagatgttggttccaaagctgtggctgctgtggctgcctttgnnnnnnnnnnnnnnnnnnnnnnnnnnnnnnnnnacctgtacgagaaaaggactgtgtcaaatcactaaatgg

SEQ ID NO: 1594 - DNA, 512 bp, Homo sapiens
  misc_feature (26)..(55): n includes a, c, g, or t, or contains no nucleotide
  misc_feature (161)..(161): n includes a, c, g, or t, or contains no nucleotide
cccagaacttcaacagcagtgccagnnnnnnnnnnnnnnnnnnnnnnnnnnnnnncctctgccgagatctggtttctgggctcttcagcttctcctcctgccccttctcccgatgctctttcaatggggtcttccagcccccagtggctgggaactttgtngccttctctgccttcttctacactgtggactttttgcggacttcgatggggctgcccgtggccaccctgcagcagctggaggcagccgcagtgaatgtctgcaaccagacctgggctcagcagctgctgagtcgcggctacggcttcgatgagcgcgccttcggcggcgtgatcttccagaagaaggccgcggacactgcagtgggctgggcgctcggctacatgctgaacctgaccaacctgatccccgccgacccgccggggctgcgcaagggcacagacttcagctcctgggtcgtcctcctgctgctcttcgcctccgcgctcctggctgcgcttgtcctgctgctg

SEQ ID NO: 1595 - DNA, 487 bp, Homo sapiens
  misc_feature (26)..(26): n includes a, c, g, or t, or contains no nucleotide
tgcttctgccatggagctgatggacntgggcaggttgctgagaaggtggggtgaaagtgagtgccgggggtgggtgagtgccctggtcttgttcataggggagcctttccctagcagtggaacgctgtggtcattttctctagcatattcccttgggaagtctagatttgctattaatctggctgagaatctaagttctgtgccttagagacagtttgcactttcccatattgtgcctgggacagccatatgattttttttcccaccaaacaagtatgcaaacagaaaccagttcaaagggggatggagtaaaagatgaggcagtagaaatgcctttgaatggttttctgtagctaattctctttaaattttgtcctgctttttttctttatgcagtgctaggtgttttaagttttctagtagtattgcttttgagttacagtataacctgagttactcctctgctctaacattgttgcagaagaac

SEQ ID NO: 1596 - DNA, 279 bp, Homo sapiens
  misc_feature (190)..(225): n includes a, c, g, or t, or contains no nucleotide
ctgcctgctgtttgcatttgtgcctcagggcccaaagaagcaagagataagcagtaatgtgtatgttttgcaatggttcttgtcaccattaaacaacaactggaaagaagggaaaataattgggggatcagatatactctcttttctcttgtctttattgttcctaatatcaggtgcccctccagtgtgnnnnnnnnnnnnnnnnnnnnnnnnnnnnnnnnnnnntgaagaacagagaatgggaataaaaagggacagaccatttttgctcagctctag

SEQ ID NO: 1597 - DNA, 593 bp, Homo sapiens
ggacaggatgtcacctcggtcccagtcaccaggccagccctgggctccaccaccccgccagcccacgatgtcacctcagccccggacaacaagccagccccgggctccaccgcccccccagcccagggtgtcacctcggccccggagaccaggccgcccccgggctccaccgcccccccagcccatggtgtcacctcggcgccggacaacaggcccgccttggcgtccaccgcccctccagtccacaatgtcacctcggcctcaggctctgcatcaggctcagcttctactctggtgcacaacggcacctctgccagggctaccacaaccccagccagcaagagcactccattctcaattcccagccaccactctgatactcctaccacccttgccagccatagcaccaagactgatgccagtagcactcaccatagcacggtacctcctctcacctcctccaatcacagcacttctccccagttgtctactggggtctctttctttttcctgtcttttcacatttcaaacctccagtttaattcctctctggaagatcccagcaccgactactaccaagagctgcagagaga

SEQ ID NO: 1598 - DNA, 505 bp, Homo sapiens
  misc_feature (50)..(78): n includes a, c, g, or t, or contains no nucleotide
  misc_feature (373)..(373): n includes a, c, g, or t, or contains no nucleotide
gaaagactccggagctgcctccgaacaggccaccgcagcccccaaccccnnnnnnnnnnnnnnnnnnnnnnnnnnnnnaaagaagtagctgtgttctcccagctgcacgtcctgagagggccaggtcgccgggagtgctctggcctccggcaggacaggacccagccactgtgccttagctgaccctgcagggccaggcacaggttggggggctgcccctggggtttgcagggtgctgcattgagggctccaggccccacccccacgccagccatgcccctccccaggactcccactattgcctctgtgattggcccaggaggaaaacacgaccaagctcaagacccttcccctgccctgggctgtgggggtntgagtctagagcccccaaccctaggccccgtgccagaggggaagaggctgactcccaggggaagaggggaagcactgtcatcttccacgtcatcttcacaccagcccatcctgccctttagatctgggcacc

SEQ ID NO: 1599 - DNA, 545 bp, Homo sapiens
  misc_feature (121)..(121): n includes a, c, g, or t, or contains no nucleotide
  misc_feature (179)..(193): n includes a, c, g, or t, or contains no nucleotide
  misc_feature (212)..(227): n includes a, c, g, or t, or contains no nucleotide
acttgaatttctggaagattcttactgttaaccaaattttgagcaaggagtctcaaaggtaattctgaaccagaattacatgttaatgaacagtgtaccttttaacagtgtaaatcacggnaatatccgtgaagggatttcttaatttattttttaccggttgattgaaatatcagttnnnnnnnnnnnnnnnggttgcagataaactgatnnnnnnnnnnnnnnnnaatacttaatgtggaataggataatatacttccaatgccctcaaggctgtgaccttacagccattttacatagcacatcattcctcctatagggatgaactttttcctggcacgaaaagtagccgctctggttgaagctttgcttattgtaacaggcttttatttccaggtaatatgtcttggaagacttaattctgattagagatatagatattactggaaactaattgttttttttctattgtactctgctttatcaaagaagtaaaacatttaaatcgtactacagaaattaagatgttgtcttgcgatccttaa

SEQ ID NO: 1600 - DNA, 560 bp, Homo sapiens
aatcagaaggcaacttactgtataaattatgcagagttattttcctatatctcacagtattaaaaataaataattaaaaattaagaataaataaacgagttgacctcggtcacaaaagcagttttactatcgaatcaatcgctgttattttttttaatgtaatttgtacatcttttttcaatctgtacatttgggctgtctgtatgtttttatagctggtttttaaaaagcataatatgcctatagctgaaaaggaaacagggctgtttaagtcactgacttatgagaaagcaaagcactggtacagttatttaacaggcatacacaagcagggaaaagataatccatttagatctttaatgctttggaaatgcgtgtaacagtactgcaataatcacagctctgggaaaaacaacgaaactttcccttgtggagaggagggattttcctgctctatataagcaacatatttttagacattaaaatatatataattttgcaggtaattgttgacttttttaactatattaagtgttaagctgacaactgtcaaagaagac

SEQ ID NO: 1601 - DNA, 485 bp, Homo sapiens
  misc_feature (408)..(412): n includes a, c, g, or t, or contains no nucleotide
gtgtctgtattctacccctttttgccttacaagtgatatttgcaggtattataccatttttctattcttggtggcttcttcatagcaggtaagcctctccttctaaaaacttctcaactgttttcatttaagggaaagaaaatgagtattttgtccttttgtgttcctacagacactttcttaaaccagtttttggataaagaatactatttccaaactcatattacaaaaacaaaataaaataataaaaaaagaaagcatgatatttactgttttgttgtctgggtttgagaaatgaaatattgtttccaattatttataataaatcagtataaaatgttttatgattgttatgtgtattatgtaatacgtacatgtttatggcaatttaacatgtgtattcttttnnnnnaattgtttcagaataggataattaggtattcgaattttgtctttaaaattcatgtggtttctatgcaaagttc

SEQ ID NO: 1602 - DNA, 528 bp, Homo sapiens
  misc_feature (370)..(370): n includes a, c, g, or t, or contains no nucleotide
  misc_feature (440)..(456): n includes a, c, g, or t, or contains no nucleotide
  misc_feature (471)..(486): n includes a, c, g, or t, or contains no nucleotide
tactaaacggccaaatgaagagacaaaatctgtagataaaaatccttgtaaggatcgtgagaagcatgtattagaagcaaggaacaataaagagtcaagtggcaataaactactttatatacttaacccaccagagacacaggttgaaaaagagcaaattactgggcaaattgacaagagtactgtcaagcctaaaccccagttaagtcattcctctagactttcctctgacttaactagagaaactgatgaagctgcttttgaaccagactataatgaaagtgacagtgaaagtaatgtttctgtaaaagaagaggaatcttcaggaaacatttctaaggacctgaaagataaaatagtggagaaagcnaaagagagcctggacacagcagcagttgtccaggtgggcataagcaggaatcagagccacagcagccccnnnnnnnnnnnnnnnnnaagccacagtccttnnnnnnnnnnnnnnnnaagccacagtagcagtgccagctcagcagaaagtcaggacag

SEQ ID NO: 1603 - DNA, 523 bp, Homo sapiens
ctcagtttaccttaatgccttagcagaagataaatcctacctagagacctttgttccttaaagcaataactgacaactctttgtagtcctccttgtgggtagttaagagtggggtcacccctttaactccaagcactacattttggcggctgcggcctctgggggaggtggcagttatgctgttactagtgattttagggctttgttatttaacttatttcaagggtgctgtgctcagccctgcccatggctgtgcagctccctccgtgcctcagatctgctgtagccagtgcagacctcactgtcgtgtccatgccacccccggcatggctccaggtggcctggtgactccatgatggacgatcttgctcccaggacctgcctcttcccaggcttcctggggaagagttgtacgcccaggcaacaagggctgagctgcgcttgcgtggctgtttcatgaccgcttgtttttctccttttggtgtaatgttttacaaatcctttggcctgagaactaatatgt

SEQ ID NO: 1604 - DNA, 356 bp, Homo sapiens
  misc_feature (54)..(54): n includes a, c, g, or t, or contains no nucleotide
  misc_feature (64)..(64): n includes a, c, g, or t, or contains no nucleotide
  misc_feature (270)..(286): n includes a, c, g, or t, or contains no nucleotide
agcctaattacagaaaattgtgcagatactagtgaagatactagtataagtttnaaaggaacangtgactgtaaaatctcacatttacaaagtgcttgatctcttcatatttcacacgcatgttttagaatagattttagggagtgtttaattcattatccttttgacttaaaatttttgttaccaacttcctaggacttagataatatataaataagtacaaatcccaggggaagtgttgtgatgctagactaaaaggtgggaatgtgnnnnnnnnnnnnnnnnnttgttccattgttgaaaatttgatgcctcagtgtttattcagtaccacctcatggagcttcaatgtaaat

SEQ ID NO: 1605 - DNA, 188 bp, Homo sapiens
  misc_feature (126)..(126): n includes a, c, g, or t, or contains no nucleotide
  misc_feature (140)..(140): n includes a, c, g, or t, or contains no nucleotide
acactttttgatcctctgagaatgaagctgttttctttaggaaaatggctgttgatcttttctaagtgtgtttcactttttcatgggatgatggctttgttgcagctgagattcatgtaactagangtggtaataatagntttcacataggaacagatgcaagttcactctgttagttaactggtagt

SEQ ID NO: 1606 - DNA, 598 bp, Homo sapiens
  misc_feature (300)..(300): n includes a, c, g, or t, or contains no nucleotide
  misc_feature (334)..(363): n includes a, c, g, or t, or contains no nucleotide
tgcctcctagaataaagatacagagagtcaaatagagagaatggagagagagaaacatatattatatattatatagagagagggaggagagcgagagagagtgaggacaccgaactgggctggcggctccaaagcacagccttccctgttccgtcccagcgggagctggtgttaggggtcccaaggttgccacccacgtgcccagctgtcccacgctgcagcgcagacggccacgcccacacccggccttttagctcaggtccaccatgggggacggcccagcgtgggtgggggtgccanagggtcccgagtgggggccgtgcctttgcccagnnnnnnnnnnnnnnnnnnnnnnnnnnnnnntctggggagcaggggcctccccggcaacagccccaggggccttgagggtctgaggtcccagccctgttgccaagtgaccttgtccccagctccctcctcccaggctggtgtgagtgtgcgtgcgtttgtgccgagcttctatttcatattgcaaatataaataaaggaaggcagtttacgaaaaaaaaaaaaaaaaaaaaaaaaaaaagggcggccgcttctagaggattcacaa

SEQ ID NO: 1607 - DNA, 458 bp, Homo sapiens
  misc_feature (220)..(235): n includes a, c, g, or t, or contains no nucleotide
taatgagctcttgtcctcagtccatttatatatgaaaactatacaacaaaggcaagttaagagaaactttatacattagtaaatgtctttgtaagtcagtgttgagatggggataaaatgactacttagcatcctaagaaatatgtgagattttttattgctagtatttgaattaaaacttcttaaatatcttttatgttgaatatggacaagaggtacnnnnnnnnnnnnnnnncattgcattctattgccttctttgaagaaggtggaccttttaaagtgtttcagctaagggaagacatttcttttctttttacataactgccttgaacctgtgagtaaatattgaggctttgtgttgtaattcttcagttggttgtgtcttttttttcccccctttttcctttttctgattagctttgtgtttggtttacatttaaagcattgctgttatgtct

SEQ ID NO: 1608 - DNA, 565 bp, Homo sapiens
  misc_feature (27)..(31): n includes a, c, g, or t, or contains no nucleotide
  misc_feature (55)..(55): n includes a, c, g, or t, or contains no nucleotide
  misc_feature (57)..(57): n includes a, c, g, or t, or contains no nucleotide
  misc_feature (67)..(68): n includes a, c, g, or t, or contains no nucleotide
  misc_feature (70)..(73): n includes a, c, g, or t, or contains no nucleotide
  misc_feature (79)..(79): n includes a, c, g, or t, or contains no nucleotide
  misc_feature (87)..(87): n includes a, c, g, or t, or contains no nucleotide
  misc_feature (113)..(113): n includes a, c, g, or t, or contains no nucleotide
  misc_feature (155)..(184): n includes a, c, g, or t, or contains no nucleotide
  misc_feature (192)..(192): n includes a, c, g, or t, or contains no nucleotide
  misc_feature (379)..(398): n includes a, c, g, or t, or contains no nucleotide
  misc_feature (413)..(413): n includes a, c, g, or t, or contains no nucleotide
tcttgcttctggtggctctcttccaannnnnacatcacttgatgcaactgggaancntggtatttgnnannnngggagnagcccccnaacatcgtgactgcccctctgttccntgaaccctcagaacctctctctgctcaccagcaaccctgttnnnnnnnnnnnnnnnnnnnnnnnnnnnnnngggaactntgcacctgtagccagccttcacgccacctccacctctgctgagtccatccagaactctctcttcacagtggcctctgccagcggggctgcgtccaccaccaccaccgcctccaaggcacagtgagctgggcagagctgggctgccagaagcctttttcactctgcagtgtgattggactgccagccnnnnnnnnnnnnnnnnnnnngtgattggcttcctntcgccgtgttgtgagggcaaaggagagaagggagaaaaaaaaaaaaaaaccacacacacccatacacacataccagaaaaagaaagaaaggatggagacggaacatttgcctaattttgtaataaaacactgtcttttcaggattgcttcat

SEQ ID NO: 1609 - DNA, 239 bp, Homo sapiens
  misc_feature (26)..(26): n includes a, c, g, or t, or contains no nucleotide
  misc_feature (28)..(31): n includes a, c, g, or t, or contains no nucleotide
  misc_feature (33)..(33): n includes a, c, g, or t, or contains no nucleotide
  misc_feature (35)..(35): n includes a, c, g, or t, or contains no nucleotide
  misc_feature (50)..(50): n includes a, c, g, or t, or contains no nucleotide
  misc_feature (57)..(71): n includes a, c, g, or t, or contains no nucleotide
  misc_feature (76)..(85): n includes a, c, g, or t, or contains no nucleotide
  misc_feature (87)..(98): n includes a, c, g, or t, or contains no nucleotide
  misc_feature (100)..(103): n includes a, c, g, or t, or contains no nucleotide
  misc_feature (105)..(106): n includes a, c, g, or t, or contains no nucleotide
  misc_feature (108)..(115): n includes a, c, g, or t, or contains no nucleotide
  misc_feature (118)..(118): n includes a, c, g, or t, or contains no nucleotide
  misc_feature (124)..(126): n includes a, c, g, or t, or contains no nucleotide
  misc_feature (128)..(133): n includes a, c, g, or t, or contains no nucleotide
  misc_feature (136)..(141): n includes a, c, g, or t, or contains no nucleotide
  misc_feature (149)..(149): n includes a, c, g, or t, or contains no nucleotide
  misc_feature (153)..(153): n includes a, c, g, or t, or contains no nucleotide
gaccttcataacaggatgcttctatngnnnngntncaggatgagtaactnggtgggnnnnnnnnnnnnnnnggctnnnnnnnnnncnnnnnnnnnnnncnnnncnngnnnnnnnnttngggaannnannnnnnttnnnnnncatgtctnccangagtgccaattactgctttgcctctcgcctaaagaatacaggactgctgctcttatcagaggtagctctaggtcagtgtaatgaac

SEQ ID NO: 1610 - DNA, 429 bp, Homo sapiens
  misc_feature (238)..(238): n includes a, c, g, or t, or contains no nucleotide
  misc_feature (390)..(404): n includes a, c, g, or t, or contains no nucleotide
gatactattacaacaagaggatccttcataaaacaaaagggaaaagatttacctataaatttaacttcaacaagctggtgatgcccaactacccattcatcaacattcggtcaagtggtgtggttcctcagagtgcaccaccagtgccaacagcctcttcccggttccatttcccacctctggacacccattctccaaccaatgatgtgcagccgggacggttctctgctagctcccnaactgcttctggccaggagtccagtaatggtactgatagaaagactgagctttcagagctggaggatggctcagctgctgactggcgccggggtgtggatcccgtgtcctccaggaatgccattggtggaggagggattggccatcagaaannnnnnnnnnnnnnnatgcttcctctgtttgctaggccag

SEQ ID NO: 1611 - DNA, 551 bp, Homo sapiens
  misc_feature (186)..(186): n includes a, c, g, or t, or contains no nucleotide
  misc_feature (188)..(202): n includes a, c, g, or t, or contains no nucleotide
  misc_feature (419)..(478): n includes a, c, g, or t, or contains no nucleotide
gacttccatctcttcaaagaaggaattaaacccatgtgggaggatgatgcaaataaaaatggtggcaagtggattattcggctgcggaagggcttggcctcccgttgctgggagaatctcattttggccatgctgggggaacagttcatggttggggaggagatctgtggggctgtggtgtctgtncnnnnnnnnnnnnnnnattatttcaatatggaataagactgccagtgaccaagcaaccacagcccgaatccgggacacacttcggcgagtgcttaacctacctcccaacaccattatggaatacaaaactcacaccgacagcatcaaaatgccaggcaggctgggcccccaaaggctcctttttcaaaacctctggaagccgcggttgaatgtgccatgaccctctccctctnnnnnnnnnnnnnnnnnnnnnnnnnnnnnnnnnnnnnnnnnnnnnnnnnnnnnnnnnnnncctggaagatccttctgtcctggacaagaggaattggaagagcattttatgttttaagaacaggctgacacgc

SEQ ID NO: 1612 - DNA, 433 bp, Homo sapiens
  misc_feature (120)..(142): n includes a, c, g, or t, or contains no nucleotide
gaagttcccctgtcttcaagcactaaaacgttgatcttaaccttttttttgaagtgcttgcctggtaatagaaaacgggttctctgcctattttaaaatagtgaatatacgtaaattttnnnnnnnnnnnnnnnnnnnnnnncaccatcaacatgaattactgtactatcctgtactgcagtggtgccttcagggactcgaggaatgtaaggttgcctttcccctttctaaataccctcagattcctaacatcgagcccatgctttgtttgatttgttctattccatccattgtcccttttgttactgacagttgccttggtcctagccagtccctgccatgagatcataggggttcccattgtgctagatcttgggaaaccagatgactctccctgtcaaaactatggctacgtcactgtaaaccatttctg

SEQ ID NO: 1613 - DNA, 433 bp, Homo sapiens
  misc_feature (119)..(149): n includes a, c, g, or t, or contains no nucleotide
cgagatcaccaacctcctgcgtggggacctgctctccgagaacccgcagcaggcagccagctccttcgggccccaccgcgtggtccctgaccgctggaagggcatgacccaggagcagnnnnnnnnnnnnnnnnnnnnnnnnnnnnnnnaaatccaggagaagctgaggctccaggaagaaaagcgccagcgagacctggactgggaccggcggaggattcagggggctcgcgccaccctgctgtttgagcggcagcagtggcggcggcagcgcgacctgcgcagagctctggacagcagcaacctcagcctggccaaggagcagcatttgcagaaaaaatatatgaatgaagtctatacaaatcaacccacgggagactatttcacacaatttaatacaggaagtcgataatgaggaacacacccttgttcc

SEQ ID NO: 1614 - DNA, 374 bp, Homo sapiens
  misc_feature (48)..(130): n includes a, c, g, or t, or contains no nucleotide
  misc_feature (145)..(159): n includes a, c, g, or t, or contains no nucleotide
  misc_feature (200)..(214): n includes a, c, g, or t, or contains no nucleotide
  misc_feature (282)..(346): n includes a, c, g, or t, or contains no nucleotide
tggagaccagaatcggccagtgcagccatttggcttctccttcaggannnnnnnnnnnnnnnnnnnnnnnnnnnnnnnnnnnnnnnnnnnnnnnnnnnnnnnnnnnnnnnnnnnnnnnnnnnnnnnnnnngaaagacgaccagcnnnnnnnnnnnnnnnatgagcaggacaccaaccaccaccagccccacgcagatccnnnnnnnnnnnnnnncccagcacttcttctgggccaggttctgtgtagtcttgttgaaggttgagctcatatccaggagttgnnnnnnnnnnnnnnnnnnnnnnnnnnnnnnnnnnnnnnnnnnnnnnnnnnnnnnnnnnnnnnnnngcataatttccgtcacctcgttcgcctg

SEQ ID NO: 1615 - DNA, 314 bp, Homo sapiens
ttgttggcgttgttaacccggagagtgctcctgtattgaactttgctgttagttattttattgcttctttttggagagtgctataaaagactattctaatgaaaacattaaaatttacaatttgacatacaaaaaggggttgtccattgattttaaccaatgtagcactgagagagagagaggttaattatagatagacaagagtggtgtttgttgtttttcccctcccagcattgaaatcattggggcttgtcagaggtattaaaaaaagatttgttgtgctattgctgcaaacacttaataactagaggaga

SEQ ID NO: 1616 - DNA, 289 bp, Homo sapiens
tattagagagggactggtagtgagaatatcagctctgtttggatggtggaaggtctcattttattgagatttttaagatacatgcaaaggtttggaaatagaacctctaggcaccctcctcagtgtgggtgggctgagagttaaagacagtgtggctgcagtagcatagaggcgcctagaaattccacttgcaccgtagggcatgctgataccatcccaatagctgttgcccattgacctctagtggtgagtttctagaatactggtccattcatgagatattcaagat

SEQ ID NO: 1617 - DNA, 361 bp, Homo sapiens
  misc_feature (248)..(248): n includes a, c, g, or t, or contains no nucleotide
  misc_feature (257)..(257): n includes a, c, g, or t, or contains no nucleotide
  misc_feature (261)..(285): n includes a, c, g, or t, or contains no nucleotide
aactctgtgatcttgctctcggtgcttccaactcatccacgtcctgtctgtttcctctgtatacaaaaccctttctgcccctgctgacacagacatcctctatgccagcagccagccaaccctttcattagaacttcaagctctccaaaggctcagattataactgttgtcatatttatatgaggctgttgtcttttccttctgagcctgcctttctccccccacccaggagtatcctcttgccaaancaaaagacntttnnnnnnnnnnnnnnnnnnnnnnnnncttgaaggtctaggtgctttaacctcacataccctcacttaaacttttatcactgttgcatataccagttgtgata

SEQ ID NO: 1618 - DNA, 496 bp, Homo sapiens
  misc_feature (28)..(42): n includes a, c, g, or t, or contains no nucleotide
  misc_feature (119)..(119): n includes a, c, g, or t, or contains no nucleotide
  misc_feature (129)..(130): n includes a, c, g, or t, or contains no nucleotide
  misc_feature (142)..(142): n includes a, c, g, or t, or contains no nucleotide
  misc_feature (157)..(179): n includes a, c, g, or t, or contains no nucleotide
  misc_feature (425)..(449): n includes a, c, g, or t, or contains no nucleotide
ttcacatttgtgtgtccaactgaaattnnnnnnnnnnnnnnnagacttgaagaattcagatctataaatactgaagtggtagcatgctctgttgattcacagtttacccatttggcctnggattaatanncccctcgaagancaaggaggacttggnnnnnnnnnnnnnnnnnnnnnnntctttcagatttgacccatcagatctcaaaggactatggtgtatacctagaggactcaggccacactcttagaggtctcttcattattgatgacaaaggaatcctaagacaaattactctgaatgatcttcctgtgggtagatcagtggatgagacactacgtttggttcaagcattccagtacactgacaaacacggagaagtctgccctgctggctggaaacctggtagtgaaacaataatccnnnnnnnnnnnnnnnnnnnnnnnnntttcgataaactgaattgagaaatacttcttcaagttatgatgcttg

SEQ ID NO: 1619 - DNA, 491 bp, Homo sapiens
  misc_feature (47)..(63): n includes a, c, g, or t, or contains no nucleotide
  misc_feature (179)..(218): n includes a, c, g, or t, or contains no nucleotide
  misc_feature (224)..(224): n includes a, c, g, or t, or contains no nucleotide
  misc_feature (335)..(349): n includes a, c, g, or t, or contains no nucleotide
  misc_feature (354)..(354): n includes a, c, g, or t, or contains no nucleotide
  misc_feature (369)..(369): n includes a, c, g, or t, or contains no nucleotide
ctagaagatctcagttattgtcgagaagagaggaaaagtctgcgggnnnnnnnnnnnnnnnnngctgacaaatatgaggaagctaaagaaaaacaagaggatatcatgaacaggatgaaaaaactacttcacagttttcactctgagctcccagttctctctgatagtgagcgagacannnnnnnnnnnnnnnnnnnnnnnnnnnnnnnnnnnnnnnntttggncaatgccatcaaacaggttactatgaaaaaggattatcaacagcaaaagatggagaaggtgttgagtcttccaaaacccaccattattctcagtgcctaccagcgaaagtnnnnnnnnnnnnnnntgaangaggagggtgaacanataagggaaatggtgaagcaaatcaatgatatccgcaatcatgtaaacttctgacaccaccaggagctgactcacacctgaactgaacaccattgaaggcttaaacccatattgtaaaacag

SEQ ID NO: 1620 - DNA, 519 bp, Homo sapiens
  misc_feature (52)..(52): n includes a, c, g, or t, or contains no nucleotide
  misc_feature (61)..(61): n includes a, c, g, or t, or contains no nucleotide
  misc_feature (67)..(67): n includes a, c, g, or t, or contains no nucleotide
  misc_feature (90)..(90): n includes a, c, g, or t, or contains no nucleotide
  misc_feature (94)..(94): n includes a, c, g, or t, or contains no nucleotide
  misc_feature (131)..(131): n includes a, c, g, or t, or contains no nucleotide
  misc_feature (297)..(317): n includes a, c, g, or t, or contains no nucleotide
  misc_feature (366)..(412): n includes a, c, g, or t, or contains no nucleotide
ggctgactctgtaccttacttacactacttacttaatagaaacacaaacttngaaattgtnccagtngtccagctggagcacaacgtttnggtnaatatgctgtttcctcagttcagagaggtagcaactnggtaaactccttataaaaagcaaatacctggatttacaaaagtgaaagtagttgttcacaaaagaattcgccatggaattctttcagttaccaagctctcctggtaatgtttgtggttatatcatttacacaaaacttttcaggaacttctgtgttgtttaagcannnnnnnnnnnnnnnnnnnnntcagtgaatcagtctgtttattaagcacttatcagggcttccacacacnnnnnnnnnnnnnnnnnnnnnnnnnnnnnnnnnnnnnnnnnnnnnnngaaatggccaactgtggctgttacagttctttcattcaattataacttgtaaaccagtgactcctaatctttttcaagttaagacaccttaccattgcttatttggt

SEQ ID NO: 1621 - DNA, 507 bp, Homo sapiens
  misc_feature (128)..(128): n includes a, c, g, or t, or contains no nucleotide
  misc_feature (200)..(217): n includes a, c, g, or t, or contains no nucleotide
  misc_feature (219)..(219): n includes a, c, g, or t, or contains no nucleotide
ctatagctatctacaagattcagacccagactcttttcaagactacattaagtcctatttggaacaagcgagtcggatctggtcatggctccttggggcggcgatggtaggggccgtcctcactgccntgctggcagggcttgtgagcttgctgtgtcgtcacaagagaaagcagcttcctgaagaaaagcagccactcnnnnnnnnnnnnnnnnnntnaccacagcttgtatcagagccatttataaaaggcttaggcaatagagtagggccaaaaagcctgacctcactctaactcaaagtaatgtccaggttcccagagaatatctgctggtatttttctgtaaagaccatttgcaaaattgtaacctaatacaaagtgtagccttcttccaactcaggtagaacacacctgtctttgtcttgctgttttcactcagcccttttaacattttcccctaagcccatatgtctaaggaaaggatgctatttggtaatgaggaactg

SEQ ID NO: 1622 - DNA, 506 bp, Homo sapiens
  misc_feature (55)..(55): n includes a, c, g, or t, or contains no nucleotide
tagagactcgactttagtccttccccgccatggcacagtggggaaggtgtcaatngggagtgtcacggacaggaggtaggatcctgccgctcgcgtcttagtgtttctccctcaagactttccttctgttttgttgtcttgtgcagtattttacagcccctcttgtgtttttctttatttctcgtacacacacgcagttttaagggtgatgtgtgtataattaaaaggacccttggcccatactttcctaattctttagggactgggattgggtttgactgaaatatgttttggtggggatgggacggtggacttccattctccctaaactggagttttggtcggtaatcaaaactaaaagaaacctctgggagactggaaacctgattggagcactgaggaacaagggaatgaaaaggcagactctctgaacgtttgatgaaatggactcttgtgaaaattaacagtgaatattcactgttgcactgtacgaagtctctgaaatg

SEQ ID NO: 1623 - DNA, 511 bp, Homo sapiens
  misc_feature (63)..(63): n includes a, c, g, or t, or contains no nucleotide
  misc_feature (125)..(140): n includes a, c, g, or t, or contains no nucleotide
  misc_feature (157)..(171): n includes a, c, g, or t, or contains no nucleotide
tgcagcagcacatggaggtccacgcgggcgtgcgcagctacatctgcagtgagtgcaaccgcnccttccccagccacacggctctcaaacgccacctgcgctcacatacaggcgaccacccctannnnnnnnnnnnnnnnggcagctgcttccgggnnnnnnnnnnnnnnnagagccacaaacgcatccacacgggtgagaaaccctacgagtgcaatggctgtggcaagaagttcagcctcaagcatcagctggagacgcactatagggtgcacacaggtgagaagccctttgagtgtaagctctgccaccagcgctcccgggactactcggccatgatcaagcacctgagaacgcacaacggcgcctcgccctaccagtgcaccatctgcacagagtactgccccagcctctcctccatgcagaagcacatgaagggccacaagcccgaggagatcccgcccgactggaggatagagaagacgtacctctacctgtgctatgtgtgaag

SEQ ID NO: 1624 - DNA, 41 bp, Homo sapiens
cagctcctcgaccattcgtttgtcaaggtttgcacagatga

SEQ ID NO: 1625 - DNA, 569 bp, Homo sapiens
  misc_feature (52)..(52): n includes a, c, g, or t, or contains no nucleotide
  misc_feature (282)..(282): n includes a, c, g, or t, or contains no nucleotide
  misc_feature (298)..(298): n includes a, c, g, or t, or contains no nucleotide
  misc_feature (300)..(300): n includes a, c, g, or t, or contains no nucleotide
  misc_feature (311)..(326): n includes a, c, g, or t, or contains no nucleotide
taaataaaccaggatggcagggaccaacccctaatccctccccagcggcaancccctcttttcagagtgggcagagggttgcctatggtgggcactaggaatgaggtcccctgcctcgatgcgggtcctaggagaaaaagtcctacttttctgggtccccaggtgcagcacctcccggagactgtttctcccatggcctcctgagtgatgggccctgcctccctgtgcctcatcctcaggctggttggagcagagggtgggcaggagccccagcacagactnggggggtgctcacagnangggccaccttnnnnnnnnnnnnnnnnttatccctggggtgtgcttggaccccacctgctttctttctctcctgcccctcccctactctcactgtaatttatggaccctgcccgcctgcgtgttgtgtgtatgtcctgtgccttttctcactattgtttgggtgtgggagggggtggtttttcactgaaaaggggggtacacctatagctttcttgatgttcaatcaatcagtcactgtgtcccagacatattcaataaacacagattgg

SEQ ID NO: 1626 - DNA, 586 bp, Homo sapiens
  misc_feature (50)..(53): n includes a, c, g, or t, or contains no nucleotide
  misc_feature (68)..(68): n includes a, c, g, or t, or contains no nucleotide
  misc_feature (74)..(74): n includes a, c, g, or t, or contains no nucleotide
  misc_feature (96)..(96): n includes a, c, g, or t, or contains no nucleotide
  misc_feature (99)..(99): n includes a, c, g, or t, or contains no nucleotide
  misc_feature (102)..(104): n includes a, c, g, or t, or contains no nucleotide
  misc_feature (109)..(113): n includes a, c, g, or t, or contains no nucleotide
  misc_feature (116)..(116): n includes a, c, g, or t, or contains no nucleotide
  misc_feature (120)..(120): n includes a, c, g, or t, or contains no nucleotide
  misc_feature (134)..(164): n includes a, c, g, or t, or contains no nucleotide
  misc_feature (167)..(167): n includes a, c, g, or t, or contains no nucleotide
  misc_feature (175)..(175): n includes a, c, g, or t, or contains no nucleotide
  misc_feature (188)..(189): n includes a, c, g, or t, or contains no nucleotide
  misc_feature (192)..(192): n includes a, c, g, or t, or contains no nucleotide
  misc_feature (196)..(196): n includes a, c, g, or t, or contains no nucleotide
  misc_feature (201)..(203): n includes a, c, g, or t, or contains no nucleotide
  misc_feature (212)..(212): n includes a, c, g, or t, or contains no nucleotide
  misc_feature (214)..(214): n includes a, c, g, or t, or contains no nucleotide
  misc_feature (216)..(216): n includes a, c, g, or t, or contains no nucleotide
  misc_feature (218)..(219): n includes a, c, g, or t, or contains no nucleotide
  misc_feature (221)..(221): n includes a, c, g, or t, or contains no nucleotide
  misc_feature (224)..(224): n includes a, c, g, or t, or contains no nucleotide
  misc_feature (231)..(231): n includes a, c, g, or t, or contains no nucleotide
  misc_feature (239)..(239): n includes a, c, g, or t, or contains no nucleotide
  misc_feature (251)..(251): n includes a, c, g, or t, or contains no nucleotide
  misc_feature (342)..(356): n includes a, c, g, or t, or contains no nucleotide
agtcattacaaatgtgactaagtcattacaaatgtgactgagtcattacnnnnggaccctctgggtgncattgnaaaagaatccgttttatatccnggnttnnnaggannnnnccnggantaataataagcttnnnnnnnnnnnnnnnnnnnnnnnnnnnnnnnggnaccttggncctcagtgttatnnacngggnttggnnnacgtgttcncngncnngngtngttgatntcacacancgggtgatctcncaaaactggtaagtttcttatgctcatgagccctccctttttttttttaatttggtgcctgcaactttcttaacaatgattctacttcctnnnnnnnnnnnnnnnaatgctcttggcctcttttttgctgctgttttgctattcttaaacttaggccaagtaccaatgttggctgttagaagggattctgttcattcaacatgcaactttagggaatggaagtaagttcatttttaagttgtgtggtcagtaggtgcggtgtctagggtagtgaatcctgtaagttcaaatttatgattaggtgacgagttgacattgagattgtccttttcccc

SEQ ID NO: 1627 - DNA, 98 bp, Homo sapiens
ccactggcccactggtggctaggtctccccttatccttctggtccagcgcaaggaggggctgcttctgaggtcggtggctgtctttccattaaagaaa

SEQ ID NO: 1628 - DNA, 546 bp, Homo sapiens
  misc_feature (51)..(51): n includes a, c, g, or t, or contains no nucleotide
  misc_feature (235)..(235): n includes a, c, g, or t, or contains no nucleotide
  misc_feature (239)..(322): n includes a, c, g, or t, or contains no nucleotide
  misc_feature (430)..(430): n includes a, c, g, or t, or contains no nucleotide
  misc_feature (487)..(507): n includes a, c, g, or t, or contains no nucleotide
  misc_feature (515)..(515): n includes a, c, g, or t, or contains no nucleotide
  misc_feature (521)..(521): n includes a, c, g, or t, or contains no nucleotide
gaatcaggtccctcggccagggttcttctttgagccaactgttttcacagncgtggaagaccacatgttcatagccaaggaggagtccttcgggcctgtcatgatcatctctcggtttgctgatggggacttggatgccgtgctgtctcgggccaatgccacggaatttggcctggcttctggtgtcttcaccagggacatcaacaaggccctgtatgtcagtgacaagctccanggcnnnnnnnnnnnnnnnnnnnnnnnnnnnnnnnnnnnnnnnnnnnnnnnnnnnnnnnnnnnnnnnnnnnnnnnnnnnnnnnnnnnngatctaggagaggcggctctgaacgagtacctgcgggtcaagacagtgaccttcgaatactgaagaaaggtctttgtgagaagaaagtccctgcccctccctcgtggntggggccccctccctcttgagcctgggtgcacagcacctcccacctggggggctagnnnnnnnnnnnnnnnnnnnnnaccatgtntgcatnttggacgccctctgtccagtcagaa

SEQ ID NO: 1629 - DNA, 250 bp, Homo sapiens
ggagtgtaagctccttttctcatttcaaagttgctaccagtgtatgcagtaattagaacaaagaagaaacattcagtagaacattttattgcctagttgacaacattgcttgaatgctggtggttcctatccctttgacactacacaattttctaatatgtgttaatgctatgtgacaaaacgccctgattcctagtgccaaaggttcaacttaatgtatatacctgaaaacccatgcatttgtgctctt

SEQ ID NO: 1630 - DNA, 520 bp, Homo sapiens
  misc_feature (117)..(117): n includes a, c, g, or t, or contains no nucleotide
  misc_feature (165)..(184): n includes a, c, g, or t, or contains no nucleotide
  misc_feature (254)..(269): n includes a, c, g, or t, or contains no nucleotide
cagttgcttcaaaatgtgaattaacttgttgaaactgtggctttaacatccatgtgactagtgtatatggtatttgctctccattagcaaaataattcattgttaggtaaacttcantagtgcaaattgcagatctgtgagcaatgtttcctattgaatataaannnnnnnnnnnnnnnnnnnnatcagcagcccagcctttatcaggaaaattatacttggcaagttgctgaaaatgcacaaagttatgaaannnnnnnnnnnnnnnnaaataactagccattattctatgtattattaaatatttactagttctgttaaaagcagagcagaagttagacactaaggatctctttgtgaactctgtgttctctatattagattgctgtttatatgtaagaattttattgcttatgtggcatacaatatttataactataaactttatagaagtacagtattaaagtcagtggtacacagacattctgtacatatcctgtgaaacgtgctgtcatatgaa

SEQ ID NO: 1631 - DNA, 295 bp, Homo sapiens
tttgatacttgcagattggggaaaacaacaaatgtcttgaagcatattaatggaattagtttctaatgtggcaaactgtattaagttaaagttctgatttgctcactctatcctggataggtatttagaacctgatagtctttaagccattccagtcatgatgaggtgatgtatgaatacatgcatacattcaaagtactgttttcaaagttaatgcaagtaaatacagcaattcctctttcaagctttaggcagatcattaattatgagctagccaaatgtgggcatactatta

SEQ ID NO: 1632 - DNA, 501 bp, Homo sapiens
  misc_feature (262)..(262): n includes a, c, g, or t, or contains no nucleotide
  misc_feature (418)..(445): n includes a, c, g, or t, or contains no nucleotide
ccgttcaccagttgccattgagggtttcagagagcctttttctaggcctacatgctttgtgaacaagtccctgtaattgttgtttgtatgtataattcaaagcaccaaaataagaaaagatgtagatttatttcatcatattatacagaccgaactgttgtataaatttatttactgctagtcttaagaactgctttctttcgtttgtttgtttcaatattttccttctctctcaatttttggttgaataaactagattacnattcagttggcctaaggtggttgtgctcggagggtttcttgtttcttttccattttgtttttggatgatatttattaaatagcttctaagagtccggcggcatctgtcttgtccctattcctgcagcctgtgctgagggtagcagtgtatgagctnnnnnnnnnnnnnnnnnnnnnnnnnnnncgacaggccacgtcctgcaatcggcccggctgcctcttcgccctgtcgtgttctgt

SEQ ID NO: 1633 - DNA, 431 bp, Homo sapiens
  misc_feature (275)..(275): n includes a, c, g, or t, or contains no nucleotide
  misc_feature (277)..(277): n includes a, c, g, or t, or contains no nucleotide
  misc_feature (281)..(318): n includes a, c, g, or t, or contains no nucleotide
  misc_feature (341)..(358): n includes a, c, g, or t, or contains no nucleotide
ctgaaggccacaaaaatgaactccatctacaagtgattacctagttgtgagctgttggcatgtggttagaagccatcagaggtgcaagggcttagaaaagaccctggccagacctgactccactcttaaacctgggtcttctccttggcggtgctgtcagcgcacagacccatgcgcatccccacccacaaccctttaccctgatgatctgtattatattttaatgtatatgtgaatatattgaaaataatttgttttttcctggtttttgtttngntttnnnnnnnnnnnnnnnnnnnnnnnnnnnnnnnnnnnnnnaagactttgtaaggacagtttannnnnnnnnnnnnnnnnnaatttgttatcatgtaaatattccaaagcaggctgccttgtggttttggccagccttgtgctatgttgataag

SEQ ID NO: 1634 - DNA, 469 bp, Homo sapiens
  misc_feature (173)..(216): n includes a, c, g, or t, or contains no nucleotide
  misc_feature (222)..(239): n includes a, c, g, or t, or contains no nucleotide
  misc_feature (316)..(317): n includes a, c, g, or t, or contains no nucleotide
  misc_feature (320)..(320): n includes a, c, g, or t, or contains no nucleotide
  misc_feature (324)..(328): n includes a, c, g, or t, or contains no nucleotide
  misc_feature (330)..(330): n includes a, c, g, or t, or contains no nucleotide
  misc_feature (332)..(341): n includes a, c, g, or t, or contains no nucleotide
  misc_feature (423)..(424): n includes a, c, g, or t, or contains no nucleotide
  misc_feature (426)..(427): n includes a, c, g, or t, or contains no nucleotide
tctgcggtaaaggacttggtctgttctaccccctgctccagcttgccctgctcgtcctgatcctgtgatttctctgtccttggctattcttgcagggagctggaaaacttcctgaggatttctggcctccccctgggttttagtttcagggcacacaggacagcagaagatcnnnnnnnnnnnnnnnnnnnnnnnnnnnnnnnnnnnnnnnnnnnnaggagnnnnnnnnnnnnnnnnnntcaaagggcctgcagagggagatgtggcccttcctccccctcattgaggacttaataaattggattgatgacaccannaanaaannnnnanannnnnnnnnntggctaggagaggggaggagactggacaaagaagctggagaataggaactggagtttttaagaaaaattgttaaagaaaaannanncgctggttttttgcaaatgctgtataaatctgtcatgccaca

SEQ ID NO: 1635 - DNA, 385 bp, Homo sapiens
gagtccctgatgattcgagtgactttctagattttgtttgtcatgtacgaaacaagagggctggcaaggaagaacccgttgttgtccattgcagtgctggaatcggaagaactggggttcttattactatggaaacagccatgtgtctcattgaatgcaatcagccagtttatccactagatattgtaagaacaatgagagatcagcgagccatgatgatccaaacacctagtcaatacagatttgtatgtgaagctattttgaaagtttatgaagaaggctttgttaaacccttaacaacatcaacaaataaataagaaagcaaaaagatctgggatatgtgttggaaaactgctttcccttatgttcactgtgccataatgct

SEQ ID NO: 1636 - DNA, 202 bp, Homo sapiens
tcaaaccatcctcaactaagctcctctccagccctggccacatccccatcctcccccaacctccagccccaacacccatcatccccctgagctcacccttaactccaatttatcctccaagcctatctctcaccatccagccctcacctagccatttcccaaccctagtcctccaccgtcccgaagccaacttcacccatgt

SEQ ID NO: 1637 - DNA, 469 bp, Homo sapiens
  misc_feature (46)..(156): n includes a, c, g, or t, or contains no nucleotide
  misc_feature (409)..(423): n includes a, c, g, or t, or contains no nucleotide
tctatgtaacagttcctcagacagttttgaaaatttggaagaagannnnnnnnnnnnnnnnnnnnnnnnnnnnnnnnnnnnnnnnnnnnnnnnnnnnnnnnnnnnnnnnnnnnnnnnnnnnnnnnnnnnnnnnnnnnnnnnnnnnnnnnnnnnnnnatctccctcttcagacagggagaacaggcatcttcctccttaccctggaatttccaacagttcccaccaaaaagtgctgaatgaaccagaataggggccgagaaggaaaattaccacctgtttcacctgctcctccttcagagcaagaaattctagcattggttgggctaggggttggggggtagggagaaaaagaaggaagagagttaccaaaagtaaacataagacaaaaccctagtggtatagatggaannnnnnnnnnnnnnnaaccagagagctggttcctccctcgactctgcacagccactgaaag

SEQ ID NO: 1638 - DNA, 502 bp, Homo sapiens
  misc_feature (89)..(152): n includes a, c, g, or t, or contains no nucleotide
  misc_feature (190)..(205): n includes a, c, g, or t, or contains no nucleotide
  misc_feature (243)..(301): n includes a, c, g, or t, or contains no nucleotide
  misc_feature (306)..(308): n includes a, c, g, or t, or contains no nucleotide
  misc_feature (311)..(316): n includes a, c, g, or t, or contains no nucleotide
  misc_feature (318)..(318): n includes a, c, g, or t, or contains no nucleotide
  misc_feature (320)..(330): n includes a, c, g, or t, or contains no nucleotide
  misc_feature (332)..(336): n includes a, c, g, or t, or contains no nucleotide
  misc_feature (339)..(339): n includes a, c, g, or t, or contains no nucleotide
  misc_feature (341)..(341): n includes a, c, g, or t, or contains no nucleotide
  misc_feature (343)..(352): n includes a, c, g, or t, or contains no nucleotide
  misc_feature (354)..(359): n includes a, c, g, or t, or contains no nucleotide
aacaggagatcgacgacgtgatagggcaggtgcggcgaccagagatgggtgaccaggctcacatgccctacaccactgccgtgattcannnnnnnnnnnnnnnnnnnnnnnnnnnnnnnnnnnnnnnnnnnnnnnnnnnnnnnnnnnnnnnngaagtacagggcttccgcatccctaagggaacgacacnnnnnnnnnnnnnnnnatcggtgctgaaggatgaggccgtctgggagaagcccnnnnnnnnnnnnnnnnnnnnnnnnnnnnnnnnnnnnnnnnnnnnnnnnnnnnnnnnnnntttcnnngcnnnnnncngnnnnnnnnnnngnnnnnccntngnnnnnnnnnngnnnnnnctcttcttcacctccctgctgcagcacttcagcttctcggtgcccactggacagccccggcccagccaccatggtgtctttgctttcctggtgaccccatccccctatgagctttgtgctgtgccccgctagaatggggtacc

SEQ ID NO: 1639 - DNA, 271 bp, Homo sapiens
  misc_feature (115)..(213): n includes a, c, g, or t, or contains no nucleotide
tgtgtctactatgctcaactatgactatgtgtgggatatggtcttccaccctaatggggccatagaaatcagactccacaccaccggctacatcagctcagcattcccctttggnnnnnnnnnnnnnnnnnnnnnnnnnnnnnnnnnnnnnnnnnnnnnnnnnnnnnnnnnnnnnnnnnnnnnnnnnnnnnnnnnnnnnnnnnnnnnnnnnnnggcatcctggcagaggcaaaagtgctggaggggtgagctgaagtctccatgcctagct

SEQ ID NO: 1640 - DNA, 403 bp, Homo sapiens
  misc_feature (64)..(64): n includes a, c, g, or t, or contains no nucleotide
  misc_feature (76)..(76): n includes a, c, g, or t, or contains no nucleotide
  misc_feature (101)..(101): n includes a, c, g, or t, or contains no nucleotide
  misc_feature (114)..(114): n includes a, c, g, or t, or contains no nucleotide
  misc_feature (119)..(119): n includes a, c, g, or t, or contains no nucleotide
  misc_feature (133)..(137): n includes a, c, g, or t, or contains no nucleotide
  misc_feature (143)..(151): n includes a, c, g, or t, or contains no nucleotide
  misc_feature (158)..(163): n includes a, c, g, or t, or contains no nucleotide
  misc_feature (165)..(179): n includes a, c, g, or t, or contains no nucleotide
  misc_feature (285)..(285): n includes a, c, g, or t, or contains no nucleotide
  misc_feature (303)..(303): n includes a, c, g, or t, or contains no nucleotide
  misc_feature (305)..(305): n includes a, c, g, or t, or contains no nucleotide
  misc_feature (315)..(315): n includes a, c, g, or t, or contains no nucleotide
gtcctcaacatctgcctcatgctgaaacttagctatctgacctgggtgcgcttctccatctggnctgctgatgggnacttgcagtgtatttcggctatggncatccggcatagnaaggnagaaccagcgggannnnncagggnnnnnnnnnacacacnnnnnngnnnnnnnnnnnnnnngcctggaggagacagtgcaggctatgcagccccccagccaggcaccagcacaggaccctggccatatggagtagctgatcagcccacacttgccccgccctcccanacctgcttgggaggccananaggccagacnagccgagagccccttctgttgtgggcagcctgggtttgcaggcctgcacaggctggggagtcctcaggaccttaggaccttcatccag

SEQ ID NO: 1641 - DNA, 512 bp, Homo sapiens
  misc_feature (203)..(203): n includes a, c, g, or t, or contains no nucleotide
  misc_feature (225)..(240): n includes a, c, g, or t, or contains no nucleotide
  misc_feature (257)..(274): n includes a, c, g, or t, or contains no nucleotide
  misc_feature (292)..(334): n includes a, c, g, or t, or contains no nucleotide
cggctggacaagcaaggcaaagtgaatgcctggacctctggccacaatgaccagtcacaatggttacaggtggatcttcttgttccaaccaaagtgactggcatcattacacaaggagctaaagattttggtcatgtacagtttgttggctcctacaaactggcttacagcaatgatggagaacactggactgtataccaggntgaaaagcaaagaaaagataannnnnnnnnnnnnnnntttgacaatgacactcnnnnnnnnnnnnnnnnnnaccctcccatctatgcannnnnnnnnnnnnnnnnnnnnnnnnnnnnnnnnnnnnnnnnnncattgcggtcagagctgctgggctgcacagaggaggaatgaggggaggctacatttcacaaccctcttccctatttccctaaaagtatctccatggaatgaactgtgcaaaatctgtaggaaactgaatggtttttttttttttttcatgaaaaagtgctcaaattatggtaggcaac

SEQ ID NO: 1642 - DNA, 473 bp, Homo sapiens
  misc_feature (77)..(77): n includes a, c, g, or t, or contains no nucleotide
  misc_feature (319)..(319): n includes a, c, g, or t, or contains no nucleotide
  misc_feature (417)..(436): n includes a, c, g, or t, or contains no nucleotide
caaagatgttctcagctaagaatggattagggattcttgcttctgtctgttcttaatttttgggtttgacaaccacntattttttcctttgtttacaatctactcaccaggctcatacctacaatgtgaacatacagtatgcccttattagcagattcaatggctcacattctttcaaaaggtctaatttgacaaatacataagacccattatttcctagaatgtttgtaatatatctaattgcaaatggtgctgtggttggcaccatgcaaagataacttgcataggactttctgtcttttttcatttccctcagcanttggcatcttgtcatctacacaatggaccctcaataaatggcctatatgtgcaaagaaagaatgtgtagcaaatgaaaataccagaccaagaaatgannnnnnnnnnnnnnnnnnnnaaatacagttagtgcctaaaatagtgtcctttgaaaa

SEQ ID NO: 1643 - DNA, 205 bp, Homo sapiens
  misc_feature (88)..(88): n includes a, c, g, or t, or contains no nucleotide
cagctgcagggtagagatcattttaagtgcttgtggagttgacatccctattgactctttcccagctgatatcagagacttagacccngcactccttggattagctctgcagagtgtcttggttgagagaataacctcatagtaccaacatgacatgtgacttggaaagagactagaggccacacttgataaatcatggggcaca

SEQ ID NO: 1644 - DNA, 593 bp, Homo sapiens
  misc_feature (78)..(122): n includes a, c, g, or t, or contains no nucleotide
  misc_feature (156)..(189): n includes a, c, g, or t, or contains no nucleotide
ccatctatgcaaatttatggggaaaaattgttttttaaattaaatttccaatacccaagccctaaaattgatggatgnnnnnnnnnnnnnnnnnnnnnnnnnnnnnnnnnnnnnnnnnnnnncagacatagatggtgggctggaacacccctcacnnnnnnnnnnnnnnnnnnnnnnnnnnnnnnnnnntgttggccagctccctagtttgtgcttactatacctggccacgcctccctacctaaggccgctggcttaaccctaggggcaggcagtgttagatcagacccagaccttctcatcccaccctcatcacatcggggagaggggactccaggggcgggaaggcaggcgtccctccatttggccagggtgggcggcgaggagggggtcactctgcaggaacactgagctctgaacacctctcgcctgctgcctgcctcacaccctctgcattcgctgtttcctctgttgggggagggggtttgtgaggggaatattagattacaccttgtcatttggaaagccccgtgtctccggcggccacagcgaggttgggggggtggtgagggaagtccatggattggccagaa

SEQ ID NO: 1645 - DNA, 504 bp, Homo sapiens
  misc_feature (27)..(27): n includes a, c, g, or t, or contains no nucleotide
  misc_feature (177)..(177): n includes a, c, g, or t, or contains no nucleotide
  misc_feature (181)..(181): n includes a, c, g, or t, or contains no nucleotide
  misc_feature (275)..(275): n includes a, c, g, or t, or contains no nucleotide
  misc_feature (308)..(308): n includes a, c, g, or t, or contains no nucleotide
  misc_feature (369)..(369): n includes a, c, g, or t, or contains no nucleotide
  misc_feature (452)..(466): n includes a, c, g, or t, or contains no nucleotide
  misc_feature (475)..(475): n includes a, c, g, or t, or contains no nucleotide
gagaccaggacgagctcaacccctacncggcctggcggctcctggacatctcggcctccagcaccgagcagattctctgagtgtggtgccggagccaggtagccccggcctgggtcatcaggcacagaggcaccgcaacaccacctgcggcaactccagacctctgggaacaagacntgcnggctctgcccccagctctgccaggacggctgcaagaccagctggcccgggaggggacaacgggctgttgcgggtgcgcggcagctggagacacntcccccgcagggccaacccctgccctgttgctntgccctgcaggggtcccggcgcctggtcacctggggtgcacacaggtcacacagtgccaanaggccccagggcccagggactccccccacagcagggtgggacccgggacccgcggctcagtggcccgctagccacgtcagccnnnnnnnnnnnnnnncattttttnattttaacagtgctcttccatcttgtgca

SEQ ID NO: 1646 - DNA, 550 bp, Homo sapiens
  misc_feature (37)..(37): n includes a, c, g, or t, or contains no nucleotide
  misc_feature (40)..(40): n includes a, c, g, or t, or contains no nucleotide
  misc_feature (50)..(50): n includes a, c, g, or t, or contains no nucleotide
  misc_feature (54)..(56): n includes a, c, g, or t, or contains no nucleotide
  misc_feature (60)..(62): n includes a, c, g, or t, or contains no nucleotide
  misc_feature (67)..(67): n includes a, c, g, or t, or contains no nucleotide
  misc_feature (69)..(70): n includes a, c, g, or t, or contains no nucleotide
  misc_feature (72)..(74): n includes a, c, g, or t, or contains no nucleotide
  misc_feature (104)..(104): n includes a, c, g, or t, or contains no nucleotide
  misc_feature (189)..(269): n includes a, c, g, or t, or contains no nucleotide
tggtcctactagtctccttctgcctcctccttgtacntgntatgtactcntctnnnacannnggggnanncnnncagctgagcatggagtgttgtcccgccagnttcgtgccctccccagtgaggacccttaccagctggagctgcctgccctgcagtcagaagtgccgaaagacagcacacaccagtnnnnnnnnnnnnnnnnnnnnnnnnnnnnnnnnnnnnnnnnnnnnnnnnnnnnnnnnnnnnnnnnnnnnnnnnnnnnnnnnncagagcctcccctggagtggccattccctgacctcttctcagagcctctctgccgaggtcccatcctccccctgcaggcaaatctcacaaggaagggaggatggcttcctactggtagcccctctgtcattttgcaggacagatactcaggctagatatgaggatatgtggggggtctcagcaggagcctggggggctccccatctgtgtccaaataaaaagcggtgggcaagggctggccgcagctcctgtgccctgtcaggacgactgagggctcaaac

SEQ ID NO: 1647 - DNA, 472 bp, Homo sapiens
  misc_feature (67)..(67): n includes a, c, g, or t, or contains no nucleotide
  misc_feature (188)..(188): n includes a, c, g, or t, or contains no nucleotide
gcttacatctggactttagaatctggcacacaacaaaagtgcctggcatccactactgctgcctttncatttataataatagcccttccatctggcagtgggggtagaatacactcttgacattcttgtctcctgctttagaatgctagtgtgtatctatcatgtatgcaatactttccccctttttngctttgctaaccaaagagcatatattttactgtcagttgtctcaactcttgaatccatgtggcgttttctctgtcctgctgcttcttttggcctcctcgttttccttctctttttcgacaatggtagacatgaatgagatatttaaagttcattggaaatcttcttccctacagcagtaagcaaaaattagcaaagagatagtctaaatggcctctcagcttggtatgtgaaaatgagatcacatactttttaaatccaaatacaaaagcatagtctctgcaag

SEQ ID NO: 1648 - DNA, 594 bp, Homo sapiens
  misc_feature (30)..(33): n includes a, c, g, or t, or contains no nucleotide
  misc_feature (36)..(36): n includes a, c, g, or t, or contains no nucleotide
  misc_feature (39)..(39): n includes a, c, g, or t, or contains no nucleotide
  misc_feature (41)..(42): n includes a, c, g, or t, or contains no nucleotide
  misc_feature (51)..(51): n includes a, c, g, or t, or contains no nucleotide
  misc_feature (61)..(61): n includes a, c, g, or t, or contains no nucleotide
  misc_feature (92)..(92): n includes a, c, g, or t, or contains no nucleotide
  misc_feature (191)..(191): n includes a, c, g, or t, or contains no nucleotide
  misc_feature (194)..(199): n includes a, c, g, or t, or contains no nucleotide
  misc_feature (202)..(202): n includes a, c, g, or t, or contains no nucleotide
  misc_feature (206)..(210): n includes a, c, g, or t, or contains no nucleotide
  misc_feature (212)..(213): n includes a, c, g, or t, or contains no nucleotide
  misc_feature (216)..(222): n includes a, c, g, or t, or contains no nucleotide
  misc_feature (224)..(257): n includes a, c, g, or t, or contains no nucleotide
  misc_feature (386)..(416): n includes a, c, g, or t, or contains no nucleotide
  misc_feature (533)..(557): n includes a, c, g, or t, or contains no nucleotide
gcattgctgtatacacacagacacacacannnntgnttntnnccaagaacnggtcagaccntgcgagtttatttgtaaacactggacagatnggagttaaaaagagcttttgttgagatttggcatgaaggatatggtgctctatttgtaatagaaacttccaaggctcttccagctcccctttctcgccnttnnnnnnctntagnnnnngnnatnnnnnnncnnnnnnnnnnnnnnnnnnnnnnnnnnnnnnnnnncaaaatggtcaccttctaaaagatatattcatagttattaatgaccctattcccaccacaaattttaaagtgctcctaagcccataacttgcctgtttgaactatggtaatgggtggaagaggagttcnnnnnnnnnnnnnnnnnnnnnnnnnnnnnnnagtacctttgcccttaggaagagtgagtattggagtcatcttatctattactccaaacctccctttttatttcttgagcctggcttggaccttggcattccgtttgaattccttctnnnnnnnnnnnnnnnnnnnnnnnnntaacactggcactgaaataaagaccacacggttaaag

SEQ ID NO: 1649 - DNA, 561 bp, Homo sapiens
  misc_feature (277)..(306): n includes a, c, g, or t, or contains no nucleotide
  misc_feature (369)..(383): n includes a, c, g, or t, or contains no nucleotide
  misc_feature (477)..(477): n includes a, c, g, or t, or contains no nucleotide
  misc_feature (482)..(482): n includes a, c, g, or t, or contains no nucleotide
  misc_feature (487)..(494): n includes a, c, g, or t, or contains no nucleotide
  misc_feature (505)..(505): n includes a, c, g, or t, or contains no nucleotide
  misc_feature (507)..(507): n includes a, c, g, or t, or contains no nucleotide
  misc_feature (509)..(509): n includes a, c, g, or t, or contains no nucleotide
  misc_feature (511)..(513): n includes a, c, g, or t, or contains no nucleotide
  misc_feature (521)..(535): n includes a, c, g, or t, or contains no nucleotide
tctgtgtgtctcctagtcactttctttctcactctgtctctgtctctatttctgtctctcctctgctgtgtcctcaatctctctgtctccctgaggctctatttctgtctctcctctgctgtgtcctcaatctctctgtctccctgaggctctatttctgtctctgatgctcttcttctgtgtctctatttctcttcctgtcacttaatcttttccttctctatctctcttatttagtcttccttccacacccttcactcaccatcttttcccacannnnnnnnnnnnnnnnnnnnnnnnnnnnnnttccaactctagggattcatgattctggtggagattccttcttccagggcctgggaggatagnnnnnnnnnnnnnnntgcctgcttaggctatgttagctgtgacaggaacctgccatagatttgcactgttctttcctaaagatcaattattttcagcaataaatacttntcagnttttnnnnnnnntttgtatgcanananannntagttttnnnnnnnnnnnnnnnttcatatttccttgtgggtaagaggc

SEQ ID NO: 1650 - DNA, 324 bp, Homo sapiens
  misc_feature (137)..(139): n includes a, c, g, or t, or contains no nucleotide
  misc_feature (142)..(151): n includes a, c, g, or t, or contains no nucleotide
  misc_feature (153)..(153): n includes a, c, g, or t, or contains no nucleotide
  misc_feature (209)..(209): n includes a, c, g, or t, or contains no nucleotide
  misc_feature (211)..(211): n includes a, c, g, or t, or contains no nucleotide
tttagtagaatcaggcactgctcgcagaaggaacacagattgtagagattaacataaattgttcttgttctaatatatatattttttcatttctgtcgtgcttggaaaactagtaaatattatgtctaagataaaannnaannnnnnnnnnanttacttcttataagaagcagtagtatgtaataaagctattagcatgagcaattaanangctataaagagattatagttacaaaagaaatactgccatatttttaagttaataacttaaaccttctcaaatgggttaaaagttgaatgaattgacaccctgatgttatgatg

SEQ ID NO: 1651 - DNA, 567 bp, Homo sapiens
  misc_feature (53)..(53): n includes a, c, g, or t, or contains no nucleotide
  misc_feature (55)..(55): n includes a, c, g, or t, or contains no nucleotide
  misc_feature (62)..(84): n includes a, c, g, or t, or contains no nucleotide
  misc_feature (120)..(147): n includes a, c, g, or t, or contains no nucleotide
  misc_feature (173)..(173): n includes a, c, g, or t, or contains no nucleotide
  misc_feature (203)..(203): n includes a, c, g, or t, or contains no nucleotide
  misc_feature (205)..(206): n includes a, c, g, or t, or contains no nucleotide
  misc_feature (218)..(218): n includes a, c, g, or t, or contains no nucleotide
  misc_feature (221)..(222): n includes a, c, g, or t, or contains no nucleotide
  misc_feature (236)..(236): n includes a, c, g, or t, or contains no nucleotide
  misc_feature (239)..(239): n includes a, c, g, or t, or contains no nucleotide
  misc_feature (243)..(243): n includes a, c, g, or t, or contains no nucleotide
  misc_feature (247)..(247): n includes a, c, g, or t, or contains no nucleotide
  misc_feature (249)..(250): n includes a, c, g, or t, or contains no nucleotide
  misc_feature (253)..(253): n includes a, c, g, or t, or contains no nucleotide
  misc_feature (255)..(255): n includes a, c, g, or t, or contains no nucleotide
  misc_feature (259)..(259): n includes a, c, g, or t, or contains no nucleotide
  misc_feature (264)..(266): n includes a, c, g, or t, or contains no nucleotide
  misc_feature (302)..(302): n includes a, c, g, or t, or contains no nucleotide
  misc_feature (357)..(357): n includes a, c, g, or t, or contains no nucleotide
  misc_feature (393)..(407): n includes a, c, g, or t, or contains no nucleotide
  misc_feature (439)..(439): n includes a, c, g, or t, or contains no nucleotide
  misc_feature (510)..(510): n includes a, c, g, or t, or contains no nucleotide
ccatggtcctggtgcccatctacgtcatctataagttcctcagcacgcagggntnctctttnnnnnnnnnnnnnnnnnnnnnnnacgccagagaacgagcaccacctggtggctcagagnnnnnnnnnnnnnnnnnnnnnnnnnnnntggctggccatctgagcctgcctggnaggagaaggaggaacccccatgccaatgtncnnggtcacaggcanccnntgcgctcccacctnggnacancatntnnggnantccntcccnnnggaagttgtcctttctgatcctctcttcttttcccnatttacaaatgatttcgtgactgtagtttttgttcaccttctgtgcatctggccntgggggctgttagctcagaggagaggagcaaacagnnnnnnnnnnnnnnntctgtccccgctgttttgggggaagtctctcncactttgggatcctgctgaagctaggttcatgaggtcggaaatccccaccacatttgcctagactttgggncacaggagttcttagtccaccaaatcagagagaggatgggcttttgatcagataccc

SEQ ID NO: 1652 - DNA, 412 bp, Homo sapiens
  misc_feature (91)..(91): n includes a, c, g, or t, or contains no nucleotide
  misc_feature (99)..(99): n includes a, c, g, or t, or contains no nucleotide
  misc_feature (101)..(102): n includes a, c, g, or t, or contains no nucleotide
  misc_feature (105)..(105): n includes a, c, g, or t, or contains no nucleotide
  misc_feature (107)..(108): n includes a, c, g, or t, or contains no nucleotide
  misc_feature (128)..(129): n includes a, c, g, or t, or contains no nucleotide
  misc_feature (170)..(172): n includes a, c, g, or t, or contains no nucleotide
  misc_feature (202)..(202): n includes a, c, g, or t, or contains no nucleotide
  misc_feature (293)..(312): n includes a, c, g, or t, or contains no nucleotide
gaatctgttgtttctgccaaaggtaaattaactaaagatttattcaggaatccccatttgaatttgtatgattcaataaaagaaaacaccnagtaagtnanntanannaaataaattgtgtatgagannttgtgttttcctttgtaatttccactaactaactaactaannncttatattcttcatggaatggagcccagangaaatgagaggaagcccttttcacactagatcttatttgaagaaatgtttgttagtcagtcagtcagtggtttctggctctgccgagggannnnnnnnnnnnnnnnnnnntttctgcagcccagaatctcaaggcactagaggcggtgtcttaattaattggcttcacaaagacaaaatgctctggactgggatttttcctttgctgtgt

SEQ ID NO: 1653 - DNA, 507 bp, Homo sapiens
  misc_feature (37)..(37): n includes a, c, g, or t, or contains no nucleotide
  misc_feature (52)..(66): n includes a, c, g, or t, or contains no nucleotide
  misc_feature (134)..(149): n includes a, c, g, or t, or contains no nucleotide
ggatagaatttgatcccctaactcactgtctgcggtnctcattgctgctaannnnnnnnnnnnnnntctcctctcaggggcagcatgctaacggggcgacgtcctaatccaactgggagaagcctcagtggtgnnnnnnnnnnnnnnnngactgtcaagctggcaagggccaggattgggggaatggagctggggcttagctgggaggtggtctgaagcagacagggaatgggagaggaggatgggaagtagacagtggctggtatggctctgaggctccctggggcctgctcaagctcctcctgctccttgctgttttctgatgatttgggggcttgggagtccctttgtcctcatctgagactgaaatgtggggatccaggatggccttccttcctcttacccttcctccctcagcctgcaacctctatcctggaacctgtcctccctttctccccaactatgcatctgttgtctgctcctctgcaaaggccagccagcttggga

SEQ ID NO: 1654 - DNA, 485 bp, Homo sapiens
  misc_feature (344)..(347): n includes a, c, g, or t, or contains no nucleotide
  misc_feature (349)..(349): n includes a, c, g, or t, or contains no nucleotide
  misc_feature (351)..(353): n includes a, c, g, or t, or contains no nucleotide
  misc_feature (416)..(435): n includes a, c, g, or t, or contains no nucleotide
tggccaaaagctgaagggagttactgagaaaatagttaacaattactgtcaggtgtcatcactgttcaaaaggtaagcacatttagaattttgttcttgacagttaactgactaatcttacttccacaaaatatgtgaatttgctgcttctgagaggcaatgtgaaagagggagtattacttttatgtacaaagttatttatttatagaaattttggtacagtgtacattgaaaaccatgtaaaatattgaagtgtctaacaaatggcattgaagtgtctttaataaaggttcatttataaatgtcaaaaaaaaaaaaaaaaaaaaaaaaaaaaaaaaaaaaannnngncnnnaattatctttcccccaaaaaagaaaaaaaaaataggcgaagcaaaatcacatactgtttgttnnnnnnnnnnnnnnnnnnnntgctagattcctgacattttgttttgaatttttctacacctggagcttgt

SEQ ID NO: 1655 - DNA, 564 bp, Homo sapiens
  misc_feature (68)..(68): n includes a, c, g, or t, or contains no nucleotide
  misc_feature (70)..(71): n includes a, c, g, or t, or contains no nucleotide
  misc_feature (80)..(80): n includes a, c, g, or t, or contains no nucleotide
  misc_feature (86)..(109): n includes a, c, g, or t, or contains no nucleotide
  misc_feature (176)..(191): n includes a, c, g, or t, or contains no nucleotide
  misc_feature (439)..(439): n includes a, c, g, or t, or contains no nucleotide
  misc_feature (442)..(442): n includes a, c, g, or t, or contains no nucleotide
  misc_feature (471)..(476): n includes a, c, g, or t, or contains no nucleotide
  misc_feature (494)..(494): n includes a, c, g, or t, or contains no nucleotide
  misc_feature (507)..(507): n includes a, c, g, or t, or contains no nucleotide
  misc_feature (514)..(514): n includes a, c, g, or t, or contains no nucleotide
  misc_feature (535)..(535): n includes a, c, g, or t, or contains no nucleotide
tgaggtctccttctacaacgtgacagagaggtgtcacaccttcactttctctcatgctaccttttgtngnnctgtccggnccctannnnnnnnnnnnnnnnnnnnnnnngaaaagtgcagctcctctgatcatctgccccatgagtgggatagatgggttttctggccatgttggnnnnnnnnnnnnnnnnatggagacctccccttgaggaggtgaattcaggccaaaagggctgttggctgtaatcctacgccaggcacaaggcatcttgttgccttgccacgtcctgtcacagctgggtatccttaccatgttccacgcccttgcagtgggagacaggatgtccatgttctctaccatccttttccttcccatgcagattgtgaaatgtaatgagatgtatcaagatatcctagaaataaaaaccagatgtccacnaanaaaaaaaaaaaaaaaaaaaaaaaaaaaannnnnnggagggataaagagtatnggataattctttnggatttnggagagccgtttcaaggttantttccagctttttgggttcagctgggttt

SEQ ID NO: 1656 - DNA, 475 bp, Homo sapiens
  misc_feature (30)..(46): n includes a, c, g, or t, or contains no nucleotide
  misc_feature (143)..(161): n includes a, c, g, or t, or contains no nucleotide
  misc_feature (252)..(267): n includes a, c, g, or t, or contains no nucleotide
  misc_feature (291)..(305): n includes a, c, g, or t, or contains no nucleotide
  misc_feature (333)..(413): n includes a, c, g, or t, or contains no nucleotide
tcatgggtcgcatgcatgctcccgggaagnnnnnnnnnnnnnnnnntttaccctatcgacgcagcgtccccacttggttgaagttgacatctgacgacgtgaaggagcagatttacaaactggccaagaagggccttactccnnnnnnnnnnnnnnnnnnnctgagagattcacatggtgttgcacaagtacgttttgtgacaggcaataaaattttaagaattcttaagtctaagggacttgctcctgatnnnnnnnnnnnnnnnnaccatttaattaagaaagcagttnnnnnnnnnnnnnnncttgagaggaacagaaaggataaggatnnnnnnnnnnnnnnnnnnnnnnnnnnnnnnnnnnnnnnnnnnnnnnnnnnnnnnnnnnnnnnnnnnnnnnnnnnnnnnnnnaattggaaatatgaatcatctacagcctctgccctggtcgcataaatttgtctgtgtactca

SEQ ID NO: 1657 - DNA, 435 bp, Homo sapiens
  misc_feature (386)..(410): n includes a, c, g, or t, or contains no nucleotide
gaaactggaatttgcccttctgtttctagtttttgatgagaatgaatcttggtacttagatgacaacatcaaaacatactctgatcaccccgagaaagtaaacaaagatgatgaggaattcatagaaagcaataaaatgcatgctattaatggaagaatgtttggaaacctacaaggcctcacaatgcacgtgggagatgaagtcaactggtatctgatgggaatgggcaatgaaatagacttacacactgtacattttcacggccatagcttccaatacaagcacaggggagtttatagttctgatgtctttgacattttccctggaacataccaaaccctagaaatgtttccaagaacacctggaatttggttactccactgcnnnnnnnnnnnnnnnnnnnnnnnnngaatggaaaccacttacaccgttct

SEQ ID NO: 1658 - DNA, 238 bp, Homo sapiens
  misc_feature (129)..(161): n includes a, c, g, or t, or contains no nucleotide
  misc_feature (166)..(166): n includes a, c, g, or t, or contains no nucleotide
cacctcaggccttgggtagatttggcaaaagaacaggagcagcataggctgtttgagctttggggaaatgaactttgctttttatatttaactaggatacttttatatgatgggtgctttgagtgtgannnnnnnnnnnnnnnnnnnnnnnnnnnnnnnnnttttngcaggtgacctggttacttagctaggattggtgatttgtactgctttatggtcatttgaagggccctttagt

SEQ ID NO: 1659 - DNA, 320 bp, Homo sapiens
aagtggattctctcctggaaaacctggaaaaaattgaaaaggaacagagcaaacaagaggtagaggtgaaaaatgctaagtcagaagaggagcagagcagtagctccatgaagaaagatgagactcatgtgaagatggagtctgaggggggtgcagaagactctgctgaggagggggacccactggatgatgatgttaatgaagatcagggggatgaccagctggagttgatcaaggatgatgaaaaagaggctgaggaaggagaggatgacagagacagcaccaatggccaggatgactcttaagcacatagtggggtt

SEQ ID NO: 1660 - DNA, 343 bp, Homo sapiens
ttgaccaactgcaaagagtgattgacaccatcaaaaccaaccctgacgacagaagaatcatcatgtgcgcttggaatccaagagatcttcctctgatggcgctgcctccatgccatgccctctgccagttctatgtggtgaacagtgagctgtcctgccagctgtaccagagatcgggagacatgggcctcggtgtgcctttcaacatcgccagctacgccctgctcacgtacatgattgcgcacatcacgggcctgaagccaggtgactttatacacactttgggagatgcacatatttacctgaatcacatcgagccactgaaaattcagcttcagcgaga

SEQ ID NO: 1661 - DNA, 118 bp, Homo sapiens
agccgccgggtttgctccaaggtcaggtgtgtgaccgctcgtggagcccctgtaaggttgagaggcggatctgggtgcgcgtctacagcccgtaccaagactactacgaggtggtgcc

SEQ ID NO: 1662 - DNA, 343 bp, Homo sapiens
gagtcacgctcagcaataccgctggtaccagatgctgtaccaggctggcgtctttgcctcccgctcttctctccgctgctgtcgcatccgtttcacctgggccctggccctgctgcagtgcctcaacctggtgttcctgctggcagacgtgtggttcggctttctgccaagcatctacctcgtcttcctgatcattctgtatgaggggctcctgggaggcgcagcctacgtgaacaccttccacaacatcgccctggagaccagtgatgagcaccgggagtttgcaatggcggccacctgcatctctgacacactggggatctccctgtcggggctcctggct

SEQ ID NO: 1663 - DNA, 208 bp, Homo sapiens
atcccgcagctgtgcagtgtttttgtttttctggttatctggtggtatatggatgagggtcttctggccccccaatggctttttgggactggcctggcttcttcactgattgggtatgttttgtttgatctcactgatggaggtgaagggcagaagagtgggtggacccggtgggctgacctgaagagtgccctagtcttcattactt

SEQ ID NO: 1664 - DNA, 154 bp, Homo sapiens
gggaggctattctgcccatttggggacacttccccgccgctgccaggacccgcttctctgaaaggctctccttgcagctgcttagacgctggatttttttcgggtagtggaaaaccagcctcccgcgacgatgcccctcaacgttagcttcacc

SEQ ID NO: 1665 - DNA, 374 bp, Homo sapiens
cttaaatatcagactttgtaacaggtagaaatattacagaataatttaagacactacaatgggggcaaatgaaataggaaaatttttagtgagttacccgtactcattacattttcagtgcttttacaaggaaaaaaggtgatatgtttaattttaacattttaattggctagctcttgcccttatatgactttaatgtctgtgagtcattcccagcttaaattaacaattgttagtattagtctcacacataagtgccatacattttatcctcatggatgtgatgcactgaaaagttagttgctctccttttttcttttttttgtcgtgcatattttatttctgtagtttctggttagctaccctaaagtgat

SEQ ID NO: 1666 - DNA, 574 bp, Homo sapiens
  misc_feature (80)..(193): n includes a, c, g, or t, or contains no nucleotide
  misc_feature (195)..(195): n includes a, c, g, or t, or contains no nucleotide
  misc_feature (198)..(198): n includes a, c, g, or t, or contains no nucleotide
  misc_feature (213)..(235): n includes a, c, g, or t, or contains no nucleotide
  misc_feature (298)..(298): n includes a, c, g, or t, or contains no nucleotide
  misc_feature (330)..(330): n includes a, c, g, or t, or contains no nucleotide
  misc_feature (332)..(332): n includes a, c, g, or t, or contains no nucleotide
  misc_feature (360)..(374): n includes a, c, g, or t, or contains no nucleotide
  misc_feature (408)..(408): n includes a, c, g, or t, or contains no nucleotide
  misc_feature (458)..(458): n includes a, c, g, or t, or contains no nucleotide
  misc_feature (470)..(470): n includes a, c, g, or t, or contains no nucleotide
  misc_feature (483)..(521): n includes a, c, g, or t, or contains no nucleotide
  misc_feature (546)..(549): n includes a, c, g, or t, or contains no nucleotide
cgcagccagcagaaggaccctggaggggagcgcaggcggaggcgaggcaaagctctctgaagcagcggagaggaaacggnnnnnnnnnnnnnnnnnnnnnnnnnnnnnnnnnnnnnnnnnnnnnnnnnnnnnnnnnnnnnnnnnnnnnnnnnnnnnnnnnnnnnnnnnnnnnnnnnnnnnnnnnnnnnnnnnngnagncagaccctcggctgnnnnnnnnnnnnnnnnnnnnnnnaggctctgtctgctccagaagtccctgttaggatccccttctaggccactcccccagcaagangctggcatcagactctgcatccctacagctcnanaaaggccagaggatgcccctctaccgcnnnnnnnnnnnnnnncagttctctctccatgaccctcctccccgctcanacatggagtccgacccctgttgtagtaggggaggggcggcttcagctcanagaggggaggcnactcgcccaaggnnnnnnnnnnnnnnnnnnnnnnnnnnnnnnnnnnnnnnntggactccccattctcctcactcannnntgtgccatttcctgccacatctgct

SEQ ID NO: 1667 - DNA, 517 bp, Homo sapiens
ttttgctagaactgttagacacattgcagtatgctgtattgaaagtaggaatatagttttaaaaaccctttgaacaaagtgtgtgcataaccagtcatgagataaaacaacacaatgcatgttgcctttttaatgtaaatacccttaggtatcattaatagtttcaaaatattgtggtttagtaaagttgatacctggttataaatattatgcctttatttttggctagaagaagaattatttttagcctagatctaaccattttcatactcttaactgattgaaacagattcaaagaagtatcgagtgctatgcattgaaacttgtttttaaatgttagatggcactatgtatattaatgtaaaacaatgttaatttactcaagttttcagtttgtaccgcctggtatgtctgtgtaagaagccaatttttgtgtattgttacagtttcaggttatttatattcgatgttttgtaaaactcaaataacgactatacttatggaccaaataaatggc

SEQ ID NO: 1668 - DNA, 111 bp, Homo sapiens
cctcgctgttggcctagatgtgattgtagccgtggtgcctgggcagatggtaaagaaacatgctgtcctcttatgacaatatgtgcagagaaggccccaaacgctggggtg

SEQ ID NO: 1669 - DNA, 587 bp, Homo sapiens
  misc_feature (74)..(74): n includes a, c, g, or t, or contains no nucleotide
  misc_feature (90)..(94): n includes a, c, g, or t, or contains no nucleotide
  misc_feature (99)..(131): n includes a, c, g, or t, or contains no nucleotide
  misc_feature (146)..(148): n includes a, c, g, or t, or contains no nucleotide
  misc_feature (151)..(151): n includes a, c, g, or t, or contains no nucleotide
  misc_feature (153)..(153): n includes a, c, g, or t, or contains no nucleotide
  misc_feature (156)..(156): n includes a, c, g, or t, or contains no nucleotide
  misc_feature (158)..(158): n includes a, c, g, or t, or contains no nucleotide
  misc_feature (453)..(467): n includes a, c, g, or t, or contains no nucleotide
  misc_feature (474)..(489): n includes a, c, g, or t, or contains no nucleotide
gccttctactggtgcctgcggaagcggcggaagccgggcagccacacacactcagcctctgaggacaacaccancaacaacgtgcgggannnnntgaannnnnnnnnnnnnnnnnnnnnnnnnnnnnnnnncaacacggtccccannnagnantangngaacaagttgagctatgacttaacatagccaaaatgtgagtggttgaatatgattaaaaatatcaaattaattgtgtgaacttggaagcacaccaatcttactttgtaaattctgatttcttttcaccattcgtacataatactgaaccacttgtagatttgatttttttttttaatctactgcatttagggagtattctaataagctagttgaatacttgaaccataaaatgtccagtaagatcactgtttagatttgccatagagtacactgcctgccttaagtgaggaaatnnnnnnnnnnnnnnnaagttcnnnnnnnnnnnnnnnnataaaacagagtaatcttgttggttcaccattgagaccgtgaagatactttgtattgtcctattagtgttatatgaacatacaaatgcatctttgatg

SEQ ID NO: 1670 - DNA, 100 bp, Homo sapiens
ccaggacattgttctcccagatggccgagtcatccccaaaggcattacctgcctcatcgatattataggggtccatcacaacccaactgtgtggccggat

SEQ ID NO: 1671 - DNA, 563 bp, Homo sapiens
  misc_feature (26)..(26): n includes a, c, g, or t, or contains no nucleotide
  misc_feature (210)..(230): n includes a, c, g, or t, or contains no nucleotide
  misc_feature (270)..(270): n includes a, c, g, or t, or contains no nucleotide
  misc_feature (300)..(300): n includes a, c, g, or t, or contains no nucleotide
  misc_feature (347)..(347): n includes a, c, g, or t, or contains no nucleotide
  misc_feature (418)..(440): n includes a, c, g, or t, or contains no nucleotide
  misc_feature (461)..(461): n includes a, c, g, or t, or contains no nucleotide
  misc_feature (501)..(501): n includes a, c, g, or t, or contains no nucleotide
  misc_feature (513)..(513): n includes a, c, g, or t, or contains no nucleotide
  misc_feature (518)..(518): n includes a, c, g, or t, or contains no nucleotide
  misc_feature (527)..(527): n includes a, c, g, or t, or contains no nucleotide
tcatcaggattctgcacacagtcagntgagataatccagtcctgctccttggctcctagcactaatccattcacattattgagggcagctgaaagtgccctctgggctcagttttcaaaccacagcctcctgcacagccatgatgctcttctatacttcagtcctgcccccagggtgggaggcagatagtgacctgacttaaggaccaannnnnnnnnnnnnnnnnnnnnggtaaccagtaactcagagtaggaaatgaccgccctactnaacttatatccacagcataatacatccagncatgaatcttgaagtttgagaaatcatgcatagttgcagaggtcccngctacctccccaggggatcataaccgaatcctcaacctgtctggacaaccaagttgtccatttgccaagcnnnnnnnnnnnnnnnnnnnnnnnaggaagagggctctgctcagncaaatgctaggccttgtcctcaagtcagatgatcattgtngtcttggatttnggggnaaacgtggntttggccttttcttcttgctggagtagattcagttg

SEQ ID NO: 1672 - DNA, 550 bp, Homo sapiens
  misc_feature (27)..(123): n includes a, c, g, or t, or contains no nucleotide
  misc_feature (162)..(163): n includes a, c, g, or t, or contains no nucleotide
  misc_feature (217)..(217): n includes a, c, g, or t, or contains no nucleotide
  misc_feature (251)..(252): n includes a, c, g, or t, or contains no nucleotide
  misc_feature (292)..(292): n includes a, c, g, or t, or contains no nucleotide
  misc_feature (304)..(319): n includes a, c, g, or t, or contains no nucleotide
  misc_feature (326)..(326): n includes a, c, g, or t, or contains no nucleotide
  misc_feature (338)..(364): n includes a, c, g, or t, or contains no nucleotide
  misc_feature (406)..(438): n includes a, c, g, or t, or contains no nucleotide
  misc_feature (443)..(443): n includes a, c, g, or t, or contains no nucleotide
  misc_feature (450)..(450): n includes a, c, g, or t, or contains no nucleotide
tatgtcatctgctggctgccgtaccannnnnnnnnnnnnnnnnnnnnnnnnnnnnnnnnnnnnnnnnnnnnnnnnnnnnnnnnnnnnnnnnnnnnnnnnnnnnnnnnnnnnnnnnnnnnnnnnttctacgtcagctcagctgtgactcctcttctctacaannccgtgtcctcctccttcagaaaactcttcctggaagccgtcagctccctgtgtngagagcaccaccccatgaagcggttacccccgannccccagagtcccaccctaatggatacagcttcaggctttngggatcccccannnnnnnnnnnnnnnntgtaatncaagaatgaacnnnnnnnnnnnnnnnnnnnnnnnnnnngtcacctggcaaagcaggtgagcaacctcatcactaatcatnnnnnnnnnnnnnnnnnnnnnnnnnnnnnnnnnccctnctctgcngagaaccatcaagcgcagggaagccacgtgacccctcctagcctcaggctccctcgtctgtgtagtggagataaagaacagcacccatctcttagtgttg

SEQ ID NO: 1673 - DNA, 404 bp, Homo sapiens
  misc_feature (91)..(95): n includes a, c, g, or t, or contains no nucleotide
  misc_feature (98)..(99): n includes a, c, g, or t, or contains no nucleotide
  misc_feature (101)..(104): n includes a, c, g, or t, or contains no nucleotide
  misc_feature (106)..(123): n includes a, c, g, or t, or contains no nucleotide
ctgcatacacatgtagtgatacctaggctgcatttagatcaccgtgtgctcaggccaggtgtgaatcctgaggtccatggaggtgcagagnnnnnganntnnnncnnnnnnnnnnnnnnnnnntttgctttgttaacaaaaaattgcagctattgtctagctttcatttttttactgagaactttaaattagtcccctattagaatagggttgctactcatctttttttaaaaaccgaatttcatcatttatctaaagagaaaatatgcagaataactggtcttgttaagagtgcaatattatatttttatgtaaaaataaaaattaatttggggggattatttattcagcatgaaacctaatatgtatatgtttgaaatacttcataatgtgcatgttgtagc

SEQ ID NO: 1674 - DNA, 194 bp, Homo sapiens
agatcgtcaggaaaagcctaaagattagactgtaagaaaagaaaatagaagccatgtttcgaagacctgtattacaggtacttcgtcagtttgtaagacatgagtccgaaacaactaccagtttggttcttgaaagatccctgaatcgtgtgcacttacttgggcgagtgggtcaggaccctgtcttgagacag

SEQ ID NO: 1675 - DNA, 475 bp, Homo sapiens
tgtccaaaatgagtcattttcagttgtaccttagatgtctggtgttgaggatcaagtgccatagcctttattcagggggcctataaacccttccagttcttgccccagggctggcctgctagcgcttcaaattcccaggtgtccctaatttgagaagtaaccttttggaatagcattagaccctggctgtcccctccccaccaaataaacatgatatttcattctctgtccagcagtcatgaaccccttcacctccaatgacctgatcatttagtttggtgggggtgggggtgggggtgggggtgggggtggaagcagccgcaggagcaagggcccctcccacatacacaggaggagtatttcatttctccttaatgaaggctctggccctaacccctcagcactgtctccagataggaacatgcacaaagcagttaattaggcagcctggagaaaaccagagatccagtacaga

SEQ ID NO: 1676 - DNA, 570 bp, Homo sapiens
gcgctgctcagatagcgatggtctggcccctcctcagcatcttatccgagtggaaggaaatttgcgtgtggagtatttggatgacagaaacacttttcgacatagtgtggtggtgccctatgagccgcctgaggttggctctgactgtaccaccatccactacaactacatgtgtaacagttcctgcatgggcggcatgaaccggaggcccatcctcaccatcatcacactggaagactccagtggtaatctactgggacggaacagctttgaggtgcgtgtttgtgcctgtcctgggagagaccggcgcacagaggaagagaatctccgcaagaaaggggagcctcaccacgagctgcccccagggagcactaagcgagcactgcccaacaacaccagctcctctccccagccaaagaagaaaccactggatggagaatatttcacccttcagatccgtgggcgtgagcgcttcgagatgttccgagagctgaatgaggccttggaactcaaggatgcccaggctgggaaggagccaggggggagcagggctcactccagccacctgaa

SEQ ID NO: 1677 - DNA, 461 bp, Homo sapiens
  misc_feature (211)..(226): n includes a, c, g, or t, or contains no nucleotide
  misc_feature (295)..(349): n includes a, c, g, or t, or contains no nucleotide
  misc_feature (422)..(436): n includes a, c, g, or t, or contains no nucleotide
tcactggcttactacaacatggccaatggcgcagtcatccacctggccctcaaggagagaggcgggaggaagaagtagacaagaggaacctgctgtcaagtccctgccattttgcctctcctgtctcccaccccctgccccagacccaggagcccccctgaggctttgccttgcctgcatatttgtttcgctcttactcagtttgggaatnnnnnnnnnnnnnnnnaggttcattcccctgaccctttccccacattggtaagagtagctgggttttctaagccactctctggannnnnnnnnnnnnnnnnnnnnnnnnnnnnnnnnnnnnnnnnnnnnnnnnnnnnnnagcaactgagagcccagggatgtcctacaggatagtttcatagtgacaggtggcacttggctaatagaatatnnnnnnnnnnnnnnntaatcattttgtaccttgacatggg

SEQ ID NO: 1678 - DNA, 311 bp, Homo sapiens
  misc_feature (39)..(39): n includes a, c, g, or t, or contains no nucleotide
  misc_feature (61)..(61): n includes a, c, g, or t, or contains no nucleotide
  misc_feature (91)..(91): n includes a, c, g, or t, or contains no nucleotide
  misc_feature (111)..(111): n includes a, c, g, or t, or contains no nucleotide
  misc_feature (120)..(122): n includes a, c, g, or t, or contains no nucleotide
  misc_feature (136)..(136): n includes a, c, g, or t, or contains no nucleotide
  misc_feature (145)..(145): n includes a, c, g, or t, or contains no nucleotide
atgatggaaatgctcttgagctcacaacatttgtttttncttttaaagtaaatgcaagtanccaaagctcactactgcggtttgcctgtgncctggacaatgaggcggagnccactgttnnnggggcacccccttnccctccccngggtttgcaaatagaggctaccgggtgctgtattcagcaacacctgttttactatttgttattaaactatcatctccaccttccttttgattagcaatttgtactaagaaacgaaacaatgttatttggtggtgtataattctacttttctagtagattactgtgt

SEQ ID NO: 1679 - DNA, 186 bp, Homo sapiens
caggtaccatcaggaagcagcgggataagctgataaaggaaggaaagtacacccctccacctcaccacattggcaagggggagcctcggccctgaacagagcagctgctgatgtctggaggctgattttcctgttctctgttctccactggaaaggttgtttacgacaaacctccttgtcaaagtg

SEQ ID NO: 1680 - DNA, 491 bp, Homo sapiens
  misc_feature (56)..(83): n includes a, c, g, or t, or contains no nucleotide
  misc_feature (231)..(270): n includes a, c, g, or t, or contains no nucleotide
  misc_feature (294)..(294): n includes a, c, g, or t, or contains no nucleotide
  misc_feature (325)..(354): n includes a, c, g, or t, or contains no nucleotide
cgaagtgcagtttggctcctggttcgaccacattaagggctggcttcggatgaagnnnnnnnnnnnnnnnnnnnnnnnnnnnnacgaggagctgcagcaggacttacagggctccgtggagcgcatctgtgggttcctgggccgtccgctgggcaaggaggcactgggctccgtcgtggcacactcaaccttcagcgccatgaaggccaacaccatgtccaactacacgcnnnnnnnnnnnnnnnnnnnnnnnnnnnnnnnnnnnnnnnngccttcctccggaaaggggtctgnggcgactggaagaaccacttcacggtggccnnnnnnnnnnnnnnnnnnnnnnnnnnnnnnaagcagatgcgggggatgccgaccttcccctgggatgaagacccggaggaggacggcagcccagatcctgagcccagccctgagcctgagcccaagcccagccttgagcccaacaccagcctggagcgtgagcccag

SEQ ID NO: 1681 - DNA, 527 bp, Homo sapiens
  misc_feature (48)..(49): n includes a, c, g, or t, or contains no nucleotide
  misc_feature (158)..(177): n includes a, c, g, or t, or contains no nucleotide
  misc_feature (362)..(381): n includes a, c, g, or t, or contains no nucleotide
gtgagtgtcctccaagagccccctgagctcagccctctgcctggaggnntccagacctttctgagccctgcttggaggcgagcattttcactgctaggacaagctcagctgttgaggacacccccaccccaaatttcagttcttacgtgattttaacnnnnnnnnnnnnnnnnnnnntttaattctctaattattattattattgttattattttttaggaccagttgtagtgaattgctactgaaagctatcccaggtgatacagagctctttgtaaaccgcagtcacacattagggttagtattaaactttgtttagatgtaccataattaacttggctagttgattgtttgaagtctannnnnnnnnnnnnnnnnnnnaaaattttaaaaaatgccagtctggtcagggaagtagggggtttcaatgctgttgggaaccaggaaggtgggacagccggcaggtagggacattgtgtacctcagttgtgtcacatgtgagcaagcccaggttgaccttgtgatgt

SEQ ID NO: 1682 - DNA, 512 bp, Homo sapiens
  misc_feature (26)..(87): n includes a, c, g, or t, or contains no nucleotide
  misc_feature (167)..(182): n includes a, c, g, or t, or contains no nucleotide
  misc_feature (264)..(264): n includes a, c, g, or t, or contains no nucleotide
  misc_feature (299)..(317): n includes a, c, g, or t, or contains no nucleotide
  misc_feature (473)..(487): n includes a, c, g, or t, or contains no nucleotide
aagagactggcttctgcggcttcggnnnnnnnnnnnnnnnnnnnnnnnnnnnnnnnnnnnnnnnnnnnnnnnnnnnnnnnnnnnnnnagcttgatgagggtcgctatggtgtctatgaggatgaaaactatgaagtgggaagcgatgatgaggaaataccattcaannnnnnnnnnnnnnnncagagcttccaaaacccagttgtcaccaagtgcaggcattatttctgcgagagctgtgcactgcagcatttccgcaccaccncgcgctgctatgtctgtgaccagcagaccaatggnnnnnnnnnnnnnnnnnnngaattgattgctaaactagagaagcatcgagctacaggagagggtggtgcttccgacttgccagaagaccccgatgaggatgcaattcccattacttaggtttcccataattcttaaatttaaaaaataaacgttttgttcttttggaaaaaaaannnnnnnnnnnnnnntccttcctttgtagagaaagtgaca

SEQ ID NO: 1683 - DNA, 609 bp, Homo sapiens
  misc_feature (47)..(61): n includes a, c, g, or t, or contains no nucleotide
  misc_feature (391)..(414): n includes a, c, g, or t, or contains no nucleotide
  misc_feature (447)..(450): n includes a, c, g, or t, or contains no nucleotide
  misc_feature (456)..(457): n includes a, c, g, or t, or contains no nucleotide
  misc_feature (461)..(464): n includes a, c, g, or t, or contains no nucleotide
  misc_feature (466)..(469): n includes a, c, g, or t, or contains no nucleotide
  misc_feature (471)..(474): n includes a, c, g, or t, or contains no nucleotide
  misc_feature (582)..(582): n includes a, c, g, or t, or contains no nucleotide
  misc_feature (584)..(584): n includes a, c, g, or t, or contains no nucleotide
gtacctctcaatgttatgatgtattatcttctgatgtgcagaaaaannnnnnnnnnnnnnntgtgaggctcggagtagtggagaagaagaagataaataataactgtatatttaatgtgaatgaacctgccacaaccaaattagaagaaatgcttggttgtaagacaccaataggaaaaccagccactgcaaaactttaataatcaacaaatagttatggaaaattcggtcacgtaattactctcatcgaaggactcattacaacaaacagggaagtaaaggaagagacacatcctctcatactccctgagactctgagaacagtggacgcagagggaagagatgatcattggaagcaatcagtttactcttccccaccacagtggttaannnnnnnnnnnnnnnnnnnnnnnntgtgtgttttaaaataaacttttggaaacatgnnnngaaaannaaannnnannnnannnnactaacacttttcagcttactatatgtattaaacttttatgttgacttttgaattaaagtatgacaacactgaaagctctggatattaaaagaaaatgaaaagggcananctacgttacttgtagcttgctttaa

SEQ ID NO: 1684 - DNA, 554 bp, Homo sapiens
  misc_feature (58)..(75): n includes a, c, g, or t, or contains no nucleotide
  misc_feature (78)..(79): n includes a, c, g, or t, or contains no nucleotide
  misc_feature (81)..(85): n includes a, c, g, or t, or contains no nucleotide
  misc_feature (89)..(91): n includes a, c, g, or t, or contains no nucleotide
  misc_feature (93)..(94): n includes a, c, g, or t, or contains no nucleotide
  misc_feature (97)..(120): n includes a, c, g, or t, or contains no nucleotide
  misc_feature (122)..(125): n includes a, c, g, or t, or contains no nucleotide
  misc_feature (151)..(214): n includes a, c, g, or t, or contains no nucleotide
atgtatacagttgcaagtctggacaaatgtatagaataaaccttttatttaagttgtnnnnnnnnnnnnnnnnnnaanngnnnnngggnnncnntgnnnnnnnnnnnnnnnnnnnnnnnntnnnnacaaatcagatcagatgttcatcctnnnnnnnnnnnnnnnnnnnnnnnnnnnnnnnnnnnnnnnnnnnnnnnnnnnnnnnnnnnnnnnnttgattcgaagggtcttaaagaatttttttaatcgtcaaccacttttaaacataaagaattcacacaactactttcatgaattttttaatcccattgcaaacattattccaagagtatcccagtattagcaatactggaatataggcacattaccattcatagtaagaattctggtgtttacacaaccaaatttgatgcgatctgctcagtaatataatttgccatttttattagaaatttaatttcttcatgtgatgtcatgaaactgtacatactgcagtgtgaatttttttgttttgttttttaatcttttagtgtttacttcctgcagtgaatttg

SEQ ID NO: 1685 - DNA, 535 bp, Homo sapiens
  misc_feature (98)..(145): n includes a, c, g, or t, or contains no nucleotide
  misc_feature (223)..(223): n includes a, c, g, or t, or contains no nucleotide
  misc_feature (230)..(256): n includes a, c, g, or t, or contains no nucleotide
  misc_feature (388)..(403): n includes a, c, g, or t, or contains no nucleotide
ccgcccaggaaaaggagcggagccaggaactcaggcgtctgcaggaggaggcccggaaggaggaggggcagcgactggcccggcgcttgcaggagctnnnnnnnnnnnnnnnnnnnnnnnnnnnnnnnnnnnnnnnnnnnnnnnncctctcccgttacaagcagcagcgactgttgacagttcttccttccctactggataagaagaaatctgtggtgtccanccccagnnnnnnnnnnnnnnnnnnnnnnnnnnntgtagcagcagcagtgcccaccagggagtccataaaagggtccctctctgtcctgctcgatgacctgcaggacctgagtgaagccatttccaaagaggaagctgtttgtcaaggagacaaccttgacagatnnnnnnnnnnnnnnnnccagatgagcagctaagcagctgacagttggagggaaagccagcctgggggctgggaggatcctggagaagtgggtggggacagaccagcccttccccatcctggggttgccctgggggataccagctgagt

SEQ ID NO: 1686 - DNA, 434 bp, Homo sapiens
  misc_feature (33)..(33): n includes a, c, g, or t, or contains no nucleotide
  misc_feature (82)..(96): n includes a, c, g, or t, or contains no nucleotide
  misc_feature (378)..(398): n includes a, c, g, or t, or contains no nucleotide
tttgggcacagaagacagcaagcttatattccnactagtgttaccagtaatccattcactctttctcatggaagtcccaatnnnnnnnnnnnnnnngcccacctggctggaaatacacacctcggaggacagcctactctacttccatacccatcatcagccaccctcagtagtgctgcaccagtggcccacctgttagcctctccgtgtacctcaagacctatgttacagcatccaacttataatatctcccatcccagtggcatagttcaccaagtcccagtgggcttaaatccccgtctgttaccatccccaaccattcatcagactcagtacaaaccaatcttcccaccacattcttacattgcagcatcaccnnnnnnnnnnnnnnnnnnnnngagtccaacaaaactcagccagtatccatatatgtg

SEQ ID NO: 1687 - DNA, 169 bp, Homo sapiens
ggtgcctgttggtggtgttcttgtcttaaccctagatagaatctaatgaactcagaggcttagctcgcctctttagggtccatggtggcagcagagaggcagaagtgggagtcagagccaggaacagtgaaggatggttcctggcccctctgagtgacagctggtggca

SEQ ID NO: 1688 - DNA, 184 bp, Homo sapiens
  misc_feature (33)..(34): n includes a, c, g, or t, or contains no nucleotide
  misc_feature (42)..(46): n includes a, c, g, or t, or contains no nucleotide
  misc_feature (48)..(70): n includes a, c, g, or t, or contains no nucleotide
  misc_feature (72)..(77): n includes a, c, g, or t, or contains no nucleotide
ctggggccccattaaagatggagagaggaaaannaaaaaaannnnnannnnnnnnnnnnnnnnnnnnnnnannnnnnacgttcccccactcccactccctctctctccctctctgcctcctcctgcctgtctgcactattcctttgcccggcatcaaggcacaggggaccagtggggaacacta

SEQ ID NO: 1689 - DNA, 328 bp, Homo sapiens
agtatatgaattaccctttcattcagcctttagaaattatattttagcctttatttttaacctgccaacatactttaagtagggattaatatttaagtgaactattgtgggtttttttgaatgttggttttaatacttgatttaatcaccactcaaaaatgttttgatggtcttaaggaacatctctgctttcactctttagaaataatggtcattcgggctgggcgcagcggctcacgcctgtaatcccagcactttgggaggccgaggtgagcggatcacaaggtcaggagttcgagaccagcctggccaagagaccagcctggcc

SEQ ID NO: 1690 - DNA, 578 bp, Homo sapiens
  misc_feature (46)..(46): n includes a, c, g, or t, or contains no nucleotide
  misc_feature (51)..(51): n includes a, c, g, or t, or contains no nucleotide
  misc_feature (60)..(60): n includes a, c, g, or t, or contains no nucleotide
  misc_feature (62)..(62): n includes a, c, g, or t, or contains no nucleotide
  misc_feature (64)..(64): n includes a, c, g, or t, or contains no nucleotide
  misc_feature (66)..(66): n includes a, c, g, or t, or contains no nucleotide
  misc_feature (76)..(76): n includes a, c, g, or t, or contains no nucleotide
  misc_feature (80)..(80): n includes a, c, g, or t, or contains no nucleotide
  misc_feature (84)..(84): n includes a, c, g, or t, or contains no nucleotide
  misc_feature (88)..(88): n includes a, c, g, or t, or contains no nucleotide
  misc_feature (92)..(92): n includes a, c, g, or t, or contains no nucleotide
  misc_feature (97)..(97): n includes a, c, g, or t, or contains no nucleotide
  misc_feature (108)..(108): n includes a, c, g, or t, or contains no nucleotide
  misc_feature (112)..(113): n includes a, c, g, or t, or contains no nucleotide
  misc_feature (144)..(144): n includes a, c, g, or t, or contains no nucleotide
  misc_feature (150)..(152): n includes a, c, g, or t, or contains no nucleotide
  misc_feature (165)..(165): n includes a, c, g, or t, or contains no nucleotide
  misc_feature (188)..(188): n includes a, c, g, or t, or contains no nucleotide
  misc_feature (267)..(267): n includes a, c, g, or t, or contains no nucleotide
  misc_feature (291)..(291): n includes a, c, g, or t, or contains no nucleotide
  misc_feature (385)..(385): n includes a, c, g, or t, or contains no nucleotide
  misc_feature (402)..(402): n includes a, c, g, or t, or contains no nucleotide
agacagcacaggcagccccacggacgacgcgagggccccacgtccntgcgnaagccacangntnancactctgggntggnaggntctngcanggaanttgggggggtncccnnggggatcccccgccccatcctcctgcccccnaccccnnnctgggctgttcanctctctcgtcttggtttggttcnatggtgaaggtttttgtttcttttttcggctaaaaagaatgcagagatgtgcccccacccccaccctcgaccacccccngatgggatggcttggggggctccnagggggtgccctcccagacccccttgcccaggcctccccagcacctaggtggggcctggggtaggaggaacaggtttaaaaatccccaaaaaancgaaccgtgaggagggntgtgggcacccccggcccagtgccccctggtggaatgcgggggagcaggcagtggggctggaagcagaaacaaaatgaaaaaaaaaggggggtgggaggggaagaaaaactctatttttgtaaaaagggaaaaagacctcgtggagaatttttactggggattcttgaacttgaaa

SEQ ID NO: 1691 - DNA, 430 bp, Homo sapiens
  misc_feature (32)..(32): n includes a, c, g, or t, or contains no nucleotide
  misc_feature (38)..(53): n includes a, c, g, or t, or contains no nucleotide
cttgaactttgaacctgtgaaatgctttaccntgtttnnnnnnnnnnnnnnnntgcagtttgttcttgtttttagtttagttttgttttggtgttttgatacctgtactgtgttcttcacagaccctttgtagcgtggtcaggtctgctgtaacatttcccaccaactctcttgctgtccacatcaacagctaaatcatttattcatatggatctctaccatccccatgccttgcccaggtccagttccatttctctcattcacaagatgctttgaaggttctgattttcaactgatcaaactaatgcaaaaaaaaaaaagtatgtattcttcactactgagtttcttctttggaaaccatcactattgagagatgggaaaaacctgaatgtataaagcatttatttgtcaataaactgccttttgtaag

SEQ ID NO: 1692 - DNA, 337 bp, Homo sapiens
  misc_feature (60)..(134): n includes a, c, g, or t, or contains no nucleotide
gaccgtgcagtctgcgctttcctctcccgcctgcctagcccaggatgaagggctgggtgnnnnnnnnnnnnnnnnnnnnnnnnnnnnnnnnnnnnnnnnnnnnnnnnnnnnnnnnnnnnnnnnnnnnnnnnnnntggtcccctcttttggggtagatgcggccccgatcaggcctgactcgctgctctttttgttcccttctgtctgctcgaaccacttgcctcgggctaatccctccctcttcctccacccggcactggggaagtcaagaatggggcctggggctctcagggagaactgcttcccctggcagagctgggtggcagctcttcctccc

SEQ ID NO: 1693 - DNA, 529 bp, Homo sapiens
  misc_feature (29)..(51): n includes a, c, g, or t, or contains no nucleotide
  misc_feature (57)..(71): n includes a, c, g, or t, or contains no nucleotide
  misc_feature (115)..(115): n includes a, c, g, or t, or contains no nucleotide
  misc_feature (290)..(290): n includes a, c, g, or t, or contains no nucleotide
  misc_feature (328)..(358): n includes a, c, g, or t, or contains no nucleotide
gaacggcccagatcgccctcatgagtgcnnnnnnnnnnnnnnnnnnnnnnntcacgnnnnnnnnnnnnnnnagcccatcggggagtcacagtcagtccccccggcccccctcccnagtccctgttggctttcggtagctctcgcatgcagttctattaacagccgtctagaagcgatgctttagtggcctaacccagggtcaaatacagctctttctagcaaaatcaggcagctctgccccatcggtaggggcaccgattagtctactaacagccagaggtccatctagnagggtgccgggaggagctgagcccccggaggtgggctnnnnnnnnnnnnnnnnnnnnnnnnnnnnnnnttgggagcttctgcctccgtgggcctctcagcccgccccgtgtggccgcccgggtgtggctcagccatgtcccctccccaggtccttcattcacccctcccctccccacagtggaattgttgaagtgtggcgagtctgtgctcgggacaataaagcttgtgacaggtccag

SEQ ID NO: 1694 - DNA, 416 bp, Homo sapiens
  misc_feature (109)..(109): n includes a, c, g, or t, or contains no nucleotide
  misc_feature (116)..(116): n includes a, c, g, or t, or contains no nucleotide
tcattgtccaggaataagattggcgtggtgcccatgacatcaccgtcactctgcctaaaagcactctagagctacttgttcacgtggagaggaaggatattttgcgaancaacagnccgcaggtggagagccctgttcacctgatagggtctagctgtgacagtaaatataataccgctgtttccttgggtacagatttgagtgttcatgtgatgagactgtaaacctcatttttcggttcctctgtttaaaaaaacatctgaaggatgaactaaggctgctggtgccctgagcaactgataatgcaaatgtggacaaagtgtctgttttctactctagcctgttcatatggaccaaatttcaacaaggaactcaaggaaaatttgtacctgccgtatttatgctttcatgtaaaa

SEQ ID NO: 1695 - DNA, 217 bp, Homo sapiens
  misc_feature (38)..(38): n includes a, c, g, or t, or contains no nucleotide
ggaaaagaccaaatctacgtctgattggtgtacctganaatgacagggagaatggaaccaagttggaaaacactctgcaggatattatccaggagaacttccctaacctagcaaagcaggccaacattcaaattcaggaaatacagagaatgccacaaagatactcctcaagaagagcaactccatatctatgtttttgaatggtgtcctgagttcc

SEQ ID NO: 1696 - DNA, 417 bp, Homo sapiens
  misc_feature (127)..(127): n includes a, c, g, or t, or contains no nucleotide
  misc_feature (154)..(154): n includes a, c, g, or t, or contains no nucleotide
aagccagacactaggagaattattaacttctcatacttccccacattgagaagcattcggagtgtatttagcctgtagatgttgtgatatgcaaatatcccattccctggttactggcattcctaangattcttcatggtattttcaaactttnggataaatttacagattagaaagatatctgacagttaatctctgttctccttacaaattccttttgtgctgctggaaaggatctttggctaggtggatgactagttttattcaaagccttttctcaaagccctttcagttacaaccaccccactatggaatcagtatttagttatacatttgtataagaacctgtattttgaaaaacacattcatgtatatttattcctggaattatttgcctgttaaacagtgtctttcatg

SEQ ID NO: 1697 - DNA, 484 bp, Homo sapiens
  misc_feature (227)..(242): n includes a, c, g, or t, or contains no nucleotide
  misc_feature (257)..(273): n includes a, c, g, or t, or contains no nucleotide
agcacaattgcagtggcgtcgcattcagaagaagggaaggtcagcagaggctatgcatgttgtgtgatgatgagtgtttacagccaccttctcctaaaacgaaatttataccggggtggatagtattccattaggtagacttatcgactttgctaagtgctttttagacagcttaaaaaattttcaagattttaaaagatgtataaggttaagtttgcaaatataannnnnnnnnnnnnnnncttttgaagtgatgnnnnnnnnnnnnnnnnnttttaaagaaaatatgttgtaataatgctgttgtaagtaatattttaatgtctctttgcctgttttctatttcagcacattcattgtggtgaatgttcatagcattataactgcttagccattgaatgataacatttgttagtggaaattggaaaatttatttgtgaaattctgcagaattcatttttctatttccaatatttgctgaggt

SEQ ID NO: 1698 - DNA, 120 bp, Homo sapiens
gaaccacttggccagaagtgtcccccagatgcttttttttttttttttttggagacagttttgctcttgtctccccggctggagtgcagtggcatgatctcaactctcaactcactgtaa

SEQ ID NO: 1699 - DNA, 513 bp, Homo sapiens
  misc_feature (28)..(28): n includes a, c, g, or t, or contains no nucleotide
  misc_feature (48)..(70): n includes a, c, g, or t, or contains no nucleotide
  misc_feature (295)..(332): n includes a, c, g, or t, or contains no nucleotide
tcagcccgggacatgcccttcagatggnttattctcagtaaagctttnnnnnnnnnnnnnnnnnnnnnnngtgtgactcgtacaactttgacgtgtttctgaagtggtttaatcgtatttgttattagcttctttgtggaaatgcaatttttatactaaaaacattgcttatttgcaatgcaatatgttataaatttgttgtttatattactggtattagtcttagcctaatgaacctaattatttttctttctgtattctttgcttcctcaaatagcatctgcagcaattggannnnnnnnnnnnnnnnnnnnnnnnnnnnnnnnnnnnnnctgaatcacaaatcacttgatcacagtattgtatataatccctgatcctatttgtttcattttattgtaaattcccatttgcatcaaaacctaatgatagtgattggtaagtaaaaacaaatggtgtattgcttttcatacaagtgttttcacaaaagccatttgcctaggcagcaaaaaa

SEQ ID NO: 1700 - DNA, 618 bp, Homo sapiens
actcaacaaccaagcgcctggaggacgggacagatggacagacagccaccctgagaacccctctgggaaaatctattcctgccaccactgggcaaacagaagaatttttctgtctttggagagtattttagaaactccaatgaaagacactgtttctcctgttggctcacagggctgaaaggggcttttgtcctcctgggtcagggagaacgcggggaccccagaaaggtcagccttcctgaggatgggcaacccccaggtctgcagctccaggtacatatcacgcgcacagcctggcagcctggccctcctggtgcccactcccgccagcccctgcctcgaggactgatactgcagtgactgccgtcagctccgactgccgctgagaagggttgatcctgcatctgggtttgtttacagcaattcctggactcgggggtattttggtcacagggtggttttggtttagggggtttgtttgttgggttgttttttgttttttggttttttttaatgacaatgaagtgacactttgacatttcctaccttttgaggacttgatccttctccaggaagaaggtgctttctgcttactgacttaggcaatacaccaagggc

SEQ ID NO: 1701 - DNA, 250 bp, Homo sapiens
gtaatgtttcagtccatcatccagctttggctgctgaaatcatacagctgtgaagacttgcctttgtttctgttagactgcttttcagttctgtattgagtatcttaagtactgtagaaaagatgtcacttcttcctttaaggctgttttgtaatatatataaggactggaattgtgtttttaaagaaaagcattcaagtatgacaatatactatctgtgttttcaccattcaaagtgctgtttagtagt

SEQ ID NO: 1702 - DNA, 464 bp, Homo sapiens
  misc_feature (171)..(205): n includes a, c, g, or t, or contains no nucleotide
  misc_feature (254)..(285): n includes a, c, g, or t, or contains no nucleotide
  misc_feature (356)..(385): n includes a, c, g, or t, or contains no nucleotide
acctgtgacgttaaattcagaaactacctcattcccaagggcacaaccatattaacttccctcacttctgtgctacatgacaacaaagaatttcccaacccagagatgtttgaccctcgtcactttctggatgaaggtggaaattttaagaaaagtaactacttcatgccnnnnnnnnnnnnnnnnnnnnnnnnnnnnnnnnnnngcctggcccgcatggagctgtttttattcctgaccttcattttacagannnnnnnnnnnnnnnnnnnnnnnnnnnnnnnngaccttgacacaactcctgttgtcaatggatttgcttctgtcccgcccttctatcagctgtgcttcattcnnnnnnnnnnnnnnnnnnnnnnnnnnnnnnctcctgtgctgtccctgcagctctctttcctctggtccaaatttcactatctgtgatgcttcttctgacccgtcatctc

SEQ ID NO: 1703 - DNA, 479 bp, Homo sapiens
  misc_feature (183)..(183): n includes a, c, g, or t, or contains no nucleotide
  misc_feature (206)..(206): n includes a, c, g, or t, or contains no nucleotide
  misc_feature (216)..(216): n includes a, c, g, or t, or contains no nucleotide
  misc_feature (224)..(224): n includes a, c, g, or t, or contains no nucleotide
  misc_feature (235)..(235): n includes a, c, g, or t, or contains no nucleotide
  misc_feature (254)..(254): n includes a, c, g, or t, or contains no nucleotide
  misc_feature (258)..(258): n includes a, c, g, or t, or contains no nucleotide
  misc_feature (268)..(269): n includes a, c, g, or t, or contains no nucleotide
  misc_feature (277)..(277): n includes a, c, g, or t, or contains no nucleotide
  misc_feature (282)..(282): n includes a, c, g, or t, or contains no nucleotide
  misc_feature (287)..(288): n includes a, c, g, or t, or contains no nucleotide
  misc_feature (298)..(299): n includes a, c, g, or t, or contains no nucleotide
  misc_feature (309)..(309): n includes a, c, g, or t, or contains no nucleotide
  misc_feature (316)..(316): n includes a, c, g, or t, or contains no nucleotide
  misc_feature (327)..(327): n includes a, c, g, or t, or contains no nucleotide
  misc_feature (329)..(329): n includes a, c, g, or t, or contains no nucleotide
  misc_feature (333)..(333): n includes a, c, g, or t, or contains no nucleotide
  misc_feature (338)..(338): n includes a, c, g, or t, or contains no nucleotide
  misc_feature (346)..(346): n includes a, c, g, or t, or contains no nucleotide
  misc_feature (351)..(351): n includes a, c, g, or t, or contains no nucleotide
  misc_feature (353)..(353): n includes a, c, g, or t, or contains no nucleotide
  misc_feature (359)..(359): n includes a, c, g, or t, or contains no nucleotide
  misc_feature (361)..(361): n includes a, c, g, or t, or contains no nucleotide
  misc_feature (371)..(371): n includes a, c, g, or t, or contains no nucleotide
  misc_feature (432)..(453): n includes a, c, g, or t, or contains no nucleotide
gagaccggcttttcccacagtcaaatcactcgcctctacagccggttcaccagcctggacaaaggagagaatgggactctcagccgggaagatttccagaggattccagaacttgccatcaacccactgggggaccggatcatcaatgccttctttccagagggagaggaccaggtaaacttncgtggattcatgcgaactttggntcatttccgncccattgnaggataatganaaagagcaaagatgtgaantggnacccgaaccnnctcaacangccgnagcanncaaactgcanntttgcttttncgactantatgatttggntnaagnatganaagatctnccgtngntgagcngnttacaggtgntacgcatgatggtcggagtaaatatctcagatgagcagctgggcagcatcgcagacaggannnnnnnnnnnnnnnnnnnnnntggggacagtgccatatctttcacag

SEQ ID NO: 1704 - DNA, 316 bp, Homo sapiens
  misc_feature (34)..(34): n includes a, c, g, or t, or contains no nucleotide
tacattctagatgcaagtctcttgtcggatatangtattgagatattacacctagtctgtggcttgactgttttctttatgtcttttgatgaatagaagttttaaattttgacaaggtcaaatttatttttttcttttgtttgatattttttctctccaatttaaccccaagatttcagatattctgctctattatataaactttatatttttatatttgtgatctaccttgaattgatatgtatgttgtgaattatggatcagggttctttttttcccccatacaagtatccagtcattgtaacactgtttattg

SEQ ID NO: 1705 - DNA, 450 bp, Homo sapiens
  misc_feature (30)..(34): n includes a, c, g, or t, or contains no nucleotide
  misc_feature (36)..(36): n includes a, c, g, or t, or contains no nucleotide
  misc_feature (38)..(39): n includes a, c, g, or t, or contains no nucleotide
  misc_feature (41)..(41): n includes a, c, g, or t, or contains no nucleotide
  misc_feature (158)..(161): n includes a, c, g, or t, or contains no nucleotide
tactgactttgcttgctttgaagtagctcnnnnntntnntnttttttttttttttttttgcagtaactgttttttaagtctctcgtagtgttaagttatagtgaatactgctacagcaatttctaatttttaagaattgagtaatggtgtagaacacnnnntaattcataatcactctaattaattgtaatctgaataaagtgtaacaattgtgtagcctttttgtataaaatagacaaatagaaaatggtccaattagtttcctttttaatatgcttaaaataagcaggtggatctatttcatgtttttgatcaaaaactatttgggatatgtatgggtagggtaaatcagtaagaggtgttatttggaaccttgttttggacagtttaccagttgccttttatcccaaagttgttgtaacctgctgtgatacgatgcttcaagagaaa

SEQ ID NO: 1706 - DNA, 386 bp, Homo sapiens
  misc_feature (26)..(26): n includes a, c, g, or t, or contains no nucleotide
  misc_feature (72)..(72): n includes a, c, g, or t, or contains no nucleotide
caggcatgtggttttgaccttttttncaatcttctagaaagggaacggaagcagaagtgggacatcgagggnctctgctgtcctctgcgctgggtgtggaatgctgctgcacctgtcccttctgctggctcagggaagtgtcttcttgcccacatttctgtggggaaaggtttttaatcctctgatgcttccatcttcctgtttaggccatgtgcccagaaacctggactgatctttctttaatagtgaacccctgggccactgaagagtaacatggctccactggacacaaaagagggatggaatcaacaggcagggggccttttataagccttaggaaaagaaaatgaaactatttcatctttggacttttcaatactattgga

SEQ ID NO: 1707 - DNA, 398 bp, Homo sapiens
  misc_feature (213)..(213): n includes a, c, g, or t, or contains no nucleotide
  misc_feature (218)..(218): n includes a, c, g, or t, or contains no nucleotide
  misc_feature (259)..(303): n includes a, c, g, or t, or contains no nucleotide
  misc_feature (354)..(356): n includes a, c, g, or t, or contains no nucleotide
acgcatttaatgctgtttgtaaccatgcatctgttttcattctttgctgtaccttttgctgcccatcctgttacttttgagtttctttcattgtggttgttcttgggttcttttgtcttgtcagagctcttctataacctcgctctaatggcttaacagttgttctgggtggaaacgtcccctcatttgaatgctcctctaaaaaaaaaaaanaaaanaaaactgtattcattccctttaaaatgaaacattcctggtnnnnnnnnnnnnnnnnnnnnnnnnnnnnnnnnnnnnnnnnnnnnntggcctgggtgattgttcaggttgtagaatgcgcattttacattgtttatnnnaattgaagggtacttctgtctgctccaatttccattccttgg

SEQ ID NO: 1708 - DNA, 104 bp, Homo sapiens
ccaaatgactgaaagcactgatatatttaaaaacaaaaggcaatttattaaggaaatttgtaccatttcagtaaacctgtctgaatgtacctgtatacgtttca

SEQ ID NO: 1709 - DNA, 457 bp, Homo sapiens
  misc_feature (185)..(186): n includes a, c, g, or t, or contains no nucleotide
  misc_feature (331)..(366): n includes a, c, g, or t, or contains no nucleotide
catgatgaccattgcctacaccaagctctactgcaatttggacaagggagacctggagaatatttgggactgctctatggtaaaacacattgccctgttgctcttcaccaactgcatcctaaactgccctgtggctttcttgtccttctcctctttaataaaccttacatttatcagtcctgaannaattaagtttatccttctggtggtagtcccacttcctgcatgtctcaatccccttctctacatcttgttcaatcctcactttaaggaggatctggtgagcctgagaaagcaaacctacgtctggacaagatcaaaacacccaagnnnnnnnnnnnnnnnnnnnnnnnnnnnnnnnnnnnngtcctgtgactcaactcaagccttggtaacctttaccagctccagcatcacttatgacctgcctcccagttccgtgccatcaccagcttat

SEQ ID NO: 1710 - DNA, 483 bp, Homo sapiens
  misc_feature (255)..(300): n includes a, c, g, or t, or contains no nucleotide
cctgttactgtgtgcccatcatagatttctttttttagtgttgcccttgctgtgtaataaacgctctatctagtttacctagcaaaagctcaaaactgcgctagtatggactttttggacagacttagtttttgcacataaccttgtacaatcttgcaacagaggccagccacgtaagatatatatctggactctcttgtattataggatttttcttgttctgaatatccttgacattacagctgtcaaaaacannnnnnnnnnnnnnnnnnnnnnnnnnnnnnnnnnnnnnnnnnnnnntcacatgcaagaattgactttgcagctactaattttgacaccttttagatctgtataaaagtgtgttgtgttgaagcagcaaaccaatgagtgctgcattttggatatttagttttatctttagttcaacaccatcatggtggattcatttataccatctaatatatgacacactgttgtagt

SEQ ID NO: 1711 - DNA, 71 bp, Homo sapiens
cagtgtatttgcacacacccagggtattccatagcttgatggttttatctcgagatccagagacaatctgc

SEQ ID NO: 1712 - DNA, 355 bp, Homo sapiens
  misc_feature (127)..(127): n includes a, c, g, or t, or contains no nucleotide
  misc_feature (134)..(134): n includes a, c, g, or t, or contains no nucleotide
  misc_feature (139)..(139): n includes a, c, g, or t, or contains no nucleotide
  misc_feature (142)..(143): n includes a, c, g, or t, or contains no nucleotide
  misc_feature (149)..(152): n includes a, c, g, or t, or contains no nucleotide
  misc_feature (156)..(159): n includes a, c, g, or t, or contains no nucleotide
  misc_feature (166)..(169): n includes a, c, g, or t, or contains no nucleotide
  misc_feature (171)..(171): n includes a, c, g, or t, or contains no nucleotide
  misc_feature (173)..(173): n includes a, c, g, or t, or contains no nucleotide
  misc_feature (200)..(222): n includes a, c, g, or t, or contains no nucleotide
cgcaagaacaagtttcagtgtggctttggcctcaccatcggctgagccctcctggcccccgccttccacgcccttccgattccacctccacctccacctccccctgccacagaggggagacctgagnccccctnccttnccnncccccnnnngggnnnnggggggnnnntngnaaaggagggaccccgccaccccagcannnnnnnnnnnnnnnnnnnnnnngaatggcgcttcgggattctgagtagcaggggcagcatgcccagtgggcctggggtcccgggagggattccggaattgaggggcacgcaggattctgagcaccaggggcagaggcggccagacaacctcaggg

SEQ ID NO: 1713 - DNA, 166 bp, Homo sapiens
aaatgcttcactgtacgtagttaagtcgtagctataacttcaaattttttaaaagagacaaactgtaaaaaatgtgtgtattcttaaaatgcaatatttgtaaggcttgttccaatgccacatacttgcagctcccattctatgtgtcatcaatagtgtcctatgc

SEQ ID NO: 1714 - DNA, 599 bp, Homo sapiens
  misc_feature (150)..(164): n includes a, c, g, or t, or contains no nucleotide
  misc_feature (217)..(256): n includes a, c, g, or t, or contains no nucleotide
  misc_feature (443)..(467): n includes a, c, g, or t, or contains no nucleotide
agcatcagcctggtcacggccatcgccgtggaccgctatgtggccgtgcggcacccgctgcgtgcccgcgggctgcggtcccccaggcaggctgcggccgtgtgcgcggtcctctgggtgctggtcatcggctccctggtggctcgctgnnnnnnnnnnnnnnnggagggcggcttctgcttcaggagcacccggcacaatttcaactccatgcggnnnnnnnnnnnnnnnnnnnnnnnnnnnnnnnnnnnnnnnntcttctgctccctgaaggtggtgactgccctggcccagaggccacccaccgacgtggggcaggcagaggccacccgcaaggctgcccgcatggtctgggccaacctcctggtgttcgtggtctgcttcctgcccctgcacgtggggctgacagtgcgcctcgcagtgggctggaacgcctgtgcccnnnnnnnnnnnnnnnnnnnnnnnnngtacataaccagcaagctctcagatgccaactgctgcctggacgccatctgctactactacatggccaaggagttccaggaggcgtctgcactggccgtggctccccgtgctaaggcccacaaaagccagga

SEQ ID NO: 1715 - DNA, 530 bp, Homo sapiens
  misc_feature (137)..(137): n includes a, c, g, or t, or contains no nucleotide
  misc_feature (193)..(193): n includes a, c, g, or t, or contains no nucleotide
  misc_feature (299)..(299): n includes a, c, g, or t, or contains no nucleotide
  misc_feature (309)..(309): n includes a, c, g, or t, or contains no nucleotide
  misc_feature (311)..(311): n includes a, c, g, or t, or contains no nucleotide
  misc_feature (324)..(324): n includes a, c, g, or t, or contains no nucleotide
  misc_feature (326)..(326): n includes a, c, g, or t, or contains no nucleotide
cttcatgcccattcggttccagtggtggctggtccccctgccctacggcatcctcatcttcgtctatgatgagatccggaagcttggagttcgctgttgcccagggagctggtgggaccaggaactctactattagnagggacgactgccttcaagcatccctgcaactgccacagcaggtgggggcagggcncgtgggaccctctggacagccaccaagatatctgagcaaccaagagtcccagccccaccagtatctgcttctgtagcccacggcaccccaaacttggagggacctncccactcccntnccccattcccaangntcgcacctcctggagcagcagcgcctgggcagtcctctgggctggcctcgggaaagccgccacctgtggtggcggtggggctctgacagggagtacagctgaccgcttctggagggtgtttctgttcttaggactccagtccaggctggacggctgcctgagggcccttcgttaaagacacgcttgtgtcctgggcgatggtaa

SEQ ID NO: 1716 - DNA, 503 bp, Homo sapiens
  misc_feature (28)..(44): n includes a, c, g, or t, or contains no nucleotide
  misc_feature (47)..(118): n includes a, c, g, or t, or contains no nucleotide
  misc_feature (250)..(250): n includes a, c, g, or t, or contains no nucleotide
  misc_feature (276)..(302): n includes a, c, g, or t, or contains no nucleotide
  misc_feature (432)..(432): n includes a, c, g, or t, or contains no nucleotide
ctcacacattgtgtggtttggggttaannnnnnnnnnnnnnnnntcnnnnnnnnnnnnnnnnnnnnnnnnnnnnnnnnnnnnnnnnnnnnnnnnnnnnnnnnnnnnnnnnnnnnnnnnaactatttgtggctgtgctgcttgagtgacgtctctgtcgtgtgggtgccaagtgcttgtgtagaaactgtgttctgagcccccttttctggacaccaactgtgtcctgtgaatgtatcgctactgtgagcngttcccgcctagccagggccatgtcnnnnnnnnnnnnnnnnnnnnnnnnnnnctgagccacagtcccagaaccaagctctcggtgtctcgggccaccatccgcccacctcgggctgaccccacctcctccatggacagtgtgagccccgggccgtgcatcctgctcagtgtggcgtcagtgncggggctgagccccttgagctgcttcagtgaatgtacagtgcccggcacgagctgaacctcatgtgttcca

SEQ ID NO: 1717 - DNA, 399 bp, Homo sapiens
ccagatgttacaacgggcaggagcctcctccgagagcaggcctcagtcggcagaccagcatagcactcatcgcatgaggacagagaccaaagcagccaagaccctgtgcatcatcatgggttgcttctgcctctgctgggcaccattctttgtcaccaatattgtggatcctttcatagactacactgtccctgggcaggtgtggactgctttcctctggctcggctatatcaattccgggttgaacccttttctctacgccttcttgaataagtcttttagacgtgccttcctcatcatcctctgctgtgatgatgagcgctaccgaagaccttccattctgggccagactgtcccttgttcaaccacaaccattaatggatccacacatgtactaag

SEQ ID NO: 1718 - DNA, 415 bp, Homo sapiens
  misc_feature (26)..(43): n includes a, c, g, or t, or contains no nucleotide
cactccagaggcagggacccagaacnnnnnnnnnnnnnnnnnncgggagactgcaaaagaggcgttaaaaaaacggtccctctggaccccactggcaggcactgacggagcggccaggacacaggagagcaggcctggggggctcagccctgcaagactcagcctagagctgcatggaccccagtcaagtgttcccgcccttcttgctgcttctgtgccctctgggggaagacactggaggtgcagttaggtcgccgcgggaaagtttggactcttgcctggtggtctcgtcccgcccctcctcttcctccctccggttccttttcctccttccggttcttggtctaggctgcctgtctcgagctccccggccttgtcctggttggctggcgcgggacaggatccggtaaactga

SEQ ID NO: 1719 - DNA, 583 bp, Homo sapiens
tggagatggtgccaagctagtccgggatgcctttgccctggccaaggagaaagcgccctctatcatcttcattgatgagttggatgccatcggcaccaagcgctttgacagtgagaaggctggggaccgggaggtgcagaggacaatgctggagcttctgaaccagctggatggcttccagcccaacacccaagttaaggtaattgcagccacaaacagggtggacatcctggaccccgccctcctccgctcgggccgccttgaccgcaagatagagttcccgatgcccaatgaggaggcccgggccagaatcatgcagatccactcccgaaagatgaatgtcagtcctgacgtgaactacgaggagctggcccgctgcacagatgacttcaatggggcccagtgcaaggctgtgtgtgtggaggcgggcatgatcgcactggccaggggtgccacggagctcacccacgaggactacatggaaggcatcctggaggtgcaggccaagaagaaagccaacctacaatactacgcctaggcacacaggccagccccagtctcacggctgaagtgcgcaataaaa

SEQ ID NO: 1720 - DNA, 402 bp, Homo sapiens
  misc_feature (51)..(66): n includes a, c, g, or t, or contains no nucleotide
  misc_feature (159)..(193): n includes a, c, g, or t, or contains no nucleotide
  misc_feature (212)..(212): n includes a, c, g, or t, or contains no nucleotide
  misc_feature (226)..(227): n includes a, c, g, or t, or contains no nucleotide
  misc_feature (235)..(235): n includes a, c, g, or t, or contains no nucleotide
  misc_feature (279)..(335): n includes a, c, g, or t, or contains no nucleotide
atgaagcttctcacgggcctggttttctgctccttggtcctgggtgtcagnnnnnnnnnnnnnnnntcgttccttggcgaggcttttgatggggctcgggacatgtggagagcctactctgacatgagagaagccaattacatcggctcagacaaatannnnnnnnnnnnnnnnnnnnnnnnnnnnnnnnnnnaaaggggacctgggggtgnctgggctgcagaanngatcagcnatgccagagagaatatccagagattctttggccatggtgcggannnnnnnnnnnnnnnnnnnnnnnnnnnnnnnnnnnnnnnnnnnnnnnnnnnnnnnnntcacttccgacctgctggcctgcctgagaaatactgagcttcctcttcactctgctctcaggagatc

SEQ ID NO: 1721 - DNA, 514 bp, Homo sapiens
  misc_feature (127)..(227): n includes a, c, g, or t, or contains no nucleotide
  misc_feature (336)..(355): n includes a, c, g, or t, or contains no nucleotide
gaaatcttttaagagccagtaacatacttctagagaacaggaaaagagactaggataatacatcttccacacatttggcccactgataatgttaattctctggcgtatttcaaagaacttgttcctnnnnnnnnnnnnnnnnnnnnnnnnnnnnnnnnnnnnnnnnnnnnnnnnnnnnnnnnnnnnnnnnnnnnnnnnnnnnnnnnnnnnnnnnnnnnnnnnnnnnngaagaaaaaaaacaaaaaacaaaaaaaaaccttgttcctttataggttcctggtagaatcagtagagatgatttcagctcattgacatttttttaagctatatcccctnnnnnnnnnnnnnnnnnnnntgacaactgggatagggaggggattagataatagatggggtcaaattctgtgtgaatgtgaacttgcctagtaagcactttgtctctgttcactactgcgatagaggaaatctatctccctatcttgggtccttgaactacagcctgctgtcttacacc

SEQ ID NO: 1722 - DNA, 472 bp, Homo sapiens
  misc_feature (316)..(316): n includes a, c, g, or t, or contains no nucleotide
  misc_feature (344)..(346): n includes a, c, g, or t, or contains no nucleotide
  misc_feature (348)..(348): n includes a, c, g, or t, or contains no nucleotide
  misc_feature (405)..(405): n includes a, c, g, or t, or contains no nucleotide
  misc_feature (410)..(410): n includes a, c, g, or t, or contains no nucleotide
  misc_feature (413)..(414): n includes a, c, g, or t, or contains no nucleotide
  misc_feature (435)..(435): n includes a, c, g, or t, or contains no nucleotide
gctgttagctttgtcaacacgcattgtccttgtcatttgggccccgagctctgaccctcgtgtctgacgcggccacctctttctggaggggctgaggacagatgtgcctgcttgtggagaccaggctgggcctaagcgaagggtcatcgcagccccagcccggagcgtggagcccttggggggtggtcgggtgggatgtgcgttctccgctcgtggtgatgtcaggagctcctcggagggaacagagcggctgtgtatgcagcctgcaggtttccatacactgaagcttttacctcaactttaaaaaaaaaaaaanaagaaaagatttaaaaaaaaaaaaaaannnanactttttttgtaaggttcggcaattttctacggaagtccagcccgctgtgagtcccncgccntgnntagcgctgcccctgctgctgntgccgcgccacccttgggaaccacttcccgagcttat

SEQ ID NO: 1723 - DNA, 445 bp, Homo sapiens
  misc_feature (172)..(172): n includes a, c, g, or t, or contains no nucleotide
  misc_feature (176)..(195): n includes a, c, g, or t, or contains no nucleotide
  misc_feature (200)..(201): n includes a, c, g, or t, or contains no nucleotide
  misc_feature (206)..(206): n includes a, c, g, or t, or contains no nucleotide
  misc_feature (281)..(281): n includes a, c, g, or t, or contains no nucleotide
  misc_feature (286)..(286): n includes a, c, g, or t, or contains no nucleotide
ttcacggattagctgtgctgttatgttgtctgtgctgcagattggcccatgtgggaagtcgggggggacctgatttcctgcttggaagacttgggggactgccgagcatatcaaagtgtttatagtcaccaagtgaactgcagcacaaccatctcctctccagcaagccctngaannnnnnnnnnnnnnnnnnnngaaannccaanccagccctgtgttagaggaggaaaagcggagatgacatggaagtctccaagcctgtgccatccacctgccaaggnaaaancacaaggtgctatctacttttctctctaggatttagattatcatttatgtgctgttgcacagtgaaacctcacctgtgtgggcgtgaaagctgattggcattgtttttgattcagctttttggatggctaattgttttcactgtgctgtgggaatgcct

SEQ ID NO: 1724 - DNA, 322 bp, Homo sapiens
  misc_feature (29)..(29): n includes a, c, g, or t, or contains no nucleotide
  misc_feature (76)..(98): n includes a, c, g, or t, or contains no nucleotide
  misc_feature (113)..(113): n includes a, c, g, or t, or contains no nucleotide
  misc_feature (118)..(118): n includes a, c, g, or t, or contains no nucleotide
  misc_feature (124)..(125): n includes a, c, g, or t, or contains no nucleotide
  misc_feature (139)..(139): n includes a, c, g, or t, or contains no nucleotide
  misc_feature (173)..(173): n includes a, c, g, or t, or contains no nucleotide
  misc_feature (233)..(233): n includes a, c, g, or t, or contains no nucleotide
  misc_feature (236)..(236): n includes a, c, g, or t, or contains no nucleotide
  misc_feature (292)..(292): n includes a, c, g, or t, or contains no nucleotide
agctggtccagaacgcacagcttgggaangcagaggcccaggcctcatgtaatttcccactcccgtaactgaacgnnnnnnnnnnnnnnnnnnnnnnncttcatccaggtggnaaatnagacannctacgctgcccccnttcaaacgagttcctcgtgttaggggcaaaggtnacagccaaactctgccactgacagccagtgccttggcctggatcctctctgtggatgcanggnctacccctcctcagtccagcctcatctactagaccagcttggccattcacttttcngatgtctgtgagcacaggactgcagactga

SEQ ID NO: 1725 - DNA, 372 bp, Homo sapiens
  misc_feature (68)..(84): n includes a, c, g, or t, or contains no nucleotide
  misc_feature (129)..(346): n includes a, c, g, or t, or contains no nucleotide
tcctgtcgcctcctgcttgtggagcccagcaggaacgatctgctccttcgggtgcggctcaacgtcannnnnnnnnnnnnnnnntatgcgctgaaagacgagtaaaggggcttcacaagttaaaagacnnnnnnnnnnnnnnnnnnnnnnnnnnnnnnnnnnnnnnnnnnnnnnnnnnnnnnnnnnnnnnnnnnnnnnnnnnnnnnnnnnnnnnnnnnnnnnnnnnnnnnnnnnnnnnnnnnnnnnnnnnnnnnnnnnnnnnnnnnnnnnnnnnnnnnnnnnnnnnnnnnnnnnnnnnnnnnnnnnnnnnnnnnnnnnnnnnnnnnnnnnnnnnnnnnnnnnnnnnacaaagcatctgattttggaagtaca

SEQ ID NO: 1726 - DNA, 520 bp, Homo sapiens
  misc_feature (30)..(30): n includes a, c, g, or t, or contains no nucleotide
  misc_feature (34)..(34): n includes a, c, g, or t, or contains no nucleotide
  misc_feature (37)..(37): n includes a, c, g, or t, or contains no nucleotide
  misc_feature (281)..(281): n includes a, c, g, or t, or contains no nucleotide
  misc_feature (443)..(443): n includes a, c, g, or t, or contains no nucleotide
  misc_feature (460)..(476): n includes a, c, g, or t, or contains no nucleotide
tctcgcaccagcagtgctgggccagcaccncccnggncaccgacctgccgctgagcgagatcccgcgcggcgtgagagtcgccctggactacgaggcggggcaggtgaccctccacaacgcccagacccaggagcccatcttcaccttcactgcctctttctccggcaaagtcttccctttctttgccgtctggaaaaaaggttcctgccttacgctgaaaggctgaagtggggcgcgcgaagggcggcgaagcggagacggcggctctccgggatccagntccgcccctggccagtgtgcggcccgggggctccctgtgcccgcgtgaggcgagagaacaggggacttgagtctcgaacagcggttgtttttactttatttatcttaggccctcagctccctgacgtcctgagcctccctgtgacgctctggccttctctgnacctcagagtgcagaannnnnnnnnnnnnnnnntgtgcctagggcaacagccaacctaggagccagcgggctttcgg

SEQ ID NO: 1727 - DNA, 378 bp, Homo sapiens
agatctacaggtaaaacctggtgaatctctagaagttatacaaaccacagatgacacaaaagttctctgcagaaatgaagaagggaaatatggttatgtccttcggagttacctagcggacaatgatggagagatctatgatgatattgctgatggctgcatctatgacaatgactagcactcaactttggtcattctgctgtgttcattaggtgccaatgtgaagtctggattttaattggcatgttattgggtatcaagaaaattaatgcacaaaaccacttattatcatttgttatgaaatcccaattatctttacaaagtgtttaaagtttgaacatagaaaataatctctctgcttaattgttatctcagaag

SEQ ID NO: 1728 - DNA, 541 bp, Homo sapiens
  misc_feature (28)..(28): n includes a, c, g, or t, or contains no nucleotide
  misc_feature (33)..(46): n includes a, c, g, or t, or contains no nucleotide
  misc_feature (56)..(57): n includes a, c, g, or t, or contains no nucleotide
  misc_feature (60)..(61): n includes a, c, g, or t, or contains no nucleotide
  misc_feature (63)..(64): n includes a, c, g, or t, or contains no nucleotide
  misc_feature (69)..(69): n includes a, c, g, or t, or contains no nucleotide
  misc_feature (72)..(72): n includes a, c, g, or t, or contains no nucleotide
  misc_feature (82)..(99): n includes a, c, g, or t, or contains no nucleotide
  misc_feature (287)..(289): n includes a, c, g, or t, or contains no nucleotide
  misc_feature (333)..(333): n includes a, c, g, or t, or contains no nucleotide
gcatgtttcactgttgatcatatataangtcannnnnnnnnnnnnntctgtatttnnagnntnnttccnacnatgtcatgtnnnnnnnnnnnnnnnnnntgctagtttttataatttatttataatttatagtttaaagtacttcagatcataatgataaaatacttgaaaaagttatatttctgccctgtataagcaccctttttattaataaagaatgcagatatttcagatgtgatataatagttaaagaactgttggtttgatctgtgattaagttgagcatnnnccgctctactgaactaaatgatccaattattacttcagtctggntatgagattccatggacaagtaaggactagattgccaaggaaaagactgtcttgcccttggatccaaaagtttaaattagtgcatacatcatgtcatttcacctcctgttcctaggaactctccattcccaagcattgccagtgttttccagataatcttagctgttgtcttgtgctgtggaaatggaagaaaccatcttcacagact

SEQ ID NO: 1729 - DNA, 366 bp, Homo sapiens
  misc_feature (41)..(41): n includes a, c, g, or t, or contains no nucleotide
  misc_feature (103)..(103): n includes a, c, g, or t, or contains no nucleotide
  misc_feature (121)..(121): n includes a, c, g, or t, or contains no nucleotide
  misc_feature (124)..(124): n includes a, c, g, or t, or contains no nucleotide
  misc_feature (167)..(167): n includes a, c, g, or t, or contains no nucleotide
  misc_feature (237)..(257): n includes a, c, g, or t, or contains no nucleotide
tttcaattccgtagccagctgctccccagcagcggaaccgnccaggatcagattgcatgtgactctgaagctgacgaacttccatggccctcattaatgacanttgtccccaaatccgaanctnctctgtgaagcattcgagacagaaccttgttatttctcagacnttggaaaatgcattgtatcgatgttatgtaaaaggccaaacctctgttcagtgtaaatagttactccagnnnnnnnnnnnnnnnnnnnnnccttttttaaaaatgcaaatcctatgtgattttaactctgtcttcacctgattcaactaaaaaaaaaaaagtattattttccaaaagtggcctctttgtctaaaacaat

SEQ ID NO: 1730 - DNA, 344 bp, Homo sapiens
  misc_feature (185)..(185): n includes a, c, g, or t, or contains no nucleotide
  misc_feature (203)..(203): n includes a, c, g, or t, or contains no nucleotide
tatcacgggaatccaggcgttcacggccagcaagtgagccgctccatcaggggcccgaaactctcaagcccctttctggagagatgcctggctggaccgtaggagcgctgtgctctgagcttagaaagggaggtggcggatggagtgggaagtgagagacactgatttttaaatatcaaaatttncccttctgaagtcgttcngatgtgttccttaaaaagaagatggaattctctgtagagcgtctcaatccacttttaaccatggatgagagcagactccatttaccctgaaatagcagcttctcttgagaggagagtgacatggaagcaactccgtctgct

SEQ ID NO: 1731 - DNA, 156 bp, Homo sapiens
ttgggtgagtcttcctctcctagtccacatattcaaatgtcagtctcctctggcaacaccttacagacacatctagaaacaatactttaccagcctaggcttccttcattccattcaagttgacacgtaatgttaaccatcaaaatggcattacag

SEQ ID NO: 1732 - DNA, 526 bp, Homo sapiens
  misc_feature (114)..(236): n includes a, c, g, or t, or contains no nucleotide
gatgtttagcttcttactgcaaaaacataagtaaaacagtcaactttaccatttccgtattctccatagattgaagaaatttataccacatatcgcatatgaccatctttccannnnnnnnnnnnnnnnnnnnnnnnnnnnnnnnnnnnnnnnnnnnnnnnnnnnnnnnnnnnnnnnnnnnnnnnnnnnnnnnnnnnnnnnnnnnnnnnnnnnnnnnnnnnnnnnnnnnnnnnnnngtggaaatgaaagctagcgcacctgcactttgaattcttgcttcttttttattactgttatgattttgctttttacagatgttggacgattttttcttctgattgttgaattcataatcatggtctcatttcctttgcttctttggaatatttctttcaacacattcctttattttattatacattgtgtcctttttttagctattgctgctgttgttttttattctatttacaggatgatttttaaactgtcaaatgaagtagtgttaacctcaaataggctaaatgtg

SEQ ID NO: 1733 - DNA, 525 bp, Homo sapiens
  misc_feature (26)..(26): n includes a, c, g, or t, or contains no nucleotide
  misc_feature (80)..(80): n includes a, c, g, or t, or contains no nucleotide
  misc_feature (82)..(82): n includes a, c, g, or t, or contains no nucleotide
  misc_feature (84)..(84): n includes a, c, g, or t, or contains no nucleotide
  misc_feature (87)..(88): n includes a, c, g, or t, or contains no nucleotide
  misc_feature (106)..(139): n includes a, c, g, or t, or contains no nucleotide
  misc_feature (238)..(268): n includes a, c, g, or t, or contains no nucleotide
  misc_feature (294)..(308): n includes a, c, g, or t, or contains no nucleotide
  misc_feature (433)..(467): n includes a, c, g, or t, or contains no nucleotide
ggaatcccaggatgctgcccaacggnaaatttgtacattgggtgctatcaatgccacatcacagggaccagccatcacanancnaanngacctccacgtctgatgnnnnnnnnnnnnnnnnnnnnnnnnnnnnnnnnnntttttgccccaccccctgccgtcagttcttcctttctccgtggctggcttcccgcactagggaacgggttgtaaatggggaacatgacttccttccggnnnnnnnnnnnnnnnnnnnnnnnnnnnnnnntgccctgtagagttcctagattaccnnnnnnnnnnnnnnnttgtgcgtgtccggaaaagggctccatttggttccagcccactcccctctgcaagtgccgcagcttccctcagagcatactctccagtggatccaagtactctctctcctaaagacaccaccttnnnnnnnnnnnnnnnnnnnnnnnnnnnnnnnnnnnattaaagtgggggagatggcagacgctttctgggacctgcccaagatatgtattctct

SEQ ID NO: 1734 - DNA, 478 bp, Homo sapiens
  misc_feature (32)..(59): n includes a, c, g, or t, or contains no nucleotide
  misc_feature (119)..(119): n includes a, c, g, or t, or contains no nucleotide
  misc_feature (121)..(121): n includes a, c, g, or t, or contains no nucleotide
  misc_feature (125)..(125): n includes a, c, g, or t, or contains no nucleotide
  misc_feature (139)..(139): n includes a, c, g, or t, or contains no nucleotide
  misc_feature (145)..(148): n includes a, c, g, or t, or contains no nucleotide
  misc_feature (153)..(153): n includes a, c, g, or t, or contains no nucleotide
  misc_feature (169)..(169): n includes a, c, g, or t, or contains no nucleotide
  misc_feature (177)..(180): n includes a, c, g, or t, or contains no nucleotide
  misc_feature (184)..(184): n includes a, c, g, or t, or contains no nucleotide
  misc_feature (201)..(201): n includes a, c, g, or t, or contains no nucleotide
  misc_feature (220)..(220): n includes a, c, g, or t, or contains no nucleotide
  misc_feature (252)..(252): n includes a, c, g, or t, or contains no nucleotide
  misc_feature (273)..(273): n includes a, c, g, or t, or contains no nucleotide
  misc_feature (288)..(292): n includes a, c, g, or t, or contains no nucleotide
  misc_feature (308)..(308): n includes a, c, g, or t, or contains no nucleotide
  misc_feature (312)..(312): n includes a, c, g, or t, or contains no nucleotide
  misc_feature (327)..(327): n includes a, c, g, or t, or contains no nucleotide
  misc_feature (370)..(370): n includes a, c, g, or t, or contains no nucleotide
  misc_feature (374)..(393): n includes a, c, g, or t, or contains no nucleotide
  misc_feature (425)..(425): n includes a, c, g, or t, or contains no nucleotide
  misc_feature (450)..(450): n includes a, c, g, or t, or contains no nucleotide
caatacgattttgccaatggaataacagattnnnnnnnnnnnnnnnnnnnnnnnnnnnnattgggtccttgtaacttcaactgactcttccaaattgtatgaatttatcaatgtattananaaanccagtttcagaatnataaannnnaaatnttagaccaaataatgnggctaatnnnnagtngtatgatttctagcccntgggtttaaaactgtatcntaaagagtcattttaaaataatataaatattnaaaaatgtaactgctatcttnatgttctgaaataannnnnaacattttaaaatatnaatnctgtagtttaaaagnaagaaatggtgggaaggaaaagtagagaaagaaatgccaattncagnnnnnnnnnnnnnnnnnnnngttttcttagaatgaattttaccaatgtatgngttcttgttaacagaatgtgtaacngaaatactgaaagacttttgcttaaagt

SEQ ID NO: 1735 - DNA, 504 bp, Homo sapiens
  misc_feature (31)..(31): n includes a, c, g, or t, or contains no nucleotide
  misc_feature (42)..(58): n includes a, c, g, or t, or contains no nucleotide
  misc_feature (152)..(152): n includes a, c, g, or t, or contains no nucleotide
  misc_feature (159)..(159): n includes a, c, g, or t, or contains no nucleotide
  misc_feature (180)..(180): n includes a, c, g, or t, or contains no nucleotide
tatcgccaaggagctctgccttcctcccgtngaaactgcacnnnnnnnnnnnnnnnnnaagatgcaatcaaggccgccctggctgattacaaattgaaacaagaacccaaaaaaggagaggcagagaagaaatgagccctccctcggcgaancctccangcaggccacaccagctgtttncccacctgctgtgcagtcaccttagatgttcagaagccgcttcctctccactgaagagctatgagatacgcacaatacttgctgttcacgttatgactctcatgcaagcaaaatacacagtttcattgttctgaatcctgtggtttctttcagcccacttttatcgccttaacctagttaatgtatattttgaattgtgtgtatgacctcagaactgaaattgataatgaagttgcaagttttgatagcccgtgaagtgcataagtatctaattttacctgaattgatttggggggaaattaccagtagaatgccttggtctga

SEQ ID NO: 1736 - DNA, 498 bp, Homo sapiens
  misc_feature (390)..(390): n includes a, c, g, or t, or contains no nucleotide
  misc_feature (402)..(402): n includes a, c, g, or t, or contains no nucleotide
  misc_feature (471)..(471): n includes a, c, g, or t, or contains no nucleotide
taatccatgttggaaggaagcaacagtgaactctacctgttctggagttctcctgggtctgcagaaggttgggaatttagaaaataaggctgttctttcatattttaatttaatctctgtcaatggccatccctcccacaaaaaaacgtgggttaagagaacttgcagactggatatgcaagcaaacgggcaactctggagaaaaataaggaaaggaatgctgactttctctttctttctcttgtccccacacccattcccaacccaatactggggccttctcaaaaggagcaaattaaacaataaaccagacagcaaggccctgggggaaaggacaacatcctgaaataaatgatggagcccaggaaggtctcttgtggaagttgaaanaactctaatttnctttgtaactttaagccttggatacgggaggagaaatctcattttgtcgagtctcagaccatgtctgtntgtaagcaatccccacagtgtcctctg

SEQ ID NO: 1737 - DNA, 229 bp, Homo sapiens
  misc_feature (29)..(29): n includes a, c, g, or t, or contains no nucleotide
tggcctcgttttttgcctgcctgttttgnctattcttaaacttaggcccaagtacccaatgttggctgttagaagggattctgttcattcaacatgcaaactttagggaatggaagtaagttcatttttaagttgtgttgtcagtaggtgcggtgtctagggtagtgaatcctgtaagttcaaatttatgattaggtgacgagttgacattgagattgtccttttccct

SEQ ID NO: 1738 - DNA, 362 bp, Homo sapiens
  misc_feature (107)..(121): n includes a, c, g, or t, or contains no nucleotide
gtgtacatcacttgcagatcaccaaaaacactccgctgcccgtgaccgccggtgggtgtgtccccgctcccgtcgtcccgcccacctcaaaccccgcaggtgtgccnnnnnnnnnnnnnnntattgtagaaagtgtattcatttgctttataatgaaaaatacatttgcaaaggtatattgatatgcatttttatacaggcacataaaaattcaacttggcttgggagcagaatgcattgcattgtataaatgactctggcctgtgtgtactttgattttataacttgtaatcttttgtttacaatgaggggctttctgtaacttcttttaatttagaacactttggtagcaatagaaactt

SEQ ID NO: 1739 - DNA, 336 bp, Homo sapiens
  misc_feature (120)..(135): n includes a, c, g, or t, or contains no nucleotide
  misc_feature (141)..(145): n includes a, c, g, or t, or contains no nucleotide
  misc_feature (149)..(149): n includes a, c, g, or t, or contains no nucleotide
gaccattgcccataggctcaacacgatcctgaactcagaccgggtgctggtgctacaagcggggagagtggtagagctggactccccggccaccctgcgcaaccagccccactccctgtnnnnnnnnnnnnnnnngagcannnnncagngagtccctgcctcactcggaggtccctgagcccaatcccacaccctgcagagttctcccctctctctgatccaggccgggcctatacagaggtgctggctgcttgtttacattctcctctggggctctacctctccacacttccccagaagggaaaagggcaccctggattactctttggaaatcac

SEQ ID NO: 1740 - DNA, 536 bp, Homo sapiens
  misc_feature (59)..(86): n includes a, c, g, or t, or contains no nucleotide
  misc_feature (362)..(376): n includes a, c, g, or t, or contains no nucleotide
  misc_feature (419)..(441): n includes a, c, g, or t, or contains no nucleotide
  misc_feature (443)..(447): n includes a, c, g, or t, or contains no nucleotide
  misc_feature (449)..(449): n includes a, c, g, or t, or contains no nucleotide
ggctgatctgccttacataatcacataaggtcctttgcttttctttgtgttaagagggnnnnnnnnnnnnnnnnnnnnnnnnnnnngtgcttttcttgtagttgactttcatgtcactcactataaaataggtctcttaacctggcaccagtataactataaagcactagctgagaaggaactgatacttacatttcatggacagcattaacaagaatgagataaatttgtactttttagatcaaaacaaattacctaattgcaaaagagaaactgaaatggaacatagtctcagattcttctaatgtgtatctcacaatgtcatgtaatgtaaaggaaacccttttggaattagaattctnnnnnnnnnnnnnnnctatttggtaataaagtgcttatttgcagataacagaaaaaannnnnnnnnnnnnnnnnnnnnnncnnnnnancagcaaaattataaaatgtcaacctcatgtctcttagatgtacataaataaattggatatattatgctcttatcaagcagttactcg

SEQ ID NO: 1741 - DNA, 541 bp, Homo sapiens
  misc_feature (26)..(26): n includes a, c, g, or t, or contains no nucleotide
  misc_feature (40)..(44): n includes a, c, g, or t, or contains no nucleotide
  misc_feature (47)..(99): n includes a, c, g, or t, or contains no nucleotide
  misc_feature (135)..(156): n includes a, c, g, or t, or contains no nucleotide
  misc_feature (158)..(166): n includes a, c, g, or t, or contains no nucleotide
  misc_feature (168)..(168): n includes a, c, g, or t, or contains no nucleotide
  misc_feature (171)..(172): n includes a, c, g, or t, or contains no nucleotide
  misc_feature (174)..(175): n includes a, c, g, or t, or contains no nucleotide
  misc_feature (200)..(247): n includes a, c, g, or t, or contains no nucleotide
  misc_feature (249)..(269): n includes a, c, g, or t, or contains no nucleotide
  misc_feature (426)..(441): n includes a, c, g, or t, or contains no nucleotide
  misc_feature (474)..(488): n includes a, c, g, or t, or contains no nucleotide
gctcaggagcctcgttctcaggccgnacgctgtgtcaccnnnnnttnnnnnnnnnnnnnnnnnnnnnnnnnnnnnnnnnnnnnnnnnnnnnnnnnnnnnccacagggcactggaatggacagcaggcgcccccannnnnnnnnnnnnnnnnnnnnngnnnnnnnnntntcnncnnctcggaccctctgctgccccggggnnnnnnnnnnnnnnnnnnnnnnnnnnnnnnnnnnnnnnnnnnnnnnnncnnnnnnnnnnnnnnnnnnnnnccccccatcatgtctgccagggtgctcccccgcccatcaccctcccggggcccctccactgcctggctcagcgggccggagctgatcgctctcactggcctgctgcagatgagccagggggagcctaggcccagctcctccgcggttggccccccannnnnnnnnnnnnnnncacccagcccctgtggtagccccagcagttctnnnnnnnnnnnnnnntctctcccacagaccccagacacccattgtccatagccttctcagggcagagt

SEQ ID NO: 1742 - DNA, 421 bp, Homo sapiens
  misc_feature (92)..(107): n includes a, c, g, or t, or contains no nucleotide
  misc_feature (372)..(372): n includes a, c, g, or t, or contains no nucleotide
  misc_feature (375)..(375): n includes a, c, g, or t, or contains no nucleotide
  misc_feature (378)..(382): n includes a, c, g, or t, or contains no nucleotide
  misc_feature (384)..(387): n includes a, c, g, or t, or contains no nucleotide
  misc_feature (389)..(389): n includes a, c, g, or t, or contains no nucleotide
  misc_feature (391)..(392): n includes a, c, g, or t, or contains no nucleotide
  misc_feature (394)..(396): n includes a, c, g, or t, or contains no nucleotide
gcttaatccgtacctcacatgtgtattttcaggtgggaaagcagtgccactctccgcttcacagatgccccctgccaagatgtcagtgatgnnnnnnnnnnnnnnnntcgaggactgctctcagtctctgagtctcagcacaatgcaggaggacatggagtcttcgggggcagataccttctgaacgggaagagacagccagcacagtgtttatgccactggttttaaagtcattttaccttggcttaaaaccctctctcagactgtttggtttttgagcatattctgaaaaaaaaattccaatattttaaaataaaacaaaaagcataatttgggtatttaaagtttttaaataaaataagtataagtcanaanaannnnnannnngngnngnnncttagaatcctgagatagcatagag

SEQ ID NO: 1743 - DNA, 273 bp, Homo sapiens
cattcaagccttggaagggattaaaaaccaactttcgacttctgaaaagaaggctacgggagagtctccagtgaggggtctccctgggcctcatggtctgtctcctctagcctcctgctcatgctgcacgggcctcccctccaccctggacccgctctgtttctgcctggtcatcctgagcccctcctggcctcagggccattccacagtgctcccctgcctcaccgcttcctcctcgctcttccagactcttcctgcagaggctcctttctg

SEQ ID NO: 1744 - DNA, 172 bp, Homo sapiens
ctctggatctcgagataaaaccatcaagctatggaataccctgggtgtgtgcaaatacactgtccaggatgagagccactcagagtgggtgtcttgtgtccgcttctcgcccaacagcagcaaccctatcatcgtctcctgtggctgggacaagctggtcaaggtatggaac

SEQ ID NO: 1745 - DNA, 493 bp, Homo sapiens
  misc_feature (26)..(43): n includes a, c, g, or t, or contains no nucleotide
gtatctcattcagatgtgccttttgnnnnnnnnnnnnnnnnnntctttagctaatgaattgcctattgttatggaaaacagttaatatgccatgtatgtacagttttgtttatattgtatatttaaagatactgctaataacctatataaatttaagtgacttgaggcctataatacaatctgctactttactaattcataaattcaaaaaaaattctatggcataggaaccaactgccttgccttcaagacctagtaactttctctataaatctcgtgttaactgaaattttttttaaatatattttttagattggtaatatttaaaccagcaaatacttaaagctttattaaacattttaatcagataagtgagtaaagcttttatttgccatttggatgccttcgttcaaagtgatagagtgttttgctgatagtgctgtagcagcagttgtaaagtagccaaaagccacgttgtttatttactggtttg

SEQ ID NO: 1746 - DNA, 253 bp, Homo sapiens
  misc_feature (33)..(70): n includes a, c, g, or t, or contains no nucleotide
  misc_feature (197)..(214): n includes a, c, g, or t, or contains no nucleotide
ctttgaaccttgatgcatggcgacagcgcaccnnnnnnnnnnnnnnnnnnnnnnnnnnnnnnnnnnnnnnaccggcgatgatggcaatcatgatggttagatagtcctcatttggatagggttggctactatcccctatgttcctgtccaacggggtctccatagtcctgcggatcaagtcatagatataggaggcnnnnnnnnnnnnnnnnnnaacataaaggaatacaagcacaagcgtgtgcaaagactt

SEQ ID NO: 1747 - DNA, 612 bp, Homo sapiens
  misc_feature (126)..(126): n includes a, c, g, or t, or contains no nucleotide
  misc_feature (128)..(128): n includes a, c, g, or t, or contains no nucleotide
  misc_feature (133)..(133): n includes a, c, g, or t, or contains no nucleotide
  misc_feature (146)..(146): n includes a, c, g, or t, or contains no nucleotide
  misc_feature (155)..(155): n includes a, c, g, or t, or contains no nucleotide
  misc_feature (179)..(200): n includes a, c, g, or t, or contains no nucleotide
  misc_feature (212)..(212): n includes a, c, g, or t, or contains no nucleotide
  misc_feature (366)..(366): n includes a, c, g, or t, or contains no nucleotide
tgaccgagagcctgtttcccggttaccacaccaaggcgcgggcggtgatgaactttgtggttcgctaccggccagacgagcagccgtctctgcggccacaccacgactcatccaccttcaccctcnangttgncctcaaccacaangggcctggnactatgagggaggtggctgccgcnnnnnnnnnnnnnnnnnnnnnntctcctccccgnaggaagggctgggcactcctgcaccccggccgcctcacccactaccacgaggggctgccaacgacctggggcacacgctacatcatggtgtcctttgtcgacccctgacactcaaccactctgccaaacctgccctgccattgtgcctttttanggggcctggcccccgtcctgggagttgggggatgggtctctctgtctccccacttcctgagttcatgttccgcgtgcctgaactgaatatgtcaccttgctcccaagacacggccctctcaggaagctcccggagtccccgcctctctcctccgcccacaggggttcgtgggcacagggcttctggggactccccgcgtgataaattattaatgttccgcagtctcactctgaataaaggacagtt

SEQ ID NO: 1748 - DNA, 410 bp, Homo sapiens
  misc_feature (327)..(327): n includes a, c, g, or t, or contains no nucleotide
cttcccatgggcattgcaagtgccaccgtgcggggcctggctctgcacacccaggaaaagtctgcagacccccagccctccgcaataattcaccagaccagaagccactggtgtacagagaacacttaaaaaaatgtattttatgtgaaaaaaaattaaaactctgtatactgtatcagcagctttgtgtaaaaatggcaatcaagagagtctaatatatttaaaacttttttaaaaaaaatcttcgcagatctttgatatcgtactgaggtaacttccacgtagccccttgccacgcggcaccggtgggccttgggtccaaaactntggctcagccacatcccaaagggggcacatgtccctggagttgcttccagctgccaaggcctgtgacagaattcgctgttaag

SEQ ID NO: 1749 - DNA, 117 bp, Homo sapiens
  misc_feature (57)..(57): n includes a, c, g, or t, or contains no nucleotide
aaggggctgagtgactccttgagtagcagtggctcttcctagagtagccatgccgangccggggcccccacccctcctccagggcaaccccttggtcctacagcaagaagccagaac

SEQ ID NO: 1750 - DNA, 531 bp, Homo sapiens
  misc_feature (43)..(44): n includes a, c, g, or t, or contains no nucleotide
  misc_feature (166)..(181): n includes a, c, g, or t, or contains no nucleotide
  misc_feature (488)..(488): n includes a, c, g, or t, or contains no nucleotide
gcctcctgaaggtggaagctatgctggttccctggctgagccnnacgaggagctggaggcggaggagtgcgggatcctggacggctgcaccaacggccgctgcgtgcgcgtccccgaaggcttcacctgccgttgcttcgacggctaccgcctggacatgacccgnnnnnnnnnnnnnnnncatcaacgagtgtgatgaggccgaggctgcctccccgctgtgcgtcaacgcgcgttgcctcaacacggatggctccttccgctgcatctgccgcccgggattcgcacccacgcaccagccgcaccactgtgcgcccgcacggccccgggcctgagccctggcacccgctggccgcccacccgcgcccgccactcggggcccctgccgcgcatcctgcagcccgcttatgcgtatgtgcacggggccgcccgcctggacctggagaagggacctacggacgcctggaagctgcgacgccctgcactgntcccgcctccaccagcgcctcccactgatgtcgtggtcccggg

SEQ ID NO: 1751 - DNA, 445 bp, Homo sapiens
  misc_feature (65)..(65): n includes a, c, g, or t, or contains no nucleotide
  misc_feature (114)..(114): n includes a, c, g, or t, or contains no nucleotide
caagttgacccagtttgtcttttaggttaagtaagactcgagagtaaaggcaaggaggggggccnagcctctgaatgcggccacggatgccttgctgctgcaaccctttccccnagctgtccactgaaacgtgaagtcctgttttgaatgccaaacccaccattcactggtgctgactacatagaatggggttgagagaagatcagtttgggcttcacagtgtcatttgaaaacgttttttgttttgttttgtaattattgtggaaaactttcaagtgaacagaaggatggtgtcctactgtggatgagggatgaacaaggggatggctttgatccaatggagcctgggaggtgtgcccagaaagcttgtctgtagcgggttttgtgagagtgaacactttccactttttgacaccttatcctgatgtatggttccaggatttgg

SEQ ID NO: 1752 - DNA, 455 bp, Homo sapiens
  misc_feature (97)..(97): n includes a, c, g, or t, or contains no nucleotide
  misc_feature (100)..(100): n includes a, c, g, or t, or contains no nucleotide
  misc_feature (102)..(105): n includes a, c, g, or t, or contains no nucleotide
  misc_feature (109)..(119): n includes a, c, g, or t, or contains no nucleotide
  misc_feature (122)..(149): n includes a, c, g, or t, or contains no nucleotide
atgctgtggggcatagaactccggaatgaccagcatgatattttcagagtcttgtccccggggtattagcacctctttttgaacagggaattgattncangnnnnggannnnnnnnnnnctnnnnnnnnnnnnnnnnnnnnnnnnnnnnggcattaaaaatagtaagcctccctcctcgtcccctgcctcaagaaattgcctccttatttatcaacatctttttcctccctttccctgagagctcacagtacaatgtttcagaagccccatttgcacaggttttcagcaactcagaatgctctacttctttttctttgagaaaggattaagatacactcctgctgtgcccccatctttcctccaaactcctgcctgtgtttgtgtggatacccagtcccagaaccacactgttgagttggacacactgtaaacccctgggtaactgtcaagtcat

SEQ ID NO: 1753 - DNA, 447 bp, Homo sapiens
  misc_feature (26)..(46): n includes a, c, g, or t, or contains no nucleotide
  misc_feature (55)..(69): n includes a, c, g, or t, or contains no nucleotide
  misc_feature (119)..(119): n includes a, c, g, or t, or contains no nucleotide
  misc_feature (128)..(128): n includes a, c, g, or t, or contains no nucleotide
  misc_feature (140)..(140): n includes a, c, g, or t, or contains no nucleotide
  misc_feature (148)..(148): n includes a, c, g, or t, or contains no nucleotide
  misc_feature (150)..(150): n includes a, c, g, or t, or contains no nucleotide
  misc_feature (163)..(164): n includes a, c, g, or t, or contains no nucleotide
  misc_feature (173)..(173): n includes a, c, g, or t, or contains no nucleotide
  misc_feature (189)..(189): n includes a, c, g, or t, or contains no nucleotide
  misc_feature (191)..(191): n includes a, c, g, or t, or contains no nucleotide
  misc_feature (197)..(197): n includes a, c, g, or t, or contains no nucleotide
  misc_feature (210)..(210): n includes a, c, g, or t, or contains no nucleotide
  misc_feature (223)..(223): n includes a, c, g, or t, or contains no nucleotide
  misc_feature (228)..(229): n includes a, c, g, or t, or contains no nucleotide
  misc_feature (245)..(245): n includes a, c, g, or t, or contains no nucleotide
  misc_feature (250)..(251): n includes a, c, g, or t, or contains no nucleotide
  misc_feature (253)..(253): n includes a, c, g, or t, or contains no nucleotide
  misc_feature (258)..(258): n includes a, c, g, or t, or contains no nucleotide
  misc_feature (260)..(260): n includes a, c, g, or t, or contains no nucleotide
  misc_feature (283)..(283): n includes a, c, g, or t, or contains no nucleotide
  misc_feature (285)..(285): n includes a, c, g, or t, or contains no nucleotide
  misc_feature (293)..(293): n includes a, c, g, or t, or contains no nucleotide
  misc_feature (303)..(303): n includes a, c, g, or t, or contains no nucleotide
  misc_feature (313)..(313): n includes a, c, g, or t, or contains no nucleotide
  misc_feature (333)..(333): n includes a, c, g, or t, or contains no nucleotide
  misc_feature (338)..(338): n includes a, c, g, or t, or contains no nucleotide
  misc_feature (350)..(351): n includes a, c, g, or t, or contains no nucleotide
  misc_feature (354)..(354): n includes a, c, g, or t, or contains no nucleotide
  misc_feature (364)..(364): n includes a, c, g, or t, or contains no nucleotide
  misc_feature (367)..(367): n includes a, c, g, or t, or contains no nucleotide
  misc_feature (379)..(379): n includes a, c, g, or t, or contains no nucleotide
  misc_feature (381)..(381): n includes a, c, g, or t, or contains no nucleotide
  misc_feature (386)..(387): n includes a, c, g, or t, or contains no nucleotide
  misc_feature (391)..(392): n includes a, c, g, or t, or contains no nucleotide
  misc_feature (398)..(399): n includes a, c, g, or t, or contains no nucleotide
  misc_feature (402)..(403): n includes a, c, g, or t, or contains no nucleotide
  misc_feature (406)..(406): n includes a, c, g, or t, or contains no nucleotide
  misc_feature (409)..(409): n includes a, c, g, or t, or contains no nucleotide
  misc_feature (415)..(415): n includes a, c, g, or t, or contains no nucleotide
  misc_feature (417)..(421): n includes a, c, g, or t, or contains no nucleotide
ttcctatgtcactttccaagggcttnnnnnnnnnnnnnnnnnnnnngagggggannnnnnnnnnnnnnntattttgataagaaactacagctcccagcagaggagaaacatcctctgangtttccggnccagactcaggncaaccttnancttgcctcttggnncccaccctngcaccttcttcctttncntctggnatggaggtccccngtttggcagaaanacctnntcttccagctcctggnactgnntnccatntncagagctcagaggagggggtgtngnttgtaggntggcagccgntccccagagncatcaccccacccaccacgnccagntcagcctgtctnnggnaggtcccagntgnaagcctcacctngnggctnntggnntagggnntgnnggnagngtggcngnnnnnccagacactgggttgtttgaaagtcc

SEQ ID NO: 1754 - DNA, 397 bp, Homo sapiens
gacaacgtcatctgtgggagctacgatagcaagctggtgtggtttgacctggatctttccaccaagccatacaggatgctgagacaccacaagaaggctctgcgggctgtggccttccacccgcggtacccactctttgcgtcaggctcggacgacggcagtgtcatcgtctgccatggcatggtgtacaatgaccttctgcagaaccccttgctggtgcccgtcaaggtgctgaagggacacgtgctgacccgagatctgggagtgctggacgtcatcttccaccccacccagccgtgggtcttctcctcgggggcagacgggactgtccgcctcttcacctagctgttctgcctgcctggggctggggtggtcgtgctgaagtcaacagagcctt

SEQ ID NO: 1755 - DNA, 492 bp, Homo sapiens
gccagtgcactcttaatacacagaaaaatatatttcacatccttctcctgctctctttcaattcctcacttcacaccagtacacaagccattctaaatacttagccagtttccagccttccagatgatctttgccctctgggtcttgacccattaagagccccatagaactcttgatttttcctgtccatctttatggatttttctggatctatattttcttcaattattctttcattttataatgcaactttttcataggaagtccggatgggaatattcacattaatcatttttgcagagactttgctagatcctctcatattttgtcttcctcagggtggcaggggtacagagagtgcctgattggaaaaaaaaaaaaaagagagagagagagaagaagaagaagaagagacacaaatctctacctcccatgttaagctttgcaggacagggaaagaaagggtatgagacacggctaggggtaaactct

SEQ ID NO: 1756 - DNA, 180 bp, Homo sapiens
  misc_feature (33)..(49): n includes a, c, g, or t, or contains no nucleotide
  misc_feature (142)..(142): n includes a, c, g, or t, or contains no nucleotide
gcccgagggcacctccttgactgtggacaacannnnnnnnnnnnnnnnngtgggctccaacaagtacggcgtgtttatgcgagtgagcgaggtgaagcccacctatcgcaactccatcaccgtgccctacaaggtgtgggcnaagttcggacacaccttctgcaagtactcggaggagat

SEQ ID NO: 1757 - DNA, 331 bp, Homo sapiens
tctcgctgtatttaagatgctggtgaagagcttttgctcttgcattagatttgaagatgtttacattgttgttattgttatgtatcacttgctaaaaatattgttttaatcagagataacctctttaaaaaaatttttaaagaactatggctatgaccaaagcttctattttgccaaaaagttaaataccgataaaatggccttaagtgtattcctgacagttaaattcagaaacgtgccaaatggaactcaaggtgccccttcagaattaaaatcattaccttgtgtgtgaaccttctacatcttcataggcctttcttccttttgaaag

SEQ ID NO: 1758 - DNA, 524 bp, Homo sapiens
ggggcaagtcacatgggcagagatagccgtgtgagcagtctcagctcaagctgccccccatttctgtaaccctcctagcccccttgatccctaaagaaaacaaacaaacaaacaaaaactgttgctatttcctaacctgcaggcagaacctgaaagggcattttggctccggggcatcctggatttagaacatggactacacacaatacagtggtataaactttttattctcagtttaaaaatcagtttgttgttcagaagaaagattgctataatgtataatgggaaatgtttgcccatgcttggttgttgcagttcagacaaatgtgacacacacacacatacacacacacacacacacacagagacacatcttaaggggacccacaagtattgccctttaacaagacttcaaagttttctgctgtaaagaaagctgtaatatatagtaaaactaaatgttgcgtgggtggcatgagttgaagaaggccaaggcttgtaaatttacccaatgcagtttggct

SEQ ID NO: 1759 - DNA, 368 bp, Homo sapiens
cttctggccctggagcatgggtagctggcatagaggggtatgggttgcctgccccattctgctgctatagctgaacagtcctttccccttccctcgctgggcagcttggcaggtaccctaacccaaaactctgtcctctcctcccgccagtggctgacagtagctgtaggtgtagtggagaacttttctgcctctgctgtgttcttgctgcttaggtttgggtgggggactaacagctgctgggaggggagctaggggcatggagaactggtcagactcaaggtggctcctctgcaaactgaccccagggttggttgctgtgggcatgttcccgcttatgctacctttgcagtctggtagtcccctgg

SEQ ID NO: 1760 - DNA, 602 bp, Homo sapiens
  misc_feature (174)..(188): n includes a, c, g, or t, or contains no nucleotide
  misc_feature (391)..(391): n includes a, c, g, or t, or contains no nucleotide
  misc_feature (467)..(492): n includes a, c, g, or t, or contains no nucleotide
agccatcaggagcactgttggaatcagcaggcctctgtgctccctctgccctccagaactcagtgactcttgaacatggatgttatatattcttataacctgtttccattctccattcaaataaagagcagactgcgatatagtccatttaccccatgtgtgcacattcaggannnnnnnnnnnnnnncccattcccttgagaggggctggatgtaatcacctttggttggactagaaagagctcaaaccattttacattcctgtttgaatttttccaaagcaaaactcactttgaccccattaagaggcaagcctggcacatctatccctgggcctttagaaagccatttgcctcaaatggctatagggttgtggggtggagggaggaanggctgggagggagtggggaggaattgctagctgtagtgtgacacattgtagtgtttgccaggaaaggagccagtcnnnnnnnnnnnnnnnnnnnnnnnnnngccacccaggtctcattcctccctgctgttggaggcaacatctcctctttttacagagggtacatccttttttcttacaaattcttcaataaagacacattcttgagtga

SEQ ID NO: 1761 - DNA, 105 bp, Homo sapiens
aagatttgtgatccaggcctcacttcctttgagcctgaggcccttggtaacctcgtggaggggatggatttccataagttttactttgagaatctcctgtccaag

SEQ ID NO: 1762 - DNA, 566 bp, Homo sapiens
  misc_feature (26)..(26): n includes a, c, g, or t, or contains no nucleotide
  misc_feature (36)..(36): n includes a, c, g, or t, or contains no nucleotide
  misc_feature (42)..(42): n includes a, c, g, or t, or contains no nucleotide
  misc_feature (53)..(53): n includes a, c, g, or t, or contains no nucleotide
  misc_feature (64)..(64): n includes a, c, g, or t, or contains no nucleotide
  misc_feature (74)..(74): n includes a, c, g, or t, or contains no nucleotide
  misc_feature (87)..(87): n includes a, c, g, or t, or contains no nucleotide
  misc_feature (113)..(113): n includes a, c, g, or t, or contains no nucleotide
  misc_feature (120)..(182): n includes a, c, g, or t, or contains no nucleotide
  misc_feature (219)..(249): n includes a, c, g, or t, or contains no nucleotide
  misc_feature (344)..(346): n includes a, c, g, or t, or contains no nucleotide
  misc_feature (447)..(509): n includes a, c, g, or t, or contains no nucleotide
ggtcaattcagctggtgctcaagacngaatcggctnggcttntggcctaggantagaaaggctngccatgatcntctacgacatccntgatatccgtctcttctggtgtgagnacgagcnnnnnnnnnnnnnnnnnnnnnnnnnnnnnnnnnnnnnnnnnnnnnnnnnnnnnnnnnnnnnnnaatatccggctgtgatcaatgatatttcattctggtnnnnnnnnnnnnnnnnnnnnnnnnnnnnnnnctatgacttagtccgaacaattggaggagacctggtggaaaaggttgatctcatagacaagtttgtacatccaaagacgcacaagaccagccacnnntaccgcatcacgtaccgccacatggaacggactctgtcccagagagaggtcaggcacatccaccaggccttgcaggaggctgcagtccagctgttgggtgnnnnnnnnnnnnnnnnnnnnnnnnnnnnnnnnnnnnnnnnnnnnnnnnnnnnnnnnnnnnnnntgctgaaagagaaaaagatatggtttgtgaactggggcatcaatcatcttttgataa

SEQ ID NO: 1763 - DNA, 72 bp, Homo sapiens
aggaggtccagatttggctcctgaaaaaggaaagaagagaattttacccctatttgcaatggagaaatacag

SEQ ID NO: 1764 - DNA, 161 bp, Homo sapiens
gacatgtccttgtgtgcccgctgcggccagtggagcgcttccatgacctgcgtcctgatgaagtggccgatttgtttcagacgacccagagagtcgggacagtggtggaaaaacatttccatgggacctctctcaccttttccatgcaggatggccccgaa

SEQ ID NO: 1765 - DNA, 450 bp, Homo sapiens
  misc_feature (183)..(183): n includes a, c, g, or t, or contains no nucleotide
  misc_feature (402)..(416): n includes a, c, g, or t, or contains no nucleotide
tacaagatcccgtcctccaggcagtgacctcccaaaccagcctgcctggtcactgactgcttactctaccttagctggacctcgtctcccagggattagagaaaagagcaggagtcctgggtcttcccagttgagactgctggagctgagacacagtactctcttaaagaaggtggggagctncccagggcagaacccactggtgttcatgactacccctggctcctctcaccttgtccctccactgccaacagaaaacaaagcagctgactgagatggtcaaaggactttggaccataggggatctttggaaggctgtggggtcttgctcttccttagcactcctttctccttgtgagatctctcctcagctggaatgaggaatgtagtccatctaaactnnnnnnnnnnnnnnnttaccacttctgtttgctttgtggatcctgggat

SEQ ID NO: 1766 - DNA, 477 bp, Homo sapiens
  misc_feature (101)..(140): n includes a, c, g, or t, or contains no nucleotide
  misc_feature (144)..(144): n includes a, c, g, or t, or contains no nucleotide
  misc_feature (146)..(146): n includes a, c, g, or t, or contains no nucleotide
  misc_feature (152)..(152): n includes a, c, g, or t, or contains no nucleotide
  misc_feature (182)..(182): n includes a, c, g, or t, or contains no nucleotide
  misc_feature (201)..(201): n includes a, c, g, or t, or contains no nucleotide
  misc_feature (248)..(248): n includes a, c, g, or t, or contains no nucleotide
  misc_feature (317)..(317): n includes a, c, g, or t, or contains no nucleotide
  misc_feature (344)..(344): n includes a, c, g, or t, or contains no nucleotide
ttaaaaagacaaacctctagatgtgtaattacatggaaaatactagcaatgtgaatgcttttgtagtaaccatcttgtagtacctgtgaaatctataactnnnnnnnnnnnnnnnnnnnnnnnnnnnnnnnnnnnnnnnnatancntctgtntaattattttgtaggtcctgtgtgtggaanccaactataaacccagttnctaaagttgtgtatgatggtgaacctttgggaatagttcttatcaancttaattggatacttttagcaaataggaacttaattctcagcactgaacatgaattacttccttggagntttttttcattcatatttttgttgttnccaggaatttatttgatattaatgggcgtaaaacagcatcattgtacttaagctatggatgtttttattttatattttctttatttataactgtgccaagtattattttgctacttaccgtgttattctgtgg

SEQ ID NO: 1767 - DNA, 352 bp, Homo sapiens
tctccaaatgatgagttctagtaaactctgatttttgcctctggatagtagatctcgagcgtttatctcgggctttaatttgctaaagctgtgcacatatgtaaaaaaaaaaaaaaaaagattattttaggggagatgtaggtgtagaattattgcttatgtcatttcttaagcagttatgctcttaatgcttaaaagaaggctagcattgtttgcacaaaaagttggtgattcccaccccaaatagtaataaaattacttctgttgagtaaactttttatgtcatcgtaaaagctgaaaaaatccctttgtttctatttataaaaaaagtgcttttctatatgtacccttg

SEQ ID NO: 1768 - DNA, 530 bp, Homo sapiens
  misc_feature (26)..(26): n includes a, c, g, or t, or contains no nucleotide
  misc_feature (33)..(33): n includes a, c, g, or t, or contains no nucleotide
  misc_feature (151)..(162): n includes a, c, g, or t, or contains no nucleotide
agtttgtgcgcaaacatatcttcaanaagcatncagagaaaattgaggaagtgaaaaaggaagtcgcgttttttaacaacttcctcactgatgctaagcgcccagctctgcctgagatcaagccagcccagccacctggccccgcccagannnnnnnnnnnngtttgaccccaggactcccctacccacaccagactccccagggcctgatgccctatggtcagccccggcccccgatcttgggctatggagctggtgctgtccgccctgcagtccccacaggaggccctccatacccccatgccccgtatggtgctggtcgagggaactatgatgccttccgaggccagggaggttatcctgggaaacctcgcaacaggatggttcgtggagacccaagggccattgtggaatatcgggacctggatgccccagacgatgttgatttcttttgagccgtcccccgttcctcagtcctgtatcatccatacttgtactaccttgtcctatgaagctctgagaattttttg

SEQ ID NO: 1769 - DNA, 204 bp, Homo sapiens
tgcatgtgtctctgggacaagtgtttttccgtgattgagggtgtctgcaggccagtgtgttcccatgtgaatgcacgtatctgtgtgtgtgcacgactgcttgtgtgagcagatccctagtcgtgtctgggtgtgtatcggttgtgcatgcatttgtgtgcatcctgtgtttctctgaaactcttagggccatatgaatttcta

SEQ ID NO: 1770 - DNA, 61 bp, Homo sapiens
gaaaggggccctccagctttccactgcagagaaagtggttgttgctcctcggtatatgtaa

SEQ ID NO: 1771 - DNA, 343 bp, Homo sapiens
tggagatgttccaagggctgctgctgttgctgctgctgagcatgggcgggacatgggcatccaaggagatgcttcggccacggtgccgccccatcaatgccaccctggctgtggagaaggagggctgccccgtgtgcatcaccgtcaacaccaccatctgtgccggctactgccccaccatgacccgcgtgctgcagggggtcctgccggccctgcctcaggtggtgtgcaactaccgcgatgtgcgcttcgagtccatccggctccctggctgcccgcgcggcgtgaaccccgtggtctcctacgccgtggctctcagctgtcaatgtgcactctgccgccg

SEQ ID NO: 1772 - DNA, 487 bp, Homo sapiens
  misc_feature (35)..(91): n includes a, c, g, or t, or contains no nucleotide
  misc_feature (244)..(320): n includes a, c, g, or t, or contains no nucleotide
  misc_feature (323)..(324): n includes a, c, g, or t, or contains no nucleotide
  misc_feature (338)..(338): n includes a, c, g, or t, or contains no nucleotide
cttgcctatgtgtgatggcaattggagatctggannnnnnnnnnnnnnnnnnnnnnnnnnnnnnnnnnnnnnnnnnnnnnnnnnnnnnnnnaggtggcgatcaccttctgctcctaggtacccccactggcaaggccaaggtctcctccacgttttttctgcaattaataatgtcatttaaaaaatgagcaaagccttatccgaatcggatatagcaactaaagtcaatacattttgcaggagnnnnnnnnnnnnnnnnnnnnnnnnnnnnnnnnnnnnnnnnnnnnnnnnnnnnnnnnnnnnnnnnnnnnnnnnnnnnnagnntttaattttgagcnccttaccaaacataacaataatccattatccttttggcaacaccacaaagatcgcatctgttaaacaggtacaagttgacatgaggttagtttaattgtacaccatgatattggtggtatttatgctgttaagtccaaacctttatctg

SEQ ID NO: 1773 - DNA, 607 bp, Homo sapiens
aagcctgctggactgtttctaacatcactgctggaaatagagctcagattcaggctgttatagatgcaaatatttttcctgttttgattgagattcttcagaaagcagagtttcgtaccagaaaagaagcagcttgggctataactaatgcaacatcaggaggtactccagagcaaataaggtatttggtagctttaggctgcattaaaccactttgtgatcttttgactgttatggactccaaaatagtccaagtggctttaaatggacttgaaaatattttacgtcttggagaacaagaatctaagcagaatggaataggcattaatccatactgtgctctcattgaagaagcatatggtctggataaaattgagtttttgcaaagccatgaaaatcaggaaatttaccagaaggcatttgatctgattgaacattactttggtgtagaagaagatgaccccagcattgtacctcaggtggatgaaaaccaacaacagtttatatttcagcagcaggaagcaccaatggatggatttcaactttaacttactggaggaaaaaaaatttatggctaaaaagggtagcttcaggtaactcctctttg

SEQ ID NO: 1774 - DNA, 393 bp, Homo sapiens
  misc_feature (54)..(54): n includes a, c, g, or t, or contains no nucleotide
  misc_feature (117)..(117): n includes a, c, g, or t, or contains no nucleotide
  misc_feature (211)..(214): n includes a, c, g, or t, or contains no nucleotide
  misc_feature (243)..(243): n includes a, c, g, or t, or contains no nucleotide
  misc_feature (250)..(271): n includes a, c, g, or t, or contains no nucleotide
gcttcctgaaccattaccagatgaaaaacccaaatggtccatacccttacactntgaagttgtgtttctccactgctcagcacgcctcctaattaggtgcctaggaagagtcccatntgagcaggaagacatttctctttcctttatgccattttttgtttttgttatttgcaaaagatcttgtattcctttttttttttttttttttttnnnnaaatgctaggtttgtagaggcttacttanccttaannnnnnnnnnnnnnnnnnnnnnggggagggagaggggaactgttatctcccaagattaaccttcacttttaaaaaattattgtacatgtgatttttttttttcctgttcatacatttgtgctgcccatgtactcttggcacatt

SEQ ID NO: 1775 - DNA, 611 bp, Homo sapiens
  misc_feature (62)..(62): n includes a, c, g, or t, or contains no nucleotide
  misc_feature (102)..(116): n includes a, c, g, or t, or contains no nucleotide
  misc_feature (193)..(193): n includes a, c, g, or t, or contains no nucleotide
  misc_feature (210)..(237): n includes a, c, g, or t, or contains no nucleotide
  misc_feature (317)..(317): n includes a, c, g, or t, or contains no nucleotide
  misc_feature (369)..(384): n includes a, c, g, or t, or contains no nucleotide
  misc_feature (386)..(415): n includes a, c, g, or t, or contains no nucleotide
  misc_feature (545)..(565): n includes a, c, g, or t, or contains no nucleotide
cagccaagggcacagggtcagcagaagctgtcctgcagaatgcctatcaagctatccataangaaatgagaggcacatcaggacagccccctgaagggtgtnnnnnnnnnnnnnnnattgtcagcaatcacaacctaacggacacagttcagaacaagcaactccaagccgtccttcaatgggtagctgcctntgagctcaatgtccctnnnnnnnnnnnnnnnnnnnnnnnnnnnnggatccaggagaagctacttcagctctcagctgctgctgtggacaaaggatgcagtgtgggcgaggttctgcagtcggtnctgcgctatgagaaggagcgccagctgaatgaggcggtggggaatgtcacannnnnnnnnnnnnnnnannnnnnnnnnnnnnnnnnnnnnnnnnnnnncccactgctttcccctcttctggcagtggggccggcccttatccccgcccttctttctcacttccacatctccccctctatatcctcacagagccctaacattatcttcacaccactctcatcaaagacnnnnnnnnnnnnnnnnnnnnntggattttgcagattttcctgtccatgcaagcaaggacgtaaaatt

SEQ ID NO: 1776 - DNA, 149 bp, Homo sapiens
cttcccacttcagctctgacttgaaggacctgctgcggaacctcctgcaggtagatctcaccaagcgctttgggaacctcaagaatggggtcaacgatatcaagaaccacaagtggtttgccacaactgactggattgccatctaccag

SEQ ID NO: 1777 - DNA, 343 bp, Homo sapiens
gcgccctgacccttcatctttgggcaggctcgagggcgcgcgcacggttggcgttctggggcctcaaactcctgggccttgaccgggcaggccgcgtctccccgggtgtgagtccaccgggacccggccgccgcctaagcgcgggcgccacagaagcggcggcgcccgaagacgcgctcctggctcggcccgacagcctcgcttggccgccagttcttctgcagccgaaggcggttgttcttttaaagaattattgaagacgaaggtttttttctttttatttttttaatggctttacagaatcttaaatagaatacagtttgacatgacggcaaaaaatgca

SEQ ID NO: 1778 - DNA, 619 bp, Homo sapiens
  misc_feature (165)..(242): n includes a, c, g, or t, or contains no nucleotide
  misc_feature (373)..(404): n includes a, c, g, or t, or contains no nucleotide
  misc_feature (441)..(580): n includes a, c, g, or t, or contains no nucleotide
aggtggtgtttgctcccgtgacagaggaacaggcccgggcgccctgcgtcgccaagctcggctttgagatcttcctcagctccttccagggcttcctggtcagcgtcctctactgcttcatcaacaaggaggtaggcagagacccggccgccgcccccgccctcnnnnnnnnnnnnnnnnnnnnnnnnnnnnnnnnnnnnnnnnnnnnnnnnnnnnnnnnnnnnnnnnnnnnnnnnnnnnnncactgccgcctgcgccgcagcctgggcgaggagcaacgccagctcccggagcgcgccttccgggccctgccctccggctccggcccgggcgaggtccccaccagccgcggcttgtcctcggggaccctccnnnnnnnnnnnnnnnnnnnnnnnnnnnnnnnngaaagttactgctagggggcgggatccccgtgtctgnnnnnnnnnnnnnnnnnnnnnnnnnnnnnnnnnnnnnnnnnnnnnnnnnnnnnnnnnnnnnnnnnnnnnnnnnnnnnnnnnnnnnnnnnnnnnnnnnnnnnnnnnnnnnnnnnnnnnnnnnnnnnnnnnnnnnnnnnnnncaaaacatcaagttccacacacgctatggaatggttatg

SEQ ID NO: 1779 - DNA, 546 bp, Homo sapiens
  misc_feature (40)..(105): n includes a, c, g, or t, or contains no nucleotide
  misc_feature (419)..(419): n includes a, c, g, or t, or contains no nucleotide
acttgtctgtgcagactaagaagaagacggtgcgctcccnnnnnnnnnnnnnnnnnnnnnnnnnnnnnnnnnnnnnnnnnnnnnnnnnnnnnnnnnnnnnnnnnnggggctcctccagggtcagaatcttttccaggtttccagaagacatgatgatgctgaagaaaagtgccttcaaaaaactcatcaaattctacagcgtccccagctttcctgaatgcagctctcaatgtggactccagctgccctgttgccctctgcaggccatggtttagacacagggccttcagccagagtctgaggatatacttcagggactctgtgaacccctcacaattgtatgccaactttgtgtgcttatgtgtacatgcatttttcttggggcgagttcataattttaatcaaattctcataggggntcatgacccacaataggatacaaacgaagagtttaagccagcatgatccagatgggttcagcagtctggtcagtgagaaagggccgagggtagacaggcagcttctgtggttcagcttgtgacatga

SEQ ID NO: 1780 - DNA, 114 bp, Homo sapiens
tttaaacctttgtgtcgtgttgcagcagagtgacgatgggggttggggggttatttattttgcctgtccttatccctgcttggacacctgagcatctgattcctgtccccctgg

SEQ ID NO: 1781 - DNA, 332 bp, Homo sapiens
  misc_feature (27)..(93): n includes a, c, g, or t, or contains no nucleotide
  misc_feature (244)..(244): n includes a, c, g, or t, or contains no nucleotide
tccagcactaaagtaatggaactttgnnnnnnnnnnnnnnnnnnnnnnnnnnnnnnnnnnnnnnnnnnnnnnnnnnnnnnnnnnnnnnnnnnnctaacagcatctcagggaatgtccatctggagctggcaagacccctgcagacctcatagagcctcatctggtggccacagcagccaagcctagagccctccggatcccatccaggcgcaaagaggaataggagggacatggaaccatttgncctctggctgtgtcacagggtgagccccaaaattggggttcagcgtgggaggccacgtggattcttggctttgtacaggaagatctac

SEQ ID NO: 1782 - DNA, 600 bp, Homo sapiens
  misc_feature (29)..(32): n includes a, c, g, or t, or contains no nucleotide
  misc_feature (56)..(56): n includes a, c, g, or t, or contains no nucleotide
  misc_feature (66)..(66): n includes a, c, g, or t, or contains no nucleotide
  misc_feature (74)..(74): n includes a, c, g, or t, or contains no nucleotide
  misc_feature (117)..(118): n includes a, c, g, or t, or contains no nucleotide
  misc_feature (122)..(122): n includes a, c, g, or t, or contains no nucleotide
  misc_feature (549)..(549): n includes a, c, g, or t, or contains no nucleotide
ctgccaagttgcacgcgcttagaacggannnntttgcacagcatgagcaaggggcngctgcgggcngcacgacnatcagcaccctagaccagaagctgcgtctggtcacttccgacnnccancagctaatcttggcttttctccaagtctacgacgacgagctgggcgagtgctgccagcgcccaggccctgacctccacccgtgcggccccatcatccaggccacgcaccagaatctgacttcctacagccaactgctgcaagtggtcatggcagttgctgacacctctgcgaaggccgtggagaccgtgaagaagcagcaaggcgagcagatctgctggggtggcagcagctccgtcatgagtctagctaccaagatgaatgaactaatggagaaatagaaagtcttcagtgatggcctacgccaaagcacaggatggggcgggcaggaagccctctcccaagatcgagttggccgaggatggatgattgtggcagcagaagccgttgcagccccacgttgtgctctaggcagggacctttggcccntttggggagggagagacagacgggcggtttgacttggacacaaagaaagcc

SEQ ID NO: 1783 - DNA, 397 bp, Homo sapiens
  misc_feature (178)..(203): n includes a, c, g, or t, or contains no nucleotide
  misc_feature (317)..(317): n includes a, c, g, or t, or contains no nucleotide
  misc_feature (339)..(342): n includes a, c, g, or t, or contains no nucleotide
ccagcataacttggaaacaggtatctgacctattcttatttagttaacacaagtgtgattaatttgatttctttaattccttattgaatcttatgtgatatgattttctggatttacagaacattagcacatgtaccttgtgcctcccattcaagtgaagttataatttacactgagnnnnnnnnnnnnnnnnnnnnnnnnnngatatattatttatttatgcactgtactgtatttttatattgctgtttaaaacttttaagctgtgcctcacttattaaagcacaaaatgttttacctactccttatttacgacncaataaaataacatcaatagannnntaggctgaattaatttgaaagcagcaatttgctgttctcaaccattctttcaagg

SEQ ID NO: 1784 - DNA, 563 bp, Homo sapiens
  misc_feature (48)..(86): n includes a, c, g, or t, or contains no nucleotide
  misc_feature (129)..(129): n includes a, c, g, or t, or contains no nucleotide
  misc_feature (131)..(133): n includes a, c, g, or t, or contains no nucleotide
  misc_feature (135)..(137): n includes a, c, g, or t, or contains no nucleotide
  misc_feature (139)..(141): n includes a, c, g, or t, or contains no nucleotide
  misc_feature (144)..(149): n includes a, c, g, or t, or contains no nucleotide
  misc_feature (151)..(152): n includes a, c, g, or t, or contains no nucleotide
  misc_feature (154)..(161): n includes a, c, g, or t, or contains no nucleotide
  misc_feature (163)..(165): n includes a, c, g, or t, or contains no nucleotide
  misc_feature (167)..(175): n includes a, c, g, or t, or contains no nucleotide
  misc_feature (179)..(179): n includes a, c, g, or t, or contains no nucleotide
  misc_feature (182)..(182): n includes a, c, g, or t, or contains no nucleotide
  misc_feature (184)..(184): n includes a, c, g, or t, or contains no nucleotide
  misc_feature (186)..(186): n includes a, c, g, or t, or contains no nucleotide
  misc_feature (188)..(189): n includes a, c, g, or t, or contains no nucleotide
  misc_feature (191)..(197): n includes a, c, g, or t, or contains no nucleotide
  misc_feature (207)..(208): n includes a, c, g, or t, or contains no nucleotide
  misc_feature (210)..(210): n includes a, c, g, or t, or contains no nucleotide
  misc_feature (212)..(212): n includes a, c, g, or t, or contains no nucleotide
  misc_feature (214)..(243): n includes a, c, g, or t, or contains no nucleotide
  misc_feature (248)..(284): n includes a, c, g, or t, or contains no nucleotide
  misc_feature (514)..(533): n includes a, c, g, or t, or contains no nucleotide
attgcttcaacagtgcttggcccccgccagcttgtcccagccactctnnnnnnnnnnnnnnnnnnnnnnnnnnnnnnnnnnnnnnnccgtcacaaaaaaaaaatcaccagctgccatagacacgggggnannntnnngnnnccnnnnnnannannnnnnnnannngnnnnnnnnngggnaangnangnngnnnnnnnccatgttccnngntncnnnnnnnnnnnnnnnnnnnnnnnnnnnnnncttannnnnnnnnnnnnnnnnnnnnnnnnnnnnnnnnnnnntgtctttagcaagcaggtttcactgcttcattagaagaggacaagtcaaaagtgaatcatttttcactacttaaggaataaatccaagagctttccagagactggctgctgcagccctgggaatgtctgtggaattactatgtggaaatggaactttgtgttatgctctagacattacagttatttgagtgttactcgttactgttgaggtcagtgcttcgtggcaaatnnnnnnnnnnnnnnnnnnnnctctgctgcccttgttttgctgcatgttaa

SEQ ID NO: 1785 - DNA, 247 bp, Homo sapiens
  misc_feature (31)..(71): n includes a, c, g, or t, or contains no nucleotide
aatgacgctgactccgctgacatcagcaccnnnnnnnnnnnnnnnnnnnnnnnnnnnnnnnnnnnnnnnnnggaaacaattcaggaccaactggtgggctccgaaaagctcttttatgaagaagatgaggcaggctctgctacgtcctgcctgtgaaagaatctcttcaggaaaccagagcttccctcatttaccttttctcctacaaagggaagcagcctggaagaaacagtccagtacttgaccc

SEQ ID NO: 1786 - DNA, 576 bp, Homo sapiens
atccccatgagtttggcccgcagagtcaaaaaggacaccaagtttcgggattttttcctccctaagggcaccgaagtgttccctatgctgggctccgtgctgagagaccccagtttcttctccaacccccaggacttcaatccccagcacttcctggatgacaaggggcagtttaagaagagtgatgcttttgtgcccttttccatcggaaagcggtactgtttcggagaaggcctggccagaatggagctctttctcttcttcaccaccgtcatgcagaacttccgcctcaagtcctcccagtcacctaaggacattgacgtgtcctccaaacacgtgggctttgccacgatcccacgaaactacaccatgagcttcctgccccgctgagcgagggctgtgccggtgcaggtctggtgggcggggccagggaaaggcggggtcagggcggggttcgcggaagaggcgggtataagaatggggggaagatgcgggaaaggaaggggcgtggtggctagagggaagagaagaaacagaaggggctcagttcaccttgataaggtgcttccgtggtgg

SEQ ID NO: 1787 - DNA, 367 bp, Homo sapiens
  misc_feature (120)..(120): n includes a, c, g, or t, or contains no nucleotide
  misc_feature (181)..(198): n includes a, c, g, or t, or contains no nucleotide
tttctgaaagcagcatgaatatatcacctaacatcctgacaataaattccatccgttgttttttttgtttgtttgttttttcttttcctttaagtaagctctttattcatcttatggtgnagcaattttaaaatttgaaatattttaaattgtttttgaactttttgtgtaaaatatatcnnnnnnnnnnnnnnnnnntttcttttgtttttcattttgtacaactttcttgaatttagaaattacatctttgcagttctgttaggtgctctgtaattaacctgacttatatgtgaacaattttcatgagacagtcatttttaactaatgcagtgattctttctcactactatctgtattgtggaat

SEQ ID NO: 1788 - DNA, 210 bp, Homo sapiens
ctttctctgtaatgccattggcgccagcctgttgtgctgaggttgacaataagagaacagacttgggaggaggaatagggcaggcaagattctggtggcttctgcgtggtcacctgtgccatctcatgccagatttcagagcagggaacatttcagaggtggagaagtggctctgtcatagagatcacagaagcacagatggttacggtg

SEQ ID NO: 1789 - DNA, 453 bp, Homo sapiens
  misc_feature (155)..(170): n includes a, c, g, or t, or contains no nucleotide
  misc_feature (291)..(322): n includes a, c, g, or t, or contains no nucleotide
gccgtggtttgtattcattgtgcatatcagggataccctcaagctggactgtgggttccaaattactcatagaggagaaaaccagagaaagatgaagaggaggagttaggtctatttgaaatgccaggggctcgctgtgaggaataggtgaaaannnnnnnnnnnnnnnnctttgagagactagactgaccccacccttccttcagtgagcagaatcactgtggtcagtctcctgtcccagcttcagttcatgaatactcctgttcctccagtttcccatcctttgtcccnnnnnnnnnnnnnnnnnnnnnnnnnnnnnnnncccctccccaccacgtcatgatggatggggcaaggtggtggggactaggggagcctggtatacatgcggcttcattgccaataaatttcatgcactttaaagtcctgtggcttgtgacctcttaataaagt

SEQ ID NO: 1790 - DNA, 429 bp, Homo sapiens
  misc_feature (389)..(403): n includes a, c, g, or t, or contains no nucleotide
gcccgtgtggagtccaaagtccttccctaacgaagtggagcctgagggtacagggaaggagaaagactgggatctcagagaccagctgcaaaagaagactttgcagctccaggccaaggaaaaggagtgcagagaactgcattcagaattagacaacctcagtgacgagtatctctcctgcctgcgtaagctgcagcactgtcgagaagagctgaaccagagccagcagctgcctcccagaaggcaatgtgggcgatggctcccagtgctgatggtggtgattgctgcagcactggcagtgttcctggccaataaagacaacctgatgatctgaataatttgtgacaactgccttgggtgaaaatcagaagcaagcaactcagcgaaannnnnnnnnnnnnnnggtacattacagcttgggttttccaa

SEQ ID NO: 1791 - DNA, 103 bp, Homo sapiens
gtatttgagtctcactccctgatgtacttggcacgttggagaagctttcagtgcaaatacctactttcgctgcagatcagactccttgcctgagagagagaat

SEQ ID NO: 1792 - DNA, 493 bp, Homo sapiens
gaagacctttgctctgctgctgctgtccctgttcctggcagtgggactaggagagaagaaagagggtcacttcagcgctctcccctccctgcctgttggatctcatgctaaggtgagcagccctcaacctcgaggccccaggtacgcggaagggactttcatcagtgactacagtattgccatggacaagattcaccaacaagactttgtgaactggctgctggcccaaaaggggaagaagaatgactggaaacacaacatcacccagagggaggctcgggcgctggagctggccagtcaagctaataggaaggaggaggaggcagtggagccacagagctccccagccaagaaccccagcgatgaagatttgctgcgggacttgctgattcaagagctgttggcctgcttgctggatcagacaaacctctgcaggctcaggtctcggtgactctgaccacacccagctcaggactcgattctgcccttcact

SEQ ID NO: 1793 - DNA, 132 bp, Homo sapiens
tcacatctgctgctggcctcggtgggctctgactgcggggctcacgggcctggggccatggctttcttctcggcccccaaatgcctttcctggagtggctaagcctctcctgacgaggctcctcatgcgggg

SEQ ID NO: 1794 - DNA, 399 bp, Homo sapiens
  misc_feature (317)..(338): n includes a, c, g, or t, or contains no nucleotide
tcatcctagtcttgggtcttcaccgcctccttccaaatacccaccctgccagcagccctaggtcttcctgttctgaccccccatcactgctcgttcagccttctagacgtctctctcgtggacatctgttctttagctgttggctttctctgaggtgtgagagggtctatgaactttgtgaatttcccatggccccagtgaaggagcccagataatcccagtagctgttacctgtctccatgtatcaaaggacacagtccagggggagggtggaaggagatgtggtttctctatagtgcaacaaacatggtttctcnnnnnnnnnnnnnnnnnnnnnnagggtctggcggcttggtaggtgggtttcaggagcagtcactattgtaggatgggcttcca

SEQ ID NO: 1795 - DNA, 219 bp, Homo sapiens
  misc_feature (78)..(101): n includes a, c, g, or t, or contains no nucleotide
tcagcatgcaagcagcgcctgctgtctcccgatgcctgcagggaggaaaatgtctgtgaaggacactttaatgaaggnnnnnnnnnnnnnnnnnnnnnnnnaagctgagttcactgtggcaggcaggaagcagagaagctcctgcccgccaaacccactgcacaggtggctgctgctggtatcagattctcctttttaagtgtcaatttctgttcacag

SEQ ID NO: 1796 - DNA, 474 bp, Homo sapiens
  misc_feature (101)..(195): n includes a, c, g, or t, or contains no nucleotide
cacatgacttattatgcatgttatgatcagtagttgattttgagaaagctctatgagctctaagtaactgcatggttttttgtttaatgtaatataggagnnnnnnnnnnnnnnnnnnnnnnnnnnnnnnnnnnnnnnnnnnnnnnnnnnnnnnnnnnnnnnnnnnnnnnnnnnnnnnnnnnnnnnnnnnnnnnnagaatttacgaaatgtaaatgacctctacagagttttatggaatacctggtactaacgtaggcagctgcaaaaccacactgagttacagctgtcagccctcctcattcctaaataacttgccttacatatcagccctcccacttctgaagttcaaattagtgcctcggaaatgtagaatttattatttgtcatttttttttttttagcatagattgagaacagttgaactcttaaatcctcagatgccaggggtctgctctagcatcagtaagtattta

SEQ ID NO: 1797 - DNA, 380 bp, Homo sapiens
  misc_feature (249)..(275): n includes a, c, g, or t, or contains no nucleotide
  misc_feature (293)..(346): n includes a, c, g, or t, or contains no nucleotide
ttttcctcagctgccgccaaggtgctcggtccttccgaggaagctaaggctgcgttggggtgaggccctcacttcatccggcgactagcaccgcgtccggcagcgccagccctacactcgcccgcgccatggcctctgtctccgagctcgcctgcatctactcggccctcattctgcacgacgatgaggtgacagtcacggaggataagatcaatgccctcattaaagcagccggtgtaaatgttgagnnnnnnnnnnnnnnnnnnnnnnnnnnngccctggccaacgtcaannnnnnnnnnnnnnnnnnnnnnnnnnnnnnnnnnnnnnnnnnnnnnnnnnnnnntgctgcaccagcaggaggtcctgccccctccact

SEQ ID NO: 1798 - DNA, 434 bp, Homo sapiens
  misc_feature (177)..(177): n includes a, c, g, or t, or contains no nucleotide
ccagtgggaaactgccccagcttctcccaccatagggggccggacccccatcaccagcctaggatccaggggctgcctctggcctcttagggagcagagagcagaactccgcagcccagcccagaggagtgtcacctcccacctttggagaggaatccttccctcccctggacaaangttgctgacaagctgctgaagtggcctctccatattccagctgagcctgaatctgactcttgagggttggggctgcacttatttattgcggggagacagctctctctcccacctcctccccagatgggaggagagcctgaggcccaagcaggacccgggggttccagcccctagctgctctggagtgggggaggttggtggaccatggagtccctggtgctgcccctcaggtgggacccaggcgttctcagctgtac

SEQ ID NO: 1799 - DNA, 296 bp, Homo sapiens
  misc_feature (61)..(61): n includes a, c, g, or t, or contains no nucleotide
  misc_feature (128)..(129): n includes a, c, g, or t, or contains no nucleotide
  misc_feature (131)..(133): n includes a, c, g, or t, or contains no nucleotide
tatagatatattccaagccgcctgacgatctaattgtaaaaagtaaagcatacaaatactnagaagaaaatggaggaaaacgacattatatgtgacttaaaacctagaagaaataaataaaactattnntnnnttttaactacataaaaatgtttataggacaagaaaaaccccaccataacccaaggcaaacaatgtattgacaggattccaataattaagaatacttcatacaaaaagaaatgtaaatgacctttaacatgtaaagatgctcaccttgttcagaagagaataaa

SEQ ID NO: 1800 - DNA, 544 bp, Homo sapiens
  misc_feature (113)..(176): n includes a, c, g, or t, or contains no nucleotide
ggtcagttatccttctctccttagccacataacttcttctctcatgaatcatccagtcattccaatggcaaataagttctcctcacctacccttgagctgcaaggtgaattcnnnnnnnnnnnnnnnnnnnnnnnnnnnnnnnnnnnnnnnnnnnnnnnnnnnnnnnnnnnnnnnnaggtgggcaatgggcactccaatgaggcagccttgatcctccacagaaaagggtttgattgtcggttctctagcaaaggcacagggctgttttgttctactactcagggaaagatattggtacagaaacttttaaacaagtttattgtcgaaagtctcacaccttcatcactatccttgatgcattcacctcccggcactcagaatataagtgagatcaacttgagtccaatggaaatcagcacattccgaatccagttgaggtgaacctgactttcacatttggattgagaatcattggcttttatacctttcttggtttgacgtgcaataaagaagcacattattttagcttctggctactgtgag

SEQ ID NO: 1801 - DNA, 258 bp, Homo sapiens
tcccaccagctctgcctatggaatagtcattcttttattcctctactttcttaaaaaacttgctttcaccttactctatggactcgccctgaattctttcttgtgcaagatccaagaaccctctcttgggtctggatcgggacctctttcctgtaacactgggaggccaatgtgtgtggatgacatggaattactcaaaatgatctaggttcatttgtttcgacataccttataaagcaagccacagggttgtctgaa

SEQ ID NO: 1802 - DNA, 529 bp, Homo sapiens
  misc_feature (43)..(65): n includes a, c, g, or t, or contains no nucleotide
  misc_feature (480)..(495): n includes a, c, g, or t, or contains no nucleotide
cttctgttctgcaagtttgatgggtaagaggtagccttttttnnnnnnnnnnnnnnnnnnnnnnnctgttccaggaaagaatctctaagactgggtagctcacagccagccaaaggcagctacatttccacagaagcccgtccgctgcctccgtggcttctccagccattgaactggtcccacacgcaccccaggccccactcctcggcagtttcaggtgtagctgtggggcccgttcctaggtctgtactcactttagggaggcttcactgactaggctttcctcctgcatgttgaatttccttcagctttaagaggaagagtggaataaatattctaagtgatttaatgcactttgacttgtataaaactttctgtgttagcgacggtatctatagccctttatacgagcgatggatcttgagctctccttccatgttgtaaatagggattgtattcttgaaaactgctgtagcaaannnnnnnnnnnnnnnntacactttttgattaaagctcttcaatccagatg

SEQ ID NO: 1803 - DNA, 274 bp, Homo sapiens
tgacatatcaagtatatgggctggccttggaagggcagaccccagtgaccaccgtaccaccaggtgctcgctggctgacgcaggaggaatttcacaccgcagctgtttccaccgccatgaaaaaggttttccgtgtgtatcagggccaacagccagggacctgtatgggttccaaaaggtcccaggtgtcctctccgtgcagtcggaaaaagccccgcatgggccagcaagtcctggataatttctttcggtctcacatctccactgatgcaca

SEQ ID NO: 1804 - DNA, 483 bp, Homo sapiens
  misc_feature (254)..(254): n includes a, c, g, or t, or contains no nucleotide
  misc_feature (262)..(262): n includes a, c, g, or t, or contains no nucleotide
cctctgtgaatgtacaggcggaactgtacgaacagctcccttccatccatttttaactctttcggaaataacacctcacagcagcttcgtgcttttgtacagacctttgtaacaagtgtacagaaaactcattttgtttgagaaacaggagttgatgaacccatcatgctggtttttctctgagcacaaagttttaggctgtacacagccagccttgggaatctcgttgagcgttcggcgtggatccacggggnccaggccnccctgcgggagcgccacacgcatccacttcggattcagtgggtgaagacagaactctgagagtctgcaggcggctcctgtgctttttatttctggctcttcggatgtcttctagacatttactatcactgcacctgaagaaaaaatcacttttaccttcctaatttaaaaagacaaaacagaaatgtacgttccttcgctagctttagtctttctgttccc

SEQ ID NO: 1805 - DNA, 545 bp, Homo sapiens
  misc_feature (105)..(119): n includes a, c, g, or t, or contains no nucleotide
  misc_feature (269)..(271): n includes a, c, g, or t, or contains no nucleotide
  misc_feature (274)..(274): n includes a, c, g, or t, or contains no nucleotide
  misc_feature (276)..(277): n includes a, c, g, or t, or contains no nucleotide
  misc_feature (279)..(279): n includes a, c, g, or t, or contains no nucleotide
  misc_feature (283)..(319): n includes a, c, g, or t, or contains no nucleotide
  misc_feature (325)..(325): n includes a, c, g, or t, or contains no nucleotide
  misc_feature (332)..(332): n includes a, c, g, or t, or contains no nucleotide
  misc_feature (343)..(343): n includes a, c, g, or t, or contains no nucleotide
  misc_feature (348)..(348): n includes a, c, g, or t, or contains no nucleotide
  misc_feature (351)..(353): n includes a, c, g, or t, or contains no nucleotide
  misc_feature (357)..(359): n includes a, c, g, or t, or contains no nucleotide
  misc_feature (367)..(367): n includes a, c, g, or t, or contains no nucleotide
  misc_feature (373)..(374): n includes a, c, g, or t, or contains no nucleotide
  misc_feature (376)..(376): n includes a, c, g, or t, or contains no nucleotide
  misc_feature (379)..(380): n includes a, c, g, or t, or contains no nucleotide
  misc_feature (382)..(382): n includes a, c, g, or t, or contains no nucleotide
  misc_feature (388)..(388): n includes a, c, g, or t, or contains no nucleotide
  misc_feature (390)..(391): n includes a, c, g, or t, or contains no nucleotide
  misc_feature (397)..(397): n includes a, c, g, or t, or contains no nucleotide
  misc_feature (399)..(399): n includes a, c, g, or t, or contains no nucleotide
  misc_feature (402)..(403): n includes a, c, g, or t, or contains no nucleotide
  misc_feature (447)..(447): n includes a, c, g, or t, or contains no nucleotide
  misc_feature (451)..(451): n includes a, c, g, or t, or contains no nucleotide
agtcctgccagacacatggcactctccgagctgggaaagctaacctggagctggcagagggtcctagcccacctcaagctgctagcccgcgcctagcatccatcnnnnnnnnnnnnnnncataaatggggtccccctccctgtccagccgtcgcctcctgcccccaccttcttgcgctgcttgtgcgaggagtcgtgcaggttagagaggcagccagatcccagaatggtgcgcaccgacgctggccagtggaccgacaccagccggtnnntcncnnancaannnnnnnnnnnnnnnnnnnnnnnnnnnnnnnnnnnnnacggtngggccgnccgaacagatngcgtnttnnntagnnntgaagccntatttnncntgnngnttcatntnngcaggnanttnntccgctgtgggaggaaggcggaggagagaagtgggcatgagggngcgnccggggagcgccgcgtcccgccagccctgctcctagccgcaatagcatgcctcccgggggcgcctaccccgacttcagcagaagcccagagccg

SEQ ID NO: 1806 - DNA, 433 bp, Homo sapiens
gcatctttcagattcacacaagcaggatgacgctggctgatgatgtaaccctggacgacctgatcatggctaaagatgacctctctggtgctgacatcaaggcaatctgtacagaagctggtctgatggccttaagagaacgtagaatgaaagtaacaaatgaagacttcaaaaaatctaaagaaaatgttctttataagaaacaggaaggcacccctgaggggctgtatctctaatgaaccatggctgtcatcaggaaaatggttgggagatttctcaatccctgaaagggatgaggttgggggagttgcccagaggaatccctgttcccactgatttttattagcaaaacatcctgtgtcttttggagtacgatgtgtaagtgcccattgggtggcctgttggtcactgtgcagcagtctgcttcccaata

SEQ ID NO: 1807 - DNA, 224 bp, Homo sapiens
  misc_feature (89)..(89): n includes a, c, g, or t, or contains no nucleotide
  misc_feature (91)..(91): n includes a, c, g, or t, or contains no nucleotide
aatcgttatatctgtaagcaacagctcatttaaatgtttcttggggcagagaaggtggagagtaaagacccaacattactaacaatgananagttgcatgttatattattactaattgtctacttctggagtctataaaatgtttttaaacagtgtcatatacaattgtcatgtatgtgaaacaatgtgttttaaaattgatgaaattcgttcacctacatttg

SEQ ID NO: 1808 - DNA, 546 bp, Homo sapiens
  misc_feature (147)..(147): n includes a, c, g, or t, or contains no nucleotide
  misc_feature (163)..(232): n includes a, c, g, or t, or contains no nucleotide
acttctttaggatgttattcagccatcaaaaaaaaacccaactaaaatgtcttaccagtaaagtattattaaaagcctcatttgtggagattcgctgacttccttggttaagctgtcttgtatttacttaatttgtcccctcaaccnaggtgttttcttttcnnnnnnnnnnnnnnnnnnnnnnnnnnnnnnnnnnnnnnnnnnnnnnnnnnnnnnnnnnnnnnnnnnnnnntccctgacaatatctttggcattaatacgacataaagacaagacagtatatgtatgttttcattcctgttttgtacgagtgcctcattttgtagtcatgaaagtaacatagtaccttaaataaaaatgtaatgactaatctaaggtctaggaataactattgtagaagctaagtagaacacttagtttggggtgtcaattttctatcaacgcaaacaccttagggtacccagaccaattttatgtatatatattctgaaatgctccctttttaatgtggtcatttgttgccttctaagttgagaggacaaaact

SEQ ID NO: 1809 - DNA, 571 bp, Homo sapiens
cacggtcattagaccatttccaggacttgtgattaataaccagctggttgatcagagtgagtcaaaaggccccgtgatacaagaatcagctgaaccaagccagttggaagttccagccacagaagaaataaaagagactgatggaagctctcagatcaagcaagaaccagaccccacgtggtagacctcttccctcctaggcttaaagtatcagtggttgagaagagcttttcggacctgttactaccccaagctgtgtaatatacttgtataacagaaataccttctatacaaacctttttttctacttttagatagaaatgtctactttttcagcagttctgtgaattaaagagcagagtgactgtgggtctggaatggctggtgtacttgggaatgtactatcaggattttacagcaatgctgggaaatgacagggaaaatgacaggaatgaatctcaccagattttttatgtactcagcagagccttgagttacggtgtttattttccaatcaagtgaagatatctcctacttctcctactggaacatctcagcttctgcagtgaag

SEQ ID NO: 1810 - DNA, 407 bp, Homo sapiens
  misc_feature (68)..(90): n includes a, c, g, or t, or contains no nucleotide
  misc_feature (129)..(172): n includes a, c, g, or t, or contains no nucleotide
  misc_feature (212)..(227): n includes a, c, g, or t, or contains no nucleotide
  misc_feature (266)..(266): n includes a, c, g, or t, or contains no nucleotide
ctccgtgtatctgagggagtaaaggtgaggtctttattgcttcactgcctaattttctcacccacatnnnnnnnnnnnnnnnnnnnnnnngggccagtagccagccaaccccgtggggaccggggttgnnnnnnnnnnnnnnnnnnnnnnnnnnnnnnnnnnnnnnnnnnnnagggtcgctgctgtggaaggggtctccgttcttggtgctnnnnnnnnnnnnnnnntagagagaagcttgtgtttttgtttgtaatggggagaancgtggccaggcaggtggcacgtggcatcgcatggtgggctcggcagcaccttgcctgtgtttctgtgagggaggctgctttctgtgaaatttcatttatatttttctatttttagtactgtatggatgttactgagcacta

SEQ ID NO: 1811 - DNA, 502 bp, Homo sapiens
  misc_feature (103)..(103): n includes a, c, g, or t, or contains no nucleotide
  misc_feature (105)..(151): n includes a, c, g, or t, or contains no nucleotide
  misc_feature (412)..(426): n includes a, c, g, or t, or contains no nucleotide
  misc_feature (456)..(470): n includes a, c, g, or t, or contains no nucleotide
tgacatctgatgcatgtgcagcagtggggagttctagattgatctctgaatgtgatcgacgcccagcaaggacaagctttaaaatgtctgcggtctgcccttntnnnnnnnnnnnnnnnnnnnnnnnnnnnnnnnnnnnnnnnnnnnnnnnactgcaggttctctaggaggcattccagaatagagtagcacactgtgtctgcagttctcgatgaccgaaagttatcaaaaatatttaaaatatttaaattgtgaacctattgataaagaatatttataaaaactgatctgtaggcctgtactaatctctacgcattagcaatattgactgtaaacccacattaaggaaaccactacgggtctggcagtgcgtgtcccgtggggtgtgcattttaaaactcgattcatagannnnnnnnnnnnnnnccatttccgtcatggtgaagcaaatgaatnnnnnnnnnnnnnnntgtggtcgcgtgctacaggtttgacaaaaaga

SEQ ID NO: 1812 - DNA, 499 bp, Homo sapiens
  misc_feature (49)..(49): n includes a, c, g, or t, or contains no nucleotide
  misc_feature (112)..(112): n includes a, c, g, or t, or contains no nucleotide
  misc_feature (204)..(259): n includes a, c, g, or t, or contains no nucleotide
tggacatgaccgtatccctctgccacaccccaggccctgcgaggggctnatcgagaggagctcactgtgggatggggttgacctctgccgcctgcctgggtatctgggcctnggccatggctgtgttcttcatgtgttgattttatttgacccctggagtggtgggtctcatctttcccatctcgcctgagagcggctgagggnnnnnnnnnnnnnnnnnnnnnnnnnnnnnnnnnnnnnnnnnnnnnnnnnnnnnnnnaatgaccaggggccagccagtgtctgaccaaggtcaaggggcaggtgcagaggtggcagggatggctccgaagccagaaatgccttaaactgcaacgtcccgtcccttccccacccccatcccatccccacccccagccccagcccagtcctcctaggagcaggacccgatgaagcgggcggcggtggggctgggtgccgtgttactaactctagtatgtttctgtgtcaatcgctgtga

SEQ ID NO: 1813 - DNA, 556 bp, Homo sapiens
ttgctcggaagaagcctccaatgaacagtatgcggggtggtctgccaccccgtgagggcagaggcatgccaccaccactccgtggaggtccaggaggcccaggaggtcctgggggacccatgggtcgcatgggaggccgtggaggagatagaggaggcttccctccaagaggaccccggggttcccgagggaacccctctggaggaggaaacgtccagcaccgagctggagactggcagtgtcccaatccgggttgtggaaaccagaacttcgcctggagaacagagtgcaaccagtgtaaggccccaaagcctgaaggcttcctcccgccaccctttccgcccccgggtggtgatcgtggcagaggtggccctggtggcatgcggggaggaagaggtggcctcatggatcgtggtggtcccggtggaatgttcagaggtggccgtggtggagacagaggtggcttccgtggtggccggggcatggaccgaggtggctttggtggaggaagacgaggtggccctggggggccccctggacctttgatggaacagat

SEQ ID NO: 1814 - DNA, 253 bp, Homo sapiens
  misc_feature (56)..(78): n includes a, c, g, or t, or contains no nucleotide
  misc_feature (85)..(85): n includes a, c, g, or t, or contains no nucleotide
  misc_feature (87)..(87): n includes a, c, g, or t, or contains no nucleotide
  misc_feature (119)..(119): n includes a, c, g, or t, or contains no nucleotide
  misc_feature (177)..(177): n includes a, c, g, or t, or contains no nucleotide
  misc_feature (188)..(188): n includes a, c, g, or t, or contains no nucleotide
  misc_feature (199)..(199): n includes a, c, g, or t, or contains no nucleotide
gaaataactgctctgtccagtgagatagaaagtgagcaagagatgaaagaaatggnnnnnnnnnnnnnnnnnnnnnnnataagcncnaagagagagcctccaggaggaactcaagaggnaaaaaatccagtacttgactcgtggagaggagtcttcgtccgataccaataagtcagncctgatgctcnaatggaaaaanggccctcttcaagcctggtgaggaaatgcttcagatgaggctccaccttgttaa

SEQ ID NO: 1815 - DNA, 397 bp, Homo sapiens
cctgcagtttgctcctggacagcagcctctccagcaactgggatgacgacagcctagggccttcactctcccctgaggctgtcctggcccggactgtggggagcacctccaccccccggagcaggtgcacacccagggatgccctggacctaagtgacatcaactcagagcctcctcggggctccttcccctcctttgagcctcggaacctcctcagcctgtttgaggacaccctagacccaacctgagccccagactctgcctctgcacttttaaccttttatcctgtgtctctcccgtcgcccttgaaagctggggcccctcgggaactcccatggtcttctctgcctggccgtgtctaataaaaagtatttgaaccttgggagcacccaagctt

SEQ ID NO: 1816 - DNA, 243 bp, Homo sapiens
  misc_feature (162)..(163): n includes a, c, g, or t, or contains no nucleotide
cattcatcatgagtttctttgatgttctggctgttccggtgtgcctatgttttctgataagggcataaatacacttagtttaatattaatttagcctttgtaagcagcacttgaagggacttaagtattcaataaattgtagttatgataattaatggaaanngagggttggtcctttccaatattaagctaaagtggaattgcattatgattaatgatatacatgatgtgcaatgtctagtc

SEQ ID NO: 1817 - DNA, 325 bp, Homo sapiens
gtgctcagcatttggaagttactgttggagatctgacagtcattattacagactttaaggagaaaacaaagtcaccgcctgcatctagtgctgcctctgcagatcaacacagtcaaagcggctctagctctgataacacagagagaggaatgtccaggtcatcttcacccagaggagaagcctcatcattgaatggagaatctcattaaagtttattttctccaatttcttagtcacttctgtcctaccatgcaaatacacagattatgccaagaggtaccacattttcatgacagatacattcatgcacaatccataatttgag

SEQ ID NO: 1818 - DNA, 428 bp, Homo sapiens
  misc_feature (59)..(59): n includes a, c, g, or t, or contains no nucleotide
  misc_feature (80)..(81): n includes a, c, g, or t, or contains no nucleotide
  misc_feature (94)..(151): n includes a, c, g, or t, or contains no nucleotide
  misc_feature (200)..(200): n includes a, c, g, or t, or contains no nucleotide
gcaacttgttcgtgggtcatcgggaatactagggagaaggtttcattgcccccagggcncttcacagagtgtgctggagnnctgagtaagaaannnnnnnnnnnnnnnnnnnnnnnnnnnnnnnnnnnnnnnnnnnnnnnnnnnnnnnnnngtggccatttagccaccatctttgcaggttgctttgccctggtagggcngtaacattgggtcctgggtctttcatggggtgatgctgggctggctccctcttggtcttcccaggctggggctgaccttcctcgcagagaggccaggtgcaggttgggaatgaggcttgctgagaggggctgtccagttcccagaaggcatatcagtctctgagggcttcctttggggccgggaacttgcgggtttgaggataggagttcacttcatcttctcagctc

SEQ ID NO: 1819 - DNA, 534 bp, Homo sapiens
  misc_feature (30)..(30): n includes a, c, g, or t, or contains no nucleotide
  misc_feature (34)..(34): n includes a, c, g, or t, or contains no nucleotide
  misc_feature (49)..(49): n includes a, c, g, or t, or contains no nucleotide
  misc_feature (64)..(64): n includes a, c, g, or t, or contains no nucleotide
  misc_feature (87)..(92): n includes a, c, g, or t, or contains no nucleotide
  misc_feature (94)..(96): n includes a, c, g, or t, or contains no nucleotide
  misc_feature (98)..(101): n includes a, c, g, or t, or contains no nucleotide
  misc_feature (103)..(107): n includes a, c, g, or t, or contains no nucleotide
  misc_feature (109)..(111): n includes a, c, g, or t, or contains no nucleotide
  misc_feature (113)..(114): n includes a, c, g, or t, or contains no nucleotide
  misc_feature (117)..(119): n includes a, c, g, or t, or contains no nucleotide
  misc_feature (158)..(192): n includes a, c, g, or t, or contains no nucleotide
  misc_feature (314)..(358): n includes a, c, g, or t, or contains no nucleotide
  misc_feature (364)..(364): n includes a, c, g, or t, or contains no nucleotide
  misc_feature (378)..(383): n includes a, c, g, or t, or contains no nucleotide
  misc_feature (400)..(400): n includes a, c, g, or t, or contains no nucleotide
  misc_feature (406)..(407): n includes a, c, g, or t, or contains no nucleotide
  misc_feature (410)..(410): n includes a, c, g, or t, or contains no nucleotide
  misc_feature (412)..(413): n includes a, c, g, or t, or contains no nucleotide
  misc_feature (415)..(418): n includes a, c, g, or t, or contains no nucleotide
  misc_feature (422)..(423): n includes a, c, g, or t, or contains no nucleotide
  misc_feature (425)..(425): n includes a, c, g, or t, or contains no nucleotide
  misc_feature (427)..(427): n includes a, c, g, or t, or contains no nucleotide
  misc_feature (430)..(430): n includes a, c, g, or t, or contains no nucleotide
  misc_feature (435)..(435): n includes a, c, g, or t, or contains no nucleotide
  misc_feature (438)..(440): n includes a, c, g, or t, or contains no nucleotide
  misc_feature (442)..(442): n includes a, c, g, or t, or contains no nucleotide
gaccaaagccgtgaggatgaggacaactcnaccntccttccttccccanaggccaaccaaccanctgctgacaggggacctggccannnnnngnnnannnnannnnngnnngnnaannngcattactgcccctgtcctccccaccctgtcatgtgtgnnnnnnnnnnnnnnnnnnnnnnnnnnnnnnnnnnngctgtgggaaggaacctgcctggggccacaggtgcccactccccaccctgcaggacaggggtgtctgtggacactcccacacccaactctgctaccaagcaggcgtctcagctttcctcctnnnnnnnnnnnnnnnnnnnnnnnnnnnnnnnnnnnnnnnnnnnnnaatttntttttttggggggnnnnnnttttcctttttttaaanttaaannaantnntnnnnaaannanantanaaaanaannnanaaattgtagcaaaaggctcccttccacaggcaactttcccaccggtggggctctgcatccgcctctccctggtgttgcaatctggctgctga

SEQ ID NO: 1820 - DNA, 277 bp, Homo sapiens
  misc_feature (120)..(120): n includes a, c, g, or t, or contains no nucleotide
  misc_feature (129)..(129): n includes a, c, g, or t, or contains no nucleotide
  misc_feature (138)..(138): n includes a, c, g, or t, or contains no nucleotide
  misc_feature (151)..(151): n includes a, c, g, or t, or contains no nucleotide
tccactggacaaggttctgtcagttcttatcaaaaagctcggtactgcactacaggatgaaaaggaaaagaaaggcaaagacaaagaagaacactaaaaaagtaatttgatctgtgaacnaaattatgnattgtgtcngttttattacacnggagtgtttttttagtataataatttgaaatataactttaaaataattctaaatttgtggctataattaaaagtttgtaagttaacctgttctagttccatcattctgtgtacagtgaagtattgc

SEQ ID NO: 1821 - DNA, 554 bp, Homo sapiens
  misc_feature (462)..(462): n includes a, c, g, or t, or contains no nucleotide
  misc_feature (464)..(464): n includes a, c, g, or t, or contains no nucleotide
  misc_feature (467)..(470): n includes a, c, g, or t, or contains no nucleotide
  misc_feature (474)..(474): n includes a, c, g, or t, or contains no nucleotide
  misc_feature (476)..(480): n includes a, c, g, or t, or contains no nucleotide
  misc_feature (483)..(485): n includes a, c, g, or t, or contains no nucleotide
  misc_feature (504)..(518): n includes a, c, g, or t, or contains no nucleotide
ccataagcaaatttcttgtggtttgtacagatttgttaaaatgtgaacgttttctaactgcctcgtagggtagaaaccaatatttttcaggatgctgtatttcactcctgtaaggactttttctttattgtcacattcataatgctgatacttacatgtaagttgttcatgttgcagaaaaaggttatacgtaccacggattctctttaatattgtacagttaaactgtatttctgatgttgcaagccattttgttttttcattgtacatagacacattgtctctttaaaatgctgctgaaattgtagagagtatagccaaaacagtaataaacaatgacagttaaaatgtaaagactatgaaaattacattggaagggagctttcaagatggtaggatattgactaactgagctccttcacttaaaaatcagctgaataaattccttaagtatacttcaananaannnnaaantnnnnnaannngttaaagttaaacctaatnnnnnnnnnnnnnnnaactcctgggtaagtaacacttagaaccatcaagag

SEQ ID NO: 1822 - DNA, 144 bp, Homo sapiens
tccggggaaagctgggcgtcttctctgagatggaagccaacttcaagaacctgtcccgggggctggtgaacgtggccgccaagctgacccacaataaagatgtcagagacctgtttgtggacctcgtggagaagtttgtggaac

SEQ ID NO: 1823 - DNA, 413 bp, Homo sapiens
  misc_feature (357)..(358): n includes a, c, g, or t, or contains no nucleotide
tatgaagacttaaggcccagtatttttgaatacaatactcatctaggatgtaacagtgaagctgagtaaactataactgttaaacttaagttccagcttttctcaagttagttataggatgtacttaagcagtaagcgtatttaggtaaaagcagttgaattatgttaaatgttgccctttgccacgttaaattgaacactgttttggatgcatgttgaaagacatgcttttatttttttgtaaaacaatataggagctgtgtctactattaaaagtgaaacattttggcatgtttgttaattctagtttcatttaataacctgtaaggcacgtaagtttaagcttttttttttttnnaagttaatgggaaaaatttgagacgcaataccaatacttaggattttggtcttgg

SEQ ID NO: 1824 - DNA, 277 bp, Homo sapiens
ataactggatctaactgggtacctgagatattttacagctggacctagtttcacaatctgttgtctccagctctgcatatgtctggccagggggcttctaggaagtaggtttcatctatcaaatgtctcctctgacttccttttgaaacttactgctcttctgttttattttgttttgtttgaagctcagagggagatgggcaattgacagggatgcaatccagggtgggatttcttgaggaagttacaaataagcttgttacaacatcaagataga

SEQ ID NO: 1825 - DNA, 349 bp, Homo sapiens
  misc_feature (63)..(82): n includes a, c, g, or t, or contains no nucleotide
  misc_feature (179)..(179): n includes a, c, g, or t, or contains no nucleotide
  misc_feature (181)..(181): n includes a, c, g, or t, or contains no nucleotide
  misc_feature (251)..(265): n includes a, c, g, or t, or contains no nucleotide
tcgtgctatggttcccatacaatctcaccttgtttctgcatacgctgttggacctgcaagtannnnnnnnnnnnnnnnnnnnccagcatctagactacgcactccaggtaacagagagcatcgccttccttcactgctgcttttcccccatcctgtatgccttctccagtcaccgcttncnccagtacctgaaggctttcctggctgccgtgcttggatggcacctggcacctggcactgcccaggcctcnnnnnnnnnnnnnnntgagagcagcatacttactgcccaagaggaaatgactggcatgaatgaccttggagagaggcagtctgagaactaccctaacaa

SEQ ID NO: 1826 - DNA, 439 bp, Homo sapiens
  misc_feature (404)..(404): n includes a, c, g, or t, or contains no nucleotide
  misc_feature (413)..(414): n includes a, c, g, or t, or contains no nucleotide
ctgaacttgctttttgaggatatacagggatattaagtagacgcaggattgtttttgtttgtaaaaattctgaattgaaactttgttttaaaaaaaggcttctttctttcatatgacaagagataggtcaggaatattggaatcaagatttaaatgttaaaattcgattttgttacacagggtgtgttcatttgttttgtagcagacaagatctagatcccagacagaaacaacacatgctattctaaaaagccgcattttaaaaggcaccttggttctcaaaagaaatcagaatatggatattcgtagtgatgatctgttttctctaaaatcttaccatattgtctgtatatggttgtaaattcaaatggaaagtaaaacgttttggccctgaaaaaaaaaanaaaaaaaanntcctgatttcccaggtcttaggcca

SEQ ID NO: 1827 - DNA, 287 bp, Homo sapiens
  misc_feature (141)..(141): n includes a, c, g, or t, or contains no nucleotide
  misc_feature (143)..(144): n includes a, c, g, or t, or contains no nucleotide
  misc_feature (147)..(147): n includes a, c, g, or t, or contains no nucleotide
  misc_feature (150)..(150): n includes a, c, g, or t, or contains no nucleotide
  misc_feature (152)..(152): n includes a, c, g, or t, or contains no nucleotide
tttcactgtgaatgcgtgacaataagatattcccttgttcctaaaactttatatcagtttattggatgtggtttttcacatttaagataattatggctcttttcctaaaaaataaaatatctttctaaaaaaaaaaaaaanannaanaananggaaggagtctttagattggccaaattgcatttctctgatattcctcttgttgcaggtcagaagagatcaattctacagaaatttccagtggttctgttgaggctttatggaattcagcatgtcaaaattcacag

SEQ ID NO: 1828 - DNA, 504 bp, Homo sapiens
cctctaatctgttttaggaagagagttggttattatgttgatcccataatataaatcatatcctttatattttagaatatctcaaatgtattccttttttgtatggtgggtttgcctagggacgtgtaactacaggcttttactaagccaaggaaaaagagaatttttcttttcatcttacaaattccagatatctacaaaagatgtgaaagcactaaaaataccatttttaagcagtactttacctgttttttctttagcaaaccaggttatgtggtgtaaaggtttgttatacgtgccacaatatagcatataaatattatgccatcattccttctcttgttaaaggtagaagaataaaattgtgatttttataacctgtgcttattactcaaatggtcttcaacatctttttaaacaacacatactttttgaatgttcagtttctattttgcttgaggtattttgtacatatgtgccttgtgattgctgctgctttaaagg

SEQ ID NO: 1829 - DNA, 433 bp, Homo sapiens
  misc_feature (27)..(27): n includes a, c, g, or t, or contains no nucleotide
  misc_feature (32)..(33): n includes a, c, g, or t, or contains no nucleotide
  misc_feature (37)..(37): n includes a, c, g, or t, or contains no nucleotide
  misc_feature (44)..(44): n includes a, c, g, or t, or contains no nucleotide
  misc_feature (49)..(49): n includes a, c, g, or t, or contains no nucleotide
  misc_feature (192)..(192): n includes a, c, g, or t, or contains no nucleotide
  misc_feature (194)..(194): n includes a, c, g, or t, or contains no nucleotide
  misc_feature (358)..(358): n includes a, c, g, or t, or contains no nucleotide
cccacgatgcagaggagaagctgtggncgcgnncctnccacacnccacnccgtggacgagaggctgggggtccaccctttggggcctggtcccatcctgcaccttgggggctccagcccccctaaaattaaatttctgcagcatccctttagctttcaatctccccagccccctgaacccggaaaaagcacncnctgcgcgatacacccagaagaacctcacagccgagggtgcccctcctcggaggacagccacgcgctacactggctctccgggccacccccaggacacagggcagacgaaacccacccccagcacacggcaggaccccccaaattactcactacggggggctgtnccataggccacacaggaagctgccttgtggggacttacctggggtgtcccccgcatgcctgtaccccagatgggt

SEQ ID NO: 1830 - DNA, 260 bp, Homo sapiens
  misc_feature (38)..(62): n includes a, c, g, or t, or contains no nucleotide
gaaactcccatggtcatgtgactccagatacttctggnnnnnnnnnnnnnnnnnnnnnnnnnaggtggattatgatcgcatcagggatgttggccctgacagggcggcatccgagtggttgctgcgctgtggggccatggtgcgctaccatggccaggagaggtggcagaaggactacaaccaccttccaacaggccctctggacaaatacaagattcaggcgatcgacgccaccgactcttgtatcatgagcattggat

SEQ ID NO: 1831 - DNA, 510 bp, Homo sapiens
  misc_feature (238)..(255): n includes a, c, g, or t, or contains no nucleotide
  misc_feature (339)..(377): n includes a, c, g, or t, or contains no nucleotide
  misc_feature (389)..(407): n includes a, c, g, or t, or contains no nucleotide
cctcatctggtgtggttggaggtctgtggagtcaaggtccccctctcccaggcaggctctctgagggcattctgtagtcccaggcccactggaaaaatgaatctatattttggttcctggaccgaagttcagtcgcagccttctgtggccacagaaagacagcttgtgctgcttgcacaactgagctgctggtgtgtaccccttagcagggtgtctggggacttacgcctttggaatnnnnnnnnnnnnnnnnnnggaacacaaaggaagccacccaggaaggaagcacagagctgggggctctggaaacgccctgtgtctctggctacagcaagaccnnnnnnnnnnnnnnnnnnnnnnnnnnnnnnnnnnnnnnnctgaccatttcnnnnnnnnnnnnnnnnnnngaagcttttcattcccacccccacccggaacctccccttgcctaacatttcccctctatggtaacatctctgacttctctacctcctctgtgctcaggtgact

SEQ ID NO: 1832 - DNA, 542 bp, Homo sapiens
  misc_feature (30)..(44): n includes a, c, g, or t, or contains no nucleotide
  misc_feature (48)..(48): n includes a, c, g, or t, or contains no nucleotide
  misc_feature (50)..(50): n includes a, c, g, or t, or contains no nucleotide
  misc_feature (113)..(129): n includes a, c, g, or t, or contains no nucleotide
  misc_feature (162)..(162): n includes a, c, g, or t, or contains no nucleotide
  misc_feature (169)..(169): n includes a, c, g, or t, or contains no nucleotide
atgtgcgggatgatgcagtcttcatccgtnnnnnnnnnnnnnnncccngnaagatcctcagctgagtgcaggtggggttcgaggggaaaggacgatggggcatgacctcagtnnnnnnnnnnnnnnnnntggagagggggccggacccccgtcagctgcttntgctgcntaggttctgttaccccatcctccctcccccagccaccaccctcaggtgcctccaattggtgcttcagccctggcccctgtggggaacaggtcttggggtcatgaagggctggaaacaagtgaccccagggcctgtctcccttcttgggtagggcagacatgccttggtgccggtcacactctacacggactgaggtgcctgctcaggtgctatgtcccaagagccataagggggtgggaattggggagggagaaagggtagttcaaagagtctgtcttgagatctgattttttccccctttacctagctgtgccccctctggttatttatttccttagtgccaggagggcacagcaggggagccctgattttt

SEQ ID NO: 1833 - DNA, 415 bp, Homo sapiens
  misc_feature (48)..(67): n includes a, c, g, or t, or contains no nucleotide
  misc_feature (136)..(136): n includes a, c, g, or t, or contains no nucleotide
  misc_feature (141)..(146): n includes a, c, g, or t, or contains no nucleotide
  misc_feature (148)..(178): n includes a, c, g, or t, or contains no nucleotide
cagtcgcagggctggtgtcctacccctttgacactgttcgtcgtagannnnnnnnnnnnnnnnnnnngaaaggggccgatattatgtacacggggacagttgactgctggaggaagattgcaaaagacgaaggagnccaannnnnncnnnnnnnnnnnnnnnnnnnnnnnnnnnnnnnagaggcatgggcggtgcttttgtattggtgttgtatgatgagatcaaaaaatatgtctaatgtaattaaaacacaagttcacagatttacagtgaacttgatctacaagttcacagatccattgtgtggtttaatagactattcctaggggaagtaaaaagatctgggataaaaccagactgaaaggaatacctcagaagagatgcttcattgagtgttcattaaaccacacatgta

SEQ ID NO: 1834 - DNA, 484 bp, Homo sapiens
  misc_feature (121)..(121): n includes a, c, g, or t, or contains no nucleotide
  misc_feature (128)..(128): n includes a, c, g, or t, or contains no nucleotide
  misc_feature (138)..(138): n includes a, c, g, or t, or contains no nucleotide
  misc_feature (147)..(147): n includes a, c, g, or t, or contains no nucleotide
  misc_feature (176)..(201): n includes a, c, g, or t, or contains no nucleotide
tgactcaaaggtgctatttaccaaacactctccctacccattcctgccagctctgcctccttttcaactctccacattttgtattgccttcccagacctgcttccagtctttattgctttnaaagttncactttgggncccacagancccaagagctaattttctggtttgtgggnnnnnnnnnnnnnnnnnnnnnnnnnnggctgtgttcttgcatcttgtctgcaaacaggtccctgcctttttagaagcagcctcatggtctcatgcttaatcttgtctctcttctcttctttatgatgttcactttaaaaacaacaaaacccctgagctggactgttgagcaggcctgtctctcctattaagtaaaaataaatagtagtagtatgtttgtaagctattctgacagaaaagacaaaggttactaattgtatgatagtgtttttatatggaagaatgtacagcttatggacaaatgtacacc

SEQ ID NO: 1835 - DNA, 439 bp, Homo sapiens
  misc_feature (190)..(252): n includes a, c, g, or t, or contains no nucleotide
  misc_feature (351)..(352): n includes a, c, g, or t, or contains no nucleotide
cctccttgtgggtagttaagagtggggtcacccctttaactccaagcactacattttggcggctgccggcctctgggggaggtggcagttatgctgttactagtgattttagggctttgttatttaacttatttcaagggtgctgtgctcagccctgcccatggctgtgcagctccctccgtgcctcagnnnnnnnnnnnnnnnnnnnnnnnnnnnnnnnnnnnnnnnnnnnnnnnnnnnnnnnnnnnnnnngtggcctggtgactccatgatggacgatcttgctcccaggacctgcctcttcccaggcttcctggggaagagttgtacgcccaggcaacaagggctganntgcgcttgcgtggctgtttcatgaccgcttgtttttctccttttggtgtaatgttttacaaatcctttggcctgagaactaatatgt

SEQ ID NO: 1836 - DNA, 401 bp, Homo sapiens
  misc_feature (128)..(184): n includes a, c, g, or t, or contains no nucleotide
  misc_feature (371)..(371): n includes a, c, g, or t, or contains no nucleotide
gtacatgaactcagggccggttgtggccatggtctgggaggggctgaacgtggtgaagacaggccgagtgatgcttggggagaccaatccagcagattcaaagccaggcaccattcgtggggacttcnnnnnnnnnnnnnnnnnnnnnnnnnnnnnnnnnnnnnnnnnnnnnnnnnnnnnnnnnaaagaaatcagcctatggtttaagcctgaagaactggttgactacaagtcttgtgctcatgactgggtctatgaataagaggtggacacaacagcagtctccttcagcacggcgtggtgtgtccctggacacagctcttcattccattgacttagaggcaacaggattgatcattcttttatagagncatatttgccaataaagcttttggaagccg

SEQ ID NO: 1837 - DNA, 561 bp, Homo sapiens
  misc_feature (26)..(40): n includes a, c, g, or t, or contains no nucleotide
  misc_feature (297)..(297): n includes a, c, g, or t, or contains no nucleotide
  misc_feature (302)..(302): n includes a, c, g, or t, or contains no nucleotide
  misc_feature (331)..(331): n includes a, c, g, or t, or contains no nucleotide
  misc_feature (346)..(346): n includes a, c, g, or t, or contains no nucleotide
  misc_feature (435)..(435): n includes a, c, g, or t, or contains no nucleotide
  misc_feature (469)..(469): n includes a, c, g, or t, or contains no nucleotide
gttacttcaggtgctggagagacccnnnnnnnnnnnnnnncagtagttatttcacatctattgtttcctgcagtttgatttgtaacagaacagttgttttcaggtttttttctctgtcatgtaaatgaaatcttttgatatttcatgcacgccttgttttcccactagtgtcagtatcgtatgataagaaactgaaatctataaataatttgctttttcattaaggacatttcagcctttttcagaatacttgatttaactgcgagtggaagcatcgatctccttcagctttccctngtagnagcagatggtacagtgagtgttcagagangtgggtacaaacccngtgatgtatgtataaggctccctgaggatgcactgcattaacttacgctgacttctttgtaagatctttgcttatagattataatttanatctgtatttttttaggtttatcctaatagctgnttttttttttttaaccataactcatagaaaatcaaatgtttttatttgttaaaagtagactgaatttgacatctggtatgctggtatgtagc

SEQ ID NO: 1838 - DNA, 468 bp, Homo sapiens
  misc_feature (68)..(83): n includes a, c, g, or t, or contains no nucleotide
  misc_feature (208)..(231): n includes a, c, g, or t, or contains no nucleotide
  misc_feature (379)..(379): n includes a, c, g, or t, or contains no nucleotide
  misc_feature (428)..(429): n includes a, c, g, or t, or contains no nucleotide
gtattatgcccaaggccgctctgcctgggggaaagggcagccaggcagaggcccagtgtctggtaggnnnnnnnnnnnnnnnngaaggggtgattggatggaaagaggccagaaaccccagcctgagagactgctgtgcaccccacagtctgactgcacagagccgcctctgttggcaggaggcactgaggctccccttcctgtgtannnnnnnnnnnnnnnnnnnnnnnnattttgctttcaattccaagaggagctctgggaaaacctgtggataaaaccaaatgccaaatgttggacgttgtttccttttccttttctctctctgattgttttaattgttctgtggtggttttaatggatttgagaccctggagcngcagctgcctttctgatttccagctgctttttgtgaataatttaaaaannaaaaaaaaaaagaaactttacattttggagacaaacctg

SEQ ID NO: 1839 - DNA, 513 bp, Homo sapiens
  misc_feature (133)..(133): n includes a, c, g, or t, or contains no nucleotide
  misc_feature (408)..(444): n includes a, c, g, or t, or contains no nucleotide
tgccgggaatgttgcacgtaactttgccgctggccgcgtcgtagttgttgcctaggttggtgaccacgtcgtcaaacttgagtacctcgtaaccctcgtgggggttcttgaggccggcgtagaaggccacgcncggcaccgtggtgtaggtggcagtgctgatggcgccgctgccccccgcgcccggcagccccggagggcccggcttgcctggctcacccttctcccccggcggccccacagggccgggaggacctgggtccccgggaggccccggagggccgggcttgccggtgcggcccggcttcccctgggggccctgcaccagcgtggaaggcgggggcgcgccgctctgctcgctcagggcgtcgccgccgtcggtccgcgcgccggcgccggggccccgcnnnnnnnnnnnnnnnnnnnnnnnnnnnnnnnnnnnnngcatctcatagtggccttccgggccgcccgagctcaccagcacggggatgagcaccaccagcaccagca

SEQ ID NO: 1840 - DNA, 511 bp, Homo sapiens
  misc_feature (118)..(135): n includes a, c, g, or t, or contains no nucleotide
  misc_feature (137)..(139): n includes a, c, g, or t, or contains no nucleotide
  misc_feature (152)..(152): n includes a, c, g, or t, or contains no nucleotide
  misc_feature (164)..(164): n includes a, c, g, or t, or contains no nucleotide
  misc_feature (188)..(188): n includes a, c, g, or t, or contains no nucleotide
  misc_feature (195)..(195): n includes a, c, g, or t, or contains no nucleotide
  misc_feature (227)..(227): n includes a, c, g, or t, or contains no nucleotide
  misc_feature (311)..(311): n includes a, c, g, or t, or contains no nucleotide
  misc_feature (341)..(341): n includes a, c, g, or t, or contains no nucleotide
  misc_feature (368)..(368): n includes a, c, g, or t, or contains no nucleotide
  misc_feature (411)..(415): n includes a, c, g, or t, or contains no nucleotide
  misc_feature (418)..(419): n includes a, c, g, or t, or contains no nucleotide
  misc_feature (422)..(422): n includes a, c, g, or t, or contains no nucleotide
  misc_feature (424)..(424): n includes a, c, g, or t, or contains no nucleotide
  misc_feature (426)..(428): n includes a, c, g, or t, or contains no nucleotide
  misc_feature (433)..(444): n includes a, c, g, or t, or contains no nucleotide
  misc_feature (448)..(451): n includes a, c, g, or t, or contains no nucleotide
  misc_feature (453)..(453): n includes a, c, g, or t, or contains no nucleotide
  misc_feature (457)..(459): n includes a, c, g, or t, or contains no nucleotide
  misc_feature (461)..(465): n includes a, c, g, or t, or contains no nucleotide
  misc_feature (467)..(467): n includes a, c, g, or t, or contains no nucleotide
  misc_feature (470)..(470): n includes a, c, g, or t, or contains no nucleotide
  misc_feature (472)..(476): n includes a, c, g, or t, or contains no nucleotide
  misc_feature (486)..(486): n includes a, c, g, or t, or contains no nucleotide
ctgtgaaacacatacattggatatgggaggtaaaggagtgtcccagttgctcctggtcactccctttatagccattactgtcttgtttcttgtaactcaggttaggttttggtctctnnnnnnnnnnnnnnnnnnannnaaaaaaaaaaaanaaaaagcctgangagatgagataggaggaaagaccntcacagnccagatctgctgggttttgaggagtgattttntttcttccccttgaaggggaaaaagctattttcattggtacatttaaagtcccccaactatggggaggtaccaattctggacangtgccactacaacaacactaaacctgaacnttttcaactccgttggtggtgggaggncagcgggcagaaatttactgttggccactgccaggtctatttnnnnnttnnaangnannnttggnnnnnnnnnnnnggannnnangggnnnannnnntnaancnnnnnattaggttgntttcctgtcatttttgagagactaa

SEQ ID NO: 1841 - DNA, 166 bp, Homo sapiens
taactcctaaggatactgaggattttttaaaatgcgtgtacagttcctgaccagtggtttgtgcctaataacttattacaaattattacccagtaaaaaccttgagacaagagtgaaaacgtaaagctaattaatccattacttgttagcaagcaaactacgtgct

SEQ ID NO: 1842 - DNA, 522 bp, Homo sapiens
  misc_feature (93)..(130): n includes a, c, g, or t, or contains no nucleotide
  misc_feature (148)..(492): n includes a, c, g, or t, or contains no nucleotide
aggagccatatcccagacctttgccagctacagtgatgggatttgcattttagggtgatttgggggcagaaataactgctgatggtagctggnnnnnnnnnnnnnnnnnnnnnnnnnnnnnnnnnnnnnntccagctgctctcttttnnnnnnnnnnnnnnnnnnnnnnnnnnnnnnnnnnnnnnnnnnnnnnnnnnnnnnnnnnnnnnnnnnnnnnnnnnnnnnnnnnnnnnnnnnnnnnnnnnnnnnnnnnnnnnnnnnnnnnnnnnnnnnnnnnnnnnnnnnnnnnnnnnnnnnnnnnnnnnnnnnnnnnnnnnnnnnnnnnnnnnnnnnnnnnnnnnnnnnnnnnnnnnnnnnnnnnnnnnnnnnnnnnnnnnnnnnnnnnnnnnnnnnnnnnnnnnnnnnnnnnnnnnnnnnnnnnnnnnnnnnnnnnnnnnnnnnnnnnnnnnnnnnnnnnnnnnnnnnnnnnnnnnnnnnnnnnnnnnnnnnnnntttttaggcaccaaatctccctcatcttct

SEQ ID NO: 1843 - DNA, 355 bp, Homo sapiens
gtgttgcactgtaatctatcatatagagctatatgtatggaaaattttgatcaattttttaagaaatgtatcctgtttgcaaaggcacagtaaagttgcatcttatagactataggcaataaagctaacaataaaccttatttaacacaaaccacatccatatcctctgttcatttgattttggaaaaagtagcatatccagtagtttcagggaattcattttaactttaagaattctgatatatttaatttataaatttcggactgatataatagagttttggaaaactataagaaatgctttgttaatgtgtgtattcctatgtaaaacacatggcttttcctgtgtatattt

SEQ ID NO: 1844 - DNA, 598 bp, Homo sapiens
  misc_feature (80)..(157): n includes a, c, g, or t, or contains no nucleotide
  misc_feature (160)..(202): n includes a, c, g, or t, or contains no nucleotide
  misc_feature (264)..(265): n includes a, c, g, or t, or contains no nucleotide
  misc_feature (341)..(371): n includes a, c, g, or t, or contains no nucleotide
tcgcttttgctggtgcacgtgtgtgcgcgccccgagaagccgcccgggcaggtcacgcggctccgcgccctgcccctgannnnnnnnnnnnnnnnnnnnnnnnnnnnnnnnnnnnnnnnnnnnnnnnnnnnnnnnnnnnnnnnnnnnnnnnnnnnnnctnnnnnnnnnnnnnnnnnnnnnnnnnnnnnnnnnnnnnnnnnnnccttcaacctctttgtgttcagcccagacacaggtgctgtctctggctcctaccgagttcgnnccctggactactgggcccgaccaggccccttctcggaccctgtgccgtacctggaggtccctgtgccaagagggcnnnnnnnnnnnnnnnnnnnnnnnnnnnnnnntgagccccagtgggttgcacctccaccggcagtcagcgagctggggctgcactgtgcccatgctgccctcccatcaccccctttgcaatatatttttatattttattattttcttttatatcttggtaccaacgccccctttaaagcggctttgcacaggtcagtctcgggttgaggctctgtggcttggccctgggcacattccagggcagcctccaagggtaaac

SEQ ID NO: 1845 - DNA, 565 bp, Homo sapiens
  misc_feature (85)..(130): n includes a, c, g, or t, or contains no nucleotide
  misc_feature (151)..(266): n includes a, c, g, or t, or contains no nucleotide
  misc_feature (376)..(390): n includes a, c, g, or t, or contains no nucleotide
  misc_feature (393)..(436): n includes a, c, g, or t, or contains no nucleotide
acctgatgctggtggagctaagagagtgacctccattgcagacaggctgaatgtggactttgccttgattcacaaagaacggaannnnnnnnnnnnnnnnnnnnnnnnnnnnnnnnnnnnnnnnnnnnnngatcgggtggccatccttgtnnnnnnnnnnnnnnnnnnnnnnnnnnnnnnnnnnnnnnnnnnnnnnnnnnnnnnnnnnnnnnnnnnnnnnnnnnnnnnnnnnnnnnnnnnnnnnnnnnnnnnnnnnnnnnnnnnnntttctcgcatcaacaacgcatgctttgaggcagtagtagtcaccaataccatacctcaggaggacaagatgaagcattgctccaaaatacaggtgattgacatctctatnnnnnnnnnnnnnnncannnnnnnnnnnnnnnnnnnnnnnnnnnnnnnnnnnnnnnnnnnncatgtccctttataatagagtaaggtattgatgacaaattcagcagaagacccggcttgctccagtgtagctttctacatcccacatcaggatattagaggttatccgaactggggaaagacggattga

SEQ ID NO: 1846 - DNA, 475 bp, Homo sapiens
  misc_feature (34)..(34): n includes a, c, g, or t, or contains no nucleotide
  misc_feature (49)..(49): n includes a, c, g, or t, or contains no nucleotide
cgtaactgtccatgcgctggttcacgcccgcgcncaggccggcgcccancccgaccccgctcgccatgctattgccgccgggggccagcagcccgccgggcagcgtgtacttatccttcttcatgagcgtcttggttttccgccggggccggtatttataatccgggtgctccttcatgtgcagcgctcgcagccgcttagcctcgtcgatgaacggccgcttctccgtctccgacaaaagtttccactcggcgcccaggcgcttgctgatctccgagttgtgcatcttggggttctcctgggccatcttgcgccgctgcccgcgggaccacaccatgaaggcattcatgggccgcttgacgcggtccgggctgtttttctggttgccgccggccgccgccgcggtggagttgccgccgccgccccccgaagtttgctgcgggcccggcggcttcagctccgtctccatcatgtt

SEQ ID NO: 1847 - DNA, 446 bp, Homo sapiens
  misc_feature (248)..(249): n includes a, c, g, or t, or contains no nucleotide
  misc_feature (256)..(256): n includes a, c, g, or t, or contains no nucleotide
  misc_feature (258)..(258): n includes a, c, g, or t, or contains no nucleotide
  misc_feature (260)..(260): n includes a, c, g, or t, or contains no nucleotide
  misc_feature (262)..(303): n includes a, c, g, or t, or contains no nucleotide
tgaatggcttttcaattctgtggactttgtaccatttggcttcaccttgtactgcaagatgaatttgtaaacaaaacaaaattggactgtctggaaagctaaagttctgaaatatggaatgtactgcctctaatttttctttgtcttcctctcactggcatttttttctctcccaggtttcttaagaataatgttttttaaaggaggctttttgcccatcaagaataaaaagaaataaaaccaaaggnntaccggnananannnnnnnnnnnnnnnnnnnnnnnnnnnnnnnnnnnnnnnnnncctgaggacagtgcccctgccccagtgacaggccttactcctcccagggcctttgcttctaatagggggtggtctttcttttctttctctcctttttttttttttgattaaaaaataaaaccaaaccagaatttgctgaaagc

SEQ ID NO: 1848 - DNA, 614 bp, Homo sapiens
  misc_feature (116)..(117): n includes a, c, g, or t, or contains no nucleotide
  misc_feature (142)..(587): n includes a, c, g, or t, or contains no nucleotide
ctgatctcaccatggcttgagacttcaggtcacccggctctcctcgttccccctttgctccagggtacaccaggtggttcccaggtgcgccttgcgttcccattctttccttgtgnnaatctccccgaattcggcacgagannnnnnnnnnnnnnnnnnnnnnnnnnnnnnnnnnnnnnnnnnnnnnnnnnnnnnnnnnnnnnnnnnnnnnnnnnnnnnnnnnnnnnnnnnnnnnnnnnnnnnnnnnnnnnnnnnnnnnnnnnnnnnnnnnnnnnnnnnnnnnnnnnnnnnnnnnnnnnnnnnnnnnnnnnnnnnnnnnnnnnnnnnnnnnnnnnnnnnnnnnnnnnnnnnnnnnnnnnnnnnnnnnnnnnnnnnnnnnnnnnnnnnnnnnnnnnnnnnnnnnnnnnnnnnnnnnnnnnnnnnnnnnnnnnnnnnnnnnnnnnnnnnnnnnnnnnnnnnnnnnnnnnnnnnnnnnnnnnnnnnnnnnnnnnnnnnnnnnnnnnnnnnnnnnnnnnnnnnnnnnnnnnnnnnnnnnnnnnnnnnnnnnnnnnnnnnnnnnnnnnnnnnnnnnnnnnnnnnnnnnnnnngatgtctgccatttcaggataaatgaa

SEQ ID NO: 1849 - DNA, 378 bp, Homo sapiens
  misc_feature (62)..(138): n includes a, c, g, or t, or contains no nucleotide
aagatggcgccgtccgccttgctgcgtcccctttcccggctgctggcccccgccaggctccnnnnnnnnnnnnnnnnnnnnnnnnnnnnnnnnnnnnnnnnnnnnnnnnnnnnnnnnnnnnnnnnnnnnnnnnnnnnnttgggttcaccttgggcaccactgtcttcttgtggatctatctcatcaaacaacacaatgaagatattttagagtacaaaagaagaaatgggctggaataaacttttgaaacactaatgtagtatgctccgtatagtgattgtagctgttcctctggattcaccatctgttgagttgtaaatgtgagagaaaaagttatatgtgaatatatatcaagccagcatttgtattttgcatcat

SEQ ID NO: 1850 - DNA, 541 bp, Homo sapiens
cctaagaggatgtctacaggatatgaaactactgggtgcaggaaaattttttaaatgttagcaaattgtggcaagaggaaaacaaacagtggagaaaactgtggtagagaaagtaaagaaggggcaggagaaagctgtaattataacctgggcctgcctttgttctcatgaagccaggggcctctccatatcctatacttgctcttacgctaataacaaaccaaatgctgcaaaataaaagtaataatgacccaaactaatttaagtcttttgtttaaggagtaaatgagagaaacattttagcttcttaatcaaggagtgctataatttcaaggcatcttaatataattcacttaccctaaagcaattgtgcaataagcaaattataaaaggaaaacaacaaaggttaactttctacaggggccaatagacaagatctgtggagcacagcaattaaccttcacatactggagtcttgtttaaaaggccatcaaaaactcagattactgaaaatcacaaatgtcaccaacaaaaggaatgt

SEQ ID NO: 1851 - DNA, 149 bp, Homo sapiens
ggctctgacagattaccgggcagagctccgggatgacccaatcatcagcacacacttggccaagttgtatgataacttactagaacagaatctgatccgagtcattgagcctttttccagagtacagattgaacacatatctagtctca

SEQ ID NO: 1852 - DNA, 429 bp, Homo sapiens
  misc_feature (373)..(389): n includes a, c, g, or t, or contains no nucleotide
tcagctcctcctgctttcttgggtcccaccagtgtcacttttctgccgttttctttcctgttctcctctgcttcattctcgtccagccattgctcccctctccctgccacccttccccagttcaccaaaccttacatgttgcaaaagagaaaaaaggaaaaaaaatcaaaacacaaaaaagccaaaacgaaaacaaatctcgagtgtgttgccaagtgctgcgtcctcctggtggcctctgtgtgtgtccctgtggcccgcagcctgcccgcctgccccgcccatctgccgtgtgtcttgcccgcctgccccgcccgtctgccgtctgtcttgcccgcctgcccgcctgcccctcctgccgaccacacggagnnnnnnnnnnnnnnnnntggtgatggttattgacgacaatgtgtagcgcatgattgt

SEQ ID NO: 1853 - DNA, 357 bp, Homo sapiens
  misc_feature (42)..(58): n includes a, c, g, or t, or contains no nucleotide
  misc_feature (153)..(190): n includes a, c, g, or t, or contains no nucleotide
  misc_feature (276)..(276): n includes a, c, g, or t, or contains no nucleotide
  misc_feature (278)..(278): n includes a, c, g, or t, or contains no nucleotide
  misc_feature (316)..(316): n includes a, c, g, or t, or contains no nucleotide
acccgaggagaggagcctcagatgaaagaaacaatcatgaannnnnnnnnnnnnnnnnaactgcaggcacaagtgcgcattggtgggaaagtgaatatgtttacaaaccaaggaacagtgatccactttaacaaccctaaagttcaggcatcnnnnnnnnnnnnnnnnnnnnnnnnnnnnnnnnnnnnnnagacaaagcagctgacagaaatgctacccagcatcttaaaccagcttggtgcggatagtctgactagtttaaggagactggccgangntctgcccaaacaatctgtggatggaaaagcaccacttnctactggagaggatgatgatgatgaagttccaggaggcttc

SEQ ID NO: 1854 - DNA, 73 bp, Homo sapiens
  misc_feature (36)..(36): n includes a, c, g, or t, or contains no nucleotide
ccacatgaagcctcctggttcaggagcaggaggagncgagggtctccaggccctcagtgttgaaatcaaaggt

SEQ ID NO: 1855 - DNA, 541 bp, Homo sapiens
tctgagacctttggttgttctttaaggcacctcctgccactttctccctcagaggcacaaacactttgtgttccacgtcagtttgaggggacggtggggggatgatatgaatgtcacaggaggagacaccttctgtctttgtttcaaagaaagtgatgtgccatttgttaatatacaagagaaatattgaaaatatattgaaaagagcaattttaaattatttttggcttatgttgcaatatttattttcttgtattagaaaagattcctttgtagagaaaaaatgtatttttcattaacgcaaagacctatttctcctttttgtacattgtccatgtgcgcaacccttaacgagcaatagaatgtatggtcacctgggtgtggccagtgcccgctgtgccctgcatgattctgtgttgccgctgctgcatagttcccagccccatcctgtcctgctcactcatgggggcttccagaccccggccccaccagggcttgtgtcatagggagccctttgcactcctcgtgtgttggcaaacgc

SEQ ID NO: 1856 - DNA, 511 bp, Homo sapiens
  misc_feature (26)..(26): n includes a, c, g, or t, or contains no nucleotide
  misc_feature (33)..(33): n includes a, c, g, or t, or contains no nucleotide
  misc_feature (344)..(364): n includes a, c, g, or t, or contains no nucleotide
gcttccgaaaagatacatatatgttnccctttncattagctgaatgaggatattttaagaagttgaaagagaatttattttcaagttgtgagtaaatcctcctttgaaattcacctgattattagataacttaaagtttatttttaaaagctgacaactttttatgaatcttcgagttgacagttcctaaaagcgtaactcagatattaatgggctgtgtattaaatggttttattttcagttttgcagcacagaacactgttgaaatatccatatcaacttgatttttttaacctaattcaggtgtcctttgcatctcttaaatgttgggggtgggggtcagnnnnnnnnnnnnnnnnnnnnntttgtcgattgcttagatttgttcctgttgtcaaaactgttacccccaaaattggtgtgacacatgctcatgcataaaatgttaaaatgagtacatccttgtatttgtatttgttttcaacatcgccaaggtgctatgggaaattaa

SEQ ID NO: 1857 - DNA, 398 bp, Homo sapiens
  misc_feature (99)..(120): n includes a, c, g, or t, or contains no nucleotide
  misc_feature (122)..(124): n includes a, c, g, or t, or contains no nucleotide
  misc_feature (128)..(132): n includes a, c, g, or t, or contains no nucleotide
  misc_feature (134)..(134): n includes a, c, g, or t, or contains no nucleotide
  misc_feature (136)..(326): n includes a, c, g, or t, or contains no nucleotide
attacgaccactggaagccagcacccaaggaagatgaccggagaacatctgccatcaaggcccttaatgctacaggacaagcaaacctcagcctggagnnnnnnnnnnnnnnnnnnnnnngnnnccannnnntnannnnnnnnnnnnnnnnnnnnnnnnnnnnnnnnnnnnnnnnnnnnnnnnnnnnnnnnnnnnnnnnnnnnnnnnnnnnnnnnnnnnnnnnnnnnnnnnnnnnnnnnnnnnnnnnnnnnnnnnnnnnnnnnnnnnnnnnnnnnnnnnnnnnnnnnnnnnnnnnnnnnnnnnnnnnnnnnnnnnnnnnnnnnnnnacaccctccccacccttgcaataatgtactttgtgatattcccccgcccttgtgaatgtactttgtacgata

SEQ ID NO: 1858 - DNA, 595 bp, Homo sapiens
gcacgtgccaagcaaagcccctggcgtgcgtcgcgtggatgagcggccggtgggccctgagccccagtacccgatcaggcccatggtgccgcacccaggcgacatcggtgacttcatcaatgagggactccgcgctgctgacaacgaccccacggcacccccctatgactccctgctggtcttcgactacgaggggagcggctccaccgcaggctccgtcagctccctgaactcatccagttccggggaccaagactacgattacctcaacgactggggccccagattcaagaagctggcggacatgtatggaggtggtgaagaggattgactgacctcgcatcttcggaccgaagtgagagccgtgctcggacgccggaggagcaggactgagcagaggcggccggtcttcccgactccctgcggctgtgtccttagtgctgttaggaggccccccaatccccacgttgagctgtctagcatgagcacccacccccacagcgccctgcacccggccgctgcccagcaccgcgctggctggcactgaaggacagcaagaggcactctgtcttcacttgaatttcctagaacagaa

SEQ ID NO: 1859 - DNA, 172 bp, Homo sapiens
tcagagagcaagctcctcttcttcccacccctactgtgattgatccttcaaggttctgtgctcagcccttccgttggttcttggatttgtcctttcccgccatgtcttcatcacatccacaacttccactaacacttgcgagcttcaaacttcttagagaaccctgcagtgt

SEQ ID NO: 1860 - DNA, 497 bp, Homo sapiens
  misc_feature (372)..(391): n includes a, c, g, or t, or contains no nucleotide
  misc_feature (419)..(442): n includes a, c, g, or t, or contains no nucleotide
gtcctactaggagaaatagacttggaaaaggagagtgacacacccctccagcaagtatccattgaagaaattctagaagaacaaagggtggaacagcagaccaagctggaagcagagaagttgaaagtgcaggccctgaaggaccgaggtctttccattcctcgagcagatactcttgatgagtactaatcttttgcccagaggctgttggctcttgaagagtaggggctgtcactgagtgaaagtgacatcctggccacctcacgcatttgatcacagactgtagagttttgaaaagtcacttttatttttaattattttacatatgcaacatgaagaaatcgtgtaggtgggttttttttttaataacannnnnnnnnnnnnnnnnnnnagtggcatagactccttcacacatcacnnnnnnnnnnnnnnnnnnnnnnnnatattgttcttcatatcccaaattagagtttacagggacagtcttcatttacttg

SEQ ID NO: 1861 - DNA, 409 bp, Homo sapiens
ctgggtctaccaaggagttgatcaagtccatcaatgaaaagtttgctgggtctgctggctgggaaggcacagaatcgctgaagaagccagaagacaaaaagcagctgggagatttctttggcatgtccaacagttatgcagagtgctacccagccacgatggatgacatggctgtggatagtgatgaggaggtggattatagcaaaatggaccagggtaacaagaagggcccttagggccgttgggactttgatacccaggaagaatacagcgagtatatgaacaacaaagaagctttgcccaaggctgcattccagtatggtatcaaaatgtctgaagggcggaaaaccaggcgcttcaaggaaaccaatgacaaagcagagcttgatcgccagtggaagaagattag

SEQ ID NO: 1862 - DNA, 318 bp, Homo sapiens
  misc_feature (125)..(125): n includes a, c, g, or t, or contains no nucleotide
  misc_feature (142)..(142): n includes a, c, g, or t, or contains no nucleotide
gaaggtctccactctcctctgggctcctccttgcctaatgcagggggtcaccgctggagaagaaccaccactgtcctcgatgtgtcccaagcctggagcgaatccgtcctcttggctctcccagncctatcacaggaatcantcctgggtttctgtccctctgaggctcaccaggtgtagttggccttgttctttgggggtattagcccttctactttctttctcacccaccctgtaccctcttctgtgtgtctctgctatccccctttcctcccaccacccatgtgcatgagcaaatgtgcaacaaaaccctgggac

SEQ ID NO: 1863 - DNA, 553 bp, Homo sapiens
  misc_feature (112)..(130): n includes a, c, g, or t, or contains no nucleotide
  misc_feature (134)..(134): n includes a, c, g, or t, or contains no nucleotide
  misc_feature (139)..(139): n includes a, c, g, or t, or contains no nucleotide
  misc_feature (143)..(143): n includes a, c, g, or t, or contains no nucleotide
  misc_feature (146)..(146): n includes a, c, g, or t, or contains no nucleotide
  misc_feature (182)..(182): n includes a, c, g, or t, or contains no nucleotide
  misc_feature (185)..(185): n includes a, c, g, or t, or contains no nucleotide
  misc_feature (274)..(290): n includes a, c, g, or t, or contains no nucleotide
  misc_feature (527)..(528): n includes a, c, g, or t, or contains no nucleotide
tgtggtgtttggtgactgtccccttccccactgtgcgagtacttccctcagggctgctctggtgatctacctggcgtgttttttcttttcagtgccgaagacgcagatgaannnnnnnnnnnnnnnnnnngtgncccancganggngaagggaacattgcacgtttcttgttctctctgttnggnccagaagcataatgctgtcaacgcaacccttatagatagctgggtagatatttgcgatttttcagttaaaagaggggaagcagttaaannnnnnnnnnnnnnnnntccgctccatgaactcgcttatctccatatcaacataaaccagaagaggcatacatctgtgggatagtcaatacataacatcctatctttatatggccatatgagaagataacttcagtgtccctatgatggtaagttcttgaatgtgagggcaagatggctgtgatagccatgactccccgctttggctggttgggacaagaacccccttccccaaatgctcacaggccccccccnnggagctgtgtctcactcagagaccc

SEQ ID NO: 1864 - DNA, 308 bp, Homo sapiens
gagaacccaaagactagaattccatttctaaacccagcccagcagccggaagtcatgaagcagtcaacctgcctggacatccagctacgctctgctgcgccattctatccacccatcaagactcccctcccttctactgataaccctcctaaaagccaactgggattgaattactcctctgccaagaaccctctgctgcaccttatccaaggcccaccataaaatgatgccagcccacctcacccaaaacctcttccagaaagtcccagctccaccctggttctctcctccacagatgtcagacctgt

SEQ ID NO: 1865 - DNA, 240 bp, Homo sapiens
  misc_feature (36)..(51): n includes a, c, g, or t, or contains no nucleotide
gttgtgcctctcagcctcatccttgtctcttacggnnnnnnnnnnnnnnnngtgctgaggattaactctgcaaaagggcggaggaaagcttttgggacctgctcctcccatctcactgtggtcaccctcttctacagctcagtcattgctgtctacctccagcccaaaaatccctatgcccaagagaggggcaagttctttggtctcttctatgcagtgggcactccttcacttaaccct

SEQ ID NO: 1866 - DNA, 525 bp, Homo sapiens
  misc_feature (148)..(148): n includes a, c, g, or t, or contains no nucleotide
  misc_feature (208)..(222): n includes a, c, g, or t, or contains no nucleotide
  misc_feature (304)..(304): n includes a, c, g, or t, or contains no nucleotide
  misc_feature (346)..(368): n includes a, c, g, or t, or contains no nucleotide
agaatagcctgaggtcccctcgtcccatccagctaccaccacggccaccactgcagccaggggctggccttctcctacttagggaagaaaaagcaagtgttcactgctccttgctgcattgatccaggagataattgtttcattcatnctgaccaagactgagccagcttagcaactgctggggagacaaatctcagaaccttgtccnnnnnnnnnnnnnnnacagtgacacccagagggagtagaatacgcagaactaccaggtggcaaagtacttgtcatagactcctttgctaatgctatncaaaaaattctttagagattataacaaatttttcaaatcatnnnnnnnnnnnnnnnnnnnnnnngaagggaagcgtatatacttaagaatacacaggatattttggggggcagagaataaaacgttagttaatccctttgtctgtcaatcacagtctcagttctcttgctttcacattgtacttaaacctcctgctgtgcctcgcatcctacgcttaataa

SEQ ID NO: 1867 - DNA, 476 bp, Homo sapiens
  misc_feature (84)..(160): n includes a, c, g, or t, or contains no nucleotide
  misc_feature (162)..(174): n includes a, c, g, or t, or contains no nucleotide
aaatctagccccagacatactgtgttgagagatacttagagggagggagtaggttttgaagaggttgatggtggtggggagggnnnnnnnnnnnnnnnnnnnnnnnnnnnnnnnnnnnnnnnnnnnnnnnnnnnnnnnnnnnnnnnnnnnnnnnnnnnnnannnnnnnnnnnnnatttaaaaagacaaagtattttgtccatttgagattctgcactccatgaaaagttcacttggacgctggggccaaaagctgttgattttcttaagttgacggttgtcaatatatcgaactgttcccaagttagtcaagtatgtctcaacactagcatgatataaaaagggacactgcagctgaatgaaaaaggaatcaaaatccactttgtacataagttaaagtcctaattggatttgtaccgtcctcccattttgttctcggaagattaaatgctacatgtgtaagtctgcctaaatagg

SEQ ID NO: 1868 - DNA, 531 bp, Homo sapiens
  misc_feature (66)..(68): n includes a, c, g, or t, or contains no nucleotide
  misc_feature (219)..(219): n includes a, c, g, or t, or contains no nucleotide
  misc_feature (221)..(223): n includes a, c, g, or t, or contains no nucleotide
  misc_feature (364)..(376): n includes a, c, g, or t, or contains no nucleotide
  misc_feature (378)..(379): n includes a, c, g, or t, or contains no nucleotide
  misc_feature (384)..(384): n includes a, c, g, or t, or contains no nucleotide
  misc_feature (408)..(472): n includes a, c, g, or t, or contains no nucleotide
gtggccttgcttcttagacggtcttcactgtgtgttttaaaacaacaacaacaacaacaacaacannntaaaactcttttgacctgtaacttaaagatcataaacttcaggcaataatattttctgtgtaagcttttaaaattatttttggggatcatagcttgttttattttgtgctataaaattaacagtattaaatgacttatattcttagaatanannnagtgtcttttcttaacagattagtgcctttttatttttgtattccgttttacgttactggtcccagcatcaaaacccttgtttccatggcctgtttgtatattgtctcaataaaacttgcatcagccggtggtggcggcannnnnnnnnnnnnanngtctnctcagtccgcccccactagcctcnnnnnnnnnnnnnnnnnnnnnnnnnnnnnnnnnnnnnnnnnnnnnnnnnnnnnnnnnnnnnnnnnagagctagaatgaagtcttggcatccgcccattccaacactcgggcacccagaggagag

SEQ ID NO: 1869 - DNA, 553 bp, Homo sapiens
caaaccatgtcagctcgaactccaccggaagcagctagtttcggctctggcctccaagtccacagtggaaccagcccagacccttctccttagaagtggaagtagtggagcccctgctctggtggggctgccaggggagaccccgggagccggaaggaggccgtccatcccgtcgacgtagaacctcgaggtttctcaaagaaatttccactcaggtctgttttccgaggcggccccgggcgggtggattggatttgtctttggtgaacattgcaatagaaatccaattggatacgacaacttgcacgtattttaatagcgtcataactagaactgaattttgtctttatgatttttaaagaaaagttttgtaaatttctctactgtctcagtttacattttcggtatatttgtatttaaatgaagtgagactttgagggtgtatattttctgtgcagccactgttaagccatgtgttccaaggcattttagcggggagggggttatcaaaaaaaaaaaaaatgtgactcaagacttccagagcctcaaatga

SEQ ID NO: 1870 - DNA, 196 bp, Homo sapiens
  misc_feature (93)..(93): n includes a, c, g, or t, or contains no nucleotide
  misc_feature (133)..(133): n includes a, c, g, or t, or contains no nucleotide
cctcttgattgtatagagtcattgtgtatattccagttacctagatattcccttgagattttgatacaatttgagggaggcagaagtctgcanttgaagaaaaaaaataagtctgtttgtcatatttaagtancctgtggctatttttatactgattttgatatcatgttcttttcatagtcgtattttgccaccg

SEQ ID NO: 1871 - DNA, 398 bp, Homo sapiens
  misc_feature (54)..(54): n includes a, c, g, or t, or contains no nucleotide
  misc_feature (103)..(103): n includes a, c, g, or t, or contains no nucleotide
  misc_feature (106)..(106): n includes a, c, g, or t, or contains no nucleotide
  misc_feature (123)..(123): n includes a, c, g, or t, or contains no nucleotide
  misc_feature (142)..(142): n includes a, c, g, or t, or contains no nucleotide
aggagagcaactccttgcgccccgtcgcctgccgccactgcaaagccctgatcntgggcatctacaagcagggcctcaaatgccgagcctgtggagtgaactnccncaagcagtgcaaggatngcctgtcagttgagtgtcngcgcagggcccagagtgtgagcctggaggggtctgcaccctcaccctcacccatgcacagccaccatcaccgcgccttcagcttctctctgccccgccctggcaggcgaggctccaggcctccagagatccgtgaggaggaggtacagacggtggaggatggggtgtttgacatccacttgtaatagatgctgtggttggatcaaggactcattcctgccttggagaaaatacttcaaccagagcagggagcctgg

SEQ ID NO: 1872 - DNA, 445 bp, Homo sapiens
  misc_feature (70)..(70): n includes a, c, g, or t, or contains no nucleotide
  misc_feature (75)..(75): n includes a, c, g, or t, or contains no nucleotide
  misc_feature (84)..(84): n includes a, c, g, or t, or contains no nucleotide
  misc_feature (88)..(88): n includes a, c, g, or t, or contains no nucleotide
  misc_feature (92)..(107): n includes a, c, g, or t, or contains no nucleotide
  misc_feature (110)..(110): n includes a, c, g, or t, or contains no nucleotide
  misc_feature (307)..(333): n includes a, c, g, or t, or contains no nucleotide
gtgccgcctgccaaagcgtccagagccatgtccacccctgaagtgccctgagccctgcccaccaccaaantgtcnacagccctngccnaccnnnnnnnnnnnnnnnnaantatcctctggtgacaccttccccaccctgccagccaaagtgtccacccaagagcaagtaacagcttcggaattcatcaggaccacgaaaggatagggataattggctcacctcgttccacagctccacctgcatcttctcatcaaagccatccagggatacacagggagcttctttccccttagcctgtgatctgcnnnnnnnnnnnnnnnnnnnnnnnnnnnttcctttctgaggctgccatgctgccactgtccaggtggagactgagcaaaggaagtcctcagctgtaccggcctttcagagcttctctttgggtgccatcaaagaattatt

SEQ ID NO: 1873 - DNA, 198 bp, Homo sapiens
tctacatgaaagtcctcagtaagtgttagagggaacagggcggagatatccttatgccacccccgctggaggatgtgggcagccttagggccctggaggcggtgcggcagggaagaggggtgcagaggctgtggctggtgagccggtcaggcacacaaggggcccttggagcgtggactggttggttttgccattttg

SEQ ID NO: 1874 - DNA, 226 bp, Homo sapiens
  misc_feature (108)..(122): n includes a, c, g, or t, or contains no nucleotide
  misc_feature (165)..(191): n includes a, c, g, or t, or contains no nucleotide
aaatggcatgtgtgccatagcagacctgggcctggctgtccgtcatgatgcagtcactgacaccattgacattgccccgaatcagagggtggggaccaaacgatacannnnnnnnnnnnnnnttgatgaaaccattaatatgaaacactttgactcctttaaatnnnnnnnnnnnnnnnnnnnnnnnnnnntatattgggagattgctcgaagatgcaattctgga

SEQ ID NO: 1875 - DNA, 547 bp, Homo sapiens
gcagttccagcagcaagatcatctctaccaccaccctgaacaagagacgatagaggagacgaggtccctgcagctcactgtgtccagctgggcccagcactggtgtctctgtgcttccttcacttcacctccatcctctgtctctggggctcatcttactagtatcccctccactatcccatgggctctctctgccccaggatgatcttctgtgctgggacagggactctgcctcttggagtttggtagctacttcttgatttgggcctggtgacccacctggaatgggaaggatgtcagctgacctctcacctcccatgggcagagaagaaaatgaccaggagtgtcatctccagaattattggggtcacatatgtcccttcccagtccaatgccatctcccactagatcctgtattatccatctacatcagaaccaaactacttctccaacacccggcagcacttggccctgcaagcttaggatgagaaccacttagtgtcccattctactcctctcattccctcttatccatctgcaggtgaat

SEQ ID NO: 1876 - DNA, 558 bp, Homo sapiens
  misc_feature (35)..(35): n includes a, c, g, or t, or contains no nucleotide
  misc_feature (177)..(177): n includes a, c, g, or t, or contains no nucleotide
  misc_feature (205)..(205): n includes a, c, g, or t, or contains no nucleotide
  misc_feature (215)..(215): n includes a, c, g, or t, or contains no nucleotide
  misc_feature (219)..(220): n includes a, c, g, or t, or contains no nucleotide
  misc_feature (230)..(230): n includes a, c, g, or t, or contains no nucleotide
  misc_feature (238)..(238): n includes a, c, g, or t, or contains no nucleotide
  misc_feature (256)..(256): n includes a, c, g, or t, or contains no nucleotide
  misc_feature (277)..(277): n includes a, c, g, or t, or contains no nucleotide
  misc_feature (289)..(289): n includes a, c, g, or t, or contains no nucleotide
  misc_feature (297)..(297): n includes a, c, g, or t, or contains no nucleotide
  misc_feature (300)..(300): n includes a, c, g, or t, or contains no nucleotide
  misc_feature (336)..(336): n includes a, c, g, or t, or contains no nucleotide
  misc_feature (363)..(363): n includes a, c, g, or t, or contains no nucleotide
gctgcagatttatctgcacaaacatctccactttngggggaaaggtgggtagattccagttccctggactaccttcaggaggcacgagagctgggagaagaggcaaagctacaggtttacttgggagccagctgagaagagagcagactcacaggtgctggtgcttggatttagccnaggctcctccgagcacctcatgcatgtncccagccccngggnnccctagcccntttcctgnccctgcagtctgcagtgnccagcacgcaaatcccttcanccacagggtttncgttttgnctnggcttgaagacaaatggtcttagaattcattgagancccatagcttcatatggctgctccagnccccacttcttagcattcttactcctcttctggggctaatgtcagcatctatagacaatagactattaaaaaatcaccttttaaacaagaaacggaaggcatttgatgcagaatttttgcatgacaacatagaaataatttaaaaatagtgtttgttctgaatgttggtagacccttcatagctttgttacaatg

SEQ ID NO: 1877 - DNA, 497 bp, Homo sapiens
  misc_feature (32)..(32): n includes a, c, g, or t, or contains no nucleotide
  misc_feature (76)..(76): n includes a, c, g, or t, or contains no nucleotide
  misc_feature (82)..(137): n includes a, c, g, or t, or contains no nucleotide
  misc_feature (139)..(139): n includes a, c, g, or t, or contains no nucleotide
  misc_feature (142)..(142): n includes a, c, g, or t, or contains no nucleotide
  misc_feature (149)..(152): n includes a, c, g, or t, or contains no nucleotide
  misc_feature (154)..(154): n includes a, c, g, or t, or contains no nucleotide
  misc_feature (181)..(181): n includes a, c, g, or t, or contains no nucleotide
tggtccttcaccacttcctgttggccctggcntggccggggaaggtggcagcggcaccggactgacctgcagtganccgcgnnnnnnnnnnnnnnnnnnnnnnnnnnnnnnnnnnnnnnnnnnnnnnnnnnnnnnnncntgncgccgcnnnncngtcgggggctggcttcgaggacgcccngcctgcctcgcgggtcgtgtccgcgggactgtgttcgtacgtgcatagtttcgatatcacatcgcggggctgtgttcgtagctgcgtcgtttcgatatcacaccctctgtgtgccgccttacttcctgcttcgagaatgtataacgtggaaatccacgggaccaaatttctgcagaggccttgccggatggttccataactgtagagtctaattgctatccattacagaaattaatcgttcagttgaaagaagtactgatgacttttcaaaacaaatgaaccaccgtagctgacagagaaccgtatcgtagaggtt

SEQ ID NO: 1878 - DNA, 480 bp, Homo sapiens
aacttatgaaaatccaaatgcaggatagtaatttttgtttacttttttaaccaaactgaatttttgaaagactattgcaggtgtttaaaaagaaagaaaagttgttttatctaatactgtaagtagttgtcatattctggaaaatttaatagttttagagttaagatatctcctctctttggttagggaagaagaaagcccttcaccattgtggaatgatgccctggctttaaggtttagctccacatcatgcttctcttgagaattctatttggtagttacaattacagaaactgattagtttgtcagtttgcagatagatttagcacagtactcatcactcggatagattgagatgttctttcacatcagatgatctgtaacactgtaagatactgatctttacaactgtttaatcagttttatttttgtacagtattagtgacctaagttattttgctgtcccgtttttgtaaatca

SEQ ID NO: 1879 - DNA, 415 bp, Homo sapiens
tgtaccactgtcttcaagccctcctgctacacatttcccagatgaaactgaaattacaaacccagttcctaaaaagaatgtgacagtgaagaagacagcagcaaaaagtcagtcttccacctccactaccggtgccaaaaaaagggctgccccaaaaggaactaaaagggatccagctttgaattctggtgtctctcaaaagcctgatcctgccaaaaccaagaatcgccgcaaaaggaagccatccacttctgatgattctgactctaattttgagaaaattgtttcgaaagcagtcacaagcaagaaatccaagggggagagtgatgacttccatatggactttgactcagctgtggctcctcgggcaaaatctgtacgggcaaagaaacctataaagtacctggaagagtca

SEQ ID NO: 1880 - DNA, 511 bp, Homo sapiens
  misc_feature (26)..(136): n includes a, c, g, or t, or contains no nucleotide
  misc_feature (194)..(194): n includes a, c, g, or t, or contains no nucleotide
  misc_feature (200)..(200): n includes a, c, g, or t, or contains no nucleotide
  misc_feature (231)..(232): n includes a, c, g, or t, or contains no nucleotide
cctggcacacagaatcattcatacgnnnnnnnnnnnnnnnnnnnnnnnnnnnnnnnnnnnnnnnnnnnnnnnnnnnnnnnnnnnnnnnnnnnnnnnnnnnnnnnnnnnnnnnnnnnnnnnnnnnnnnnnnnnnnnngtacccctgctgtttgcttttggtaatgtgatgttgatgttctccccctacccacaanccatgncccttgagggtagcagggcagcagcataccnnaaagagatgtgctgcaggactccggaggcggcctgggtgggtgagccatggggcagttgacctgggtcttgaaagagtcgggagtgacaagctcagagagcatgaactgatgctggcatgaaggattccaggaagatcatggagacctggctggtagctgtaacagagatggtggagtccaaggaaacagcctgtctctggtgaatgggactttctttggtggacacttggcaccagctctgagagcccttcccctgtgtcctgccaccatgtgggtca

SEQ ID NO: 1881 - DNA, 350 bp, Homo sapiens
aataccagcagcagccttagagcacagggagacccgtccatttggcaggggtggctgcctcatttagagaggaaaagtaaccatcactggttgcacttatgatttcatgtgcggggatcatctgccgtgcctggatcctgaaatagaggctaaattactcaggaagaacaccctctaaatgggaaagtattctgtactcttagatggattctccactcagttgcaacttggacttgtcctcagcagctggtaatcttgctctgcttgacaacatctgagtgcagccgtttgagaagaaaacatctattctctccaaaaatgcacccaactagctctatgtttacaaatgg

SEQ ID NO: 1882 - DNA, 542 bp, Homo sapiens
  misc_feature (32)..(32): n includes a, c, g, or t, or contains no nucleotide
  misc_feature (173)..(173): n includes a, c, g, or t, or contains no nucleotide
  misc_feature (188)..(188): n includes a, c, g, or t, or contains no nucleotide
  misc_feature (223)..(223): n includes a, c, g, or t, or contains no nucleotide
  misc_feature (237)..(238): n includes a, c, g, or t, or contains no nucleotide
  misc_feature (336)..(336): n includes a, c, g, or t, or contains no nucleotide
  misc_feature (344)..(344): n includes a, c, g, or t, or contains no nucleotide
  misc_feature (382)..(382): n includes a, c, g, or t, or contains no nucleotide
  misc_feature (434)..(453): n includes a, c, g, or t, or contains no nucleotide
ccaagtctctgcagaagatagggcccatcctnggacaacagcaccttgcagagtgaagtcaagcccatcctagagaagctgacccaggaccaggatgtggacgtcaaatactttgcccaggaggctctgactgttctgtctctcgcctgatgctggaagaggagcaaacactnggcctctggtgtccnaccctccaacccccacaagtccctctttggggagnacactggggggccnntttggctgtcactccctgtgcatggtctgaccccaggccccttcccccagcacggttcctcctctccccagcctgggaagatgtctcactgtccaccntcccaacngggctaggggagcacggggttggacaggacagtgaccnttgggaggaaggggctactccgcccacgtcagggagagatgtgagcatcccnnnnnnnnnnnnnnnnnnnntgtaatgggaacccctcccccatttacttctccacctcccgtcctccccatcattggtttttttttgtgtgtcaactgtgccgttttta

SEQ ID NO: 1883 - DNA, 454 bp, Homo sapiens
  misc_feature (39)..(85): n includes a, c, g, or t, or contains no nucleotide
  misc_feature (116)..(116): n includes a, c, g, or t, or contains no nucleotide
  misc_feature (123)..(123): n includes a, c, g, or t, or contains no nucleotide
  misc_feature (127)..(127): n includes a, c, g, or t, or contains no nucleotide
  misc_feature (129)..(129): n includes a, c, g, or t, or contains no nucleotide
  misc_feature (146)..(151): n includes a, c, g, or t, or contains no nucleotide
  misc_feature (153)..(156): n includes a, c, g, or t, or contains no nucleotide
  misc_feature (162)..(187): n includes a, c, g, or t, or contains no nucleotide
  misc_feature (203)..(220): n includes a, c, g, or t, or contains no nucleotide
  misc_feature (260)..(260): n includes a, c, g, or t, or contains no nucleotide
tagaaatctcctctcgcttctctggccttgtgaggttgnnnnnnnnnnnnnnnnnnnnnnnnnnnnnnnnnnnnnnnnnnnnnnnttcaacatttatgcagtcagggcagggatgnttatatntttnanaagggctgttgcaaccnnnnnnannnnaaaaannnnnnnnnnnnnnnnnnnnnnnnnnatattctttacaccannnnnnnnnnnnnnnnnnatcaaatagcattcagagtatttgaatgtccaccagacanccagccccggggggcacagagagaacaacattcctctctgtcaacatcgagaggctttaaaacaactgtttagtggaaactttctgagagatggaaaacaagcttctggtgggtgcattttctggcccggagttgcctgcatccacgctactgccccctgccccccgcccccccagtttgtacggttgcaacag

SEQ ID NO: 1884 - DNA, 397 bp, Homo sapiens
acgaggcttatcctggcaatggggtagtcactgccacccttccacacacacacacacacacacacacacacacacaaaaatcccttccttgtgggattcttgggcatctcctgcctccctcactctcacggtaattaatgtcttaattggctgttgcctggggaacaggagagctgctgcaggcagatgacctcatggggggtggagggaggtgaggtgcccaggtgtctatttaccctgcagagctgggagtttcaccccaccccccaccctgttctctccttacctttggcatcctttggcctggtggggaaacagaggcccagggtggagacctaagcgggtataagaccaggtggcctgctccttttctgggccctagcacaggtgggtaacc

SEQ ID NO: 1885 - DNA, 254 bp, Homo sapiens
  misc_feature (109)..(109): n includes a, c, g, or t, or contains no nucleotide
ttgtttacagtgaggactcggccactgtgtctctgtttcctgaaatataaactgtagcgaccccagactgtagagatttttatgtgtttggatacatctgctgtgtggnaaaaaaaaaaaaactacaaaaaccctaattttgtacatactgtatttttactattgaactgtattctagtggctgttcatgctccaagactttagttaccgagacatgaatactatccatgtaataagcacttgcctggaataaa

SEQ ID NO: 1886 - DNA, 582 bp, Homo sapiens
  misc_feature (252)..(267): n includes a, c, g, or t, or contains no nucleotide
  misc_feature (275)..(275): n includes a, c, g, or t, or contains no nucleotide
  misc_feature (278)..(278): n includes a, c, g, or t, or contains no nucleotide
  misc_feature (280)..(282): n includes a, c, g, or t, or contains no nucleotide
  misc_feature (284)..(284): n includes a, c, g, or t, or contains no nucleotide
  misc_feature (291)..(291): n includes a, c, g, or t, or contains no nucleotide
  misc_feature (293)..(295): n includes a, c, g, or t, or contains no nucleotide
  misc_feature (297)..(346): n includes a, c, g, or t, or contains no nucleotide
  misc_feature (348)..(357): n includes a, c, g, or t, or contains no nucleotide
  misc_feature (359)..(360): n includes a, c, g, or t, or contains no nucleotide
  misc_feature (362)..(362): n includes a, c, g, or t, or contains no nucleotide
  misc_feature (433)..(433): n includes a, c, g, or t, or contains no nucleotide
  misc_feature (466)..(466): n includes a, c, g, or t, or contains no nucleotide
  misc_feature (468)..(520): n includes a, c, g, or t, or contains no nucleotide
  misc_feature (524)..(524): n includes a, c, g, or t, or contains no nucleotide
  misc_feature (528)..(542): n includes a, c, g, or t, or contains no nucleotide
atcgtcaaccagaaagcctccctgtggaagctggacctgtgcaccaccgtcctgccacagattgagaagcttctgcagagcaagtatgagagctacgtccagacgggctgcacctccctgaagctgatcctgcagcggtttctgcccctcatcacagacatgctggcggccccaccctctgtgggtgtggatatcagcagggaggagaggctgcataagtgccggctctgctacaagcagcttaagagcatnnnnnnnnnnnnnnnngagcaagncangnnngngcggccncnnngnnnnnnnnnnnnnnnnnnnnnnnnnnnnnnnnnnnnnnnnnnnnnnnnnnannnnnnnnnngnngngctcggcagcccacagggcctggcctcagcccccactcctgttccttgtgcacccactggcccatgagccnctgcctggcccctgctgctgtcctgtggccgtncnnnnnnnnnnnnnnnnnnnnnnnnnnnnnnnnnnnnnnnnnnnnnnnnnnnnnacanctcnnnnnnnnnnnnnnngcccagctttgcccaactgttgcttcttggggcagcgaac

SEQ ID NO: 1887 - DNA, 460 bp, Homo sapiens
  misc_feature (78)..(78): n includes a, c, g, or t, or contains no nucleotide
  misc_feature (98)..(98): n includes a, c, g, or t, or contains no nucleotide
  misc_feature (106)..(106): n includes a, c, g, or t, or contains no nucleotide
  misc_feature (140)..(143): n includes a, c, g, or t, or contains no nucleotide
  misc_feature (145)..(146): n includes a, c, g, or t, or contains no nucleotide
  misc_feature (149)..(178): n includes a, c, g, or t, or contains no nucleotide
  misc_feature (205)..(233): n includes a, c, g, or t, or contains no nucleotide
  misc_feature (435)..(435): n includes a, c, g, or t, or contains no nucleotide
agagatttcatgctcagttttagcaccgacccccaggacttcatccaggaatggctccgttcccagcgccgagacctnaagatcatcactgatgtgantggaaatnctgaggaggagagacgagctgctttctaccaccnnnncnnggnnnnnnnnnnnnnnnnnnnnnnnnnnnnnnccaaggtgcagcagcgaaggcaggaannnnnnnnnnnnnnnnnnnnnnnnnnnnnctaactgctcagggatctttcttcccagccctggagcctggagggagaccaccctctgggtccttgctggggccgcagacacgtaggctggggtgaggagtgtctgctgtcaccctctactctccagctttagttttataaatgtagtgataggattccttgttgcttggtccccaaagccttatactttttgcattggctntaattgggttcagcagatgcctcct

SEQ ID NO: 1888 - DNA, 211 bp, Homo sapiens
  misc_feature (116)..(116): n includes a, c, g, or t, or contains no nucleotide
agagaacaactatcccagagcagaagtggtgatgcaagatgttgcccccaacccagatgacccggaagatttccctgcgctgtcttgaaagagccctgtttcccagcaccgcgganctgcactgcacacctgtggggagacttttccagctgggccaagggagtcagactctaagaacaatagatgttgcttttcccgtgtcatgtaaatt

SEQ ID NO: 1889 - DNA, 345 bp, Homo sapiens
gctcggctgaaccaggactcctcactgtctacctgagagaatgagcacccctcatccatctcagcatcaacacaatttccaggggacctcaggtctacctcaggactgaacgccacacctcaggattcctcctccttgaatctgagactggctgcccattctgagatggggatgaaggtaagatgccgcatcaccaggcacgccgcccctgacagctgccttgataccagctctctgtggaaacccccgaggagttggatctggagaacagctgggcctcctcactcaggacttctctcctgaagaacacgcagtgctaaaactgaggatgatttccctaatgct

SEQ ID NO: 1890 - DNA, 583 bp, Homo sapiens
  misc_feature (29)..(29): n includes a, c, g, or t, or contains no nucleotide
  misc_feature (38)..(38): n includes a, c, g, or t, or contains no nucleotide
  misc_feature (47)..(47): n includes a, c, g, or t, or contains no nucleotide
  misc_feature (51)..(101): n includes a, c, g, or t, or contains no nucleotide
  misc_feature (207)..(221): n includes a, c, g, or t, or contains no nucleotide
  misc_feature (240)..(240): n includes a, c, g, or t, or contains no nucleotide
  misc_feature (243)..(246): n includes a, c, g, or t, or contains no nucleotide
  misc_feature (249)..(292): n includes a, c, g, or t, or contains no nucleotide
  misc_feature (294)..(299): n includes a, c, g, or t, or contains no nucleotide
cttaagtgtatctgtccagatgaaggatngggtcacangacctcttngctnnnnnnnnnnnnnnnnnnnnnnnnnnnnnnnnnnnnnnnnnnnnnnnnnnnggcccttcaagtggtctgaaaccgtggctctaaaaaccacagctggtggagaggaggacagacacacttgccaccttgcctacctaattgccatctaaaatgggcnnnnnnnnnnnnnnnacaatagagttttcacccnttnnnnttnnnnnnnnnnnnnnnnnnnnnnnnnnnnnnnnnnnnnnnnnnnncnnnnnngggagcaaaaaatgtgctgaggagactgtttacctaaaggttgttcttggtgctattccttgtcaaaatgtgaacacacacaaatgaggtttgtgcattgtcatccgtgggctgccattgagccagtaacccccagtggtctcatggtgctcttcgctccagtttggggaatgctggattctttcagcccctgcagccctccaggtcaaaatgacactttgtcactgagttttctacacagctctattagtaactgacagcacacgccttcaagggaacttcaa

SEQ ID NO: 1891 - DNA, 392 bp, Homo sapiens
  misc_feature (104)..(186): n includes a, c, g, or t, or contains no nucleotide
  misc_feature (274)..(294): n includes a, c, g, or t, or contains no nucleotide
  misc_feature (347)..(347): n includes a, c, g, or t, or contains no nucleotide
  misc_feature (361)..(364): n includes a, c, g, or t, or contains no nucleotide
  misc_feature (366)..(366): n includes a, c, g, or t, or contains no nucleotide
tctccccttgagctgagcagggtggggaacatcttgcacaggctgcagaccaccttccaagaagccctcgacctttaccgtgtgttggtctccagtggccaggnnnnnnnnnnnnnnnnnnnnnnnnnnnnnnnnnnnnnnnnnnnnnnnnnnnnnnnnnnnnnnnnnnnnnnnnnnnnnnnnnnngtggggactagtgtggccccagcccaggctctgcccagcccaggacccccgtccccaccgacgctgtaccccctggccagcccagacnnnnnnnnnnnnnnnnnnnnntactcggagctgctggtgcaggccgtgcggaggaaggcacgggggcactgagngcgcagcccctccnnnncngccctgctgcttctgaggacttaggt

SEQ ID NO: 1892 - DNA, 456 bp, Homo sapiens
  misc_feature (115)..(115): n includes a, c, g, or t, or contains no nucleotide
  misc_feature (393)..(393): n includes a, c, g, or t, or contains no nucleotide
  misc_feature (396)..(396): n includes a, c, g, or t, or contains no nucleotide
  misc_feature (410)..(410): n includes a, c, g, or t, or contains no nucleotide
  misc_feature (413)..(413): n includes a, c, g, or t, or contains no nucleotide
aaaggtaccagctttggaacgagatgctatactaataagcaagtgtaaaaaaaaaaaaaaaagaggaagaaaatcttaagtgattgatgctgttttcttttaaaaaaaaaaaaanaaaattcattttctttgggttagagctagagagaaggccccaagcttctatggtttcttctaattcttattgcttaaagtatgagtatgtcacttacccgtgcttctgtttactgtgtaattaaaatgggtagtactgtttacctaactacctcatggatgtgttaaggcatattgagttaaatctcatataatgtttctcaatcttgttaaaagctcaaaattttgggcctatttgtaatgccagtgtgacactaagcattttgttcacaccacgcnttnataactaaactggnaancaaaggtgttaagtacctctgttctggatctgggcagtcagca

SEQ ID NO: 1893 - DNA, 265 bp, Homo sapiens
aaattgatatcatctgatggccatgaatttattgtaaaaagagaacatgcattaacatcaggcacgataaaagccatgttgagtggcccaggtcagtttgctgagaacgaaaccaatgaggtcaattttagagagataccttcacatgtgctatcgaaagtatgcatgtattttacgtacaaggttcgctacactaacagctccaccgagattcctgaattcccaattgcacctgaaattgcactggaactgctgatggctgcga

SEQ ID NO: 1894 - DNA, 499 bp, Homo sapiens
  misc_feature (26)..(26): n includes a, c, g, or t, or contains no nucleotide
  misc_feature (397)..(397): n includes a, c, g, or t, or contains no nucleotide
gagcttagttccaatgcatttggctnccagaaagaccccagtgccttttgacaatggccagggttttacctacttcctgccagtctttcccaaaggaaactcattccaaatacttcttttttcccctggagtccgagaaggaaaatggaattctggttcatactgtggtcccttgtaacctcaggtctttaatgtgatcactttcaaatttaaaagatccaggtggaaatatttttactatagtaataattctacaaaatacctgaattcttaacactgttatatttcagtataagtggtggctttttcttttcatgtctttgatctggttttattcctgtaattcagccacctgattttgtgaggggggggaataatatgtggtttttgtacaaanatgtttctcagtgtgttgttattttggaaaaaatgaggggagggagtttggcaagaatggagaaaatgaatgaagaaggcctaatctctctctttttcagtg

SEQ ID NO: 1895 - DNA, 464 bp, Homo sapiens
  misc_feature (31)..(31): n includes a, c, g, or t, or contains no nucleotide
  misc_feature (51)..(51): n includes a, c, g, or t, or contains no nucleotide
  misc_feature (116)..(116): n includes a, c, g, or t, or contains no nucleotide
gagccttaagacactccctcaatgccacccntgaccccacggctggagaanccctgtgcttatgtggtgggcagggccactgttgatggaggatggcggggacggggtggtgctcnaaaggatctgtggtgctggaggtctacacgcctctcaggacagcgtgtcaggaacctcagagcagcttcacatctgccaaagctgagagggagcgaacttgggaagcattttgctcattgtcctacccaagtattaatagcataatagttgatgccaaaggagatggtgacgtcccttccactgtagttgctgtcacaaccttgacgtctttaagctaatggccgtttgcatctgtgtcttcaaacagatcctggttacagccattttgtgtgattcacttcgggggttaagtaatgcaggattctgcaaacaaggtgtcgccgtccaaatgtactgtcctggcatag

SEQ ID NO: 1896 - DNA, 223 bp, Homo sapiens
  misc_feature (174)..(183): n includes a, c, g, or t, or contains no nucleotide
agttgtcaaccttcattcatctcttacatctctcaccctctccttttttttttctttgattttcccccttattgatgggactgatattcattctgtttttgatgaacatttggaaactgtcgggctttttattaaagctctgtagaattaaaatgttctggaattataagcaannnnnnnnnntgagtgttatttttattttggatatagctttgatgtaatt

SEQ ID NO: 1897 - DNA, 332 bp, Homo sapiens
  misc_feature (229)..(252): n includes a, c, g, or t, or contains no nucleotide
gaaacccaggtgctggaccagggccctcagggaggggaccctgcggctagagtgggctaggccctggctttgcccgtcagatttgaacgaatgtgtgtcccttgagcccaaggagagcggcaggaggggtgggaccaggctgggaggacagagccagcagctgccatgccctcctgctccccccaccccagccctagccctttagcctttcaccctgtgctctggaaannnnnnnnnnnnnnnnnnnnnnnnaggaggagcaaaaatgagccagcaccagcgccttggctttgtgttagcatttcctcctgaagtgttctgttggcaataaa

SEQ ID NO: 1898 - DNA, 564 bp, Homo sapiens
  misc_feature (48)..(108): n includes a, c, g, or t, or contains no nucleotide
  misc_feature (167)..(168): n includes a, c, g, or t, or contains no nucleotide
  misc_feature (180)..(180): n includes a, c, g, or t, or contains no nucleotide
  misc_feature (224)..(300): n includes a, c, g, or t, or contains no nucleotide
  misc_feature (314)..(351): n includes a, c, g, or t, or contains no nucleotide
  misc_feature (417)..(417): n includes a, c, g, or t, or contains no nucleotide
  misc_feature (455)..(472): n includes a, c, g, or t, or contains no nucleotide
ctgtgacatctttccgtgtcaccctgcctggaagaggtctgggtgggnnnnnnnnnnnnnnnnnnnnnnnnnnnnnnnnnnnnnnnnnnnnnnnnnnnnnnnnnnnnngccatggggcctgccgtgcctgccccactgtgacccacaggcctgggtggtgtacctcnnggacttctcccnaggctcactcagtgcgcacttaggggtggactcagctctgtctnnnnnnnnnnnnnnnnnnnnnnnnnnnnnnnnnnnnnnnnnnnnnnnnnnnnnnnnnnnnnnnnnnnnnnnnnnnnnctgacagctcctannnnnnnnnnnnnnnnnnnnnnnnnnnnnnnnnnnnnnactgtttccctgggctgagaggggaagtgcatatgtgtagcgggtactggttcctgtgtcttaggncacaagccttagcaaatgattgattctccctggacaannnnnnnnnnnnnnnnnngcagggaaaaggaagaacagagtttatttttacagaaaagagggtgggagggtgtggtcttggcccttataggaccctgtgccaataaacag

SEQ ID NO: 1899 - DNA, 541 bp, Homo sapiens
ttcgctgacatcctgcgagactacaaagttattatggctgaaaacattcctgaaaaccctctgaagtacctatatcctgacattcccaaagacaaagccttcggtaaacactacagctctcagccttgcgaagtttcaagaccaacagaaaggggtgacaaaggttatgttccttctgtttttatccccatctcaacaatccgaagtgattcaacagagccacattctccatcagaccttcttcccatgtctccaagtgtgtatgcggtgttgagagaaaacctgagtcccacaacaattgaaactgcaatgaagtctccttattctgctgaatgacaggataaactctgacgcaccaagaaaggaagcaaatgaaaaagtttaaagactgttctttgcccaataaccacattttatttcttcagctttgtaaataccaggttctaggaaatgtttgacatctgaagctctcttcacactcccgtggcactcctcaattgggagtgttgtgactgaaatgcttgaaaccaaagcttcagat

SEQ ID NO: 1900 - DNA, 294 bp, Homo sapiens
  misc_feature (98)..(98): n includes a, c, g, or t, or contains no nucleotide
  misc_feature (127)..(127): n includes a, c, g, or t, or contains no nucleotide
  misc_feature (142)..(142): n includes a, c, g, or t, or contains no nucleotide
  misc_feature (144)..(144): n includes a, c, g, or t, or contains no nucleotide
  misc_feature (171)..(172): n includes a, c, g, or t, or contains no nucleotide
tgaggtttgcttccttctacttaaaaaacaacttgaacatacctgtttggatcacatggtcttgtcctgataacttggaagaggttgcttcagcattnttcttattgttgtggtggttattattaanattgtttcatattcngnttaaaaaattaaaattttacacaagannaatgtcttcttttcaattccagtacatttttcagaagtaactaatgctattggctttgtgcattgtaatttcagaccattttatatgtctttagttatatgtacagtatacacacatatgtg

SEQ ID NO: 1901 - DNA, 559 bp, Homo sapiens
  misc_feature (29)..(43): n includes a, c, g, or t, or contains no nucleotide
  misc_feature (95)..(95): n includes a, c, g, or t, or contains no nucleotide
  misc_feature (121)..(121): n includes a, c, g, or t, or contains no nucleotide
  misc_feature (134)..(134): n includes a, c, g, or t, or contains no nucleotide
  misc_feature (156)..(156): n includes a, c, g, or t, or contains no nucleotide
  misc_feature (170)..(170): n includes a, c, g, or t, or contains no nucleotide
  misc_feature (184)..(184): n includes a, c, g, or t, or contains no nucleotide
  misc_feature (199)..(199): n includes a, c, g, or t, or contains no nucleotide
  misc_feature (215)..(216): n includes a, c, g, or t, or contains no nucleotide
  misc_feature (258)..(260): n includes a, c, g, or t, or contains no nucleotide
  misc_feature (504)..(504): n includes a, c, g, or t, or contains no nucleotide
cagaaattccttgtggggacatccgcttnnnnnnnnnnnnnnncactcaccgagaggaaaaaggcttctccacaacctcctcctccagttctgangaggcacgcctgccttctcccctccnagtgaatgagttnccagctaagcctgatgatggangggccttctccacngggacacagtctgntgcccagactcaagncctccagccacttatnnccatggattcccctggacatattcccatggtagactgtgacnnngctgagctggcctattttggacgtgtgaggatgtggatggaggtgatgaaaaccaccctatcatcagttaggattaggtttagaatcaagtctgtgaaagtctcctgtatcatttcttggtatgatcattggtatctgatatctgtttgcttctaaaggtttcactgttcatgaatacgtaaactgcgtaggagagaacagggatgctatctcgctagccatatattttctgagtagcatatanaattttattgctggaatctactagaaccttctaatccatgtgctgctgtggcatc

SEQ ID NO: 1902 - DNA, 191 bp, Homo sapiens
agaagagacccaaatcattctgaaggctcaactactttactggaaggttatacctctcattacccacacacgaaggaaagcaggaccttcatcccagtgacctcagctaagactgggtcctttggagttactgcagttactgttggagattccaactctaatgtcaatcgttccttatcaggagaccaaga

SEQ ID NO: 1903 - DNA, 462 bp, Homo sapiens
cacgacccgtatgaagggaaagtggagttcaaactcaagattgagaagtgaaacgtttgcgcaggggtcctgggcacgcctgcggggtcgctcaaggacaccctcctggttgggcttaccttgcccgtcagttccctgccaaatcatccccaaagtggtttggagcaacggtgttgtcagtgtgcgaactccagagaagcgcccacatctgaaggacctgctcgcgagtatcagttcttccttgttgaattcttacagtttttagatggaatttgctgctataagaatgtccagctaccatgggaacgcaaggcagcaactctctaattaaccaggtcataaaaacgattcgtcttctatgtagacatcactttcttactataatttatttttctacacttcaatatgaactgccccccccacattaatataaaaactactaatgcactgatatgaaacacg

SEQ ID NO: 1904 - DNA, 444 bp, Homo sapiens
  misc_feature (105)..(105): n includes a, c, g, or t, or contains no nucleotide
gagcttctccacctggaaatttccctctcacctacttctctggccctgggtacccctcttctcatcacttcctgttcccaccactggactgggctggcccagccncctgtttttccaacattccccagtatccccagcttctgctgcgctggtttgcggctttgggaaataaaataccgttgtatatattctgccaggggtgttctagctttttgaggacagctcctgtatccttctcatccttgtctctccgcttgtcctcttgtgatgttaggacagagtgagagaagtcagctgtcacggggaaggtgagagagaggatgctaagcttcctactcactttctcctagccagcctggactttggagcgtggggtgggtgggacaatggctccccactctaagcactgcctcccctactccccgcatctttggggaatcggtt

SEQ ID NO: 1905 - DNA, 543 bp, Homo sapiens
  misc_feature (34)..(34): n includes a, c, g, or t, or contains no nucleotide
  misc_feature (166)..(166): n includes a, c, g, or t, or contains no nucleotide
  misc_feature (321)..(321): n includes a, c, g, or t, or contains no nucleotide
gctcctccaggtctccataaattgtctttggggnattccaccacacccaatgctctggagccacaaggagtgtcccttcttccccagcagagccgtgggagggtccttgtctgctctcctttgaaccttggcagcccttggatggagggctccctttccctccccnttttttttttctttgttcctgtgaaatgttaatctccgtgagttcttcctggttcatgtgttctggggggtttggggtgggagggaatgcagatgggagttgggggaggggaggatacagttcaggataccccagcctggagtcagggccagggnaggcatggccccacttgtatccagaagttcccaggggtgattgtgatggtggttgggactggaggttgtataaggtgttcttggaaggaaggggcaggagttggaattagttggtccctactgtcccccatgaggttgtgaacccctccccccaacttttcatgtttcttaaaggcattttggttttttaaaatctgtacagcaagagcaactttttctgtc

SEQ ID NO: 1906 - DNA, 501 bp, Homo sapiens
  misc_feature (224)..(238): n includes a, c, g, or t, or contains no nucleotide
gatgacccattttccctcatgaccgatcccaagctcatcatttggagccctgtgcgccgctcagatgtggcctggaactttgagaagttcctcatagggccggagggagagcccttccgacgctacagccgcaccttcccaaccatcaacattgagcctgacatcaagcgcctccttaaagttgccatatagatgtgaactgctcaacacacagatctcctacnnnnnnnnnnnnnnnggagccttaggatgcagcatgccttcaggagacactgctggacctcagcattcccttgatatcagtccccttcactgcagagccttgcctttcccctctgcctgtttccttttcctctcccaaccctctggttggtgattcaacttgggctccaagacttgggtaagctctgggccttcacagaatgatggcaccttcctaaaccctcatgggtggtgtctgagaggcgtgaagggcctggagccactctgctagaagagacc

SEQ ID NO: 1907 - DNA, 328 bp, Homo sapiens
  misc_feature (87)..(107): n includes a, c, g, or t, or contains no nucleotide
  misc_feature (241)..(286): n includes a, c, g, or t, or contains no nucleotide
ctaaatccagggtaaaatcaatgttacaaaatttaagggtatgttaactaaaggatagcatttctaagatattttgaatattagggnnnnnnnnnnnnnnnnnnnnngtaggatacttctcatgttttgaaattatatgaatatggaaaaaaatggcttaagaccagcgtctctgtatgacattgtgtggttgaccctctgagataactgttttcatctacagaattgcatttttgctttnnnnnnnnnnnnnnnnnnnnnnnnnnnnnnnnnnnnnnnnnnnnnnctgcatatataccagtcattatctgtttggtccttatacagt

SEQ ID NO: 1908 - DNA, 289 bp, Homo sapiens
  misc_feature (199)..(218): n includes a, c, g, or t, or contains no nucleotide
ccatcggcgtagtgggcaccgccgaggacaaccgcagccacagcgcccacttctttgagtttctcaccaaggagctagccctgggccaggaccggatacttatccgctttttccccttggagtcctggcagattggcaagatagggacggtcatgacttttttatgattgggcacggagggatccagggcatctgtgannnnnnnnnnnnnnnnnnnnagatctcttggcagagtgagggcctggagataaccagctttggattatcccgcatgcaacattcctgtgat

SEQ ID NO: 1909 - DNA, 588 bp, Homo sapiens
  misc_feature (210)..(210): n includes a, c, g, or t, or contains no nucleotide
  misc_feature (240)..(240): n includes a, c, g, or t, or contains no nucleotide
  misc_feature (274)..(396): n includes a, c, g, or t, or contains no nucleotide
gaacaggcttgcaattaagatcaataaggctgcagcaccatttcaatttactttccatcttacccagtagtttttgtgtttttaaattcgtttgggtggttatgtttgcatgcttaagcacacatttgaaaattaattatagctgtactacccgatgtttttccttggggatgatggccttgttcctttttaaattctgatgcttgaatnctattttctagtgatttttcacatctcccntttaagtttttgctgcagcaatttgagagagtannnnnnnnnnnnnnnnnnnnnnnnnnnnnnnnnnnnnnnnnnnnnnnnnnnnnnnnnnnnnnnnnnnnnnnnnnnnnnnnnnnnnnnnnnnnnnnnnnnnnnnnnnnnnnnnnnnnnnnnnnnacttaacaaaataatacccgagaatgtaaggtctctaagtcattactaacaaagagcaaaaataatatctgcagtattgtttttcccattgattttaagtcagtttagagtacaaactgtatattagaatttgcctgtaaaatgaattctaaaaagcagatgtaaagtctctcctgaaaatgttggcatagt

SEQ ID NO: 1910 - DNA, 493 bp, Homo sapiens
gtacgcactcatgagtgactgctggatctacaagtgggaggatcgccccgacttcctgaccgtggagcagcgcatgcgagcctgttactacagcctggccagcaaggtggaagggcccccaggcagcacacagaaggctgaggctgcctgtgcctgagctcccgctgcccaggggagccctccacgccggctcttccccaccctcagccccaccccaggtcctgcagtctggctgagccctgcttggttgtctccacacacagctgggctgtggtagggggtgtctcaggccacaccggccttgcattgcctgcctggccccctgtcctctctggctggggagcagggaggtccgggagggtgcggctgtgcagcctgtcctgggctggtggctcccggagggccctgagctgagggcattgcttacacggatgccttcccctgggccctgacattggagcctgggcatcctcaggtggtcaggcgtagatca

SEQ ID NO: 1911 - DNA, 327 bp, Homo sapiens
cctatcccgtgagtggattgtgagaaattccacccacgtggagacagcttactgcagcactgttggtgttcggagctcttctgtgccctggctccatgctttcacctacacaagcatcaccttcctaatcaccgcggggcggggagcgtgtggctctgccccttctctttaatctcatttaatttttattaaacatgctcagtacctgtgttgagaaaaggctttctttatcctaaagattattacctttttaaagtgctcttatattttcatgagtttttattttgtctctgagattttgtattccacattctagggtattctgta

SEQ ID NO: 1912 - DNA, 83 bp, Homo sapiens
aagacactgaatggctgaaaggtcaacagataggccttggagcattttcttcttgttatcaggctcaagatgtgggaactgga

SEQ ID NO: 1913 - DNA, 583 bp, Homo sapiens
cagttgctgctgccccactacaggccccacacctgccctgggcatgcccagcccctggtggtggggggttctctgctgagaaggcaaactgaggcagcatgcacggaggcggggtcaggggagacgaggccaagctgaggaggtgctgcaggtcccgtctggctccagcccttgtcagattcacccagggtgaagccttcaaagctttttgctaccaaagcccactcaccctttgagctacagaacactttgctaggagatactcttctgcctcctagacctgttctttccatctttagaaacatcagtttttgtatggaagccaccgggagatttctggatggtggtgcatccgtgaatgcgctgatcgtttcttccagttagagtcttcatctgtccgacaagttcactcgcctcggttgcggacctaggaccatttctctgcaggccacttaccttcccctgagtcaggcttactaatgctgccctcactgcctctttgcagtaggggagagagcagagaagtacaggtcatctgctgggatctagttttccaagtaacattttgtggtgacagaagcct

SEQ ID NO: 1914 - DNA, 561 bp, Homo sapiens
  misc_feature (249)..(249): n includes a, c, g, or t, or contains no nucleotide
  misc_feature (255)..(259): n includes a, c, g, or t, or contains no nucleotide
  misc_feature (277)..(369): n includes a, c, g, or t, or contains no nucleotide
  misc_feature (412)..(412): n includes a, c, g, or t, or contains no nucleotide
  misc_feature (432)..(481): n includes a, c, g, or t, or contains no nucleotide
tgtccctgctggaggagcgctttcgggtggccataaaagacaagcaggaaggaattgagtaggggccagagggggctctgctcggcctgtgagccccgttcctacctgtgcctgaccctccgctccaggtaccacaccgaggagagcggccggtcccagccatggcccgccttgtggccacccctcaccctgacaccgacgtgtcctgtacatagattaggttttatattcctaataaagtatagcggnagagannnnnaaaaaaaaaaaaaaaaannnnnnnnnnnnnnnnnnnnnnnnnnnnnnnnnnnnnnnnnnnnnnnnnnnnnnnnnnnnnnnnnnnnnnnnnnnnnnnnnnnnnnnnnnnnnaccaaagatccggggtccaggggctgctgcgggggctgtgctnagccggagagaagtgtgcannnnnnnnnnnnnnnnnnnnnnnnnnnnnnnnnnnnnnnnnnnnnnnnnnctgcctgtcagtcaaagcaggaacacttcttcctgcataactcgaaacacctttccacaggcttcttgtccacagtagag

SEQ ID NO: 1915 - DNA, 325 bp, Homo sapiens
  misc_feature (26)..(58): n includes a, c, g, or t, or contains no nucleotide
  misc_feature (279)..(279): n includes a, c, g, or t, or contains no nucleotide
taaacactagttggaagctctcaatnnnnnnnnnnnnnnnnnnnnnnnnnnnnnnnnntggggcagggggagcctcaagcacaatctagctgtcctcctaaagactctgtaatgctcactcccctcgcgttctcccggcgctgtcgggaggctgtgctggtggtcgtgtagaggtccttctcctttcacatggtgcagagagcgaggacctctcctcctcgttcagttgcacttcagtattttcacggatatgaatgtaaaatatataaatatataaanctgcggctttaacaactgtaatacaaccttttgaattagttccgtg

SEQ ID NO: 1916 - DNA, 488 bp, Homo sapiens
  misc_feature (34)..(39): n includes a, c, g, or t, or contains no nucleotide
  misc_feature (41)..(41): n includes a, c, g, or t, or contains no nucleotide
  misc_feature (43)..(47): n includes a, c, g, or t, or contains no nucleotide
  misc_feature (49)..(49): n includes a, c, g, or t, or contains no nucleotide
  misc_feature (80)..(80): n includes a, c, g, or t, or contains no nucleotide
  misc_feature (88)..(88): n includes a, c, g, or t, or contains no nucleotide
  misc_feature (90)..(91): n includes a, c, g, or t, or contains no nucleotide
  misc_feature (95)..(98): n includes a, c, g, or t, or contains no nucleotide
  misc_feature (101)..(101): n includes a, c, g, or t, or contains no nucleotide
  misc_feature (103)..(104): n includes a, c, g, or t, or contains no nucleotide
  misc_feature (106)..(106): n includes a, c, g, or t, or contains no nucleotide
  misc_feature (108)..(126): n includes a, c, g, or t, or contains no nucleotide
  misc_feature (210)..(211): n includes a, c, g, or t, or contains no nucleotide
  misc_feature (242)..(243): n includes a, c, g, or t, or contains no nucleotide
  misc_feature (249)..(249): n includes a, c, g, or t, or contains no nucleotide
  misc_feature (262)..(262): n includes a, c, g, or t, or contains no nucleotide
  misc_feature (273)..(274): n includes a, c, g, or t, or contains no nucleotide
  misc_feature (287)..(287): n includes a, c, g, or t, or contains no nucleotide
atacgtgagcaagtgttgctctcccgtctgcgcnnnnnngncnnnnncncagtggcacagaaccgaggagctgccattanccccccananngggnnnngtntnntntnnnnnnnnnnnnnnnnnnnttgcttctgccagctccttcccctaggagggaagggtggggtggaactgggcacatgccagcaccacttctagcttccttcgcnntatcccccaccccctgaccctccagctcctnncctggnccctctcacgtgncccacttctgnnctgggcctttagnccctagaacctgcaggtggtgggggcggctaccaagaaggaacagaggtctctggggaggagtctgggtggtccagccctgatgattggccccacctcctgctgccccataaccctctcttcatttcggctttttcatttaccctcatttagagccatttgcagagatttagaaagatttacagtaacgaatggattccta

SEQ ID NO: 1917 - DNA, 576 bp, Homo sapiens
  misc_feature (31)..(57): n includes a, c, g, or t, or contains no nucleotide
  misc_feature (117)..(117): n includes a, c, g, or t, or contains no nucleotide
  misc_feature (184)..(184): n includes a, c, g, or t, or contains no nucleotide
ccaggacatgcaagaaggggccgactagccnnnnnnnnnnnnnnnnnnnnnnnnnnngtaactgtgtgtttccctccagccctggcctcctgcccttgtcactaatcaccaaggagntcattaacttcctccctctatgcccacccctgacacttcaccattaatcttaacacagaacatgagnttatgtgtttataggacaacttaagctgttcttcagtttgaaacatcttttcacccaggggcaagttagcaaattgagtcttttaggacagattctcagatgggatgatctggaggaggaggaaaaagatacactcccttggggctgagcatgccccacactcttggatcttctctctgttccctggtgtcttcactaatgtcctcatgttggtgaagtgttgggggatggagggcgggtgagcagtcgggggacaaaaagtctatttttccttcacttttgtctcttcaatgtgtgttttcctcacactccttacttgactgctttcttcccccactttcatgtcccctctggattgtccagtgtaatgcatggcattgtggtgtctgtct

SEQ ID NO: 1918 - DNA, 328 bp, Homo sapiens
atctggcaagatttccctttatgtatatattttaacaatccgcttggacacgaacaaagccacacttctaactgcttctggcgaactgattttatttttaatttttttcaataaagatattcttagatactgaaagaaatagttaatgagtttgcatttgtgcttgagaaaatttggctcaagtccatttggctgtagtgtcaacgatgtttccagtagtgtttagatttggtgtcttcaaaggtagttgattaaaaccaagtgtgtctttaatatcttgtatcagaataactttgtatgttaccaacttaaattgctagaataaggt

SEQ ID NO: 1919 - DNA, 505 bp, Homo sapiens
  misc_feature (76)..(76): n includes a, c, g, or t, or contains no nucleotide
  misc_feature (98)..(98): n includes a, c, g, or t, or contains no nucleotide
  misc_feature (274)..(274): n includes a, c, g, or t, or contains no nucleotide
  misc_feature (277)..(277): n includes a, c, g, or t, or contains no nucleotide
  misc_feature (341)..(341): n includes a, c, g, or t, or contains no nucleotide
  misc_feature (372)..(373): n includes a, c, g, or t, or contains no nucleotide
  misc_feature (420)..(434): n includes a, c, g, or t, or contains no nucleotide
  misc_feature (436)..(436): n includes a, c, g, or t, or contains no nucleotide
  misc_feature (471)..(471): n includes a, c, g, or t, or contains no nucleotide
ccctacaaggatacgctggggcccatgcagaaggagctggccgagcagctgggcctgtctactggcgagaaggagnaagctgccgggagagctagagnccggtgcaggccacgcagaacaagacagggaagtatgtgccgccgagcctgcgcgacggggccagccgccgcggggagtccatgcagcccaaccgcagagccgacgacaacgccaccatccgtgtcaccaacttgtcagaggacacgcgtgagaccgacctgcaggagctcttccngcntttcggctccatctcccgcatctacctggctaaggacaagaccactggccaatccaagggcttngccttcatcagcttccaccgccgcgaggatnntgcgcgtgccattgccggggtgtccggctttggctacgaccacctcnnnnnnnnnnnnnnntnggccaagccgtccaccaactaagccagctgccacngtgtactcggtccgggacccttggcgacagaaga

SEQ ID NO: 1920 - DNA, 601 bp, Homo sapiens
  misc_feature (40)..(55): n includes a, c, g, or t, or contains no nucleotide
  misc_feature (93)..(94): n includes a, c, g, or t, or contains no nucleotide
  misc_feature (97)..(97): n includes a, c, g, or t, or contains no nucleotide
  misc_feature (191)..(191): n includes a, c, g, or t, or contains no nucleotide
  misc_feature (196)..(196): n includes a, c, g, or t, or contains no nucleotide
  misc_feature (348)..(348): n includes a, c, g, or t, or contains no nucleotide
  misc_feature (460)..(460): n includes a, c, g, or t, or contains no nucleotide
  misc_feature (543)..(543): n includes a, c, g, or t, or contains no nucleotide
  misc_feature (558)..(558): n includes a, c, g, or t, or contains no nucleotide
  misc_feature (565)..(567): n includes a, c, g, or t, or contains no nucleotide
tggaggcagcgataccagagccacccggacgccgctgtgnnnnnnnnnnnnnnnnggccgggctgcccttcgctgccaggacacctgccccanngcnggcttggccgccatccgggacgcttccagaccacctgccagccatcacaaggggaacgcagaggcggaaaccttgcagcatttttatttaaaanaaaanaagaaaaaaaacacccaaccacacaaagaacaaaaccagtaacaaacacaaaggaattcagggtcgctttgcttgctctctgtgctccgtggaggcctccgtgtgccctcgttgccgtggggacccagctccatgcacgtcaacccagtccngcccagactagtggacagacctggtgtcaccagtttttcctagcatcagtccgaaccatgcgcccgccctgccccaactgtgtgctggtcctgctgtggccgaggggaccgngtgtgtttggctctttatgcccctcccgctgtggtcctggaactcttcaccagggagggagccctgcgggggccgcagctttntggagggagccgccngtgcttnnntcacctgctccctttcttgcgtctccctgtgatg

SEQ ID NO: 1921 - DNA, 286 bp, Homo sapiens
  misc_feature (165)..(165): n includes a, c, g, or t, or contains no nucleotide
  misc_feature (173)..(206): n includes a, c, g, or t, or contains no nucleotide
agaagccttcaccttccagcttttgtctggcctgtgctgcgtgggagccactggtctgtgcacatccacggtgggtgagtggccaagacaagcagtgtgatagagtccttggtgggtttagtcatctcggaagtcgtagggcagctatggaaaccactgggttcntggaacgnnnnnnnnnnnnnnnnnnnnnnnnnnnnnnnnnngtaggtggccttggccttcatcccagcctgggatgctccattgcatttgtcacctagtcactgtatatacgtgcacattt

SEQ ID NO: 1922 - DNA, 57 bp, Homo sapiens
ctgggacatccgaaagctacaccacagatgccgtggttcatgccttcttcccgcaac

SEQ ID NO: 1923 - DNA, 514 bp, Homo sapiens
  misc_feature (102)..(134): n includes a, c, g, or t, or contains no nucleotide
  misc_feature (190)..(190): n includes a, c, g, or t, or contains no nucleotide
  misc_feature (351)..(377): n includes a, c, g, or t, or contains no nucleotide
ttacaccgagaacatctgtgggctcagtgactcacctggtgtctccaagaacacggcccgcatcctcaagacaggaatcaccttcaaaccgttcgagtatannnnnnnnnnnnnnnnnnnnnnnnnnnnnnnnntgacacctctcatagaccgcgtggtcgtggctgggtactcggcagccctcaactgngctgtcagaggccacccgaagccgaaggtggtctggatgaagaacaagatggaaatccgtgaagatcccaagttcctgataaccaattaccaaggagtcctgacgctgaacatccgtcgcccctcgcccttcgacgctgggacttacacctgccgggccgnnnnnnnnnnnnnnnnnnnnnnnnnnnagtgcaagctggaggtccgagtgccgcagtgagacctgtcccctacctgccaagacaattggtggtggagtcctgaccccaatccccaacctcccaggactgtgttctttctggagttttcgctgagaacaaaacag

SEQ ID NO: 1924 - DNA, 451 bp, Homo sapiens
tgtgggccgatacccagatcctaatttcaaaagttgtaccccttatgaattgaggacgatcgacgtgttcgatggaaactcagggaagatgatgtgtcagctctatgacccagaatcttctggcatcagttcgcttaatgaattcaatcccatgggggacacgctggcctctgcaatgggttaccacattctcatctggagccaggaggaagccaggacacggaagtgagagacactaaagaaggtgtgggccagacaaggccttggagcccacacatgggatcaagtcctgcaagcagaggtggtgatttgttaaagggccaaaagtatccaaggttagggttggagcaggggtgctgggacctggggcactgtgggactgggacacttttatgttaatgctctggacttgcctccagagactgctccagagttggtgacacagctgtcc

SEQ ID NO: 1925 - DNA, 472 bp, Homo sapiens
  misc_feature (29)..(30): n includes a, c, g, or t, or contains no nucleotide
  misc_feature (32)..(36): n includes a, c, g, or t, or contains no nucleotide
  misc_feature (38)..(41): n includes a, c, g, or t, or contains no nucleotide
  misc_feature (43)..(45): n includes a, c, g, or t, or contains no nucleotide
  misc_feature (47)..(47): n includes a, c, g, or t, or contains no nucleotide
  misc_feature (49)..(49): n includes a, c, g, or t, or contains no nucleotide
  misc_feature (107)..(107): n includes a, c, g, or t, or contains no nucleotide
  misc_feature (264)..(264): n includes a, c, g, or t, or contains no nucleotide
gagccccaagagctatccggactctctcnnannnnngnnnntnnncnancaaagaggtctcggcaggggagcaggattcccggcccagcagctggctcaggaggtgnacagctttgggattcgcatctgagcatcctcctactcttctcctgggaactctgttggggagggttgctcagaacagaagtgcctgggacgcccagatcctgctggagtggcagctggggtgatggccagggcaggctgggagggacatactttccnataggacccagtgctttcatctccgtgcaactgaccaagagaaaccaaacccaaactccttcctttacacagacctatttgagggaggctgggtattgtttgtgtatttcaacctaacaagattttgagatagttggaatgcagaaggagacaggaggactcaagtgtcctgtcttttgcaaaaatgtcaaacgtagctactcagtct

SEQ ID NO: 1926 - DNA, 365 bp, Homo sapiens
  misc_feature (72)..(72): n includes a, c, g, or t, or contains no nucleotide
ccttttgggcttctataaatgaatatacatctaaaatgtgggggtttagcttaattgattgttttccatagnaaactaggttttatgggaagatggttggatagacttgtttcacttaaaggtctgatttgtgtaggacaaacccacatatgtaatcgtgccagtctgttctctgcatgacataattttccagcaatagctgtgtggtttttgtaatcctatcatctagtcagttcaagatcttgcaacactgtgtgattctttgctccgtagttcagtcttgttgaacatgacacaggtgtttactttcctgttcttgcatctagtttcattctaataatgttctctgttgaaaaagctggctt

SEQ ID NO: 1927 - DNA, 311 bp, Homo sapiens
  misc_feature (208)..(208): n includes a, c, g, or t, or contains no nucleotide
  misc_feature (218)..(218): n includes a, c, g, or t, or contains no nucleotide
  misc_feature (242)..(260): n includes a, c, g, or t, or contains no nucleotide
ctcccaaaagcataaaaatggagacgatcttaacaggaaattcttaaaaggtaaaaacaactcttccttgtactagtccttgggtagttaccatacaacaggttcttctttttgttagtttcgttgaaaagggatttttggtcccaagtctgttcctgcttagtatctgctccggcctcctcctctctccaagcggcctcctagacgncctccgcccntgggcaccctgcagcctgaccggnnnnnnnnnnnnnnnnnnngagggcagcccctttccatggacagagagagcccacgatctggtctgccca

SEQ ID NO: 1928 - DNA, 251 bp, Homo sapiens
  misc_feature (36)..(36): n includes a, c, g, or t, or contains no nucleotide
  misc_feature (99)..(121): n includes a, c, g, or t, or contains no nucleotide
  misc_feature (128)..(168): n includes a, c, g, or t, or contains no nucleotide
tctgaataaactaatacttaaaatgtcaaaaaaaanatctgtacagcattagatttttatatttaatatatatttgactaattaaaagtgaaagttgtnnnnnnnnnnnnnnnnnnnnnnnattttannnnnnnnnnnnnnnnnnnnnnnnnnnnnnnnnnnnnnnnnctgtttcccattgtcctcctactcaactaaaattcatagttggctttaagcccaaaagaattttgaacaatgtgacagaaaca

SEQ ID NO: 1929 - DNA, 529 bp, Homo sapiens
  misc_feature (30)..(30): n includes a, c, g, or t, or contains no nucleotide
  misc_feature (49)..(49): n includes a, c, g, or t, or contains no nucleotide
  misc_feature (72)..(72): n includes a, c, g, or t, or contains no nucleotide
  misc_feature (77)..(77): n includes a, c, g, or t, or contains no nucleotide
  misc_feature (107)..(107): n includes a, c, g, or t, or contains no nucleotide
  misc_feature (114)..(114): n includes a, c, g, or t, or contains no nucleotide
  misc_feature (145)..(147): n includes a, c, g, or t, or contains no nucleotide
  misc_feature (151)..(151): n includes a, c, g, or t, or contains no nucleotide
  misc_feature (155)..(156): n includes a, c, g, or t, or contains no nucleotide
  misc_feature (158)..(159): n includes a, c, g, or t, or contains no nucleotide
  misc_feature (162)..(162): n includes a, c, g, or t, or contains no nucleotide
  misc_feature (164)..(164): n includes a, c, g, or t, or contains no nucleotide
  misc_feature (170)..(170): n includes a, c, g, or t, or contains no nucleotide
  misc_feature (176)..(176): n includes a, c, g, or t, or contains no nucleotide
  misc_feature (178)..(178): n includes a, c, g, or t, or contains no nucleotide
  misc_feature (185)..(185): n includes a, c, g, or t, or contains no nucleotide
  misc_feature (191)..(191): n includes a, c, g, or t, or contains no nucleotide
  misc_feature (201)..(201): n includes a, c, g, or t, or contains no nucleotide
  misc_feature (203)..(204): n includes a, c, g, or t, or contains no nucleotide
  misc_feature (211)..(212): n includes a, c, g, or t, or contains no nucleotide
  misc_feature (218)..(218): n includes a, c, g, or t, or contains no nucleotide
  misc_feature (224)..(224): n includes a, c, g, or t, or contains no nucleotide
  misc_feature (227)..(232): n includes a, c, g, or t, or contains no nucleotide
  misc_feature (234)..(235): n includes a, c, g, or t, or contains no nucleotide
  misc_feature (237)..(253): n includes a, c, g, or t, or contains no nucleotide
  misc_feature (255)..(259): n includes a, c, g, or t, or contains no nucleotide
  misc_feature (261)..(267): n includes a, c, g, or t, or contains no nucleotide
  misc_feature (269)..(280): n includes a, c, g, or t, or contains no nucleotide
  misc_feature (282)..(286): n includes a, c, g, or t, or contains no nucleotide
  misc_feature (288)..(293): n includes a, c, g, or t, or contains no nucleotide
  misc_feature (295)..(315): n includes a, c, g, or t, or contains no nucleotide
  misc_feature (321)..(322): n includes a, c, g, or t, or contains no nucleotide
  misc_feature (327)..(327): n includes a, c, g, or t, or contains no nucleotide
  misc_feature (331)..(331): n includes a, c, g, or t, or contains no nucleotide
  misc_feature (336)..(336): n includes a, c, g, or t, or contains no nucleotide
  misc_feature (340)..(340): n includes a, c, g, or t, or contains no nucleotide
  misc_feature (348)..(348): n includes a, c, g, or t, or contains no nucleotide
  misc_feature (355)..(355): n includes a, c, g, or t, or contains no nucleotide
  misc_feature (366)..(366): n includes a, c, g, or t, or contains no nucleotide
  misc_feature (378)..(378): n includes a, c, g, or t, or contains no nucleotide
  misc_feature (380)..(458): n includes a, c, g, or t, or contains no nucleotide
atggtatctttacttgaaatcttattaatncccccttccctcaaacaancgccccacgggtgagttgaaaanacccnactatgggcaccccttagatttccccagcntgtgcgnacaaagcagtcttggcgacccgacgcctgcnnnaacngacnnanngancntttctngcgaancnccggggngccctntctcccttangnnagtagannagaacnagcccncgnnnnnnannannnnnnnnnnnnnnnnnannnnncnnnnnnnannnnnnnnnnnntnnnnnannnnnngnnnnnnnnnnnnnnnnnnnnnggggcnntggancccncgtgncccnaccccgcnaggaaanccctgaggccntaggggagctgntnnnnnnnnnnnnnnnnnnnnnnnnnnnnnnnnnnnnnnnnnnnnnnnnnnnnnnnnnnnnnnnnnnnnnnnnnnnnnnntgcggttccaaagcacagggcttggcgcaccccactgtgctctcaataaatgtgtttcctgtcttaacaaa

SEQ ID NO: 1930 - DNA, 486 bp, Homo sapiens
  misc_feature (397)..(411): n includes a, c, g, or t, or contains no nucleotide
catttgcactactggaaggagttagatgttggtactagatactgaatgtaaacaaaggaattatggctggtaacataggtttttagtctaattgaatcccttaaactcagggagcatttataaatggacaaatgcttatgaaattaagatttgtaatatttctctctttttagagaaatttgccaatttactttgttatttttccccaaaaagaatgggatgatcgtgtatttatttttttacttcctcagctgtagacaggtccttttcgatggtacatatttctttgcctttataatcttttatacagtgtcttacagagaaaagacataagcaaagactatgaggaatatttgcaagacatagaatagtgttggaaaatgtgcaatatgtgatnnnnnnnnnnnnnnntaggaaatattctgtaatcttcagacctagaataatactagtcttataataggtttgtgactttcctaaatcaat

SEQ ID NO: 1931 - DNA, 431 bp, Homo sapiens
  misc_feature (31)..(33): n includes a, c, g, or t, or contains no nucleotide
  misc_feature (253)..(253): n includes a, c, g, or t, or contains no nucleotide
tgccgctggtaaagagacaggagctgccaannnacccaagctgacgcctcaggagaagctgaaactgaggatgcagaaggcgctgaacaggcagttcaaggcggataagaaggcggcacaagaaaagatgatccagcaggagcatgagcggcaggagcgggaagacgagcttcgagccatggcccgcaagatccgcatgaaggagcgggaacgccgagagaaggagagagaagagtgggaacgccagtacagncggcagagccgctcaccctccccccgatacagtcgagaatacagctcttctcgaaggcgctcaaggtcccgatcccgaagcccccattaccgacattaggcagaagagtggggggtggggaggacaagggggtgggtaaggggctcaagctgtgatgctgctggttttatctctagtg

SEQ ID NO: 1932 - DNA, 253 bp, Homo sapiens
gctcactgcttctcctaagccttctgcacatgtggcacctgcaacccaggagcaggagccggagagctgccctctgacagcaggtgcagcagagatggctacagctcaggagctgggaaggtgatggggcacagggaaagcacagatgttctgcagcgccccaaagtgacccattgcctggagaaagagaagaaaatattttttaaaaagctagtttatttagcttctcattaattcattcaaataaagtcgt

SEQ ID NO: 1933 - DNA, 337 bp, Homo sapiens
  misc_feature (193)..(220): n includes a, c, g, or t, or contains no nucleotide
cgagacagacgaggacgacgactacatggacatttgaggggccactgcagccccaccgccacgccccaggggaccagccaggcctggaatgccccctgggcaggaccctgggcaggaccagaggcccacatggatgccactccccacacagcccccaggcctgcccagcccacctcctcatggcatcctcccnnnnnnnnnnnnnnnnnnnnnnnnnnnncatgggagcccagaggaggaggggcccgccttagccatgtgaaggtggattggtcgccatctgcacgccaggcggcatccttttctatgaagtgttgactttgtaaatctgcccaca

SEQ ID NO: 1934 - DNA, 413 bp, Homo sapiens
  misc_feature (190)..(214): n includes a, c, g, or t, or contains no nucleotide
  misc_feature (260)..(260): n includes a, c, g, or t, or contains no nucleotide
  misc_feature (264)..(264): n includes a, c, g, or t, or contains no nucleotide
  misc_feature (320)..(320): n includes a, c, g, or t, or contains no nucleotide
ctgtggctcgtccttaacgtttctgaaccaccttggtgccctgagcaggaagatgtgccacttcctagcaggcgcaaggcctgtgcggaagaaacgccgctccctgccaccagggctgaagatgcgagcccgtcctcatgacgcaggcgccaccctgctgccggagccgggcttcggcagtcttctccannnnnnnnnnnnnnnnnnnnnnnnncctgcgtttcagtggagcgtatgagcgtcaagtcctgctttctcangtanccccattgcggggccccaccattcatcctgtctgaaggtcctgggtttggtgtgancgcttggcggctggtgggtggggttttcaagtgggtgacggcgctctccggcagccggggatggccgtgtccgcactgaccaggcctgtggag

SEQ ID NO: 1935 - DNA, 476 bp, Homo sapiens
  misc_feature (31)..(31): n includes a, c, g, or t, or contains no nucleotide
  misc_feature (43)..(43): n includes a, c, g, or t, or contains no nucleotide
  misc_feature (90)..(108): n includes a, c, g, or t, or contains no nucleotide
  misc_feature (111)..(111): n includes a, c, g, or t, or contains no nucleotide
  misc_feature (293)..(293): n includes a, c, g, or t, or contains no nucleotide
  misc_feature (312)..(340): n includes a, c, g, or t, or contains no nucleotide
  misc_feature (359)..(359): n includes a, c, g, or t, or contains no nucleotide
  misc_feature (383)..(383): n includes a, c, g, or t, or contains no nucleotide
  misc_feature (420)..(451): n includes a, c, g, or t, or contains no nucleotide
ctgcagctacattgttgagttagtgatgatnttgtatatgctnatggtcttaactggattacaaaaagcaaatactagaacagctagctnnnnnnnnnnnnnnnnnnnttngtatttttctgcactggtttaatcatgcttaatactacaaaacaaaaataaatatttcacagtggttggtttgttttgtttttaaaccacagtttgatttagttagccttgctggggccataatatgcttcagggtgtgtaaaagaagaaatctctttgtggctttcatgggcagggaatcncagagatagcaaatgccannnnnnnnnnnnnnnnnnnnnnnnnnnnnggaaccctaacttagggcntgggcaggggaaagagaaagaagntgagagattatacttcatgagtcttagcaatatgggnnnnnnnnnnnnnnnnnnnnnnnnnnnnnnnntgcatgtcctccaaggcaaagtttg

SEQ ID NO: 1936 - DNA, 462 bp, Homo sapiens
  misc_feature (105)..(105): n includes a, c, g, or t, or contains no nucleotide
  misc_feature (107)..(107): n includes a, c, g, or t, or contains no nucleotide
  misc_feature (109)..(109): n includes a, c, g, or t, or contains no nucleotide
  misc_feature (114)..(115): n includes a, c, g, or t, or contains no nucleotide
  misc_feature (130)..(145): n includes a, c, g, or t, or contains no nucleotide
ccagtacttgtttgctgtggaaggtttctaggaatggattgcttagtctaaagtaagcactaccaccatccacgttttcactcaacacagtgccttttaattggngncnaacanncaaaacaccttgacnnnnnnnnnnnnnnnnatcagaaaccatgtgtacatccctgtgcctcttagattgctaagttctgctctcattcttacttcaaaggacactttttaaagaattgttaatgcttttttataatacaagtcatagccctgttggcaaaaagaaaaaagattcagtgagaaagaaaaatcactgataattccatcatccagggagaaccactgttatttaagtatatggccttccagacttttctgtgcatttatagatatttttaatgggatcaaagtgtacatactgttttgtaactttttttcactcaacaataccatgactgtcttgctgtg

SEQ ID NO: 1937 - DNA, 528 bp, Homo sapiens
  misc_feature (36)..(50): n includes a, c, g, or t, or contains no nucleotide
gcccttctgaactggcttaaagaatacaactctggnnnnnnnnnnnnnnnagccattgaggaatttacactgtcctgtgctggctactgtgtagcttcttatgtccttgggattggtgacagacatagtgacaacatcatggtcaaaaaaactggccagctcttccacattgactttggacatattcttggaaatttcaaatctaagtttggcattaaaagggagcgagtgccttttattcttacctatgatttcatccatgtcattcaacaaggaaaaacaggaaatacagaaaagtttggccggttccgccagtgttgtgaggatgcatatctgattttacgacggcatgggaatctcttcatcactctctttgcgctgatgttgactgcagggcttcctgaactcacatcagtcaaagatatacagtatcttaaggactctcttgcattagggaagagtgaagaagaagcactcaaacagtttaagcaaaaatttgatgaggcgctcagggaaagctggactact

SEQ ID NO: 1938 - DNA, 463 bp, Homo sapiens
  misc_feature (26)..(26): n includes a, c, g, or t, or contains no nucleotide
  misc_feature (171)..(270): n includes a, c, g, or t, or contains no nucleotide
  misc_feature (272)..(273): n includes a, c, g, or t, or contains no nucleotide
  misc_feature (275)..(275): n includes a, c, g, or t, or contains no nucleotide
  misc_feature (420)..(435): n includes a, c, g, or t, or contains no nucleotide
gagctgcatttcatggagcccatttnaaaacctctttccttatgactttgttactcaagtccagagttctctgtgcacttctgctagataaggagtgtaagccctgccccccagcactggcagcacgctgggccctccccacacaggacaccgtgcagttccgggggaagnnnnnnnnnnnnnnnnnnnnnnnnnnnnnnnnnnnnnnnnnnnnnnnnnnnnnnnnnnnnnnnnnnnnnnnnnnnnnnnnnnnnnnnnnnnnnnnnnnnntnntngtaatattgtacagttttgcatggcctggtgtgatcattttttggttagaatataatgctgacaaatgtggatggaggggaagatactgctttagcctatcactccttattttattttgtttggttttatgccctcagtgtcttnnnnnnnnnnnnnnnngatcctctgctaccaaacaatgatgtgg

SEQ ID NO: 1939 - DNA, 451 bp, Homo sapiens
tgcttgtccctgtggaagtatcttggttgtgacagagtcaagggtgtgtgcagcattgttggctgttcctgcagtagaatgggggcagcacctcctaagaaggcacctctctgggttgaagggcagtgttccctggggctttaactcctgctagaacagtctcttgaggcacagaaactcctgttcatgcccatacccctggccaaggaagatccctttgtccacaagtaaaaggaaatcctcctccagggagtctcagcttcaccctgaggtgagcatcatcttctgggttaggccttgcctaggcatagcctgcctcaagctatgtgagctcaccagtccctccccaaatgctttccatgagttgcagttttttcctagtctgttttccctccttggagaacagggccctgtcggtttgttcactgtatgtccttggtgcctggagcct

SEQ ID NO: 1940 - DNA, 147 bp, Homo sapiens
gttcttcctggacctgggcattcagcctcctgctcttaactgaattgggagcctctgccacctgccccgtgtatcctggctctcagctcatggggaagccacatagacatccctttcttcccttgcacgctcgctagcagctggtaa

SEQ ID NO: 1941 - DNA, 367 bp, Homo sapiens
  misc_feature (280)..(281): n includes a, c, g, or t, or contains no nucleotide
atactgtgaacatcctgtcagctgcccgaatgttgttcgacaggtgctacaagagcatagccaacttgatagaaaggaggcaatttgaaaccaaagagaataagcgtctactagaaaaatctcagagggtagaagccatcattgcatctatgcaggctactggtgcagaggaagcacagttacaagaaatagaggagatgatcacagctcctgaacgtcagcagctagagaccctgaaacgtaatgtcaacaagttggatgccagtgagatccaggtggnngaaaccatcttcctgctggagtcttacattgagtgcaccatgaagagacagtgatccagaagaagcatcttcctcagaagatctgg

SEQ ID NO: 1942 - DNA, 455 bp, Homo sapiens
  misc_feature (33)..(33): n includes a, c, g, or t, or contains no nucleotide
  misc_feature (306)..(328): n includes a, c, g, or t, or contains no nucleotide
  misc_feature (356)..(382): n includes a, c, g, or t, or contains no nucleotide
ggccttttacatgttgtctaattatcatttttnccccaaattttgcgttgtaggactactgttcgaagatttttggaagaatactgagaacggcataaagtgaagatcgacatttaaaaaatgaggtgaaagaaagctatagtggcatagaaaaagtataaagctcagttagtttttttattattattattattaaaagttaattcaggactgatgtgacctaccagatttcagaacatgtgttaatagtatatatgccactgaaaacttaggtcctgtatcatacttttttctttaagacttttnnnnnnnnnnnnnnnnnnnnnnnggcttgctcagtgtttaattgcaagttnnnnnnnnnnnnnnnnnnnnnnnnnnntaaacgttagtattcgtgtgaatcagactaagtgggatttcatttttacaactctgctctacttagcctttgg

SEQ ID NO: 1943 - DNA, 301 bp, Homo sapiens
ttgcaacacctttgggtactagataccctggggccagcagaagtatagcatgaagacagaactaccatcggtgggccagttctgcctctctgacaaccatcagccaccggaccccaccccgaggcatcaccacaaatcatggtctggaaggagaacaaatgcccagcgtttgggtctgactctgagcctagggctactgatcctcctcaccccaggtccctctcctgtagtcagtctgagttctgatggtcagaggttggagctgtgacagtggcatacgaggtgttttgttctctctgct

SEQ ID NO: 1944 - DNA, 481 bp, Homo sapiens
  misc_feature (26)..(26): n includes a, c, g, or t, or contains no nucleotide
  misc_feature (34)..(51): n includes a, c, g, or t, or contains no nucleotide
  misc_feature (359)..(453): n includes a, c, g, or t, or contains no nucleotide
acaactaaaacatctggagcagcagnaggggcannnnnnnnnnnnnnnnnngcagaaggggcagctggagcagcctgtgtttgccccagctccaggccaggtccaagacattcaaccagccctgcccacaaagggagaagtattgcttcctgtagagcaccagcagcagaagcaggaggtgcagtggccacccaaacataaataaccacccgcagtgtccagaggccctcagatcgtctcatacaagggaagagagagccactggctccacttatttcgggtccgctaggtggcccgtctcatctgtgaacttgactctgtccctctacatgtctctttaatggggtgagggtgggggnnnnnnnnnnnnnnnnnnnnnnnnnnnnnnnnnnnnnnnnnnnnnnnnnnnnnnnnnnnnnnnnnnnnnnnnnnnnnnnnnnnnnnnnnnnnnnnaatccttacttccccagtattgaagctg

SEQ ID NO: 1945 - DNA, 305 bp, Homo sapiens
  misc_feature (37)..(64): n includes a, c, g, or t, or contains no nucleotide
  misc_feature (122)..(122): n includes a, c, g, or t, or contains no nucleotide
  misc_feature (153)..(153): n includes a, c, g, or t, or contains no nucleotide
  misc_feature (185)..(185): n includes a, c, g, or t, or contains no nucleotide
gcaaacatgcatgattctccaagacaaaagaagagannnnnnnnnnnnnnnnnnnnnnnnnnnnaggctgcctctcccaccacaagcccagagtggatgggctgggggaggggtgctgtttnaatttctaaaggtaggaccaacacccagggnatcagtgaaggaagagaaggccagcagatcantgagagtgcaaccccaccctccacaggaaattgcctcatgggcagggccacagcagagagacacagcatgggcagtgccttccctgcctgtgggggtcatgctgccacttttaatgggtc

SEQ ID NO: 1946 - DNA, 546 bp, Homo sapiens
  misc_feature (62)..(62): n includes a, c, g, or t, or contains no nucleotide
  misc_feature (92)..(92): n includes a, c, g, or t, or contains no nucleotide
  misc_feature (98)..(98): n includes a, c, g, or t, or contains no nucleotide
  misc_feature (126)..(126): n includes a, c, g, or t, or contains no nucleotide
  misc_feature (128)..(131): n includes a, c, g, or t, or contains no nucleotide
  misc_feature (133)..(143): n includes a, c, g, or t, or contains no nucleotide
  misc_feature (145)..(150): n includes a, c, g, or t, or contains no nucleotide
  misc_feature (153)..(154): n includes a, c, g, or t, or contains no nucleotide
  misc_feature (156)..(162): n includes a, c, g, or t, or contains no nucleotide
  misc_feature (164)..(174): n includes a, c, g, or t, or contains no nucleotide
  misc_feature (176)..(176): n includes a, c, g, or t, or contains no nucleotide
  misc_feature (181)..(181): n includes a, c, g, or t, or contains no nucleotide
  misc_feature (183)..(183): n includes a, c, g, or t, or contains no nucleotide
  misc_feature (185)..(185): n includes a, c, g, or t, or contains no nucleotide
  misc_feature (188)..(190): n includes a, c, g, or t, or contains no nucleotide
  misc_feature (192)..(192): n includes a, c, g, or t, or contains no nucleotide
  misc_feature (194)..(211): n includes a, c, g, or t, or contains no nucleotide
ttagcaaaacagtaatactgacaagacatcatcttacaccatgagctaacatggacatgaangggagtgaccatctacagtgtgtgaaatgnccacangaagtcatcaacaagggaggagagttangnnnntnnnnnnnnnnnannnnnncannannnnnnngnnnnnnnnnnncntcctncngnagnnnancnnnnnnnnnnnnnnnnnnaaggacatttttcttggatgtttcctgaacttcccctcccaaaagaaactcatccaaaataaaataagccttctcaaaattaaagatgatatctagttcacagacactgccgaaatacttgtcaagtaattccacataacgatgaattatttccagggtaattagttcattgtcctgatcctcaatagcacagcaaaaatacagactagcatatcttttgtaaacaatcttcagatctcgccactcaaggaagctgcacattttaggtttccgtgctaaaacggtctgaacaagttctcttgtgatctttttcttctctttgtctgatagtggga

SEQ ID NO: 1947 - DNA, 532 bp, Homo sapiens
  misc_feature (50)..(50): n includes a, c, g, or t, or contains no nucleotide
  misc_feature (488)..(503): n includes a, c, g, or t, or contains no nucleotide
gccaacccttagctcatagtgtcaacatctcctctaccaaccacccagcncaaggaccagtagcagaagcacatgggcgatgtctcccctccactgctctgacccacccctctggcagaaaatctaacaagctacaaaatgccagaaagacagggagtaggagaaggagaagccaagggtctctataaatcagccctgaatgcacccatttggctgccaagagcttctcactgccttgctagcagcctgccactgttccctggcaaattgaaaccacccacgcaaacactcaaaaccccaatctccttgctaataagatacaaccagttaacaccgtgaaaaatgcacatctccagccttcatttcaaaaaagagctctgtactaaatgcaatatgcttttaaagggggttttacagggaccaatctcaatgcaaagaccagtaccagatgtctgagttttggttacaggtttataattagacacaannnnnnnnnnnnnnnngagttttactttcaagctggaagctagca

SEQ ID NO: 1948 - DNA, 519 bp, Homo sapiens
  misc_feature (92)..(92): n includes a, c, g, or t, or contains no nucleotide
  misc_feature (123)..(123): n includes a, c, g, or t, or contains no nucleotide
  misc_feature (166)..(166): n includes a, c, g, or t, or contains no nucleotide
  misc_feature (236)..(252): n includes a, c, g, or t, or contains no nucleotide
  misc_feature (304)..(304): n includes a, c, g, or t, or contains no nucleotide
tgcgtgggtccaaacactcctcttcctccaggtcatttgttttgcatttttaatgtctttattttttgtaatgaaaaagcacactaagctgncccctggaatcgggtgcagctgaataggcancccaaaagtccgtgactaaatttcgtttgtctttttgatagcnaaattatgttaagagacagtgatggctagggctcaacaattttgtattcccatgtttgtgtgagacagannnnnnnnnnnnnnnnncttggttagaattgtgctactgtgaacgctgatcctgcatatggaagtcccncttcggtgacatttcctggccattcttgtttccattgtgtggatggtgggttgtgcccacttcctggagtgagacagctcctggtgtgtagaattcccggagcgtccgtggttcagagtaaacttgaagcagatctgtgcatgcttttcctctgcaacaattggctcgtttctcttttttgttctcttttgataggatcctgtttcctatgtgtg

SEQ ID NO: 1949 - DNA, 56 bp, Homo sapiens
gaaacataaatctggcctacatgcacatccgggcatagtaccttcccttgaactta

SEQ ID NO: 1950 - DNA, 539 bp, Homo sapiens
  misc_feature (111)..(149): n includes a, c, g, or t, or contains no nucleotide
  misc_feature (194)..(194): n includes a, c, g, or t, or contains no nucleotide
  misc_feature (201)..(201): n includes a, c, g, or t, or contains no nucleotide
  misc_feature (210)..(210): n includes a, c, g, or t, or contains no nucleotide
  misc_feature (217)..(218): n includes a, c, g, or t, or contains no nucleotide
  misc_feature (224)..(224): n includes a, c, g, or t, or contains no nucleotide
  misc_feature (227)..(227): n includes a, c, g, or t, or contains no nucleotide
  misc_feature (232)..(232): n includes a, c, g, or t, or contains no nucleotide
  misc_feature (237)..(237): n includes a, c, g, or t, or contains no nucleotide
  misc_feature (250)..(250): n includes a, c, g, or t, or contains no nucleotide
  misc_feature (257)..(257): n includes a, c, g, or t, or contains no nucleotide
  misc_feature (263)..(263): n includes a, c, g, or t, or contains no nucleotide
  misc_feature (269)..(269): n includes a, c, g, or t, or contains no nucleotide
  misc_feature (276)..(276): n includes a, c, g, or t, or contains no nucleotide
  misc_feature (285)..(285): n includes a, c, g, or t, or contains no nucleotide
  misc_feature (294)..(294): n includes a, c, g, or t, or contains no nucleotide
  misc_feature (303)..(303): n includes a, c, g, or t, or contains no nucleotide
  misc_feature (310)..(310): n includes a, c, g, or t, or contains no nucleotide
  misc_feature (318)..(318): n includes a, c, g, or t, or contains no nucleotide
  misc_feature (330)..(330): n includes a, c, g, or t, or contains no nucleotide
  misc_feature (345)..(345): n includes a, c, g, or t, or contains no nucleotide
  misc_feature (363)..(363): n includes a, c, g, or t, or contains no nucleotide
accttcatagcctcttttgtaggcttctgaacatgccagctgctctgtccccatggaaactcctcggcctcccctggtgctgcaccttcttggattccctcctcctctgcnnnnnnnnnnnnnnnnnnnnnnnnnnnnnnnnnnnnnnnctggttaggccctgttttctagctgagataatttccctgatctcnagcctangcatccccntttgtgnnagctcntangcccntaaantaacccactgcantgctggncctcangccccntgggtcntctctcccnacactgaanctcatcccnaaatcancactcccngagccttccccntcagctcacttcccnacaaccagttcttttccnatgtcagtgaagggcaccccctttcacaaagctcctcatgctctagacctggtgagggccacagctgcctttttgaacgtgtagttttgcagtcctccccggcccttgcatacacagaagtgtgcgcataagtcgcattgttttgtggtttgcttttcctctactaaatgatgtgc

SEQ ID NO: 1951 - DNA, 340 bp, Homo sapiens
  misc_feature (124)..(150): n includes a, c, g, or t, or contains no nucleotide
acccgacgcaggtcagtgcctcgtggtggaggagcgtgggcagaatcacggggtgcagaggagccgaagaccgtcccctcagctccggggcagctcctgtgcggctctgcacttcctggtaccnnnnnnnnnnnnnnnnnnnnnnnnnnnggcgtggcgggcggggtaggcggcagtaaggcgggcagtgttcgagctcatctcgcacgcggcactgtccctgctctccctggcagcagcaggaagacctgggtccttgtcgctgaaaaaatagactctgaagaaaaacccctgctgtcctcacgcagccgcgggcagatgagctgtgatggcttccccg

SEQ ID NO: 1952 - DNA, 510 bp, Homo sapiens
  misc_feature (107)..(168): n includes a, c, g, or t, or contains no nucleotide
  misc_feature (240)..(240): n includes a, c, g, or t, or contains no nucleotide
  misc_feature (242)..(245): n includes a, c, g, or t, or contains no nucleotide
  misc_feature (247)..(274): n includes a, c, g, or t, or contains no nucleotide
  misc_feature (276)..(279): n includes a, c, g, or t, or contains no nucleotide
  misc_feature (281)..(292): n includes a, c, g, or t, or contains no nucleotide
  misc_feature (294)..(295): n includes a, c, g, or t, or contains no nucleotide
  misc_feature (300)..(300): n includes a, c, g, or t, or contains no nucleotide
  misc_feature (329)..(329): n includes a, c, g, or t, or contains no nucleotide
  misc_feature (333)..(333): n includes a, c, g, or t, or contains no nucleotide
  misc_feature (338)..(354): n includes a, c, g, or t, or contains no nucleotide
  misc_feature (359)..(359): n includes a, c, g, or t, or contains no nucleotide
  misc_feature (362)..(386): n includes a, c, g, or t, or contains no nucleotide
  misc_feature (393)..(393): n includes a, c, g, or t, or contains no nucleotide
  misc_feature (399)..(399): n includes a, c, g, or t, or contains no nucleotide
  misc_feature (404)..(420): n includes a, c, g, or t, or contains no nucleotide
  misc_feature (445)..(445): n includes a, c, g, or t, or contains no nucleotide
  misc_feature (470)..(470): n includes a, c, g, or t, or contains no nucleotide
  misc_feature (483)..(483): n includes a, c, g, or t, or contains no nucleotide
aggcttaccatgcagggctgaaggcctctgaaagaacgctggtgcagaacgactggatggaggagaaggtccctgtaattgttgcaaccattagttttgggatgggnnnnnnnnnnnnnnnnnnnnnnnnnnnnnnnnnnnnnnnnnnnnnnnnnnnnnnnnnnnnnnactaccaggagtctggccgggctggcagggatgggaagccttcctggtgccgtctctattactccaggaatnannnngnnnnnnnnnnnnnnnnnnnnnnnnnnnnannnncnnnnnnnnnnnnannaaaanagaggaaacaaagcatctgataaagccantatnatggnnnnnnnnnnnnnnnnnacctnctnnnnnnnnnnnnnnnnnnnnnnnnngccacgnaagagnctaannnnnnnnnnnnnnnnngttgtgtccagcatcggactgtganttcctcaagagagcacccaggaganttttacatttggntaaaagccttggatcactcactcatgg

SEQ ID NO: 1953 - DNA, 550 bp, Homo sapiens
  misc_feature (207)..(207): n includes a, c, g, or t, or contains no nucleotide
  misc_feature (210)..(211): n includes a, c, g, or t, or contains no nucleotide
  misc_feature (220)..(221): n includes a, c, g, or t, or contains no nucleotide
  misc_feature (233)..(233): n includes a, c, g, or t, or contains no nucleotide
  misc_feature (238)..(239): n includes a, c, g, or t, or contains no nucleotide
  misc_feature (245)..(247): n includes a, c, g, or t, or contains no nucleotide
  misc_feature (263)..(263): n includes a, c, g, or t, or contains no nucleotide
  misc_feature (270)..(270): n includes a, c, g, or t, or contains no nucleotide
  misc_feature (287)..(287): n includes a, c, g, or t, or contains no nucleotide
cccgttactaagcaggctagatcaggaggcacaccaactctgcccctcacatccccagggctgtctgagactggacggccaaggtcagctgtgcccctcacgtccttggggctgtctaagactgggtggccaagttcagctctggttttgttgtctggaaacctactttcttgcagagatattagccacatctctaatatccgtgtnatnngttataaanngacaatattttnaactnncctatnnngctttacccttttgtncttattncttcaacagatggagancgtcaggcaggaaagggaagggacagtttactgaatctctgcccacaacaactatcaacatatatcgaccttctttccctcccaaagccccattaaaatgacagcaaaagatatgtaaaaatgattgactataaaaacaaagagaacagaataggaaacgtaaggagaagagaagtaaacttgatccctgcccaaattgacataaacacaatttttcttctatgtgtaaacatattagaagtgagccagttccaggcacagtg

SEQ ID NO: 1954 - DNA, 424 bp, Homo sapiens
  misc_feature (125)..(150): n includes a, c, g, or t, or contains no nucleotide
  misc_feature (303)..(334): n includes a, c, g, or t, or contains no nucleotide
gctgttgcccttctccggttgtgtgtacagtatgtgtggaataaaaaagggaaactgttttcacaagctgttctttgtttcataattggattcatcaatcccgtagctacccatattgcactgannnnnnnnnnnnnnnnnnnnnnnnnngtcctatgatccactttgttggttgttgttgcagaagactgaactgttttggaatatttaacaattacagaaacagtcaagtgttttccaatgtggttgtccggtttctatggccttgctgtgtactttccctctttttgacagtaaacttcnnnnnnnnnnnnnnnnnnnnnnnnnnnnnnnnttagcgctgctctgcacccctcccttgggagggagacttcatgtggtttattgcgagttttttgtttacttttcaggtttgtactacaag

SEQ ID NO: 1955 - DNA, 323 bp, Homo sapiens
gtagctaaatttctgtgctcttacccctttattcatgtagttcctcctatcaggaatatcctgcccactctctgcttaactatgacaagaggtcatctgtccaaagagaaagaagagagtttgtggatttaggagaaaagaaaagactccaaatactgctatgggcatttatttaaaaagagaaatgaccaaagaggttaacaagtatttagatgaagctgggcagttgtagtctgtggtgctcttggtctgcacaaatcttcctcttcctccagcagtgctgtatggatgttgttgaatgttgaggtctgtctgcattttct

SEQ ID NO: 1956 - DNA, 424 bp, Homo sapiens
  misc_feature (269)..(269): n includes a, c, g, or t, or contains no nucleotide
gccagtcaggcaagggatttgttatccaaaatgctggtaatagatgcatctaaaaggatctctgtagatgaagctctccaacacccgtacatcaatgtctggtatgatccttctgaagcagaagctccaccaccaaagatccctgacaagcagttagatgaaagggaacacacaatagaagagtggaaagaattgatatataaggaagttatggacttggaggagagaaccaagaatggagttatacgggggcagccctctcctttagnacaggtgcagcagtgatcaatggctctcagcatccatcatcatcgtcgtctgtcaatgatgtgtcttcaatgtcaacagatccgactttggcctctgatacagacagcagtctagaagcagcagctgggcctctgggctgctgtagatgactact

SEQ ID NO: 1957 - DNA, 85 bp, Homo sapiens
gcaccgttttcctttcccctgattggctcagttccaccagggcccgcccccacgtcatctatttttgtctgctacgcgtccctcg

SEQ ID NO: 1958 - DNA, 119 bp, Homo sapiens
ccaacgtgcaggagccgggccgcgtggaggcgttgcagcagccctacgtggaggcgctgctgtcctacacgcgcatcaagaggccgcaggaccagctgcgcttcccgcgcatgctcatg

SEQ ID NO: 1959 - DNA, 126 bp, Homo sapiens
cttcactctgaatcctcatgaggcttctcagccctggatttcctgctgccatcctcacccagcacccacaactagcgcctgggcagggcagggctggcacctctcaacgtctgtggactgaatgaa

SEQ ID NO: 1960 - DNA, 208 bp, Homo sapiens
  misc_feature (48)..(48): n includes a, c, g, or t, or contains no nucleotide
  misc_feature (51)..(55): n includes a, c, g, or t, or contains no nucleotide
  misc_feature (143)..(182): n includes a, c, g, or t, or contains no nucleotide
ccacttctgctacctttgcgctgctgtgagcctcaccctgggcccctnggnnnnncttctctgctcccctgggtgatgggtgggcccagaaggtggcagtcccacaccttgtcctcccacctccctgaactgtccattgcttnnnnnnnnnnnnnnnnnnnnnnnnnnnnnnnnnnnnnnnnttggcactcagaatgggcccagtggg

SEQ ID NO: 1961 - DNA, 193 bp, Homo sapiens
ttcatctgtctgtcccagttaactgttaaataaggcctcatcctccactgaagagtatggattgaaggattgtgaactatgtttagtgtgattgtgaacttggtgcctaatgttccatgtctgaagtttgccccagtgctacacgttggagtatacctatgtgtgtgctttgccactgaagtaagattttgcc

SEQ ID NO: 1962 - DNA, 535 bp, Homo sapiens
  misc_feature (135)..(160): n includes a, c, g, or t, or contains no nucleotide
  misc_feature (256)..(256): n includes a, c, g, or t, or contains no nucleotide
  misc_feature (349)..(349): n includes a, c, g, or t, or contains no nucleotide
cagtggccaccttggaaacatcggctggctttgggactattccacctccttcccctgagcccagatctgcccccaccatcctttctctggcttcttttagcaagttatcaactaatcactaactccttccttttnnnnnnnnnnnnnnnnnnnnnnnnnnaaatctagcctctgaatgtcttggctccatctcttcagacccctttgcctttaaaaaaaaaacaaaaacaaaaacaaaaaaacccataatgcccanagaatgtcaaatgaggggcctcctgcctcctgctctgaatattctgtagctgtagaggcattttaaccctttgtcctccagcatcccttcacntcctcatcctctctaacctcctttttctttttttaatgctgcagcctccacactccacccacaggtggacccttccctttttctctagctggatctgtgtttcttcccttcgggcccccatgttttcctgcacccgccctaccatggtctctctctgcagttatttaatgcctgtgtcagatctac

SEQ ID NO: 1963 - DNA, 545 bp, Homo sapiens
  misc_feature (29)..(29): n includes a, c, g, or t, or contains no nucleotide
  misc_feature (34)..(34): n includes a, c, g, or t, or contains no nucleotide
  misc_feature (39)..(106): n includes a, c, g, or t, or contains no nucleotide
  misc_feature (112)..(116): n includes a, c, g, or t, or contains no nucleotide
  misc_feature (120)..(122): n includes a, c, g, or t, or contains no nucleotide
  misc_feature (124)..(167): n includes a, c, g, or t, or contains no nucleotide
  misc_feature (491)..(505): n includes a, c, g, or t, or contains no nucleotide
tgtctaagaatgtgagccagtcacagatngcaanattgnnnnnnnnnnnnnnnnnnnnnnnnnnnnnnnnnnnnnnnnnnnnnnnnnnnnnnnnnnnnnnnnnnnngtcaannnnnaggnnngnnnnnnnnnnnnnnnnnnnnnnnnnnnnnnnnnnnnnnnnnnnncaataatatgtaaagaaaatgccttaatataaactgactcagttgaatacctaatttgctgagacctcagcgtttcccttctttttgcgaattggggggaaagtgtatttttcttgcttatcatgcactctttccttttcttctcgcccgcttttcccctccttttctttttccttccttctttcctccctttaatataagggagaaatacatggtttttgtggaaatcattatatgtttgctttagattttcttctgttttcaccatcataacacttaagttaaatcatgatgtaaaattttagtacttaaaggtttttaatnnnnnnnnnnnnnnngcattgcatttgtaaacagtcctggtcagtagttaaataa

SEQ ID NO: 1964 - DNA, 151 bp, Homo sapiens
  misc_feature (107)..(108): n includes a, c, g, or t, or contains no nucleotide
agtttatgatcaaggcactagcaggtttggtgtctgagggcccagtttctaatttgaagatggtgctttaaacactgtcctcacatggtagaaggggcagatgggcnnaaaaaaaaaaaaaaaaaaaaagggcaaatgctgtgtgtagccc

SEQ ID NO: 1965 - DNA, 338 bp, Homo sapiens
  misc_feature (95)..(95): n includes a, c, g, or t, or contains no nucleotide
  misc_feature (99)..(99): n includes a, c, g, or t, or contains no nucleotide
cttttgctgaggttttctctgaggtttttttgatgctttataggaaactattttttaaaaaaagccatttcccacccaaggacacagtggatgtntttnccctgactccagcagggcaaggaatgtagccgagaggttgtgtgggctgggctctggtgccctcttccctggccaggacacctctcctcctgattcccttggcaccttgtctttctgtctgtttacctgtctccctgcctgcccatctgcatcttttgcagcccactctgacttccatctgggggctgagaccacccttgcctgcccccttctttctgccttaagaatgtccttttagg

SEQ ID NO: 1966 - DNA, 477 bp, Homo sapiens
  misc_feature (398)..(412): n includes a, c, g, or t, or contains no nucleotide
caattcagaccaaaatgatagatgtggattctcttacagacaaagagtgcgactggctcaacaattaccacctgacctgcagggatgtgattgggaaggaattgcagaaacagggccgccaggaagctctcgagtggctcatcagagagacgcaacccatctccaaacagcattaataaatacctccccggttttgtttttgtaaaatgctctggaggaaggaagaaacgtggcagatccctgacatctttcccctttcctttccttcttccctacctcccctttttactttagactttaagaagaacagaaaatcttcttatcctctttgatattttattgcaaacactcagtcttttatgattttttaattgttgagaacaagccaagaataaaannnnnnnnnnnnnnngagggtccctccaaagttgaacacttggtgaaaggaagatgccccgacttctttggccagtgatg

SEQ ID NO: 1967 - DNA, 367 bp, Homo sapiens
aggtctacgtccagcacctgctaaagcaagaccgagagcacctgtggaagttgatcgaaggcggtgcccacatctacgtctgtggggatgcacggaacatggccagggatgtgcagaacaccttctacgacatcgtggctgagctcggggccatggagcacgcgcaggcggtggactacatcaagaaactgatgaccaagggccgctactccctggacgtgtggagctaggggcctgcctgccccacccaccccacagactccggcctgtaatcagctctcctggctccctcccgtagtctcctgggtgtgtttggcttggccttggcatgggcgcaggcccagtgacaaagactcctctgggcctg

SEQ ID NO: 1968 - DNA, 474 bp, Homo sapiens
  misc_feature (173)..(173): n includes a, c, g, or t, or contains no nucleotide
  misc_feature (411)..(426): n includes a, c, g, or t, or contains no nucleotide
agtgctatctgatgacggggaaacaaaattattctctgagagggaaaggacatttgagggaaacatcaaatttccccataaataaatgaatggagtttgcaggaaggtgagggtgagcagagatgtgtgtggacatctctgaccatccatcgctgtattcaaatggattgttntattccattctggtctcaggcatgaccacgtccagtgaagacatttgaggcagcacatctcaggacccaggcaatagactggccccaactcaggctggactaaggtgtgattaattctttgttttttgtgtggaacagctcaccttgtcagacagcctcagggcatctctgagacacaggggcagaaaatgacattcatcttttgagtcctcatccatggagtgctgtgtttgggggnnnnnnnnnnnnnnnncgagaaccccattctgccaccccaccaggatgcccattctccaggact

SEQ ID NO: 1969 - DNA, 522 bp, Homo sapiens
  misc_feature (181)..(181): n includes a, c, g, or t, or contains no nucleotide
  misc_feature (194)..(194): n includes a, c, g, or t, or contains no nucleotide
  misc_feature (236)..(236): n includes a, c, g, or t, or contains no nucleotide
aatgagaggccctgcctggacccagggagaggagccagtgacacaggcagagcggtgcagccctccttcccttccatttggaggaggtggtgccaggagcctgcccgcttacctctgctgaagcataagtggactttgcttttggggcttatctctgatacatgctggagccctgcctctnccactgctagatnggaacctggaatctctcatctacctcttagtctgtcagtttnctacgtgtgagaagcaagcttgtgggccagtgtccttgtacatgctgtagcacttaaaaaataattccagggttccctggaaaaccagtcccagggttcctatgatctgtagtttctacctggattataactggttttgggtacctgaattttgattggttagccttaattatagtctggcgtgatcatgtagaatcttttctggtgaacagatcataaagttctatcaaggagttctatcaaggcatccatgtcagtggtgctatgctggttacaacttgagatt

SEQ ID NO: 1970 - DNA, 329 bp, Homo sapiens
  misc_feature (93)..(93): n includes a, c, g, or t, or contains no nucleotide
  misc_feature (206)..(220): n includes a, c, g, or t, or contains no nucleotide
tttctggatgaacgagacagtggaccactcattctgacacacatctacctgctcctgggcatgtctcttcccatctggctgatccccagaccntgcacacagaagggtagcctgggaggagccagggccctcgtcccctatgccggtgtcctggctgtgggtgtgggtgatactgtggcctccatcttcggtagcaccatgggggnnnnnnnnnnnnnnngaaccaaaaagacttttgaggggaccatgacatctatatttgcgcagatcatttctgtagctctgatcttaatctttgacagtggagtggacctaaactacagttatgc

SEQ ID NO: 1971 - DNA, 268 bp, Homo sapiens
  misc_feature (87)..(88): n includes a, c, g, or t, or contains no nucleotide
  misc_feature (91)..(97): n includes a, c, g, or t, or contains no nucleotide
  misc_feature (99)..(101): n includes a, c, g, or t, or contains no nucleotide
  misc_feature (203)..(219): n includes a, c, g, or t, or contains no nucleotide
caaacgtacaagacagagtaatcggcacagacccacccctcccccggaaccgccgaatccagaatggagcccaaacccacacccccnnctnnnnnnntnnntccacagggggaggggcagggtggactgggggacctgccccccatgctggggcggcacctccgttttccatctcctgccaaccccactcttttcccatcttnnnnnnnnnnnnnnnnngtttagccagctgggagctggatggttgaaccacatacaaaggcaacaa

SEQ ID NO: 1972 - DNA, 249 bp, Homo sapiens
gaccttcttggtgattttgtggctttatttttatagggggaatggcaaaaaccaagtggagcagagtcctcagtccctgatcatcctggagggaaagaactgcactcttcaatgcaattatacagtgagccccttcagcaacttaaggtggtataagcaagatactgggagaggtcctgtttccctgacaatcatgactttcagtgagaacacaaagtcgaacggaagatatacagcaactctggatgc

SEQ ID NO: 1973 - DNA, 563 bp, Homo sapiens
  misc_feature (123)..(137): n includes a, c, g, or t, or contains no nucleotide
  misc_feature (235)..(235): n includes a, c, g, or t, or contains no nucleotide
  misc_feature (244)..(260): n includes a, c, g, or t, or contains no nucleotide
  misc_feature (444)..(444): n includes a, c, g, or t, or contains no nucleotide
  misc_feature (488)..(511): n includes a, c, g, or t, or contains no nucleotide
  misc_feature (520)..(536): n includes a, c, g, or t, or contains no nucleotide
tgcttctggaattgagttctccttttaagtaccaatgatacttaaatttctcagaaatgtaatggtgtgtcattgccttgaaatgcttgcttagggcttcttttatgttatcttaaaaagtgnnnnnnnnnnnnnnnttttttacatccatttcacatgtaagagacaaaaaagtctagattggtcttgatattgagataataaaaagtaagtagcattaagaaaggtaacaatncttcattcnnnnnnnnnnnnnnnnntgaaacaatttaggggaatgaggggcaaaaggggagaaatactgctaaagaacatgagcataaaaatgcgtgcgtttcagtgtttaagaaggcttgataaagaatgtcacttttttatttaactgataagatttttgttattttttactttgataagtaaaccaaagaatatttgtatttcaancagtttgtgtggtgtttctatataattttctgtgtataaataannnnnnnnnnnnnnnnnnnnnnnntaaaaaagnnnnnnnnnnnnnnnnnccagctatgtcctctaggaaatgacag

SEQ ID NO: 1974 - DNA, 458 bp, Homo sapiens
  misc_feature (31)..(57): n includes a, c, g, or t, or contains no nucleotide
  misc_feature (136)..(150): n includes a, c, g, or t, or contains no nucleotide
  misc_feature (262)..(311): n includes a, c, g, or t, or contains no nucleotide
  misc_feature (338)..(384): n includes a, c, g, or t, or contains no nucleotide
cccggcctaataaagcagtgttgccatctcnnnnnnnnnnnnnnnnnnnnnnnnnnnacacctgcgcagagaagagggctgcctggcctccctgggccgctggtacagatcacacacacacacagattaaacgcannnnnnnnnnnnnnngggcccagactgcagtggctcaagacaggacactgcggaaagccgccatgtgccgccgcacactgtctgagatctgctcagccgatctgctccggccgtagtaatccgtgannnnnnnnnnnnnnnnnnnnnnnnnnnnnnnnnnnnnnnnnnnnnnnnnntagtcctggtcctcatccttggggccnnnnnnnnnnnnnnnnnnnnnnnnnnnnnnnnnnnnnnnnnnnnnnntggtggagccggtcagacccaacagtcttgggtggaagtcctggacgtagcgggccatggcttcaacgtcgtcc

SEQ ID NO: 1975 - DNA, 319 bp, Homo sapiens
  misc_feature (103)..(124): n includes a, c, g, or t, or contains no nucleotide
  misc_feature (150)..(150): n includes a, c, g, or t, or contains no nucleotide
  misc_feature (222)..(222): n includes a, c, g, or t, or contains no nucleotide
  misc_feature (234)..(234): n includes a, c, g, or t, or contains no nucleotide
ccggacggcaggtacatgcgctcctggctggagcccacgcccggtgcgctctccttcgcgggcttgccctccagccggccttatggcattaaacctgaaccgnnnnnnnnnnnnnnnnnnnnnngtcccacgcttgacactcacactttntccctgactgactatgcttgtggttctcctccagttgatagagaaaaacaacccagcgaaggcgccttctcngaaaacaatgcngagaatgagagcggcggagacaagccccccatcgatcccaataacccagcagccaactggcttcatgcgcgctccactcggaaaa

SEQ ID NO: 1976 - DNA, 290 bp, Homo sapiens
  misc_feature (73)..(107): n includes a, c, g, or t, or contains no nucleotide
  misc_feature (135)..(156): n includes a, c, g, or t, or contains no nucleotide
cgctagtacagttgctgcagcaatgtgcatggttgtcacacgaacagaaaaagattcttatgtagttgctttnnnnnnnnnnnnnnnnnnnnnnnnnnnnnnnnnnnatatgaccttacaacaggttttaatggnnnnnnnnnnnnnnnnnnnnnntggaactgattgctctcttccaatgatctgggctcagaagacaaacacacctgctgatgtcttcattgtattcactgataatgagacctttgctggaggtgtccatcctgctattgctctgagggagtatcgaa

SEQ ID NO: 1977 - DNA, 529 bp, Homo sapiens
  misc_feature (228)..(242): n includes a, c, g, or t, or contains no nucleotide
  misc_feature (310)..(362): n includes a, c, g, or t, or contains no nucleotide
atctgatcagacaaggaatgaagcaatgactgtgggctgggaaactgtacctacctctcttcccactgcaaatttctgggatagaccaaaagtgaatttgattatgtgttggctgaagttcttcattctgactgttgaggggaggttttcctttgaagagttttcatcccagactcagctgtcttttcacatggatgaaataattcctgctaccaacaacagagcttnnnnnnnnnnnnnnnttttcaagatgccttgttgctttgaagaagggagtgatgtcaattctcttgttacattctccctttannnnnnnnnnnnnnnnnnnnnnnnnnnnnnnnnnnnnnnnnnnnnnnnnnnnncttgaatctccccttggcccaggctgaggtactatcttgtcctatacacttctacttggtcactttgctttcttcgttaatggaacatacagtagcatgttaagagggatttcatgtttttgtttttttaaagttaaaaattacatgatgcagagattcaggttttc

SEQ ID NO: 1978 - DNA, 290 bp, Homo sapiens
  misc_feature (258)..(258): n includes a, c, g, or t, or contains no nucleotide
  misc_feature (262)..(262): n includes a, c, g, or t, or contains no nucleotide
gggcctatgggcaactgcgttgaaaggacgttcgccaagggccgtgtgtaaatacgaactgcgccatggagaggagaggcactgccggagcccttgccagatctccctccctctctccgtgcagtagctgtgtgtccgaggtcagtgtgcggaatcacagccaaggacgtgaagagatgtacgggggaaagagaagctggggattggatgaaagtcaaaggttgtctactttaagaaaataaaataccctgaatgganaaancccagcattgtcccagtgtgctatgtgt

SEQ ID NO: 1979 - DNA, 554 bp, Homo sapiens
  misc_feature (376)..(376): n includes a, c, g, or t, or contains no nucleotide
  misc_feature (425)..(427): n includes a, c, g, or t, or contains no nucleotide
ctgggctccagctttggctctggcgcgggctccagctccttcagccgcaccagctcctccagggccgtggttgtgaagaagatcgagacacgtgatgggaagctggtgtctgagtcctctgacgtcctgcccaagtgaacagctgcggcagcccctcccagcctacccctcctgcgctgccccagagcctgggaaggaggccgctatgcagggtagcactgggaacaggagacccacctgaggctcagccctagccctcagcccacctggggagtttactacctggggaccccccttgcccatgcctccagctacaaaacaattcaattgctttttttttttggtccaaaataaaacctcagctagctctgccaanaaaaaaaaaaaaaaaaaaaaaaaaaaaaaaaaaaaaaaaaaaaaaaaannngaaggtgggggagtctgtgttccacacaacccgctgggtgccccccttgatcggggagctgtacgggctgcgcaccacagaggaggctctccatgccagccacggcttcatgtggtacacgtaggcc

SEQ ID NO: 1980 - DNA, 471 bp, Homo sapiens
  misc_feature (143)..(350): n includes a, c, g, or t, or contains no nucleotide
  misc_feature (398)..(410): n includes a, c, g, or t, or contains no nucleotide
  misc_feature (415)..(415): n includes a, c, g, or t, or contains no nucleotide
  misc_feature (418)..(419): n includes a, c, g, or t, or contains no nucleotide
ggtcattactctcaaccacctaggcaatgaagaatataccatttcaaatatttacagtacttgtcttcaccaacactgtcccaaggtgaaatgaagcaacagagaggaaattgtacataagtacctcagcatttaatccaaannnnnnnnnnnnnnnnnnnnnnnnnnnnnnnnnnnnnnnnnnnnnnnnnnnnnnnnnnnnnnnnnnnnnnnnnnnnnnnnnnnnnnnnnnnnnnnnnnnnnnnnnnnnnnnnnnnnnnnnnnnnnnnnnnnnnnnnnnnnnnnnnnnnnnnnnnnnnnnnnnnnnnnnnnnnnnnnnnnnnnnnnnnnnnnnnnnnnnnnnnnnnnnnacccaaatgaattctaaaccaatcaaatgtctgggaagccctccaagnnnnnnnnnnnnnaagcnctnnaagaatattcccaatattcccggtcagcagtatcaaggctgacttgtgttca

SEQ ID NO: 1981 - DNA, 434 bp, Homo sapiens
  misc_feature (33)..(33): n includes a, c, g, or t, or contains no nucleotide
  misc_feature (40)..(41): n includes a, c, g, or t, or contains no nucleotide
  misc_feature (44)..(44): n includes a, c, g, or t, or contains no nucleotide
  misc_feature (47)..(49): n includes a, c, g, or t, or contains no nucleotide
  misc_feature (56)..(56): n includes a, c, g, or t, or contains no nucleotide
  misc_feature (65)..(65): n includes a, c, g, or t, or contains no nucleotide
  misc_feature (69)..(69): n includes a, c, g, or t, or contains no nucleotide
  misc_feature (78)..(78): n includes a, c, g, or t, or contains no nucleotide
  misc_feature (82)..(82): n includes a, c, g, or t, or contains no nucleotide
  misc_feature (119)..(119): n includes a, c, g, or t, or contains no nucleotide
  misc_feature (121)..(121): n includes a, c, g, or t, or contains no nucleotide
  misc_feature (123)..(123): n includes a, c, g, or t, or contains no nucleotide
  misc_feature (125)..(125): n includes a, c, g, or t, or contains no nucleotide
  misc_feature (135)..(197): n includes a, c, g, or t, or contains no nucleotide
  misc_feature (400)..(400): n includes a, c, g, or t, or contains no nucleotide
gatgctcacctgtgccatctgtcctcctgtctntgccagnnggnacnnnagttctntgctgttancctnccccaaggncctnggccgagcctctacctgaagcaactctgctcttcctntnantntcaaagcacnnnnnnnnnnnnnnnnnnnnnnnnnnnnnnnnnnnnnnnnnnnnnnnnnnnnnnnnnnnnnnncacctcatgccaccgccaaccccctgccccaggagcgggcctgagccacgtcccctaggagcagctggagatggccaaaagagtgagctcaggactactggatcccatgcccaggtgtccagcagacctcaaggcagaagggtcacctaacccaggagtccacagactgatgtgacctcaggttcccacatcagtggccacanggcagggcccacctggtagaagtgttctggatat

SEQ ID NO: 1982 - DNA, 390 bp, Homo sapiens
  misc_feature (55)..(165): n includes a, c, g, or t, or contains no nucleotide
gaagaagatccctacttggtagttaaccctaactacttgctcgaagattgagatnnnnnnnnnnnnnnnnnnnnnnnnnnnnnnnnnnnnnnnnnnnnnnnnnnnnnnnnnnnnnnnnnnnnnnnnnnnnnnnnnnnnnnnnnnnnnnnnnnnnnnnnnnnnnnncaggatttgttttcagaaacaagaattgagttgatggtcctatgtgtcacattcatcacaggtttcataccaacacaggcttcagcacttcctttggtgtgtttcctgtcccagtgaagttggaaccaaataatgtgtagtctctataaccaatacctttgttttcatgtgtaagaaaaggcccattacttttaaggtatgtgctgtcctattgagcaaataact

SEQ ID NO: 1983 - DNA, 231 bp, Homo sapiens
  misc_feature (64)..(104): n includes a, c, g, or t, or contains no nucleotide
  misc_feature (142)..(142): n includes a, c, g, or t, or contains no nucleotide
  misc_feature (174)..(197): n includes a, c, g, or t, or contains no nucleotide
tgtgtgtcccggacctgtggtatgtgtccctttgccatcccaaacaggcaactgcttgctgctnnnnnnnnnnnnnnnnnnnnnnnnnnnnnnnnnnnnnnnnncacaggccttcctgggcctggccctcctctcctgactnccagatccttccctgccctcttgtgtgcaagnnnnnnnnnnnnnnnnnnnnnnnngtttcttctttgatacctttgttctgtcccctgc

SEQ ID NO: 1984 - DNA, 550 bp, Homo sapiens
  misc_feature (72)..(78): n includes a, c, g, or t, or contains no nucleotide
  misc_feature (80)..(84): n includes a, c, g, or t, or contains no nucleotide
  misc_feature (86)..(96): n includes a, c, g, or t, or contains no nucleotide
  misc_feature (98)..(99): n includes a, c, g, or t, or contains no nucleotide
  misc_feature (101)..(103): n includes a, c, g, or t, or contains no nucleotide
  misc_feature (106)..(113): n includes a, c, g, or t, or contains no nucleotide
  misc_feature (115)..(117): n includes a, c, g, or t, or contains no nucleotide
  misc_feature (119)..(121): n includes a, c, g, or t, or contains no nucleotide
  misc_feature (123)..(129): n includes a, c, g, or t, or contains no nucleotide
  misc_feature (134)..(137): n includes a, c, g, or t, or contains no nucleotide
  misc_feature (140)..(140): n includes a, c, g, or t, or contains no nucleotide
  misc_feature (142)..(142): n includes a, c, g, or t, or contains no nucleotide
  misc_feature (144)..(146): n includes a, c, g, or t, or contains no nucleotide
  misc_feature (148)..(148): n includes a, c, g, or t, or contains no nucleotide
  misc_feature (151)..(187): n includes a, c, g, or t, or contains no nucleotide
tcctccagggcacttttaggaaagggtttttagctagtgtttttcctcgcttttaatgacctcagccccgcnnnnnnngnnnnnannnnnnnnnnngnncnnntgnnnnnnnnannngnnncnnnnnnnccccnnnnccngngnnngnccnnnnnnnnnnnnnnnnnnnnnnnnnnnnnnnnnnnnntcgtgggggccatcacacctgccctgtgcagcggagccggaccaggctcttgtgtcctcactcaggtttgcttcccctgtgcccactgctgtatgatctgggggccaccaccctgtgccggtggcctctgggctgcctcccgtggtgtgagggcggggctggtgctcatggcacttcctccttgctcccacccctggcagcagggaagggctttgcctgacaacacccagctttatgtaaatattctgcagttgttacttaggaagcctggggagggcaggggtgccccatggctcccagactctgtctgtgccgagtgtattataaaatcgtgggggagatgcccggcctgggatgctgttt

SEQ ID NO: 1985 - DNA, 331 bp, Homo sapiens
tcatcagggctgaggctgccaagatcacaccacagtgaggagtggtggcaggactcgtgggccctctccggcctgtttcccctgccactccagcccccttgagctgggaactcaggctcctggaaaaacctgggcagtgggaggctcagctgcgggccattgatttgagcctttgagggaggatagggctggcctttgtgaagccagcagaggctgagaacctcaggcttccctagatccagagcccctccccatcttcctctctctaaaaacaaccctaccccccattgccaccttcactcctgtgtctccagctgattagcctcagact

SEQ ID NO: 1986 - DNA, 519 bp, Homo sapiens
  misc_feature (152)..(153): n includes a, c, g, or t, or contains no nucleotide
  misc_feature (155)..(172): n includes a, c, g, or t, or contains no nucleotide
  misc_feature (265)..(265): n includes a, c, g, or t, or contains no nucleotide
  misc_feature (267)..(309): n includes a, c, g, or t, or contains no nucleotide
  misc_feature (357)..(371): n includes a, c, g, or t, or contains no nucleotide
  misc_feature (419)..(419): n includes a, c, g, or t, or contains no nucleotide
ttcagttgagtgcagcatctttcccacattcaatatgaagcaccaccagatggctaccaaatgataagaacaacagcaacaaaaggctccaaaacacacatgcctctttgttttgatgcttctaaagcaagccatgtctcagtcactttgcnngnnnnnnnnnnnnnnnnnncatggactgtaaatgcatatgcatgatttcctaaactgttttagaactctccttaacaatctcaactaccctatttttccctgttccctggtncnnnnnnnnnnnnnnnnnnnnnnnnnnnnnnnnnnnnnnnnnnntagtggtgacatgtcagctgcccactgatactcctttggaaaatggtnnnnnnnnnnnnnnnacactttggtatgatgcatatacaagttggaagactaaagaggtgcantgtgatctgagcctccatcattgtcctccacaaacatattttcatattctttatgtggaagaatagattttaaagtacaagccaaatgattttcattggt

SEQ ID NO: 1987 - DNA, 568 bp, Homo sapiens
  misc_feature (165)..(165): n includes a, c, g, or t, or contains no nucleotide
  misc_feature (180)..(180): n includes a, c, g, or t, or contains no nucleotide
  misc_feature (186)..(186): n includes a, c, g, or t, or contains no nucleotide
  misc_feature (197)..(199): n includes a, c, g, or t, or contains no nucleotide
  misc_feature (204)..(204): n includes a, c, g, or t, or contains no nucleotide
  misc_feature (209)..(209): n includes a, c, g, or t, or contains no nucleotide
  misc_feature (215)..(215): n includes a, c, g, or t, or contains no nucleotide
  misc_feature (233)..(233): n includes a, c, g, or t, or contains no nucleotide
  misc_feature (238)..(238): n includes a, c, g, or t, or contains no nucleotide
ggcctgggcctctatctactgccaaccacacagccctccgaggttcacactgactcctccttcctgtctaccttaatcatgaaaccgaattcatggggttgtattctccccaccctcagctcctcactgttctcagagggatgtgagggaactgaactctggtgnccgtgctagggggtnaggggncctctccctcnnnactgnctggnactggnagctgggctcctgtagancctgnaggggtccctctctctagggtctcctgtagggcttatgactgtgaatccttgatgtcatgattttatgtgacgattcctaggagtccctgcccctagagtaggagcagggctggaccccaagcccctccctcttccatggagagaagagtgatctggcttctcctcggacctctgtgaatatttattctatttatggttcccgggaagttgtttggtgaaggaagcccctccctgggcattttctgcctatgctggaatagctccctcttctggtcctggctcagggggctgggattttgatatattttctaataaaggactttgtctcg

SEQ ID NO: 1988 - DNA, 400 bp, Homo sapiens
  misc_feature (248)..(262): n includes a, c, g, or t, or contains no nucleotide
  misc_feature (317)..(374): n includes a, c, g, or t, or contains no nucleotide
catcagatgtcttgagaaagctatattttccaatagtaccccttgtgtaaagttacgaaaaaaacaagcccttcagtactggttagcaggaagaaatgtcctacaaaagacgagtctgtcaacctagtgcctgtgttctgtacagggcttatttatttactgttaataaacagatcttccaaaacacacagttacctggttcacagatagctgctttttattgacaaacaagatcatagtatttcagnnnnnnnnnnnnnnncattaatacttttctgttactcagcatttttttttatatcagttcaaaagctacnnnnnnnnnnnnnnnnnnnnnnnnnnnnnnnnnnnnnnnnnnnnnnnnnnnnnnnnnnatgggactctcatgttaacaaagaat

SEQ ID NO: 1989 - DNA, 545 bp, Homo sapiens
gtcctgtctctgtgcatgtcgctgccgctcctggtgttcgcggacgtgcaggagggcggtacctgcaacgccagctggccggagcccgtggggctgtggggcgccgtcttcatcatctacacggccgtgctgggcttcttcgcgccgctgctggtcatctgcctgtgctacctgctcatcgtggtgaaggtgagggcggcgggcgtgcgcgtgggctgcgtgcggcggcgctcggagcggaaggtgacgcgcatggtgttggtggtggtgctggtgtttgcgggatgttggctgcccttcttcaccgtcaacatcgtcaacctggccgtggcgctgccccaggagcccgcctccgccggcctctacttcttcgtggtcatcctctcctacgccaacagctgtgccaaccccgtcctctacggcttcctctctgacaacttccgccagagcttccagaaggttctgtgcctccgcaagggctctggtgccaaggacgctgacgccacggagccgcgtccagacaggatccggcagcagcaggaggc

SEQ ID NO: 1990 - DNA, 541 bp, Homo sapiens
tttctttctaacatatcaatgcttagcagaactattcacattgtcagtagtaaatttaaagacaaatgcccgttttcctccagtccattgaacataccatacttatatacctgcaactaagtgtttaaaattatgctctgtaactctgtactgctagtattagaactaaaaatcttaaaatacagccagtgcttaatgcttatatcaatgtggatttgtcggcttttatgtaatctgtaatatgtatagcaggaaatacgaagagttacacagtgtatgccttaaaaggctgtttcttaaaggtgttacaaggggataatggtatttcaactagttatcagcaagtgacaatacattccaccacaaatacactcttgttcttctagcttttagactatatgaaaaaaccgggtgcttcaaagtacatgataagggaacactatacctgtcatggatgaactgaagactttgcctgttcattttttaaatattattttcaggtcctttgcttaccaaaggaggcccaatttcactcaaatgt

SEQ ID NO: 1991 - DNA, 444 bp, Homo sapiens
gagccccttcaacaggcacattatttccccctgagatccataagggaatttagtttctactattgtagagttctgaaaagaggtaaaatagtagtcctttggtcatcctatttttgctttcaattttgatatttcagactgtaaaaggccttgggggatgatagtacatgtggtagcagtaatttttttgaagcaactgcactgacattcatttgagttttctctcattatcagattctgttccaaacaagtattctgtagatccaaatggattaccagtgtgctacagacttcttattatagaacagcattctattctacatcaaaaatagtttgtgtaagttagttttggttaccatctaaaatatttttaaatgttctttacataaaaatttatgttgtgttttaaaatccttaggggctttatctatttttctaagtcag

SEQ ID NO: 1992 - DNA, 328 bp, Homo sapiens
  misc_feature (185)..(186): n includes a, c, g, or t, or contains no nucleotide
  misc_feature (188)..(188): n includes a, c, g, or t, or contains no nucleotide
  misc_feature (208)..(208): n includes a, c, g, or t, or contains no nucleotide
  misc_feature (211)..(224): n includes a, c, g, or t, or contains no nucleotide
  misc_feature (251)..(271): n includes a, c, g, or t, or contains no nucleotide
cactagtgggtcttatgtgtgtctgtgtcttctccttaaacactcgccctggagtctgttctcacacctgtgcgcaggtttgcacactcaagttctcatgggcaggctcaggtctgtcccgctgccctgggcacgaggtctcctgaggacctgggcctgttctgctcctaggagacctgagcccnntnaccgcgtgactcccaccatnccnnnnnnnnnnnnnntggattcagccatgcatggactggggnnnnnnnnnnnnnnnnnnnnnctgtgcccctcgtgtctcctcacatgggtgtctgtggttctctcctgtgtaaatgtc

SEQ ID NO: 1993 - DNA, 598 bp, Homo sapiens
  misc_feature (129)..(129): n includes a, c, g, or t, or contains no nucleotide
  misc_feature (131)..(133): n includes a, c, g, or t, or contains no nucleotide
  misc_feature (135)..(135): n includes a, c, g, or t, or contains no nucleotide
  misc_feature (138)..(138): n includes a, c, g, or t, or contains no nucleotide
  misc_feature (160)..(183): n includes a, c, g, or t, or contains no nucleotide
  misc_feature (203)..(229): n includes a, c, g, or t, or contains no nucleotide
  misc_feature (370)..(370): n includes a, c, g, or t, or contains no nucleotide
  misc_feature (372)..(372): n includes a, c, g, or t, or contains no nucleotide
  misc_feature (512)..(512): n includes a, c, g, or t, or contains no nucleotide
tggagagccgcatgtcactgtcagagatgagcccacccccacccttccctgggggcgattagctgctgagtcacccacccagccttggagctggatgcctgtgcagcagaacagaggcaacggtggcangnnngnggnggctgcgcacagcttctcccgnnnnnnnnnnnnnnnnnnnnnnnnacgccaatgcctcctaagcnnnnnnnnnnnnnnnnnnnnnnnnnnncccacattaacgctccaccacaagcccagcctagtcagagccctcattgccccatccctgagtgggcaggagcctggcctggggagggcttgggcctgtgaggattctccccgaaggtgccctcggaggcagcaggtttgngnccctggggggcccgttccccagaagctgccagtgctttcagatgcattgactcttcccgcctcccctccctcagaaaggtagtgcccacactatttttaaaatgttattttatgcaatacactgttcctagtgagcaggnctctggccctgaggagtctttgcaatgtattgaaggaattgctgccgtgtgagttttgaatgattttgcagtaaagacctgatctt

SEQ ID NO: 1994 - DNA, 251 bp, Homo sapiens
  misc_feature (40)..(122): n includes a, c, g, or t, or contains no nucleotide
  misc_feature (124)..(126): n includes a, c, g, or t, or contains no nucleotide
  misc_feature (189)..(189): n includes a, c, g, or t, or contains no nucleotide
  misc_feature (198)..(198): n includes a, c, g, or t, or contains no nucleotide
aatgaggatcctgttggtgatcctcattccagtttccaannnnnnnnnnnnnnnnnnnnnnnnnnnnnnnnnnnnnnnnnnnnnnnnnnnnnnnnnnnnnnnnnnnnnnnnnnnnnnnnnnngnnnggcctcctgacttattcatagtattgtcgcctggtggcattggtgtggggtagcttgtcctgnctacttgcntaaagttctctttctttgagaaaactgaggaaccagaatgcttagagttcata

SEQ ID NO: 1995 - DNA, 350 bp, Homo sapiens
  misc_feature (26)..(40): n includes a, c, g, or t, or contains no nucleotide
  misc_feature (269)..(296): n includes a, c, g, or t, or contains no nucleotide
tcttgtagcagtacagtacagtcctnnnnnnnnnnnnnnnaggaaaaggtctgataaaaaccaagatgcctccacattttgtcataattgtaaccaatttcacctctgtctccagtatcaccacaaaattgttcttccttggagtgtcttggctattcttagccaactgttcctccatattacttctagaattagaccaacaatttataaatcaaacaaacccaagagcattgaaattttgattggatttgtattgaatttatagattnnnnnnnnnnnnnnnnnnnnnnnnnnnntgttgtcttccaatacatgaatatggtacagctcttcatttacttaggcctttg

SEQ ID NO: 1996 - DNA, 463 bp, Homo sapiens
gttcctttatgcagcttggccctgtctaccgagatgcccatctcttcctgcctgctagcctgctagaccctcaaactgggtgggttctgtgtcaataaaaagcttcaccccctggctgagtgaggtggtcccctgcaatcactgtttgtcccctacccacccaacctgtccctgcctgctcccagcccactcatccttatgtgctagggataaatcaagagtcctcagcactccacattcccaaaaaatcccaggaactcctaaaccttcccctgtgacagaagatgaggttggcagctgatcagacctcaataattttatactgtaataagctctttgaatgtgtatattattatcttttacaatcatttcattttgtatttaatatcaatggactgagtctgattcagaaaataattgtaatgttcatattcaatatcttacagtgatacagttttgtatt

SEQ ID NO: 1997 - DNA, 529 bp, Homo sapiens
  misc_feature (30)..(33): n includes a, c, g, or t, or contains no nucleotide
  misc_feature (36)..(40): n includes a, c, g, or t, or contains no nucleotide
  misc_feature (42)..(46): n includes a, c, g, or t, or contains no nucleotide
  misc_feature (66)..(66): n includes a, c, g, or t, or contains no nucleotide
actaaatacacttggcagctgaagatgaannnnaannnnnannnnntttaggctggacagcgtccngccacagctactacctgacactgagctcatgcagagagatgatggctgatgttccttctcccttgggacatgggtctggcacctgtgggctgtcgatagtgccctctgagcagagggtcacggtcatgtcagtttgggggaattctctgttgtgcctcacagactcccccctttctttcctccctccccttctcattttgatgtctaaagcatcaagtccctcttcctcggagtttctctagctgcagtggaagattctgttttcctgtggggaaaatgctcacttgagattttgcagggacccgggtctgtctggtttctgatgacatagtaagagaaaggtcttttttcaggttggctggtgaaaggaattgcatgtgactcacacaaacaggagctagcccaatcatacactgactcgcgtgggtgttaaaatgtttatcatgcctaagggagacattta

SEQ ID NO: 1998 - DNA, 413 bp, Homo sapiens
  misc_feature (31)..(51): n includes a, c, g, or t, or contains no nucleotide
  misc_feature (120)..(121): n includes a, c, g, or t, or contains no nucleotide
  misc_feature (123)..(123): n includes a, c, g, or t, or contains no nucleotide
cccagcagggtgttaagcctctgtctctggnnnnnnnnnnnnnnnnnnnnnactttcctaggagagagtggagatgggaagacagggaaaggaaggcagcaggaggccacaagcccaccnngntcttcatgtcaagagagggagtaacatgtcttctcattgcccacggacccaacctctgtccaggtgcccctcatcatcacagtttaacacaagctcccctgctccagccaaattgatctcccagtcttgtccttacccattccaagtgctctgccagcccctgttcatccaagttttaagtcctccaccctgttctaagagactgttccaacggctctgggcctcagtggtcacttgaccaccattgtctcagagctgcccactttgtgtgtgtcacatgctgcctgagt

SEQ ID NO: 1999 - DNA, 305 bp, Homo sapiens
ctgctgatgtcgacccctggcgagtccgagctgctctctcccatgatggcatcttaaacctggaagcacctcggggtggccgacatttggacacagaggtcaatgaggtctacatctccctgctccctgcgcctcctgatccagaggaagaggaggaggcagccatagttgagccctgattgccacagacccagcacccagcaaatccctctctacctcccaaggtgatatggccagctgcccaccactccagaggtagcagcatccttgggggaagggaaaggtgcatggtccacaatgtatgg

SEQ ID NO: 2000 - DNA, 541 bp, Homo sapiens
aagctacatcagcacaattggtgtggatttcaaaataagaactatagagttagacgggaaaacaatcaagcttcaaatatgggacacagcaggccaggaaagatttcgaacaatcacctccagttattacagaggagcccatggcatcatagttgtgtatgatgtgacagatcaggagtccttcaataatgttaaacagtggctgcaggaaatagatcgttatgccagtgaaaatgtcaacaaattgttggtagggaacaaatgtgatctgaccacaaagaaagtagtagactacacaacagcgaaggaatttgctgattcccttggaattccgtttttggaaaccagtgctaagaatgcaacgaacgtagaacagtctttcatgacgatggcagctgagattaaaaagcgaatgggtcccggagcaacagctggtggtgctgagaagtccaatgttaaaattcagagcactccagtcaagcagtcaggtggaggttgctgctaaatttgcctccatccttttctcacagcaatgaatttg

SEQ ID NO: 2001 - DNA, 533 bp, Homo sapiens
  misc_feature (208)..(255): n includes a, c, g, or t, or contains no nucleotide
  misc_feature (259)..(259): n includes a, c, g, or t, or contains no nucleotide
  misc_feature (461)..(478): n includes a, c, g, or t, or contains no nucleotide
cagacagctttgtgcctccgtcggggccctccaaccccatgaaccccaccattggcaatggcctctcacctcaggtaatgggactcctgaccaaccacggtggggtacctcatcagccccagactgattacgcgctctcccctctcaccgggggtctggaacctaccaccacggtgtcggccagctgcagtcagagactagaccatannnnnnnnnnnnnnnnnnnnnnnnnnnnnnnnnnnnnnnnnnnnnnnncctnatagcaccacaggctacagtatggaccctgtcacaggctaccaatatgggcagtatggacaaagtaagccttggactttttagggggcaattcctcctggaagggagataaactcaactcttccttaagaaaggtgaattagaggcaagattaagccacacatgccggtatcaatttttttttttttttttgcaaagccagnnnnnnnnnnnnnnnnnngcttccttgtgtaattattttcttaactgatgtcaacaacatcttgcggttatta

SEQ ID NO: 2002 - DNA, 329 bp, Homo sapiens
  misc_feature (121)..(121): n includes a, c, g, or t, or contains no nucleotide
  misc_feature (130)..(130): n includes a, c, g, or t, or contains no nucleotide
  misc_feature (134)..(134): n includes a, c, g, or t, or contains no nucleotide
  misc_feature (142)..(142): n includes a, c, g, or t, or contains no nucleotide
  misc_feature (144)..(144): n includes a, c, g, or t, or contains no nucleotide
  misc_feature (160)..(160): n includes a, c, g, or t, or contains no nucleotide
  misc_feature (164)..(164): n includes a, c, g, or t, or contains no nucleotide
  misc_feature (167)..(202): n includes a, c, g, or t, or contains no nucleotide
gtgataggcatcctcgtggtcatcatcggggtgtcccttggcatgaacacaggatatgccatcaacccgtcccgggacctgcccccccgcatcttcaccttcattgctggttggggcaaanaggtcttcnagcnaatggggnanaactggtggtgggtgnccantgnnnnnnnnnnnnnnnnnnnnnnnnnnnnnnnnnnnntcatctacctggtcttcattggctccaccatcccacgggagcccctgaaattggaggattctgtggcgtatgaagaccacgggataaccgtattgcccaagatgggatctcatgaacccacgatctc

SEQ ID NO: 2003 - DNA, 530 bp, Homo sapiens
  misc_feature (102)..(114): n includes a, c, g, or t, or contains no nucleotide
  misc_feature (116)..(117): n includes a, c, g, or t, or contains no nucleotide
  misc_feature (119)..(122): n includes a, c, g, or t, or contains no nucleotide
  misc_feature (124)..(169): n includes a, c, g, or t, or contains no nucleotide
  misc_feature (365)..(389): n includes a, c, g, or t, or contains no nucleotide
  misc_feature (404)..(409): n includes a, c, g, or t, or contains no nucleotide
caggttctatccaaatctatgtgggcatgagttgggttataactggatcctactatcattgtggctttggttcaaaaggaaacactacatttgctcacagannnnnnnnnnnnntnntnnnnannnnnnnnnnnnnnnnnnnnnnnnnnnnnnnnnnnnnnnnnnnnnnttaagcaggaatgtcatgttccagttcattacaaaagaaaacaataaaacaatgtgaatttttataataaaatgtgaactgatgtagcaaattacgcaaatgtgaagcctcttctgataacacttgttaggcctcttactgatgtcagtttcagtttgtaaaatatgtttcatgctttcagttcagcattgtgacnnnnnnnnnnnnnnnnnnnnnnnnnatgtgcatgaccaannnnnntgtatgtctatgaacactgcattgtttcaggtggacattttatcattttcaaatgtttctcacaatgtatgttatagtattattattatatattgtgttcaaatgcattctaaagagactt

SEQ ID NO: 2004 - DNA, 545 bp, Homo sapiens
  misc_feature (62)..(82): n includes a, c, g, or t, or contains no nucleotide
  misc_feature (102)..(135): n includes a, c, g, or t, or contains no nucleotide
  misc_feature (229)..(245): n includes a, c, g, or t, or contains no nucleotide
  misc_feature (353)..(367): n includes a, c, g, or t, or contains no nucleotide
  misc_feature (422)..(472): n includes a, c, g, or t, or contains no nucleotide
caagctggactgcataaagattggtatggccttagctcttagccaaacaccttcctgacacnnnnnnnnnnnnnnnnnnnnngatcgtggtggtgttcctcnnnnnnnnnnnnnnnnnnnnnnnnnnnnnnnnnncgggagttcctgttaaaggtcaagacactgtcaaaggccgtgttccattcaatggacaagatcccgttaaaggacaagtttcagttaaaggtcnnnnnnnnnnnnnnnnncaagagccagtcaaaggtccagtctccactaagcctggctcctgccccattatcttgatccggtgcgccatgttgaatccccctaaccgctgcttgaaagatactgannnnnnnnnnnnnnngaagtgctgtgaaggctcttgcgggatggcctgtttcgttccccagtgagagggnnnnnnnnnnnnnnnnnnnnnnnnnnnnnnnnnnnnnnnnnnnnnnnnnnngtcctaagtccctgctgcccttccccttcccacactgtccattcttcctcccattcaggatgcccacggctgg

SEQ ID NO: 2005 - DNA, 244 bp, Homo sapiens
agcccagtgaagaccacctctcaggcccactcgctgcctctctcgcctgcctccacaaggcagcaaatagacgagctccgagacagtgacagtgtctgcgacacgggcgtggagacatccttccgcaaactcagctttaccgagtctctgaccagtggtgcctcactgctaactctcaacaaaatgccccatgattatgggcaggaaggacctctagaaggcaaaatttagcctgctgacaatt

SEQ ID NO: 2006 - DNA, 511 bp, Homo sapiens
caggttcagcagagaaatggcctaaccacagtgtgctctcatgtccagctcctttctggagaatctagaggtgaacgagataattgggagagacatgtcccagatttctgtttcccaaggagcaggggtgagcaggcaggctcccctcccgagtcctgagtccctggatttaggaagatctgatgggctctaacagtgcttactgcagccttgtgtccaccaccaacttctcagcatgtttctctccttggaccttgggtttccaactctgcagccttcaggtctggggccaggagtgggacccaccatttgtggggaaagtagcattcctccacctcaggccttgggtagatttggcaaaagaacaggagcagcataggctgtttgagctttggggaaatgaactttgctttttatatttaactaggatacttttatatgatgggtgctttgagtgtgaatgcagcaggctctcttgtttccgaggtgctgcttttgcaggtgacctggt

SEQ ID NO: 2007 - DNA, 565 bp, Homo sapiens
  misc_feature (91)..(109): n includes a, c, g, or t, or contains no nucleotide
  misc_feature (235)..(253): n includes a, c, g, or t, or contains no nucleotide
  misc_feature (383)..(427): n includes a, c, g, or t, or contains no nucleotide
cgcctatgtggtcgtgggaatcacaagctggggggtaggctgtgccctggccaagcgccccggaatctacacagccacctggccctatctnnnnnnnnnnnnnnnnnnnattggttctaacgctttgcgtatgattcaatcggccacccctccacctcccaccactcgaccgcccccgattcgaccccccttctcccaccctatctctgctcaccttccttggtatttccaaccnnnnnnnnnnnnnnnnnnnccccgaccaccggcagcccagcccccacccccaccttcacccccgcccccacccccacctccagcctcacctttacccccacccccacccccacccccacctacaccctcatctaccacaaaacttcccnnnnnnnnnnnnnnnnnnnnnnnnnnnnnnnnnnnnnnnnnnnnnttgaaggggaagacctattccgacggaaagaaccattatgacatggagaccacagagctcccagaactgacctcgacctcctgatctgacctggttctcaacagacccagtgagcccttcactcctgagaaaaaggaa

SEQ ID NO: 2008 - DNA, 373 bp, Homo sapiens
tgctgccgtctgcacacggtccgcgcgtcgctggaagacctgggctgggccgattgggtgctgtcgccacgggaggtgcaagtgaccatgtgcatcggcgcgtgcccgagccagttccgggcggcaaacatgcacgcgcagatcaagacgagcctgcaccgcctgaagcccgacacggtgccagcgccctgctgcgtgcccgccagctacaatcccatggtgctcattcaaaagaccgacaccggggtgtcgctccagacctatgatgacttgttagccaaagactgccactgcatatgagcagtcctggtccttccactgtgcacctgcgcgggggaggcgacctcagttgtcctgccctgtggaatgggct

SEQ ID NO: 2009 - DNA, 201 bp, Homo sapiens
ccttttcagggctgtattgattggggtgtagactgaactatccggggtctgtttcttttcggtgatgaaagtcttgagaaggtagtaatggataagatgtgagggagaggagagagggagatttggagtgtagggtgagtgcccctcttcttagaactgaatactcttcttctaatgaacttgtattcttgtttccatgtc

SEQ ID NO: 2010 - DNA, 430 bp, Homo sapiens
gccacgtgcagagacctagcctgtcccccaaagcagtgtccaacaccttgggcccggccttgcatctcccggcgctgggccttggggggcggtcccttggctctgtccacacccccagaatcaggtccccgcccagctccgaggacggcggcgtctccatccaggctagttccccatgccctcagccatgggggaatctgtcccgggccgctgaggggctcccctgcccctcctgggagcttacctgggacccacctcggcgacggagaccgcagcagctggagaggaaggggtgaggcgtgggatcgccaggagtagggaggacatcgacgatgtgcccgtagcagtcgcccctccctcctcgcgcacggggtactgaggcggaaggtttgaaggttacggctcagggctgccccattaaagtcagtgt

SEQ ID NO: 2011 - DNA, 224 bp, Homo sapiens
  misc_feature (34)..(34): n includes a, c, g, or t, or contains no nucleotide
  misc_feature (44)..(44): n includes a, c, g, or t, or contains no nucleotide
  misc_feature (64)..(64): n includes a, c, g, or t, or contains no nucleotide
  misc_feature (72)..(72): n includes a, c, g, or t, or contains no nucleotide
  misc_feature (88)..(102): n includes a, c, g, or t, or contains no nucleotide
caagttgatgccactgctgtctgagggctcctcnggctcaacantcagctcagtgcttgtgtanttcttccngggcttgtaacacctnnnnnnnnnnnnnnnctggattccctaccgatgcttcttcagctgtcaaaaaagaagagactgctttgatcatgaaagatgatgggatgggatgcatcagtccatagctgtacaccccagtcacacagagtaggagt

SEQ ID NO: 2012 - DNA, 139 bp, Homo sapiens
ctccaaagccacatgtaaagacttggttatgtttatctaatgttgggtccaagaaggaatttctttccatccctgtgaggcaatgggtgggaatgataggacaggcaaagagaagcttcctcaggctagcaaaaatatc

SEQ ID NO: 2013 - DNA, 376 bp, Homo sapiens
  misc_feature (37)..(37): n includes a, c, g, or t, or contains no nucleotide
  misc_feature (100)..(100): n includes a, c, g, or t, or contains no nucleotide
  misc_feature (116)..(116): n includes a, c, g, or t, or contains no nucleotide
  misc_feature (125)..(125): n includes a, c, g, or t, or contains no nucleotide
  misc_feature (158)..(159): n includes a, c, g, or t, or contains no nucleotide
  misc_feature (167)..(167): n includes a, c, g, or t, or contains no nucleotide
  misc_feature (204)..(204): n includes a, c, g, or t, or contains no nucleotide
  misc_feature (216)..(216): n includes a, c, g, or t, or contains no nucleotide
  misc_feature (233)..(233): n includes a, c, g, or t, or contains no nucleotide
  misc_feature (239)..(239): n includes a, c, g, or t, or contains no nucleotide
  misc_feature (244)..(261): n includes a, c, g, or t, or contains no nucleotide
  misc_feature (268)..(268): n includes a, c, g, or t, or contains no nucleotide
  misc_feature (271)..(272): n includes a, c, g, or t, or contains no nucleotide
ccttgaagattacaactgtgatttccttttcctcagncaagctcctatgtgtatattttcctgaatttctcatctcaaaccctttgcttctttattgtgncagctttgagactagntgcctatgntgtgttatttgtttccctgtttttttggtaggnncttatatnaaaacaaacattcctttgttctagtgttgtgaagggnctccctcttccnttatctgaagtggtgantatagnaaatnnnnnnnnnnnnnnnnnntactgtnaanntgtatgtagggtgatgaccctctttgtcctaggtgtaccctttcctcatctctattaaattgtaaacaggactactgcatgtactctctttgcagtgaatttgg

SEQ ID NO: 2014 - DNA, 599 bp, Homo sapiens
  misc_feature (29)..(49): n includes a, c, g, or t, or contains no nucleotide
  misc_feature (155)..(170): n includes a, c, g, or t, or contains no nucleotide
  misc_feature (420)..(439): n includes a, c, g, or t, or contains no nucleotide
  misc_feature (517)..(519): n includes a, c, g, or t, or contains no nucleotide
  misc_feature (521)..(527): n includes a, c, g, or t, or contains no nucleotide
  misc_feature (529)..(529): n includes a, c, g, or t, or contains no nucleotide
  misc_feature (531)..(531): n includes a, c, g, or t, or contains no nucleotide
  misc_feature (533)..(533): n includes a, c, g, or t, or contains no nucleotide
gtttctgtgttaccaacaacagcagactnnnnnnnnnnnnnnnnnnnnntgttgttcggtcagcccttccctaattacacctatcccctacacatacatgcacatagacacacacatgaacacactgaagatatttccttcaggtgtgtgtaaannnnnnnnnnnnnnnngaaattcaaatgggattgattagtcaagtaacttgagacctcacagtaatcttcacacttaaccttagacacctatgcagtcatgttgggagcaggttacaatgttacttcagcccacagtttatttctatacttgagttcttaagtacagaagatagaagtgatttaaatggcatagtatatatatcattttctggccttttaaaatttatttgagacctcttgatgaaatggacatattatatatttnnnnnnnnnnnnnnnnnnnngataatttgatggaatattttaagtttcagtaaatcagaacaataaacaaactcagatataaaaaaaaaaaaaaaaannnannnnnnnanananaaatgaaacttgaaatgtgtaaactttgaagaacataaaaacttcatggtggtttcttattaagac

SEQ ID NO: 2015 - DNA, 589 bp, Homo sapiens
ggccggtgctgctccgccagttggtgcccgccctggggccgccagtgcgcgcggagctgctgggcgccgcttgggctcgcaacgcctcatggccgcgcagcctccgcctggcgctggcgctacgcccccgggcccctgccgcctgcgcgcgcctggccgaggcctcgctgctgctggtgaccctcgacccgcgcctgtgccaccccctggcccggccgcggcgcgacgccgaacccgtgttgggcggcggccccgggggcgcttgtcgcgcgcggcggctgtacgtgagcttccgcgaggtgggctggcaccgctgggtcatcgcgccgcgcggcttcctggccaactactgccagggtcagtgcgcgctgcccgtcgcgctgtcggggtccggggggccgccggcgctcaaccacgctgtgctgcgcgcgctcatgcacgcggccgccccgggagccgccgacctgccctgctgcgtgcccgcgcgcctgtcgcccatctccgtgctcttctttgacaacagcgacaacgtggtgctgcggcagtatgaggacatggtggtggacgagtgcggctgccgctaacccgg

SEQ ID NO: 2016 - DNA, 546 bp, Homo sapiens
  misc_feature (26)..(26): n includes a, c, g, or t, or contains no nucleotide
  misc_feature (28)..(29): n includes a, c, g, or t, or contains no nucleotide
  misc_feature (41)..(41): n includes a, c, g, or t, or contains no nucleotide
  misc_feature (47)..(50): n includes a, c, g, or t, or contains no nucleotide
  misc_feature (53)..(53): n includes a, c, g, or t, or contains no nucleotide
  misc_feature (55)..(55): n includes a, c, g, or t, or contains no nucleotide
  misc_feature (64)..(66): n includes a, c, g, or t, or contains no nucleotide
  misc_feature (70)..(70): n includes a, c, g, or t, or contains no nucleotide
  misc_feature (73)..(74): n includes a, c, g, or t, or contains no nucleotide
  misc_feature (76)..(78): n includes a, c, g, or t, or contains no nucleotide
  misc_feature (83)..(83): n includes a, c, g, or t, or contains no nucleotide
  misc_feature (85)..(85): n includes a, c, g, or t, or contains no nucleotide
  misc_feature (159)..(174): n includes a, c, g, or t, or contains no nucleotide
  misc_feature (202)..(246): n includes a, c, g, or t, or contains no nucleotide
  misc_feature (388)..(433): n includes a, c, g, or t, or contains no nucleotide
gcaccacctactgagtgttagcactncnnagggtacagagnagaacnnnnccnanacaagtgtnnntggnttnntnnnggtgncnagtgtggacctggagcatcaggtgtttactgttctgtctccagcccctcgcccactgcctaagaacttccttcnnnnnnnnnnnnnnnngttcatggatctgaagtagagatcagcnnnnnnnnnnnnnnnnnnnnnnnnnnnnnnnnnnnnnnnnnnnnnagaggcagatgggctgagataaaagactgttggggccacctgaccagtaaactgtggactagtagaaagttcatattctacctctaaaaacaggtagtggtaacctgactcttctaatcttgaaccaaaaggaaaaccatgnnnnnnnnnnnnnnnnnnnnnnnnnnnnnnnnnnnnnnnnnnnnnnctctaagaccctggagaattgcatttctttcactgtgctactatgtggtttttaaaaaatcaatgctttatattccatatgtggttcttacccatttatctaggatgaaagtg

SEQ ID NO: 2017 - DNA, 192 bp, Homo sapiens
atatggccaagttagacaattctctgcgtttttaaagacaaaaactataataaatgtattccgccactcattacacatgataatcattaatgtgctaccttcacagactcattgaacaaacactaagtgtcatttctacatgctggacacaaaaccaggccctcaggatacaactgtgagcaagatataatc

SEQ ID NO: 2018 - DNA, 151 bp, Homo sapiens
ccttataagccaaaagctagagacaagagagacacctccaacttcgacaaagagttcaccagacagcctgtggaactgacccccactgataaactcttcatcatgaacttggaccaaaatgaatttgctggcttctcttatactaacccag

SEQ ID NO: 2019 - DNA, 560 bp, Homo sapiens
  misc_feature (67)..(67): n includes a, c, g, or t, or contains no nucleotide
  misc_feature (168)..(168): n includes a, c, g, or t, or contains no nucleotide
  misc_feature (367)..(412): n includes a, c, g, or t, or contains no nucleotide
  misc_feature (452)..(525): n includes a, c, g, or t, or contains no nucleotide
  misc_feature (532)..(532): n includes a, c, g, or t, or contains no nucleotide
gcctttgcattgtcttgtcacacctccctcacagtcttatagcacaatatacccaaatcagcccccncagtccgagggctgggcccaaggtatggtcggaggaggagctcctgcctgcggttttgtgtatgtgtgtatgtgtgtgcgtgtttgtgtgcgtgtttaccntccacaggggacactctacactcagtgtaagatctgctgggaacagggccaccaggagtggctggatctcagtctctctgtctctctttctctccttttccttttggtgtatcaaatatttgattgacaaagtaagggccttgattaggaccaaattctcgtgtgttgctatggtctttatttaggacaacaattaacnnnnnnnnnnnnnnnnnnnnnnnnnnnnnnnnnnnnnnnnnnnnnnacatatgtaatatataaatatatatataaaacattccccnnnnnnnnnnnnnnnnnnnnnnnnnnnnnnnnnnnnnnnnnnnnnnnnnnnnnnnnnnnnnnnnnnnnnnnnnnttgcagnccccagccctgttccaatcaacgcagtt

SEQ ID NO: 2020 - DNA, 469 bp, Homo sapiens
  misc_feature (37)..(37): n includes a, c, g, or t, or contains no nucleotide
  misc_feature (46)..(61): n includes a, c, g, or t, or contains no nucleotide
  misc_feature (166)..(181): n includes a, c, g, or t, or contains no nucleotide
  misc_feature (362)..(362): n includes a, c, g, or t, or contains no nucleotide
  misc_feature (371)..(371): n includes a, c, g, or t, or contains no nucleotide
tctgaaaatagcaacccagaatgtaaaaaagaaaaanctggggggnnnnnnnnnnnnnnnncagtgatagagcaaagcatcaaagaatctttaagggaggtttaaaaaaaaaaaaaaaaaaaaagattggttgcctctgcctttgtgatcctgagtccagaatggnnnnnnnnnnnnnnnnatggtgatgtcactcacctagacaaccagaggctggcattgaggctaacctccaacacagtgcatctcagatgcctcagtaggcatcagtatgtcactctggtccctttaaagagcaatcctggaagaagcaggagggagggtggctttgctgttgttgggacatggcaatctagaccggnagcagcgcntcgctgacagcttgggaggaaacctgagatctgtgttttttaaattgatcgttcttcatgggggtaagaaaagctggtctggagttgctgaatgttgc

SEQ ID NO: 2021 - DNA, 547 bp, Homo sapiens
  misc_feature (100)..(100): n includes a, c, g, or t, or contains no nucleotide
  misc_feature (152)..(152): n includes a, c, g, or t, or contains no nucleotide
  misc_feature (176)..(191): n includes a, c, g, or t, or contains no nucleotide
  misc_feature (238)..(238): n includes a, c, g, or t, or contains no nucleotide
  misc_feature (486)..(507): n includes a, c, g, or t, or contains no nucleotide
catgtctacagctggcccaagaataaaaaaaacatcctgctgcggctgctgagagaggaagagtatgtggctcctccacgggggcctctgcccacccttncaggtggttcccttgtgacaccgttcatccccagatcactgaggccaggccnatgtttggggccttgttctgacannnnnnnnnnnnnnnntggtcggtagcactcctggctggtttttttctgttcctccccgagangccctctggcccccaggaaacctgttgtgcagagctcttccccggagacctccacacaccctggctttgaagtggagtctgtgactgctctgcattctctgcttttaaaaaaaccattgcaggtgccagtgtcccatatgttcctcctgacagtttgatgtgtccattctgggcctctcagtgcttagcaagtagataatgtaagggatgtggcagcaaatggaaatgactacaaacactctcctatnnnnnnnnnnnnnnnnnnnnnntgagttagccagatgcttgtgtatcctcagaccaaactga

SEQ ID NO: 2022 - DNA, 522 bp, Homo sapiens
  misc_feature (366)..(382): n includes a, c, g, or t, or contains no nucleotide
gtttaccttctgttgtctacagcttttttaattttaaggtttgactaattgtatccatctcattgtacagtgttttagttgcaagcagaaagtagaatttggtataaagcaggttatttctatattgaaaggagtacagttgaaattgtagatttaagattgttaaaatcatgacaattctaacttgtctattctaacctattgtgtacaatctgattttttaaaattgtaaacatgtatgatcttggtttcatgtgtttttgaaagtgttattgtttaaaaaatgaaaaaagcatatctgctaaagagctgtcagttttcattactgactctgtaaaatacactgttctttgtgtactgtgtgtnnnnnnnnnnnnnnnnncattagccttcaaaagtatttggaaacttaagatgaactacatttcttgcaaagtacattcctttctgtggtattttgtcctgtaactgaagtatagtaattattttatggaaatgttagcaattctgtaccaactttga

SEQ ID NO: 2023 - DNA, 470 bp, Homo sapiens
tgtcagtccaatctccaatgagaacatgagcaaatagacctttccaggttgaaagtgaaacatactgggtttctgtaagtttttcctcatggcttcatctctatctttactttctcttgaatatgctacacaaagttctttattactacatactaaagtttgcattccagggatattgactgtacatatttatgtatatgtaccatgttgttacatgtaaacaaacttcaatttgaagtgcagctattatgtggtatccatgtgtatcgaccatgtgccatatatcaattatggtcactagaaagtctctttatgatactttttattgtactgtttttcatttcacttgcaaaattttgcagaattcctcctttctacccataaattacatatatttttcttctttagtcatggagaactccccccctcatctcttccctattatctttccctgtgtactggtattatta

SEQ ID NO: 2024 - DNA, 511 bp, Homo sapiens
  misc_feature (27)..(27): n includes a, c, g, or t, or contains no nucleotide
  misc_feature (29)..(29): n includes a, c, g, or t, or contains no nucleotide
  misc_feature (36)..(36): n includes a, c, g, or t, or contains no nucleotide
  misc_feature (62)..(150): n includes a, c, g, or t, or contains no nucleotide
  misc_feature (165)..(165): n includes a, c, g, or t, or contains no nucleotide
  misc_feature (167)..(167): n includes a, c, g, or t, or contains no nucleotide
  misc_feature (174)..(175): n includes a, c, g, or t, or contains no nucleotide
  misc_feature (183)..(183): n includes a, c, g, or t, or contains no nucleotide
  misc_feature (194)..(194): n includes a, c, g, or t, or contains no nucleotide
  misc_feature (200)..(200): n includes a, c, g, or t, or contains no nucleotide
  misc_feature (216)..(216): n includes a, c, g, or t, or contains no nucleotide
  misc_feature (229)..(229): n includes a, c, g, or t, or contains no nucleotide
  misc_feature (232)..(233): n includes a, c, g, or t, or contains no nucleotide
  misc_feature (269)..(319): n includes a, c, g, or t, or contains no nucleotide
  misc_feature (386)..(388): n includes a, c, g, or t, or contains no nucleotide
tggcccagccactgcagcacaggaggntncgtgagnccttggttcctccccgaaaacccccnnnnnnnnnnnnnnnnnnnnnnnnnnnnnnnnnnnnnnnnnnnnnnnnnnnnnnnnnnnnnnnnnnnnnnnnnnnnnnnnnnnnnnnnncaggcccggtgaggncnaaggttnncccagtgnagcctctgcgncctctnccactgtttcatgagncccaaacaccctnccnnggcacaacgctctaccctgcagcttggagaactccnnnnnnnnnnnnnnnnnnnnnnnnnnnnnnnnnnnnnnnnnnnnnnnnnnntgcagatagtgcctctgcaaactaaggagtgactaggtgggttggggaccccctcaggattgtttcnnngcaccagtgcctcagtgctgcaattgagggctaaatcccaagtgtctcttgactggctcaagaattagggccccaactacacacccccaagccacagggaagcatgtactgtacttcccaatt

SEQ ID NO: 2025 - DNA, 436 bp, Homo sapiens
gacatgaggcccattcttcactctgaagagagcggtcagtgttctcagtagtaggtttctgttctattgggtgacttggagatttatctttgttctcttttggaattgttcaaatgtttttttttaagggatggttgaatgaacttcagcatccaagtttatgaatgacagcagtcacacagttctgtgtatatagtttaagggtaagagtcttgtgttttattcagattgggaaatccattctattttgtgaattgggataataacagcagtggaataagtacttagaaatgtgaaaaatgagcagtaaaatagatgagataaagaactaaagaaattaagagatagtcaattcttgccttatacctcagtctattctgtaaaatttttaaagatatatgcatacctggatttccttggcttctttgagaatgta

SEQ ID NO: 2026 - DNA, 416 bp, Homo sapiens
  misc_feature (386)..(386): n includes a, c, g, or t, or contains no nucleotide
agttcctggcattcagcactgcttagcattctcggaaggtttcttcaactgcttgcttttcccaggcttgcctttagtgtcatgtaagacatttttaagttatatttattttgttgggttttaaaattgcacagaacactaagaccgaaaggctggactcttgtttctccttgaaagctttgcctttgttttgaacttcctttcccacttggtagaaagagcccagaagcagccctggccctgtaagatggactctttcatccttcagttgtatttagctttgagtttctctgcatctgtccaccccatgtgtatataacccagcccctggctctggggtggtcacctcgtcagtgccttttgttctggaggagaggacccccccngcctgccgagaggctctcttcctgttctgc

SEQ ID NO: 2027 - DNA, 348 bp, Homo sapiens
  misc_feature (263)..(266): n includes a, c, g, or t, or contains no nucleotide
  misc_feature (279)..(281): n includes a, c, g, or t, or contains no nucleotide
  misc_feature (293)..(297): n includes a, c, g, or t, or contains no nucleotide
  misc_feature (299)..(299): n includes a, c, g, or t, or contains no nucleotide
  misc_feature (303)..(305): n includes a, c, g, or t, or contains no nucleotide
  misc_feature (307)..(313): n includes a, c, g, or t, or contains no nucleotide
  misc_feature (323)..(323): n includes a, c, g, or t, or contains no nucleotide
tgcccaacaagaaggggaccaggcttggccggtacaggtgtgagaaagggactactgcagtcctcactgagaaaatcactcctctggagattgaggtgctggaagaaacagtccaaacaatggacacttcctgaatggcatcagtgggtggctggccgcggttctggaaggtggtgagcattgaggcccagtaagacactcatgtggctagtgtttgccgaatgaaactcaactcaataaaaaacaaaaaccaaattgggcannnnaaaaaaaaaaaannnaaaaaaaaaaannnnnancgannncnnnnnnncctattaggngtcctgtttcaatttactttggcct

SEQ ID NO: 2028 - DNA, 494 bp, Homo sapiens
  misc_feature (34)..(51): n includes a, c, g, or t, or contains no nucleotide
  misc_feature (55)..(56): n includes a, c, g, or t, or contains no nucleotide
  misc_feature (58)..(58): n includes a, c, g, or t, or contains no nucleotide
  misc_feature (72)..(72): n includes a, c, g, or t, or contains no nucleotide
  misc_feature (89)..(89): n includes a, c, g, or t, or contains no nucleotide
  misc_feature (91)..(91): n includes a, c, g, or t, or contains no nucleotide
  misc_feature (99)..(99): n includes a, c, g, or t, or contains no nucleotide
gtcatggctctggtgtttgccatcaaggcggaannnnnnnnnnnnnnnnnncggnncnaggaggcagtgcgnctggggggcccgggccngnaaactcancctggccagctttgctgtctggcttgctgtcctcattctgggtcccctgctgctgtggttgctctcctacgccatcgctcaggctgagtgaccctggatggcctctgctgagagccagccgagacctcctggatcctgcaatgcggcattgctaaggtcctgtgacagcagtggttggaaggatcctggttggaaggatggggactctctcaaggggctttggaagagctcttctagccctttataaaaggagggcagcagctgagactgatgagaggagggcagcctgctctgttctttcagggccccccacccccatctcccctaccctagcccaccctagggcctctacccagcgggaggggttgaagaccaggcctggttttattagaatt

SEQ ID NO: 2029 - DNA, 466 bp, Homo sapiens
  misc_feature (129)..(143): n includes a, c, g, or t, or contains no nucleotide
  misc_feature (166)..(185): n includes a, c, g, or t, or contains no nucleotide
  misc_feature (241)..(285): n includes a, c, g, or t, or contains no nucleotide
ggacacccacactctgcagggactggcccccaactcaccccgtgctggctggtggggtccatttccccgcagcggggatccccccacctggcctgctcacggggccttggagcatgagaccagtgaccnnnnnnnnnnnnnnnatcaggacagtggctccttctcnnnnnnnnnnnnnnnnnnnngagggccgagggccacacgggtgccacagcccaggtcggagtggcccagccggcannnnnnnnnnnnnnnnnnnnnnnnnnnnnnnnnnnnnnnnnnnnnaacggaaagtgcctcccggacccccagagggccacccaacctcaccagtcaccagccccagaccacccacagcccctcccagacaccccgcctcatctggaaatagttccgtttgtttctctaaaaagacttgtaggtgggaaaaaaaatcttttgttctcatggaattggcctattggca

SEQ ID NO: 2030 - DNA, 243 bp, Homo sapiens
  misc_feature (80)..(80): n includes a, c, g, or t, or contains no nucleotide
  misc_feature (179)..(179): n includes a, c, g, or t, or contains no nucleotide
  misc_feature (182)..(182): n includes a, c, g, or t, or contains no nucleotide
  misc_feature (203)..(218): n includes a, c, g, or t, or contains no nucleotide
ctgttgtcatacttctcatggttcacacccatgacgaacatgggggcatcagcagagggggcagagatgatgaccctttnggctcccccctgcaaatgagccccagccttctccatggtggtgaagacgccagtggactccacgacgtactcagcgccagcatcgccccacttgatttnggngggatctcgctcctggaagannnnnnnnnnnnnnnnattgatgacaagcttcccgttctca

SEQ ID NO: 2031 - DNA, 346 bp, Homo sapiens
  misc_feature (32)..(32): n includes a, c, g, or t, or contains no nucleotide
  misc_feature (42)..(42): n includes a, c, g, or t, or contains no nucleotide
  misc_feature (151)..(151): n includes a, c, g, or t, or contains no nucleotide
  misc_feature (178)..(197): n includes a, c, g, or t, or contains no nucleotide
accttctttacatgttgtgcattgttgtggtnccagaaatgnccaaacctttttaaagatggtgcaactttgagtccttggcttgactatacaggccttgaacttcatggcatatcaactttgccatatctgcaggagagctgttctatangaaatagctcagagttgcaaatatcannnnnnnnnnnnnnnnnnnnttttaagaaatgtctgtattgtatttgaagactgtttgccataaatctgaaatttgaacctatgtatttcaatttggtatgctaaaaagttctgaattaatgtaaagttttttgttataatattgtaatctcagttcaaaagttaactg

SEQ ID NO: 2032 - DNA, 88 bp, Homo sapiens
aatgctgaagcttttggacttcggcagtctgtccaaccttcaggtcactcagcctacagttgggatgaatttcaaaacgcctcgggga

SEQ ID NO: 2033 - DNA, 249 bp, Homo sapiens
  misc_feature (65)..(130): n includes a, c, g, or t, or contains no nucleotide
atgcatccagcagtacaataaaagtaaaccacaaaaaaatacctcaggaaagaatagaaagaaannnnnnnnnnnnnnnnnnnnnnnnnnnnnnnnnnnnnnnnnnnnnnnnnnnnnnnnnnnnnnnnnntttatattagttgctttgttaaaaaaaaaaagattgtattgctgtccttgaatgccatagtcaaagagagtttttaatagaaccatgttggttgcactttgtagtgtttggtgctcatt

SEQ ID NO: 2034 - DNA, 473 bp, Homo sapiens
  misc_feature (27)..(27): n includes a, c, g, or t, or contains no nucleotide
  misc_feature (85)..(107): n includes a, c, g, or t, or contains no nucleotide
  misc_feature (243)..(295): n includes a, c, g, or t, or contains no nucleotide
cactgaggtactgctgtctgtcacagnagaacaatatggtcgacctatcagtgggcaaaaagaggtgcatggcatggcccagccnnnnnnnnnnnnnnnnnnnnnnnccatggaaggcatcttcatgaagcccagtgagttgttgaaggcagaagcccaccatgcagagctgtgaatctagaggctctgagccactgttaacgcacaatgttcacagacatctgttgctgcctcaccttgggnnnnnnnnnnnnnnnnnnnnnnnnnnnnnnnnnnnnnnnnnnnnnnnnnnnnngatatacaacagaaaatagtggctgtgtttggaagcttcagccctgcacatttgaactagtcactctcccagacttgcgtgggtcagttctttctgagtagaggacttgctggtaaaggggcagatgctttttattagtactgataaaacaaactgagggaaacatccctcttagctg

SEQ ID NO: 2035 - DNA, 313 bp, Homo sapiens
gactttccggacagaacgtcctgtcaactcagctgccctctcccccaactatgaccatgtggtcctgggcggtggtcaggaagccatggatgtaaccacaacctccaccaggattggcaagtttgaggccaggttcttccatttggcctttgaagaagagtttggaagagtcaagggtcactttggacctatcaacagtgttgccttccatcctgatggcaagagctacagcagcggcggcgaagatggttacgtccgtatccattacttcgacccacagtacttcgaatttgagtttgaggcttaagaagct

SEQ ID NO: 2036 - DNA, 469 bp, Homo sapiens
  misc_feature (85)..(103): n includes a, c, g, or t, or contains no nucleotide
  misc_feature (121)..(121): n includes a, c, g, or t, or contains no nucleotide
  misc_feature (239)..(310): n includes a, c, g, or t, or contains no nucleotide
tgggcacactgcagtcaccaggcgccatctacgctgcctccaagttatcctactttgataagatgagtaacgaaatgcccatgannnnnnnnnnnnnnnnnnnggaaacactgaagcatanaatcaacccctcggcgggggaggcgttcccacaagcggtggacgtgctgctctacactccagggcatcttgacccagccgaaaaagttgaagatgctcaccccaagttatggtgtgcnnnnnnnnnnnnnnnnnnnnnnnnnnnnnnnnnnnnnnnnnnnnnnnnnnnnnnnnnnnnnnnnnnnnnnnncactgcaaaagtgaactgcatggtgatggccgaccagaaccaggtgtgggttggctcggaagactccgtcatctacatcatcaacgtccacagcatgtcctgcaacaagcagctcacagcccactgctccagtgtcacggatttgattgtgcaggacgg

SEQ ID NO: 2037 - DNA, 575 bp, Homo sapiens
  misc_feature (105)..(202): n includes a, c, g, or t, or contains no nucleotide
  misc_feature (254)..(311): n includes a, c, g, or t, or contains no nucleotide
  misc_feature (381)..(467): n includes a, c, g, or t, or contains no nucleotide
taagacaccaccaggagtttctgcccccacagaacctttattgtgtaagttttctgatggaggacagaaaaagagacagaacccaaacaaatacatccctaatgnnnnnnnnnnnnnnnnnnnnnnnnnnnnnnnnnnnnnnnnnnnnnnnnnnnnnnnnnnnnnnnnnnnnnnnnnnnnnnnnnnnnnnnnnnnnnnnnnnccatacagtattgctacaaaccgaatgatcactcaaacttctattacacccnnnnnnnnnnnnnnnnnnnnnnnnnnnnnnnnnnnnnnnnnnnnnnnnnnnnnnnnnnaaccatatattctacagcaccccggtgccgtgttaactccctcaatggagcacaccatgtcactacagcnnnnnnnnnnnnnnnnnnnnnnnnnnnnnnnnnnnnnnnnnnnnnnnnnnnnnnnnnnnnnnnnnnnnnnnnnnnnnnnnnnnnnnntgcaaggagcctacttgccacagtatgaacatatgcagacgacagcggctcctgttgaggaggcaagtggtcaacagcaggtggctgtcgagacgtctaatgaccatt

SEQ ID NO: 2038 - DNA, 505 bp, Homo sapiens
  misc_feature (89)..(103): n includes a, c, g, or t, or contains no nucleotide
  misc_feature (144)..(144): n includes a, c, g, or t, or contains no nucleotide
  misc_feature (435)..(435): n includes a, c, g, or t, or contains no nucleotide
  misc_feature (440)..(441): n includes a, c, g, or t, or contains no nucleotide
tggtgctcaaacccgctcccctcccctacgtcctgcactttctcggaccagtccccccactcccgacccgaccccagccccacctgagnnnnnnnnnnnnnnntactgtaggggaagaagtgggaactgaaatggtattttgtnaaaaaaaataaataaaataaaaaaattaaaggttttaaagaaagaactatgaggaaaaggaaccccgtccttcccagccccggccaactttaaaaaacacagaccttcacccccacccccttttctttttaagtgtgaaacaacccagggccagggcctcactggggcagggacaccccggggtgagtttctctggggctttattttcgttttgttggttgttttttctccacgctggggctgcggaggggtggggggtttacagtcccgcaccctcgcactgcactgtcnctctnncccaggggcagaggggtcttcccaaccctacccctattttcggtgatttttgtgtgagaatatt

SEQ ID NO: 2039 - DNA, 410 bp, Homo sapiens
  misc_feature (168)..(237): n includes a, c, g, or t, or contains no nucleotide
  misc_feature (240)..(245): n includes a, c, g, or t, or contains no nucleotide
  misc_feature (247)..(248): n includes a, c, g, or t, or contains no nucleotide
  misc_feature (250)..(254): n includes a, c, g, or t, or contains no nucleotide
  misc_feature (258)..(258): n includes a, c, g, or t, or contains no nucleotide
  misc_feature (260)..(260): n includes a, c, g, or t, or contains no nucleotide
  misc_feature (267)..(267): n includes a, c, g, or t, or contains no nucleotide
tttcaaatgttctgcttcatgtgtctgtgaagaattgtacttttttaaaagtgtgtgtcctctgaggtgcttgagaaagtgtacactgcagaactgcccattctcattactgtgtcctattttattcatgcctgtgtgtttttcttaagtatgaattctagatacagnnnnnnnnnnnnnnnnnnnnnnnnnnnnnnnnnnnnnnnnnnnnnnnnnnnnnnnnnnnnnnnnnnnnnnttnnnnnnanntnnnnnaaantnttaaccnattaaattgccattcacttttagaatcttgtatttaagttttgattttcaaatgttctgcttcatgtgtctgtgaagaattgtactttaagtgtgtgtcctctgaggtgcttgagaaagtgtacactgcagaactgcccattc

SEQ ID NO: 2040 - DNA, 403 bp, Homo sapiens
  misc_feature (153)..(168): n includes a, c, g, or t, or contains no nucleotide
  misc_feature (295)..(295): n includes a, c, g, or t, or contains no nucleotide
  misc_feature (298)..(305): n includes a, c, g, or t, or contains no nucleotide
  misc_feature (307)..(308): n includes a, c, g, or t, or contains no nucleotide
  misc_feature (319)..(319): n includes a, c, g, or t, or contains no nucleotide
  misc_feature (328)..(350): n includes a, c, g, or t, or contains no nucleotide
  misc_feature (364)..(378): n includes a, c, g, or t, or contains no nucleotide
catggagggcctagagcatgttgaaaaaataaggctgtgcaagtgtcattatatcgaggatgactgtttgctgagacttagtcaacttgaaaatttacaaaaaaccatattggaaatggaaataatatcctgtgggaatatcacagacaaagnnnnnnnnnnnnnnnntcatttaagaaacctcaaatatttgttgttaagtgatcttcctggagtaagagaaaaagaaaatcttgtccaagcctttaagacagcactgccttctctggaactaaaattacaattgaagtaaaanaannnnnnnnanntcagtataaangatcatttnnnnnnnnnnnnnnnnnnnnnnnactaatattatatnnnnnnnnnnnnnnntataaggatgccatatcatgacatt

SEQ ID NO: 2041 - DNA, 498 bp, Homo sapiens
  misc_feature (41)..(41): n includes a, c, g, or t, or contains no nucleotide
  misc_feature (85)..(85): n includes a, c, g, or t, or contains no nucleotide
  misc_feature (89)..(89): n includes a, c, g, or t, or contains no nucleotide
  misc_feature (96)..(96): n includes a, c, g, or t, or contains no nucleotide
  misc_feature (164)..(180): n includes a, c, g, or t, or contains no nucleotide
  misc_feature (216)..(231): n includes a, c, g, or t, or contains no nucleotide
  misc_feature (330)..(361): n includes a, c, g, or t, or contains no nucleotide
gttcatccggcctgagggagagatcaccgattacagaaccngggtcagcggggtcacccctcagcacatggtgggggccacaccntttngccgtgnccaggctagagatcctgcagctcctgaaaggcaagctggtggtgggtcatgacctgaagcacgacttnnnnnnnnnnnnnnnnnacatgagcggctacacaatctacgacacgtccactnnnnnnnnnnnnnnnngtgaggccaagctggaccactgcaggcgtgtctccctgcgggtgctgagtgagcgcctcctgcacaagagcatccagaacagcctgcttggacacagcnnnnnnnnnnnnnnnnnnnnnnnnnnnnnnnnctatcaaatctcccagagaatccgagcccgccgagggctgccccgcctggctgtgtcagactgaagccccatccagcccgttccgcagggactagaggctttcggctttttgggacagcaactaccttgcttttgga

SEQ ID NO: 2042 - DNA, 470 bp, Homo sapiens
  misc_feature (334)..(334): n includes a, c, g, or t, or contains no nucleotide
  misc_feature (360)..(360): n includes a, c, g, or t, or contains no nucleotide
ggactcagccacaaactctaataagacctgtacatctgagaacctttcccgttactgcgttttcaccacctgtcttccccatgctttatttatctgtatgaacacagatttgacattacagctaaggaaataatttgagttgattcagaaatcctggcatgtgacaattttgttaaattaccaagtttggtttttaataatttctcaatattatgcgccaagatctaattttaaaactgtatgaggactttgtgctgaaaatagagtatttttttaaagtaaggctgtcttggtttaaaagcagattacagaaatgtaagtcaacttaagaacngtgaatgaatgtaaaaacattcagtngagaccatatgcattttctgtgctgtttgtacttgaggtatgtaacatttgtatacctgaacttattttaaagatgaactgaaatgcacatagccaagtcttgagataca

SEQ ID NO: 2043 - DNA, 593 bp, Homo sapiens
ccagcgaagatcctttcttataaccgtgccaatcgagctgttgcaattctttgtaaccatcagagggcaccaccaaaaacttttgagaagtctatgatgaacttgcaaactaagattgatgccaagaaggaacagctagcagatgcccggagagacctgaaaagtgctaaggctgatgccaaggtcatgaaggatgcaaagacgaagaaggtagtagagtcaaagaagaaggctgttcagagactggaggaacagttgatgaagctggaagttcaagccacagaccgagaggaaaataaacagattgccctgggaacctccaaactcaattatctggaccctaggatcacagtggcttggtgcaagaagtggggtgtcccaattgagaagatttacaacaaaacccagcgggagaagtttgcctgggccattgacatggctgatgaagactatgagttttagccagtctcaagaggcagagttctgtgaagaggaacagtgtggtttgggaaagatggataaactgagcctcacttgccctcgtgcctgggggagagaggcagcaagtcttaacaaaccaacatctttgcgaa

SEQ ID NO: 2044 - DNA, 435 bp, Homo sapiens
  misc_feature (103)..(103): n includes a, c, g, or t, or contains no nucleotide
  misc_feature (308)..(308): n includes a, c, g, or t, or contains no nucleotide
  misc_feature (310)..(315): n includes a, c, g, or t, or contains no nucleotide
  misc_feature (317)..(318): n includes a, c, g, or t, or contains no nucleotide
  misc_feature (320)..(320): n includes a, c, g, or t, or contains no nucleotide
  misc_feature (392)..(406): n includes a, c, g, or t, or contains no nucleotide
catttgttagaaccagtcttttgaaagaaaagtatttccaacttgtcacttgccagtcactccgttttgcaaaaggtggcccttcactgtccattccaaatancccacacgtgctctctgctggattctaaattatgtgaattttgccatattaaatcttcctcatttatactattatttgttacgttcaatcagaatccccgaaacctcctataaagcttagctgccccttctgaggatgctgagaacggtgtctttctttataaatgcaaatggctaccgttttacaataaaattttgcatgtgcnannnnnnannangtttttgaagagggagaagcgcccctccactgtagaccttatgaggtaaggctgcgagtgaagacctagcannnnnnnnnnnnnnngaaagaaacgaagtctcacacagggatct

SEQ ID NO: 2045 - DNA, 88 bp, Homo sapiens
tagagttttgatttgcgtggcactctgcttttaatcccttgttgaataagtgttagaaaccttgatcttggccctatacctgatcacc

SEQ ID NO: 2046 - DNA, 482 bp, Homo sapiens
  misc_feature (73)..(73): n includes a, c, g, or t, or contains no nucleotide
  misc_feature (78)..(78): n includes a, c, g, or t, or contains no nucleotide
  misc_feature (80)..(113): n includes a, c, g, or t, or contains no nucleotide
  misc_feature (151)..(165): n includes a, c, g, or t, or contains no nucleotide
  misc_feature (170)..(173): n includes a, c, g, or t, or contains no nucleotide
  misc_feature (175)..(179): n includes a, c, g, or t, or contains no nucleotide
  misc_feature (181)..(184): n includes a, c, g, or t, or contains no nucleotide
  misc_feature (187)..(188): n includes a, c, g, or t, or contains no nucleotide
  misc_feature (190)..(193): n includes a, c, g, or t, or contains no nucleotide
  misc_feature (196)..(236): n includes a, c, g, or t, or contains no nucleotide
  misc_feature (242)..(243): n includes a, c, g, or t, or contains no nucleotide
cacctcggattctgatctgatccttagggggtgccctggccccacggacccgactcagcttgagacactccanccaangnnnnnnnnnnnnnnnnnnnnnnnnnnnnnnnnnnccttcaggcacccccaagcgtgcagctctgtcccagcnnnnnnnnnnnnnnngaggnnnncnnnnngnnnnggnncnnnnccnnnnnnnnnnnnnnnnnnnnnnnnnnnnnnnnnnnnnnnnncgtggnngcccccaggcctggtccccaagagctttggaggcttggattcctgggcctggcccaggtggctgtttccctgaggaccagaactgctcattttagcttgagtgatggcttcaggggttggaagttcagcccaaactgaagggggccatgccttgtccagcactgttctgtcagtctcccccaggggtggggggtatggggaccattcattccctggcattaatcccttagagggaataa

SEQ ID NO: 2047 - DNA, 517 bp, Homo sapiens
  misc_feature (63)..(63): n includes a, c, g, or t, or contains no nucleotide
gctgcctgtcgagctcaccggctagcccaggccacagccagcctgtcgtgtccagcctgacgnctactggggcagggcagcaggcttttgtgttctctaaaaatgttttatcctccctttggtaccttaatttgactgtcctcgcagagaatgtgaacatgtgtgtgtgttgtgttaattctttctcatgttgggagtgagaatgccgggcccctcagggctgtcggtgtgctgtcagcctcccacaggtggtacagccgtgcacaccagtgtcgtgtctgctgttgtgggaccgttgttaacacgtgacactgtgggtctgactttctcttctacacgtcctttcctgaagtgtcgagtccagtcctttgttgctgttgctgttgctgttgctgttgctgttggcatcttgctgctaatcctgaggctggtagcagaatgcacattggaagctcccaccccatattgttcttcaaagtggaggtctcccctgatccagacaagtgggagagcccgt

SEQ ID NO: 2048 - DNA, 500 bp, Homo sapiens
  misc_feature (43)..(43): n includes a, c, g, or t, or contains no nucleotide
  misc_feature (56)..(57): n includes a, c, g, or t, or contains no nucleotide
  misc_feature (64)..(64): n includes a, c, g, or t, or contains no nucleotide
  misc_feature (112)..(112): n includes a, c, g, or t, or contains no nucleotide
  misc_feature (122)..(122): n includes a, c, g, or t, or contains no nucleotide
  misc_feature (280)..(280): n includes a, c, g, or t, or contains no nucleotide
  misc_feature (333)..(333): n includes a, c, g, or t, or contains no nucleotide
tactaagcactacaggcctcacagaaacagagatcccatcttnggagttttcagtnnccacatngggagataaagggttttgaacatgaaatgacaaaaacaacagcaagangaaaattctngtcctttttcattactatcagactcaaataaatgtcttggctcttacattacattcattcttcaaccattgtggtctggcttccacttccttcacttcaccaacatggctctgccaaaggaagcccgtgatctctaggccatcactttaattgatctntctacaacatttatcctggttgttaagccctccttacaacattcttctctctntgtttttatagctccatctctcctgcttctttaacttgataatgcatacttgatttttctatttgttatttcataaaccaattaatacacagataaaatgactgtatatcaaaccatgtttgtatagaaaaaatggattttggatgcctctcatatgtaattagttc

SEQ ID NO: 2049 - DNA, 218 bp, Homo sapiens
tagcagagctggaccagtggtgccttggagggataagccagctgcagctgggctgtgtggttgacttatgggcccagccagccaggctcaggccatggctcccctttttcttcctcaccctgatttcttgcttattcactgaagttctcctgaagaggaactgggcctgttgccctttctgtaccatttatttgctcccaatgtttatgataataaag

SEQ ID NO: 2050 - DNA, 383 bp, Homo sapiens
tgtgctcaagagtcccatggctagtggcatttccgtgctcccgccaccaggctctactgtcaacatcatccctatctgcaacccaagaggaatcagaaaaatagagccgttagcagtccactttaagtcaggcacagtggctcacacctgtaatcccagcattttgggaggccaaagtgggaggattgcttgagcccatgagttcaagaccagcctggacaacatagcaaaaccccatctctacaaaaaataaatattagtgggcatggtgacacatgcctgtagtcccagctactcaggaggctgaggcaggaggatcactcgagcccaggaggtcgaggcgacagtgagctataactatgccactgcacatcagcctggac

SEQ ID NO: 2051 - DNA, 449 bp, Homo sapiens
  misc_feature (64)..(79): n includes a, c, g, or t, or contains no nucleotide
gaatgggttcccttcacctactgctggccattgtcccttctgttggagattcctttctttatgnnnnnnnnnnnnnnnnccttcaacacccccccttgctggtcctgccggtcacagttgaggattttggctgtgatgggctcatactcataatggcctgttgagttgtttttagtgacaggttttgtttgctgcacacctcattggcttgcttaccaacaccagctagaagtggtccctctttcatatccaaaccagaacacatttgggtattcctgagactttatagagcgtgtattgtttgttatacgaacctaacctaccttgttgttttctcatattaagaaatttaaatctactttgttttagtgaagctattttggtaatgtataagcaattttggttctgtttagggagaattcagggtttccatgacttgatttgagctt

SEQ ID NO: 2052 - DNA, 519 bp, Homo sapiens
  misc_feature (61)..(100): n includes a, c, g, or t, or contains no nucleotide
  misc_feature (106)..(166): n includes a, c, g, or t, or contains no nucleotide
  misc_feature (168)..(168): n includes a, c, g, or t, or contains no nucleotide
  misc_feature (170)..(170): n includes a, c, g, or t, or contains no nucleotide
  misc_feature (195)..(195): n includes a, c, g, or t, or contains no nucleotide
  misc_feature (200)..(200): n includes a, c, g, or t, or contains no nucleotide
  misc_feature (209)..(209): n includes a, c, g, or t, or contains no nucleotide
  misc_feature (257)..(279): n includes a, c, g, or t, or contains no nucleotide
  misc_feature (297)..(302): n includes a, c, g, or t, or contains no nucleotide
  misc_feature (304)..(304): n includes a, c, g, or t, or contains no nucleotide
  misc_feature (310)..(312): n includes a, c, g, or t, or contains no nucleotide
  misc_feature (325)..(342): n includes a, c, g, or t, or contains no nucleotide
  misc_feature (489)..(489): n includes a, c, g, or t, or contains no nucleotide
  misc_feature (494)..(494): n includes a, c, g, or t, or contains no nucleotide
catcagcgtcaaggagttgggcacggtgatgaggatgctgggccagacacccaccaaggannnnnnnnnnnnnnnnnnnnnnnnnnnnnnnnnnnnnnnncagcgnnnnnnnnnnnnnnnnnnnnnnnnnnnnnnnnnnnnnnnnnnnnnnnnnnnnnnnnnnnnngncngaaagggaagagcgaggaggagctnggccngagtgcttnccgcatcttcgacaggaatgcagacggctacatcgacccggaggagcnnnnnnnnnnnnnnnnnnnnnnntccggggagcacgtgacnnnnnngnacgagnnngagatcgaatctnnnnnnnnnnnnnnnnnnacaagaacaacgacggccgcattgacttcgacgagttcctgaagatgatggagggcgtgcagtaaggagtggacagtcgcctctaccaagatcgcgtgtccctagggtgtgggagactccgccctgccgggtccccaccagggaggncgcgnccccttgtgggtctttgtctggaag

SEQ ID NO: 2053 - DNA, 362 bp, Homo sapiens
  misc_feature (33)..(47): n includes a, c, g, or t, or contains no nucleotide
  misc_feature (72)..(72): n includes a, c, g, or t, or contains no nucleotide
catgtatcaggtacttaattgcatagagttagnnnnnnnnnnnnnnngtgttgctttaatggaaaaaaaaancagtaaaagtgaaatattactgttttaaggaaaactaatttagggtggcagccaataaaggtggttggtgtctaatttaagtgttaaatcaatttctttcattcagttagctctttacccaagaagaagtgaatgatttggagcttagggtatgttttgtatcccctttctgataaacccattccctaccaattttatgtcataagagatttttttcccccaaatctagaacaatgtataatacattcacatctagtcaagggcataggaacggtgtcatggagtccaaa

SEQ ID NO: 2054 - DNA, 61 bp, Homo sapiens
tgatctatgctgcacccagtctgcaaagtgggattccctctcggttcagtgacagtggatc

SEQ ID NO: 2055 - DNA, 605 bp, Homo sapiens
  misc_feature (26)..(91): n includes a, c, g, or t, or contains no nucleotide
  misc_feature (506)..(506): n includes a, c, g, or t, or contains no nucleotide
  misc_feature (508)..(508): n includes a, c, g, or t, or contains no nucleotide
gacctcagtggtcatcatcccctttnnnnnnnnnnnnnnnnnnnnnnnnnnnnnnnnnnnnnnnnnnnnnnnnnnnnnnnnnnnnnnnnnncaagagcctgcagggaacagaacagtgaacagggaggactctgatgaacaagaccctcaggaggtgacatacgcacagttgaatcactgcgttttcacacagagaaaaatcactcgcccttctcagaggcccaagacacccccaacagataccagcgtgtaacacggaacttccaaatgctgagcgcagatccaaagttgtcttctgtccactagcaccacagtcaggccttgatgggatcttctagggagacaatagccctgtctcaaaaccgggttgccagctcccatgtaccagcagctggactctgaaggcgtgagtctgcatcttagggcatcgctcttcctcacaccacgaatctgaacatgcctctctcttgcttacaaatgtctaaggtccccactgcctgctggananaaaacacacttgcttagcccacaattctccatttcacttgacccctgcccacctctccaacctaactggcttacttcctagtctacttgaggctgcg

SEQ ID NO: 2056 - DNA, 403 bp, Homo sapiens
cagacgtttcccagggcgttcaggcagccctgatggaccgaaggctctggtgtctggtttggccccacagcagtgtgggccgatcctgtttacctcatacatccctgcactgtgtgttttcatttttgtctgctttagttctcttttattttctattcaccacacactcaccactcccagcttctcgtgtccagtgaaacccctgaaccaagatcactgaatttttgtttttttcttgttgctttgggaaatttttttttctctgtagggtttttaagaggtttcgggggttttgttgtgtaaatattctattttattcttggggggatcaaaccttaggaaaaggatatctatatatctatatagctatatatttgtgttccttcagggaaactggtcttga

SEQ ID NO: 2057 - DNA, 348 bp, Homo sapiens
  misc_feature (42)..(42): n includes a, c, g, or t, or contains no nucleotide
  misc_feature (241)..(255): n includes a, c, g, or t, or contains no nucleotide
  misc_feature (275)..(320): n includes a, c, g, or t, or contains no nucleotide
ctggtgctgacttgccagcagagcgcccccctggaggagtcngagcatctgcccctgtccacagtacatacggaagtctccaaagggtccctgaggctaagtggcaggtccaatcccatttaaccaggtctaggtcttctccctgccatgtcccttgccaggctcttccacttagctaagtgggcacactgcaagctggggtggcaccccagcattcctggctttctggggtccagatagnnnnnnnnnnnnnnnttttgcatccatttgcatcnnnnnnnnnnnnnnnnnnnnnnnnnnnnnnnnnnnnnnnnnnnnnnttctgagcacagattccagaggtcacag

SEQ ID NO: 2058 - DNA, 524 bp, Homo sapiens
  misc_feature (28)..(28): n includes a, c, g, or t, or contains no nucleotide
  misc_feature (41)..(41): n includes a, c, g, or t, or contains no nucleotide
  misc_feature (54)..(54): n includes a, c, g, or t, or contains no nucleotide
  misc_feature (60)..(62): n includes a, c, g, or t, or contains no nucleotide
  misc_feature (70)..(70): n includes a, c, g, or t, or contains no nucleotide
  misc_feature (72)..(72): n includes a, c, g, or t, or contains no nucleotide
  misc_feature (77)..(77): n includes a, c, g, or t, or contains no nucleotide
  misc_feature (82)..(83): n includes a, c, g, or t, or contains no nucleotide
  misc_feature (96)..(96): n includes a, c, g, or t, or contains no nucleotide
  misc_feature (109)..(109): n includes a, c, g, or t, or contains no nucleotide
  misc_feature (137)..(137): n includes a, c, g, or t, or contains no nucleotide
  misc_feature (167)..(167): n includes a, c, g, or t, or contains no nucleotide
  misc_feature (188)..(188): n includes a, c, g, or t, or contains no nucleotide
  misc_feature (221)..(221): n includes a, c, g, or t, or contains no nucleotide
  misc_feature (223)..(223): n includes a, c, g, or t, or contains no nucleotide
  misc_feature (226)..(227): n includes a, c, g, or t, or contains no nucleotide
  misc_feature (229)..(232): n includes a, c, g, or t, or contains no nucleotide
  misc_feature (318)..(379): n includes a, c, g, or t, or contains no nucleotide
cagagtgctcctggaaggaccccgaggncagaagccgcccnttgagctggcgcnaagcannnacgcgagncngtgcngctcnntgcgggccgactncaacctcacccgnatccggcctgactgtttcctggaagtgncggatgaggccacgggcgccctggcatcgncggtgtcgggctacgtgcagnccctggccagcgcaggtgtggtggctgttctgngnccnngnnnntcccgccccccagggttgcgctgtggctctggcttctgatcgctgctccatccacctgcagcttcaggggctggtggaccctgcannnnnnnnnnnnnnnnnnnnnnnnnnnnnnnnnnnnnnnnnnnnnnnnnnnnnnnnnnnnnnggaacgccgtgctgcctcgggctatcctgtcaaggtgccgctcgaagtccaggaggcagatgaagccaagctccaacagacagaagcagagctcaggaaggtggatgaggccatcgccctattccagaagatgctgtgatccacc

SEQ ID NO: 2059 - DNA, 151 bp, Homo sapiens
  misc_feature (54)..(54): n includes a, c, g, or t, or contains no nucleotide
aatgagcccaccttgtgttcttcctagctccaccctccccgtgctgctgtgttntgctcctccccacgcttccctgctatagttcccagctgctgtaacggagccacctccaactctaacaataaaccaagttcattgcagatagtgtaaa

SEQ ID NO: 2060 - DNA, 499 bp, Homo sapiens
  misc_feature (166)..(166): n includes a, c, g, or t, or contains no nucleotide
  misc_feature (222)..(222): n includes a, c, g, or t, or contains no nucleotide
  misc_feature (405)..(405): n includes a, c, g, or t, or contains no nucleotide
  misc_feature (411)..(451): n includes a, c, g, or t, or contains no nucleotide
ccaagctcagtctaaatgaaaccgaaacgtgaccacgcacaaaggcagtcactgctcgaggggtgcagaccgcagaattttcacagcaggggctcttggaactctggaaacccccttcttaaatttgggaggaggagtatgcctttggtgtccccctcccaagggncaattctgaaccccatctttggcaggcatacatatttcactgtttccaaagctatntactctgccaaacaacacccagtcctattccaaactctcaacgattctatcttgttcctgtttttctatgtatttatggttgccgtttgtgtctgatttgattttactgttttttccctgattttatggagtagcattgtgacctgttttcctttgtcttatataactttagtaaactaaccnctgtcnnnnnnnnnnnnnnnnnnnnnnnnnnnnnnnnnnnnnnnnntccaatcagagccctctcgcccagccagccctggctctgtgtgcagag

SEQ ID NO: 2061 - DNA, 302 bp, Homo sapiens
  misc_feature (40)..(40): n includes a, c, g, or t, or contains no nucleotide
atgctgacatgaacagctctttggaagggcagttcttgtngggaggtaggggtgttaagagttggaatgacagtgagcagcagatctggtgtaggtaacttttagtccaattgtgaaaagaagagcaacatggtccctgtggccaggagcaggagtcttgcttgctcttcctctctgtggccatctcagctgtcggtccccctatcacccttcctcactcaggctgagggggtgtggctgagctccttagaaggcagtctgtttgcacaaagtaggatgtggatagtgcttggatgtgcctc

SEQ ID NO: 2062 - DNA, 432 bp, Homo sapiens
  misc_feature (26)..(26): n includes a, c, g, or t, or contains no nucleotide
  misc_feature (35)..(35): n includes a, c, g, or t, or contains no nucleotide
  misc_feature (61)..(61): n includes a, c, g, or t, or contains no nucleotide
  misc_feature (79)..(99): n includes a, c, g, or t, or contains no nucleotide
  misc_feature (166)..(182): n includes a, c, g, or t, or contains no nucleotide
gtcgacttcaataattggaaagactnggaagatgnttcagatgaagacatgtctaattttnatcgtttctctgagatgnnnnnnnnnnnnnnnnnnnnngaggatgtagatttaccagaagtagatggagcagatgatgattcacaagacagtgatgatgaaaaannnnnnnnnnnnnnnnnaggaatattgtcatcacctggattttgagaaagaaaaataacttctctgcaagatttcataattgagagaattcctgagttgatagctctaaaggcagatatgctgtatttgcctactttaacccatttttcaacctgtttgttttttaaaaggcttcactaagggttgatatgtaccattgtatggggcaattttaagtcagctaaggcaataaccttatgcatgaacatttcccagactttcatgaag

SEQ ID NO: 2063 - DNA, 294 bp, Homo sapiens
  misc_feature (105)..(120): n includes a, c, g, or t, or contains no nucleotide
taggtacatctgttttcactatatgatattaagaaagcgtgaaatgacttaaatgttcatttttttctgtatagatactttatcatgttttcatgattttaggannnnnnnnnnnnnnnntattcaaagtgtgaaactaaaactttatggttgtactttaattcttggcatgttgcctctatgtcccatttaaaataaaatacattctcattaactttagatgggaaataaggttgtatgttgatggatgaattttggcatgatgactgtactctcaataaaggctgaaaatgt

SEQ ID NO: 2064 - DNA, 489 bp, Homo sapiens
  misc_feature (42)..(42): n includes a, c, g, or t, or contains no nucleotide
  misc_feature (46)..(46): n includes a, c, g, or t, or contains no nucleotide
  misc_feature (57)..(57): n includes a, c, g, or t, or contains no nucleotide
  misc_feature (63)..(63): n includes a, c, g, or t, or contains no nucleotide
  misc_feature (69)..(69): n includes a, c, g, or t, or contains no nucleotide
  misc_feature (73)..(73): n includes a, c, g, or t, or contains no nucleotide
  misc_feature (117)..(117): n includes a, c, g, or t, or contains no nucleotide
  misc_feature (120)..(121): n includes a, c, g, or t, or contains no nucleotide
  misc_feature (140)..(140): n includes a, c, g, or t, or contains no nucleotide
  misc_feature (167)..(167): n includes a, c, g, or t, or contains no nucleotide
  misc_feature (170)..(170): n includes a, c, g, or t, or contains no nucleotide
  misc_feature (181)..(181): n includes a, c, g, or t, or contains no nucleotide
  misc_feature (221)..(221): n includes a, c, g, or t, or contains no nucleotide
  misc_feature (228)..(228): n includes a, c, g, or t, or contains no nucleotide
  misc_feature (270)..(322): n includes a, c, g, or t, or contains no nucleotide
tcactggtgtacagctcactctcgccccggatgcggcggaancganggatcttcccnattgtnattccntgcnttccggatggtggaatacacctcgtccccttcaaacagaaccanggnngttctcgtccgggctgaanggggcgtagcctctcatctcgccaagntgnaccacagtgcnattcaccaggttccagcagctggggtgccgggcgttggtnccacagnccagcagcccctcactccgcctctccaggagagtgatgtagnnnnnnnnnnnnnnnnnnnnnnnnnnnnnnnnnnnnnnnnnnnnnnnnnnnnncgtgcgcacagatgcgttcttgccctcggggaagtcaaagaggtagaccttgccacgtcctcccacccacacagaggagctgcctggctcgtggaaaagcaccgtgtgcggctcagtctggccaaagtccacccggtcctgccctacatggcctttccagacggcga

SEQ ID NO: 2065 - DNA, 447 bp, Homo sapiens
  misc_feature (51)..(58): n includes a, c, g, or t, or contains no nucleotide
  misc_feature (338)..(338): n includes a, c, g, or t, or contains no nucleotide
  misc_feature (355)..(370): n includes a, c, g, or t, or contains no nucleotide
actacccgctagaccggtgctgctatgggaaattcctgctgacgtcccacnnnnnnnncccctggaagatgcaggaagcctggaagctggtgggtggctctgacggggaaaggactgcgcccttttgctcctggttccagggagtcctgggcatcctgcggtgtcgagcaatagcctggcttcagagctgagagtgcctggggccacaggaaaggcaggaacaggaccttctctctcccaggcccaacgcaggggccctcactggctgcagctgatctgtttccttataccagatcctcagtctcactaaagacagcgatatgggagacacccagggncctggcccgccagcccnnnnnnnnnnnnnnnngaagagaaaaagaaaaaaatgctgcagttgttctctcaagctagggcagaagaggggtgtcaagctcctcaataaac

SEQ ID NO: 2066 - DNA, 463 bp, Homo sapiens
  misc_feature (85)..(103): n includes a, c, g, or t, or contains no nucleotide
  misc_feature (209)..(209): n includes a, c, g, or t, or contains no nucleotide
  misc_feature (216)..(216): n includes a, c, g, or t, or contains no nucleotide
  misc_feature (222)..(222): n includes a, c, g, or t, or contains no nucleotide
  misc_feature (228)..(229): n includes a, c, g, or t, or contains no nucleotide
  misc_feature (326)..(355): n includes a, c, g, or t, or contains no nucleotide
tctgttcctcaaggatcccagactagcttgggaagttttctttggaccatgtactccttatcagtaccgcctcatgggccctggnnnnnnnnnnnnnnnnnnnagaaatgccatcctgacccagtgggacagaacattgaaacctttaaaaactcgaattgtccctgattcctccaagcctgcctccatgtcacattatttaaaagccnggggggnacctgncctacnngcctctcttctacttatctgtaaatcttcacttttcttgaaattggtgagagataaactacaggacagaatgtccccttacctagtaagtctttggnnnnnnnnnnnnnnnnnnnnnnnnnnnnnncaccaagtcatgctaattctatctccaagtatcttgtgcatccctcctctgctctccatcataactgctattagccaaattcaggcccagtcatctcctatctgaatt

SEQ ID NO: 2067 - DNA, 247 bp, Homo sapiens
gacagttccatgtataccaagaaaatgccccaggccttcctgtgggggccgtcgccggcatcgtgaccggggtcctggtcggagtggcgctggtggccgcgctggtgtgtttcctgctccttgccaaaactggaaggccgtggtccctcccacagctctgccttctcgatgtcccctctctccactgcctaggcccccctacccaaccccaggacagcagcttccatctatgagaagtggcttctta

SEQ ID NO: 2068 - DNA, 535 bp, Homo sapiens
caattctatgtgtatctttagatgcagtgaaattcagattgcagcaaaatcacttatctgttcttttcggctaaaacactctaggtgaattttctaaacttccatggtttacatatttatatatgactaccaagatggagcaatccacggatggacttttgaataaactcaaatatttgatactgcttcctccaaggaatggagagtgtcaggcaggtaggtaagaaccactcctacacttatttctagctcctgaagccaactgcagccttggagccaatggctgtatttggctgtgtgttacaggttggccaaactgattgccatcaggtcagacaaaactgccttttatggtgtagtctgccagcttcagacatatgctgtattgttgttattggctagactatttattagactattgttggactattttttatcaaatgctttaccccacgcctgtttgtattgggagctctggaccaatagtgtctctcctagtgacagaaatatgagcatctgtggattacacagcctc

SEQ ID NO: 2069 - DNA, 562 bp, Homo sapiens
  misc_feature (134)..(134): n includes a, c, g, or t, or contains no nucleotide
cttcctcattgtagggcgttaggatgttgctttctttttccattagttaaacatttttttctcctttggaggaagggaatgaaacatttatggcctcaagatactatacatttaaagcaccccaatgtctctcntttttttttttttacttccctttcttcttccttatataacatgaagaacattgtattaatctgatttttaaagatctttttgtatgttacgtgttaagggcttgtttggtatcccactgaaatgttctgtgttgcagaccagagtctgtttatgtcagggggatggggccattgcatccttagccattgtcacaaaatatgtggagtagtaacttaatatgtaaagttgtaacatacatacatttaaaatggaaatgcagaaagctgtgaaatgtcttgtgtcttatgttctctgtatttatgcagctgatttgtctgtctgtaactgaagtgtgggtccaaggactcctaactactttgcatctgtaatccacaaagattctgggcagctgccacctcagtctcttctctgtattatcatagtctgg

SEQ ID NO: 2070 - DNA, 414 bp, Homo sapiens
  misc_feature (304)..(334): n includes a, c, g, or t, or contains no nucleotide
acctcaggtggctgaaggagagaatgtatttggtgtctgccatatctttgcatccttcaatgacacttttgtccatgtcactgatctttctggcaaagaaaccatctgccgtgtgactggtgggatgaaggtaaaggcagaccgagatgaatcctcaccatatgctgctatgttggctgcccaggatgtggcccagaggtgcaaggagctgggtatcaccgccctacacatcaaactccgggccacaggaggaaataggaccaagacccctggacctggggcccagtcggccctcagagccctnnnnnnnnnnnnnnnnnnnnnnnnnnnnnnngaggatgtcacccccatcccctctgacagcactcgcaggaaggggggtcgccgtggtcgccgtctgtgaacaagattcct

SEQ ID NO: 2071 - DNA, 469 bp, Homo sapiens
aatggtctgtgagcagaagctcctgaagggagagggccccaagacctcgtggaccagagaactgaccaacgatggggaactgatcctgaccatgacggcggatgacgttgtgtgcaccagggtctacgtccgagagtgagtggccacaggtagaaccgcggccgaagcccaccactggccatgctcaccgccctgcttcactgccccctccgtcccaccccctccttctaggatagcgctccccttaccccagtcacttctgggggtcactgggatgcctcttgcagggtcttgctttctttgacctcttctctcctcccctacaccaacaaagaggaatggctgcaagagcccagatcacccattccgggttcactccccgcctccccaagtcagcagtcctagccccaaaccagcccagagcagggtctctctaaaggggacttgagggcctgagcaggaaagactg

SEQ ID NO: 2072 - DNA, 196 bp, Homo sapiens
caccacacaaacttagttcatatgcttttacttgggcaagggtgctttccttccaataccccagtagcttttattttagtaaagggaccctttcccctagcctagggtcccatattgggtcaagctgcttacctgcctcagcccaggattttttattttgggggaggtaatgccctgttgttaccccaaggcttct

SEQ ID NO: 2073 - DNA, 208 bp, Homo sapiens
  misc_feature (33)..(33): n includes a, c, g, or t, or contains no nucleotide
catttgggctcttcgctggccttggtggagctngtgccagcaccagtggcagctctggtgcctgtggtttctcctacaagtgagattttagatattgttaatcctgccagtctttctcttcaagccagggtgcatcctcagaaacctactcaacacagcactctaggcagccactatcaatcaattgaagttgacactctgcattaaa

SEQ ID NO: 2074 - DNA, 586 bp, Homo sapiens
cacgcagccagaggtggagcctcaggtggacagccctgctcctccaaggccctccctccaaccacaccctcggctacttgatcacagggactctgtggagcaggtagctgtgctggcgtctttgggaatcctttctttcctgggactggtggctggggccctggcactggggctctggctgaggctgagacggggtgggaaggatggatccccaaagcctgggttcttggcctcagtgattccagtggacaggcgtccaggagctccaaacctgtagaggacccaggagggcttcggcagattccacctataattctgtcttgctggtgtggatagaaaccaggcaggacagtagatccctatggttggatctcagctggaagttctgtttggagcccatttctgtgagaccctgtatttcaaatttgcagctgaaaggtgcttgtacctctgatttcaccccagagttggagttctgctcaaggaacgtgtgtaatgtgtacatctgtgtccatgtgtgaccatgtgtctgtgaaggccagggaacatgtattcctctgcatgcatgtatgtaggtgcctgggag

SEQ ID NO: 2075 - DNA, 595 bp, Homo sapiens
catgtgccgcgagaagcagcccatggtgccagagtctctggctgactacatcacagcagcatacgtggagatgaggcgagaggcttgggctagtaaggatgccacctatacttctgcccggaccctgctggctatcctgcgcctttccactgctctggcacgtctgagaatggtggatgtggtggagaaagaagatgtgaatgaagccatcaggctaatggagatgtcaaaggactctcttctaggagacaaggggcagacagctaggactcagagaccagcagatgtgatatttgccaccgtccgtgaactggtctcagggggccgaagtgtccggttctctgaggcagagcagcgctgtgtatctcgtggcttcacacccgcccagttccaggcggctctggatgaatatgaggagctcaatgtctggcaggtcaatgcttcccggacacggatcacttttgtctgattccagcctgcttgcaaccctggggtcctcttgttccctgctggcctgccccttgggaaggggcagtgatgcctttgaggggaaggaggagcccctctttctcccatgctgcacttactccttttg

SEQ ID NO: 2076 - DNA, 425 bp, Homo sapiens
aaaccacatgtgctagtggatctacttgtggatgatagcggtaaagagtccttgattggttatagaccaacagaagattccaaagaattttcatgagatcagctaagttgcaccaactttgaagtctgattttcctggacagttttctgctttaatttcatgaaaagattatgatctcagaaattgtatcttagttggtatcaaccaaatggagtgacttagtgtacatgaaagcgtaaagaggatgtgtggcattttcacttttggcttgtaaagtacagactttttttttttttaaacaaaaaaagcatgtaacttatgaacctttacatccagataggttaccagtaacggaacagtatccagtactcctggttcctaggtgagcaggtgatgccccagggacctttgtagccacttcactt

SEQ ID NO: 2077 - DNA, 174 bp, Homo sapiens
  misc_feature (92)..(92): n includes a, c, g, or t, or contains no nucleotide
  misc_feature (99)..(107): n includes a, c, g, or t, or contains no nucleotide
  misc_feature (110)..(110): n includes a, c, g, or t, or contains no nucleotide
agggttctctgtgtgtgtccccggcacgtcagggaccctatcctcccaccgcctccgttaacacgatcctgaataaatcttgagaaccccanaaaaaannnnnnnnnaanaagagggcagctccctggcatactggctgcagcccgtgggcagctccgggctgtcgtccataga

SEQ ID NO: 2078 - DNA, 527 bp, Homo sapiens
  misc_feature (74)..(100): n includes a, c, g, or t, or contains no nucleotide
  misc_feature (142)..(142): n includes a, c, g, or t, or contains no nucleotide
  misc_feature (168)..(168): n includes a, c, g, or t, or contains no nucleotide
  misc_feature (248)..(248): n includes a, c, g, or t, or contains no nucleotide
  misc_feature (337)..(337): n includes a, c, g, or t, or contains no nucleotide
  misc_feature (365)..(365): n includes a, c, g, or t, or contains no nucleotide
  misc_feature (388)..(388): n includes a, c, g, or t, or contains no nucleotide
caaagttcctcgacccgggccagatacactccagttcacagtggatgtcttccactttgctaatgactccagannnnnnnnnnnnnnnnnnnnnnnnnnnaaggtcaccctagctgagcaggacccagatgaactcaacaanggcctgttccttcagcaagccttccnaacagctggttcccagtggaaggcccggctgacatctgtcaatgctgtaacaaaggtgactgtggcactccaagccattnccaggaggcagcctcgtgtcgtgagccagtggtccacgtctgcttcccgtaaccgcaggcatgtgacagaagaagcagatgtcaccgtnggggccactgatcttcctggacaggagnggtgaccatgaagtagagcagtnggctttgccttctgacacctcagtggtgctgctgggcgtaggcctggctgtggtggtgtccctgactctgactgctgttatcctggttctcaccaggaggtgtcgcactgcctcccaccctgtgtctgcttccgaataa

SEQ ID NO: 2079 - DNA, 332 bp, Homo sapiens
ctttcatgtttgtagcttgagctggttttaattggaagctctgtgatttacataatcacttacaatctctgtaaataaggaactatttatgaggaattgtaaatttcctctctcccccttcttaccctgtctgtgatcttgtctgtgatgcagtaatgatattccactctaggttcccatgatcagtggtgaaatatagtgattttcacctgtgcttccattctgaagttctggaaagaagtactggatggactgaagtccaggacaacgtcccaaagaaaggcagagtccaggtaggcttggaggaccaagccctggatgagcactggagg

SEQ ID NO: 2080 - DNA, 589 bp, Homo sapiens
aggcttgctttcctgcatctctgtgaagcctctctccttggccacagactgaactcgcagggagtgcagcaggaaggaacaaagacaggcaaacggcaacgtagcctgggctcactgtgctggggcatggcgggatcctccacagagaggaggggaccaattctggacagacagatgttgggaggatacagaggagatgccacttctcactcaccactaccagccagcctccagaaggccccagagagaccctgcaagaccacggagggagccgacacttgaatgtagtaataggcagggggccctgccaccccatccagccagaccccagctgaaccatgcgtcaggggcctagaggtggagttcttagctatccttggctttctgtgccagcctggctctgcccctcccccatgggctgtgtcctaaggcccatttgagaagctgaggctagttccaaaaacctctcctgacccctgcctgttggcagcccactccccagccccagccccttccatggtactgtagcaggggaattccctccccctccttgtgccttctttgtatataggcttctcaccgcgaccaa

SEQ ID NO: 2081 - DNA, 541 bp, Homo sapiens
  misc_feature (42)..(42): n includes a, c, g, or t, or contains no nucleotide
  misc_feature (81)..(81): n includes a, c, g, or t, or contains no nucleotide
  misc_feature (120)..(120): n includes a, c, g, or t, or contains no nucleotide
  misc_feature (137)..(137): n includes a, c, g, or t, or contains no nucleotide
  misc_feature (149)..(149): n includes a, c, g, or t, or contains no nucleotide
  misc_feature (163)..(163): n includes a, c, g, or t, or contains no nucleotide
  misc_feature (176)..(176): n includes a, c, g, or t, or contains no nucleotide
  misc_feature (200)..(200): n includes a, c, g, or t, or contains no nucleotide
  misc_feature (447)..(447): n includes a, c, g, or t, or contains no nucleotide
ccaattcctgcctgaaatctctggcctcacccctgctggggnttggactgaaaaccctcctccccaatttggggggtgttngccccatcactgcccagctcctctgactgccccccctgnaatttagggtgggggtnactagtcactgnccaatgtgtgtatngggacttgctggnaaaacggggatgcttgcccctctnccaggactattgagcccagagagagctgtcctctcattgggtgaactgattgaggaagggtctattgtctttttaaatggcacaattttaagggtttgagggtacagtcccttaacctgccacgggagggggcccccaaactttcttccccccacacttctggttttctgtgtggagggggagcagggatatctaagctgtggtgtgaaagggtaggagagatgctggaggtgggggtgctgtgttntagaccccccatattatcccagtgtcccctgcccccctcttcccccaccccatgcccccaattctgtggcgcatccagattgtgaaaatgtaca

SEQ ID NO: 2082 - DNA, 239 bp, Homo sapiens
aactgtcaaccttgacaaattgtggactttggtcagtgaacagacacgggtgaatgctgctaaaaacaagactggggctgctcccatcattgatgtggtgcgatcgggctactacaaagttctgggaaagggaaagctcccaaagcagcctgtcatcgtgaaggccaaattcttcagcagaagagctgaggagaagattaagagtgttgggggggcctgtgtcctggtggcttgaagca

SEQ ID NO: 2083 - DNA, 556 bp, Homo sapiens
  misc_feature (198)..(199): n includes a, c, g, or t, or contains no nucleotide
ctctcctactctgatgagcaacagttgtgacagtggcaccaaaggtcatttgtggttgtttttgtttgtttgtttcttaaatcctactatctcctggcctggacctcagaaggagctttttgcctatctataatttttcactgccaatttttgatatcctctctcctagagttactgttaaaaggttggttcgtaaanntccacaccccgatgctcagaagtgtcttgccagcaacattcctgctagcatacaggagtgatttcctaaaccagtttcattctagtctgaatagggacaaacaaatcttgaggaagcccaagtgcgtacctttatttttgcccccaccaccctctttctgtacttcaatttttgtttgttttttgtttttttgtccctgtcataaaatattttggtgcttcaaaacttgtaccttcattgtacatccttttcttttctccccttgggtcttattataaaagaagacaatgtacgttgtaattaccaaaaagaatagggaaaaacaagaatttcatgactctacctgtggtctatctt

SEQ ID NO: 2084 - DNA, 475 bp, Homo sapiens
gccttcccaacatggcgcagtctattaacatcacggagctgaatctgccgcagctagaaatgctcaagaaccagctggaccaggaagtggagttcttgtccacgtccattgctcagctcaaagtggtacagaccaagtatgtggaagccaaggactgtctgaacgtgctgaacaagagcaacgaggggaaagaattactcgtcccactgacgagttctatgtatgtccctgggaagctgcatgatgtggaacacgtgctcatcgatgtgggaactgggtactatgtagagaagacagctgaggatgccaaggacttcttcaagaggaagatagattttctaaccaagcagatggagaaaatccaaccagctcttcaggagaagcacgccatgaaacaggccgtcatggaaatgatgagtcagaagattcagcagctcacagccctgggggcagctcaggctactgctaaggcctg

SEQ ID NO: 2085 - DNA, 275 bp, Homo sapiens
agctcatgaagctgtgctgggcccctagcccacaggaccggccatcattcagcgccctgggcccccagctggacatgctgtggagcggaagccgggggtgtgagactcatgccttcactgctcacccagagggcaaacaccactccctgtccttttcatagctcctgcccgcagacctctggattaggtctctgttgactggctgtgtgaccttaggcccggagctgcccctctctgggcctcagaggccttatgagggtcctctacttcaggaa

SEQ ID NO: 2086 - DNA, 364 bp, Homo sapiens
  misc_feature (196)..(218): n includes a, c, g, or t, or contains no nucleotide
  misc_feature (282)..(282): n includes a, c, g, or t, or contains no nucleotide
acatcacctctgagaataggagaaatgaagcaacagttgtgtctagatgtcagaggcatggctgggcctccatctctgcctaagggagatataaaagagttcaaactattgcccatgttccccagggtcagaagttctaattatgatgatagaggctgggttgtaagtagtaagtgaagggtagcagaatatgccnnnnnnnnnnnnnnnnnnnnnnngagttgaagacaattgagaaaaaaaatagattaaaaacaaacaaacacctctgccctctccctntttgcctaaaagcaggatatgaaattgtgaaggtgtcttcttactcggggaagaacaaaagttagtcaccagagactttaga

SEQ ID NO: 2087 - DNA, 508 bp, Homo sapiens
  misc_feature (27)..(29): n includes a, c, g, or t, or contains no nucleotide
  misc_feature (31)..(31): n includes a, c, g, or t, or contains no nucleotide
  misc_feature (45)..(45): n includes a, c, g, or t, or contains no nucleotide
  misc_feature (49)..(49): n includes a, c, g, or t, or contains no nucleotide
  misc_feature (150)..(185): n includes a, c, g, or t, or contains no nucleotide
gagtctggagtctagacggctcagatnnnanacaagagaccatgnaggntaccatccatgtccctgcccagcatgaagatggccctgaggatgacccacagttggtaggcatcactgctcgtaacattccacgagggccccagttggctnnnnnnnnnnnnnnnnnnnnnnnnnnnnnnnnnnnnctgagcaaaggagccaaaaacatcctggatgttgcacggcagcttaacgatgcccattaactggtttgtggggcacagatgcctgggttgctgctgtccagtgcctacatcccgggcctcagtgccccattctcactgctatctggggagtgattaccccgggagactgaactgcagggttcaagccttccagggatttgcctcaccttggggccttgatgactgccttgcctcctcagtatgtgggggcttcatctctttagagaagtccaagcaacagcctttgaatgtaaccaatcctactaataaaccagttctgaagg

SEQ ID NO: 2088 - DNA, 84 bp, Homo sapiens
ctttccctaatttcctctggagatggttgtttttccaggatgccaagcttctcatccaatcgtttcagtttctccgcacaagct

SEQ ID NO: 2089 - DNA, 401 bp, Homo sapiens
  misc_feature (63)..(145): n includes a, c, g, or t, or contains no nucleotide
  misc_feature (239)..(253): n includes a, c, g, or t, or contains no nucleotide
gcaggcgcacggatcgaaatgcagaacgacgccggcgagttcgtggacctgtacgtgccgcgnnnnnnnnnnnnnnnnnnnnnnnnnnnnnnnnnnnnnnnnnnnnnnnnnnnnnnnnnnnnnnnnnnnnnnnnnnnnnnnnnnnaggcaggtataatggccagtttacttaaaatgctatctgcggggccattcgtaggatgggtgagtcagatgattccattctccgattggccaannnnnnnnnnnnnnntcaaagaacttttgactggagagaatcacagatgtggaatatttgtcataaataaataaataatgaaaacctcaaaaaaaaaaaaaaaaaagatgatactgggtaccaagagggtgggggctggcaccatggggatctgagtattagg

SEQ ID NO: 2090 - DNA, 199 bp, Homo sapiens
  misc_feature (65)..(65): n includes a, c, g, or t, or contains no nucleotide
  misc_feature (88)..(89): n includes a, c, g, or t, or contains no nucleotide
  misc_feature (98)..(98): n includes a, c, g, or t, or contains no nucleotide
  misc_feature (102)..(103): n includes a, c, g, or t, or contains no nucleotide
  misc_feature (115)..(115): n includes a, c, g, or t, or contains no nucleotide
  misc_feature (117)..(131): n includes a, c, g, or t, or contains no nucleotide
  misc_feature (134)..(134): n includes a, c, g, or t, or contains no nucleotide
  misc_feature (144)..(144): n includes a, c, g, or t, or contains no nucleotide
ccaaagtgtttgcttctccctttctgcggccttcgccagcccaggctcggctgccacccagtggnacagaaccgaggagctgccattnncccccatangggnnagtgtcttgttncnnnnnnnnnnnnnnntcnttgcttctgncagctccttcccctaggagggaagggtggggtggaactgggcacatgccagcacc

SEQ ID NO: 2091 - DNA, 449 bp, Homo sapiens
  misc_feature (84)..(84): n includes a, c, g, or t, or contains no nucleotide
  misc_feature (102)..(102): n includes a, c, g, or t, or contains no nucleotide
  misc_feature (104)..(104): n includes a, c, g, or t, or contains no nucleotide
  misc_feature (107)..(112): n includes a, c, g, or t, or contains no nucleotide
  misc_feature (114)..(115): n includes a, c, g, or t, or contains no nucleotide
  misc_feature (118)..(118): n includes a, c, g, or t, or contains no nucleotide
  misc_feature (124)..(124): n includes a, c, g, or t, or contains no nucleotide
  misc_feature (130)..(131): n includes a, c, g, or t, or contains no nucleotide
  misc_feature (138)..(138): n includes a, c, g, or t, or contains no nucleotide
  misc_feature (140)..(140): n includes a, c, g, or t, or contains no nucleotide
  misc_feature (143)..(146): n includes a, c, g, or t, or contains no nucleotide
  misc_feature (148)..(149): n includes a, c, g, or t, or contains no nucleotide
  misc_feature (155)..(155): n includes a, c, g, or t, or contains no nucleotide
  misc_feature (160)..(160): n includes a, c, g, or t, or contains no nucleotide
  misc_feature (163)..(190): n includes a, c, g, or t, or contains no nucleotide
cctacctgagtgagcgtggctcctgcttctgggtggctgagtctgaagagaaggtggtgggcatggtaggagctctgcctgttnatgatcccaccttgaggnanaannnnnngnnagntgtttnatctcnntgtgganantgnnnncnntcgtcnggggntannnnnnnnnnnnnnnnnnnnnnnnnnnnccagtttgcccgggaccagggctacagtgaagttatcctggacaccggcaccatccagctctctgctatggccctctaccagagcatgggcttcaagaagacgggccagtccttcttctgtgtgtgggccaggctagtggctcttcatacagttcatttcatctaccacctcccttcttctaaggtagggagtctgtgatctctttctgtgtgtattggtcagaatagaatccattcagctgtagcagcaagcaatccc

SEQ ID NO: 2092 - DNA, 553 bp, Homo sapiens
  misc_feature (30)..(30): n includes a, c, g, or t, or contains no nucleotide
  misc_feature (33)..(33): n includes a, c, g, or t, or contains no nucleotide
  misc_feature (58)..(58): n includes a, c, g, or t, or contains no nucleotide
  misc_feature (63)..(63): n includes a, c, g, or t, or contains no nucleotide
  misc_feature (87)..(88): n includes a, c, g, or t, or contains no nucleotide
  misc_feature (116)..(159): n includes a, c, g, or t, or contains no nucleotide
  misc_feature (237)..(237): n includes a, c, g, or t, or contains no nucleotide
  misc_feature (242)..(303): n includes a, c, g, or t, or contains no nucleotide
ttcaagcttggcaccatcaagggccagttnaantttgtccacgtgatcgtcaccccgntggantacgagtgcaacctggtgtccctnncagtgcaggaaagacatggagggccttnnnnnnnnnnnnnnnnnnnnnnnnnnnnnnnnnnnnnnnnnnnncccttcgtggcccgccagatggccctgcacgcaaatatggcctcacaggtgcatcatagccgctccaaccccaccganatctnnnnnnnnnnnnnnnnnnnnnnnnnnnnnnnnnnnnnnnnnnnnnnnnnnnnnnnnnnnnnnggaagccgcctactccaaccccagcctacctctggtgcaccctccgtcccatagcaaagcccctgcacagactccagccgagcccacacctggctatgaggtgggccagcggaagcgcctcatctcctcggtggaggacttcaccgagtttgtgtgaggccggggccctccctcctgcactggccttggacggtattgcctgtcagtgaaataaataaagtcctgaccccagtgcacagacatagaggca

SEQ ID NO: 2093 - DNA, 596 bp, Homo sapiens
  misc_feature (263)..(263): n includes a, c, g, or t, or contains no nucleotide
  misc_feature (272)..(291): n includes a, c, g, or t, or contains no nucleotide
  misc_feature (308)..(329): n includes a, c, g, or t, or contains no nucleotide
  misc_feature (331)..(334): n includes a, c, g, or t, or contains no nucleotide
  misc_feature (336)..(337): n includes a, c, g, or t, or contains no nucleotide
  misc_feature (339)..(341): n includes a, c, g, or t, or contains no nucleotide
  misc_feature (346)..(351): n includes a, c, g, or t, or contains no nucleotide
  misc_feature (353)..(354): n includes a, c, g, or t, or contains no nucleotide
  misc_feature (356)..(363): n includes a, c, g, or t, or contains no nucleotide
  misc_feature (365)..(371): n includes a, c, g, or t, or contains no nucleotide
  misc_feature (373)..(376): n includes a, c, g, or t, or contains no nucleotide
  misc_feature (378)..(378): n includes a, c, g, or t, or contains no nucleotide
  misc_feature (383)..(383): n includes a, c, g, or t, or contains no nucleotide
  misc_feature (390)..(390): n includes a, c, g, or t, or contains no nucleotide
  misc_feature (394)..(396): n includes a, c, g, or t, or contains no nucleotide
  misc_feature (403)..(404): n includes a, c, g, or t, or contains no nucleotide
  misc_feature (407)..(407): n includes a, c, g, or t, or contains no nucleotide
  misc_feature (416)..(416): n includes a, c, g, or t, or contains no nucleotide
  misc_feature (420)..(420): n includes a, c, g, or t, or contains no nucleotide
  misc_feature (424)..(426): n includes a, c, g, or t, or contains no nucleotide
  misc_feature (428)..(431): n includes a, c, g, or t, or contains no nucleotide
  misc_feature (434)..(434): n includes a, c, g, or t, or contains no nucleotide
  misc_feature (437)..(437): n includes a, c, g, or t, or contains no nucleotide
  misc_feature (440)..(440): n includes a, c, g, or t, or contains no nucleotide
  misc_feature (444)..(444): n includes a, c, g, or t, or contains no nucleotide
  misc_feature (452)..(454): n includes a, c, g, or t, or contains no nucleotide
  misc_feature (459)..(459): n includes a, c, g, or t, or contains no nucleotide
  misc_feature (462)..(462): n includes a, c, g, or t, or contains no nucleotide
  misc_feature (464)..(465): n includes a, c, g, or t, or contains no nucleotide
  misc_feature (470)..(471): n includes a, c, g, or t, or contains no nucleotide
  misc_feature (477)..(477): n includes a, c, g, or t, or contains no nucleotide
  misc_feature (482)..(482): n includes a, c, g, or t, or contains no nucleotide
caccctgaaccatgggcacactgagggtggggccctccttcttacagcggaaactggtgagcagggggaagatgtccgggtggatgaggttgagctgggtttgaatcttgtggctgcgaaggttgtgaactgaggcacagttctcattcaggaccaagtgctgggtgtcaggcccaaacctctccatccactgctggtacctgctgtccacaagcacagatgctggggccatgtgaaccaccaaggccacgggggcatctgcntttccttgnnnnnnnnnnnnnnnnnnnntctcacagatgggttgnnnnnnnnnnnnnnnnnnnnnntnnnncnncnnnaaagnnnnnncnngnnnnnnnngnnnnnnnannnntnttcangccaaantctnnntcttccnncangagtgatgntttncccnnncnnnnganagnagnaatnatgggagnnnatggnagntnncccanntggganggccnatctcctttgctttgagcaccaagaagtttcctctctttaagtgaagcttacagatgaaagctacgaccagggaagagtccctgacccctcttctctgggctaacaccatgtgg

SEQ ID NO: 2094 - DNA, 451 bp, Homo sapiens
gttgcatatggctgcatcaaatatgctgacctttcccataaccggttgaatgactacatcttctcctttgacaaaatgctagatgacagaggaaatacagctgcttacttgttgtatgccttcactagaatcaggtctattgcacgtctggccaatattgatgaagaaatgctccaaaaagctgctcgagaaaccaagattcttttggttcatgagaaggaatggaaactaggccggtgcattttacggttccctgagattctgcaaaagattttagatgacttatttctccacactctctgtgattatatatatgagctggcaactgctttcacagagttctatgatagctgctactgtgtggagaaagatagacagactgggaaaatattgaaggtgaacatgtggcgtatcttgtgtgaaacagtagctgctgtcatggccaaggggt

SEQ ID NO: 2095 - DNA, 385 bp, Homo sapiens
ggtcgccaggacctcgccgctgcagaccccggctgcccccggcgccgccgcggggcctgcgctcagcccggtgccacctgtggtccacctggccctccgccaagccggcgacgacttctcccgccgctaccgcggcgacttcgccgagatgtccagccagctgcacctgacgcccttcaccgcgcggggacgctttgccacggtggtggaggagctcttcagggacggggtgaactgggggaggattgtggccttctttgagttcggtggggtcatgtgtgtggagagcgtcaaccgggagatgtcgcccctggtggacaacatcgccctgtggatgactgagtacctgaaccggcacctgcacacctggatccaggataacgga

SEQ ID NO: 2096 - DNA, 53 bp, Homo sapiens
aatgttacaaatacctgttatcctttgtagagcacacagagttaaaagttgaa

SEQ ID NO: 2097 - DNA, 462 bp, Homo sapiens
  misc_feature (128)..(147): n includes a, c, g, or t, or contains no nucleotide
  misc_feature (239)..(239): n includes a, c, g, or t, or contains no nucleotide
  misc_feature (241)..(241): n includes a, c, g, or t, or contains no nucleotide
  misc_feature (246)..(246): n includes a, c, g, or t, or contains no nucleotide
  misc_feature (267)..(267): n includes a, c, g, or t, or contains no nucleotide
  misc_feature (271)..(271): n includes a, c, g, or t, or contains no nucleotide
  misc_feature (275)..(276): n includes a, c, g, or t, or contains no nucleotide
ctccccgtgttcatatgtcagggcacatgtgatgtggtgcgtgtgaatctgtgggcgcccaaggccagcagccatatctggcaagaagctggagccggggtgggtgtgctgttgccttccctctcctnnnnnnnnnnnnnnnnnnnnggtgtttcagactggcggctccagtgggccaaagggcaaccacatgagcatgggcaggggctttctccttggatgtgggacccacagcagcntnctganggctgggggtgggtgggtggngtgntttnnccttgaggacgctagggcaggcagcacacctggatgtggacttggactcggacacttctgccctgcaccctggcccgctctctacctctgcccaccgttgtggccctgcagccggagatctgaggtgctctggtctgtgggtcagtcctctttccttgtcccaggatggagctgatccagtaacct

SEQ ID NO: 2098 - DNA, 376 bp, Homo sapiens
  misc_feature (195)..(225): n includes a, c, g, or t, or contains no nucleotide
tgaggtccctggaaccatctcccagccctggcccgcaggaggaggatggagaagtggctctggtgcttctgggcaggccctcacccggcgctgtgggccctgaagatgtggcactgtgcagcagccgccgccccgtaaggcctgggcgccgtggcctgggccctgtgccctcctagaggagcaggcacctccccnnnnnnnnnnnnnnnnnnnnnnnnnnnnnnngcaccacccttgccccaagtcttttaacctgggtgttagcattttaaagagaccccacaggagttctggcctgtgactaactaactgccccaccccagccgagacctcggcgagactgtaactagtgatgtttgtacaaccaaagactcta

SEQ ID NO: 2099 - DNA, 473 bp, Homo sapiens
  misc_feature (226)..(241): n includes a, c, g, or t, or contains no nucleotide
  misc_feature (288)..(291): n includes a, c, g, or t, or contains no nucleotide
  misc_feature (387)..(394): n includes a, c, g, or t, or contains no nucleotide
gtatgatgtcctttaatgtaaactcaaatatcaatattttaaatgtccggataatattctagaggtttaaaaaatggaaatatttgaactttctattgaagacaataaagtacacaagtcgttaaggggctattcactttatcctgtactttcaatgaaattgtgatcatttcctaagaaaaggtaaaattcactatcatattttgtgtccccaccttgatgttannnnnnnnnnnnnnnntatgaactggatttaagaatgttataatagaagtcttacaaaatggnnnnagagtttttgtttcaatttttatcatcataaatgggcaaaaagtagttggactaatttcggtttttatacaagtaaagatttaatagtataaggannnnnnnncatttcttttacactgagtgtaaaactctacaaagagttatagtatttactactttgaggtttccctcacaacttctgg

SEQ ID NO: 2100 - DNA, 580 bp, Homo sapiens
  misc_feature (44)..(72): n includes a, c, g, or t, or contains no nucleotide
  misc_feature (84)..(84): n includes a, c, g, or t, or contains no nucleotide
  misc_feature (121)..(137): n includes a, c, g, or t, or contains no nucleotide
  misc_feature (145)..(150): n includes a, c, g, or t, or contains no nucleotide
  misc_feature (171)..(172): n includes a, c, g, or t, or contains no nucleotide
  misc_feature (259)..(283): n includes a, c, g, or t, or contains no nucleotide
  misc_feature (524)..(524): n includes a, c, g, or t, or contains no nucleotide
ctgtctacctgagagaatgagcacccctcatccatctcagcatnnnnnnnnnnnnnnnnnnnnnnnnnnnnnacctcaggactnaacgccacacctcaggattcctcctccttgaatctgnnnnnnnnnnnnnnnnntgagatgnnnnnnaaggtaagatgccgcatcacnnggcacgccgcccctgacagctgccttgataccagctctctgtggaaacccccgaggagttggatctggagaacagctgggcctcctnnnnnnnnnnnnnnnnnnnnnnnnncacgcagtgctaaaactgaggatgatttccctaatgcttctgcttggccttatggaggagctgctccttccttacagccttggggatggacttgcccacacctccacctcccctgagccctgtgagaggcacgactgtctatgccaatgaggctcggtggggggctctcaagtgcctgatcctgccctgggctcagagccagcccagagggaagcaactgcacagccccacaggccctccntggcactgtccccccaaccccatctcagagctcagagggtacaagctccagaacag

SEQ ID NO: 2101 - DNA, 271 bp, Homo sapiens
  misc_feature (73)..(73): n includes a, c, g, or t, or contains no nucleotide
gctgttagtaccttctttcccggagtcctggtccacgagttggatttactgctgtcgcgggtgggcctcacgnccattccctgtccctcggccccctgagtgagtccggtctcccggcgaaagtgagcgaggtttgcccggagcgcgcacgaggggaaaatgcctaaaaaaaagactggtgcgaggaagaaggctgagaaccgccgagaacgtgaaaaacaactaagagcatcaagaagcactatagatttagctaaacatccatgtaatg

SEQ ID NO: 2102 - DNA, 547 bp, Homo sapiens
  misc_feature (249)..(252): n includes a, c, g, or t, or contains no nucleotide
  misc_feature (265)..(265): n includes a, c, g, or t, or contains no nucleotide
  misc_feature (268)..(268): n includes a, c, g, or t, or contains no nucleotide
  misc_feature (294)..(294): n includes a, c, g, or t, or contains no nucleotide
tcaggcaccaggataaaagcagggacttaaacagcaccccggttcttcagcctgagccatcacatgctatcagtctcctaacctccccctgggccttaagacagggcttgggcagagaagataaatggtgggacaaaaaaatgagttacattgccacctgagaaacctcagaggggaggacccagccttagcctccctcctcccaagtgcaaaatgtgtaaacagagtaaacggaacagaaaagtgcannnnaagtggttttctntcntgcccctcccaccgcccctccccccnccccctattatttggggataaagaatataaagacaaccctggcttttctattgccttgttgcttgctgaatataaggaatggggtggggcaggaaggggcttgcccttagccacagctctacggctgtgcctcattcatttccacagctgccagtgtccctagagtttatcaggtgaattggtcaggggatcagtctccctcgagcctgacttacggctgggacagccccatctttctgttgattatgtggcg

SEQ ID NO: 2103 - DNA, 219 bp, Homo sapiens
  misc_feature (136)..(173): n includes a, c, g, or t, or contains no nucleotide
gctacagccagctgggtgacgacgacctgaaggagacgggcttccaccttaccaccacgaaccagggggcctctgccgcgggccccggcttcagcctcaagttctgaaggtcagagtggaccccgtcatggggagnnnnnnnnnnnnnnnnnnnnnnnnnnnnnnnnnnnnnnagctgcgatgagactcggaactcctcgtcttactttgtgctccatg

SEQ ID NO: 2104 - DNA, 475 bp, Homo sapiens
  misc_feature (47)..(49): n includes a, c, g, or t, or contains no nucleotide
  misc_feature (59)..(75): n includes a, c, g, or t, or contains no nucleotide
  misc_feature (284)..(299): n includes a, c, g, or t, or contains no nucleotide
  misc_feature (301)..(345): n includes a, c, g, or t, or contains no nucleotide
ggtacattccattcctatttaaggtaagcccaaagcccacttttggnnnttttctcgannnnnnnnnnnnnnnnntgtgtaagcgcctgcgttcttctgggtttggctagatagggttgtgtccctctatggaatggagagtgatgtgggcaagggtgtcattttctcgcacaatacaactcactgaggatgcttctgtagaagtgagaaacacgatgagtacattcagaattacaataactcactctcactgggtaacttctcatgatagatttgtatgatcnnnnnnnnnnnnnnnntnnnnnnnnnnnnnnnnnnnnnnnnnnnnnnnnnnnnnnnnnnnnnattgttaaattgagacaagtaattgaataatttgtcctatttttattttaaaaaaagtgaatggactgaaatgttaaatgtgaatgtacatttcttaattgcaacttttctactgagtgtttgcactata

SEQ ID NO: 2105 - DNA, 482 bp, Homo sapiens
  misc_feature (217)..(243): n includes a, c, g, or t, or contains no nucleotide
  misc_feature (288)..(302): n includes a, c, g, or t, or contains no nucleotide
aacagcagcttcgacctggtgctgctgggcatgggtgccgacgggcacacagcctccctcttcccacagtcacccactggcctggatggcgagcagctggtcgtgctgaccacgagcccctcccagccacaccgccgcatgagccttagcctgcctctcatcaaccgcgccaagaaggtggcagtcctggtcatgggcaggatgaagcgtgagatcnnnnnnnnnnnnnnnnnnnnnnnnnnngagcccaagaagtggcccatctcgggtgtcctgccgcactccggnnnnnnnnnnnnnnncatggactacgacgccttcctgggatgagggcgcctgtgccccttgcccgcttcgctcctgtgctttccttcgcccgtgtcttccctcccttctcggccccgccacctgcccagcgtgccctggctctccagaaccttctatcccacagtcaggccccagagagggcaggacaagccttg

SEQ ID NO: 2106 - DNA, 505 bp, Homo sapiens
tctggatcgttgtggggactgcctgtttgccatttcccatcctgagaagcacagacttaaacaacaacaagtcctgctttgctgatcttggatacaagcaaatgaatgcagttgcgttggtcgggatgattacagttgctgagcttgcaggatttgtgatcccagtgatcatcatcgcatggtgtacctggaaaactactatatccttgagacagccaccaatggctttccaagggatcagtgagaggcagaaagcactgcggatggtgttcatgtgtgctgcagtcttcttcatctgcttcactccctatcatattaactttattttttacaccatggtaaaggaaaccatcattagcagttgtcccgttgtccgaatcgcactgtatttccaccctttttgcctgtgccttgcaagtctctgctgccttttggatccaattctttattactttatggcttcagagtttcgtgaccaactatcccgccatggcagttctgtgac

SEQ ID NO: 2107 - DNA, 377 bp, Homo sapiens
tcaagcaatcctcctgagtgatcccatttcttaatcagtgtagccccaagaaggctggggctatttaccagggtagaaaaaggagcttacctcccacctttggtcctaagtccctgccccctccccttcacaccataactaggtaacagtttgataactagggaagaaagcagaacagttaagcagccgccacatccccgctggctgggggcctcactccaggaaggggctggactggctgtcctttccagtggcctggctccgctgtgtggatggggccagaggcaggaaccctggtgaggaagctccagtcctgctctctacccagcccatcttgcctccatggtgcctctacctctgggcctcctctaacaggg

SEQ ID NO: 2108 - DNA, 576 bp, Homo sapiens
  misc_feature (128)..(128): n includes a, c, g, or t, or contains no nucleotide
  misc_feature (130)..(131): n includes a, c, g, or t, or contains no nucleotide
  misc_feature (133)..(133): n includes a, c, g, or t, or contains no nucleotide
  misc_feature (135)..(139): n includes a, c, g, or t, or contains no nucleotide
  misc_feature (141)..(141): n includes a, c, g, or t, or contains no nucleotide
  misc_feature (143)..(143): n includes a, c, g, or t, or contains no nucleotide
  misc_feature (155)..(155): n includes a, c, g, or t, or contains no nucleotide
  misc_feature (214)..(214): n includes a, c, g, or t, or contains no nucleotide
  misc_feature (216)..(216): n includes a, c, g, or t, or contains no nucleotide
  misc_feature (218)..(218): n includes a, c, g, or t, or contains no nucleotide
  misc_feature (220)..(221): n includes a, c, g, or t, or contains no nucleotide
  misc_feature (223)..(223): n includes a, c, g, or t, or contains no nucleotide
  misc_feature (290)..(290): n includes a, c, g, or t, or contains no nucleotide
  misc_feature (333)..(342): n includes a, c, g, or t, or contains no nucleotide
  misc_feature (346)..(346): n includes a, c, g, or t, or contains no nucleotide
ggagcatccttgaccttcatttaacttggctcacttctcttcagacttgggtagaagtgcagagccacagaattgctttccttccccgcctttgacatgaggccttcagtaaagagctacagaacatnannanannnnnanancacagatttttnttgcattagggcacagtgttaaattttttggaggtaaatatactatttataatcactanananannangagggggtatgtgtctcaggcttttctgaagttgcaagacttaaagaaataatccatctgcatcccnagtcctattttataaggatattcataaaaattccatggtgaannnnnnnnnnaaanaggtcctcccttcccagtttctgtgtaagtctttgcatttaagacatccaatcaataatgaaggaaatttttttctgaatgtaggtttgagtgaggggcacctctgctttcccttagcaaccctcatatacctccctgcaccgttacgctgtgatggcaactggggatagaaaaaaaatggggaaagacaggaatcctaaaagggagagttattacgtgccacaagccct

SEQ ID NO: 2109 - DNA, 451 bp, Homo sapiens
gttcccttcagtgacttgagtgttttagttatgcataagtatttctagcaaaggaagggtagaaaggaattgaaaattaatttacactagttgctacttgggaataaagggctttttgaggggggtatggatattaaatgttttcgttatatacttatccctattaaaacaggcagttgtttctttgaatatgcctaaataacagtattcttaaaatctgacagacaagtaacatgtcaattacttgatattccttgtctccagtaccacaggccactcttgacatcccatgtttgcctggataaagttcctcatttcaaacagtatacatacttctttgcagttcattatagtaaggcttaacctgtaaacagtatctgatggcccacctataaataaaattcagcattctatttttaataatttgtatgccaccaatttgtattatttg

SEQ ID NO: 2110 - DNA, 541 bp, Homo sapiens
  misc_feature (29)..(29): n includes a, c, g, or t, or contains no nucleotide
  misc_feature (33)..(33): n includes a, c, g, or t, or contains no nucleotide
  misc_feature (47)..(385): n includes a, c, g, or t, or contains no nucleotide
  misc_feature (410)..(410): n includes a, c, g, or t, or contains no nucleotide
gacataatgctatggccagaactgaaacnttangagttataattcannnnnnnnnnnnnnnnnnnnnnnnnnnnnnnnnnnnnnnnnnnnnnnnnnnnnnnnnnnnnnnnnnnnnnnnnnnnnnnnnnnnnnnnnnnnnnnnnnnnnnnnnnnnnnnnnnnnnnnnnnnnnnnnnnnnnnnnnnnnnnnnnnnnnnnnnnnnnnnnnnnnnnnnnnnnnnnnnnnnnnnnnnnnnnnnnnnnnnnnnnnnnnnnnnnnnnnnnnnnnnnnnnnnnnnnnnnnnnnnnnnnnnnnnnnnnnnnnnnnnnnnnnnnnnnnnnnnnnnnnnnnnnnnnnnnnnnnnnnnnnnnnnnnnnnnnnnnnnnnnnnnnnnnnnnnnnnnnnncaaggtagacagtgtctaccaccanagtggccataccaaagaggctaccgattccttcctgctacctggatccctgaagttgccctggtctctgcaccttctaaacctagttcttaagagctttccattacatgagctgtctcaaagccctccaat

SEQ ID NO: 2111 - DNA, 544 bp, Homo sapiens
  misc_feature (148)..(168): n includes a, c, g, or t, or contains no nucleotide
tctaccagagagtggccagctaagagcctgcctcaccccttaccaatgagggcaggggaagaccacctggcatgagggagaggggctgagggatggacttcagcccctctgctctgtaccctttttccttttgtccccggcagcaggnnnnnnnnnnnnnnnnnnnnnagaatggctgggcagagcagaggggcagcgatagactctggggatggagcaggacggggacgggaggggccggccacctgtctgtaaggagactttgttgcttcccctgcccccggaatccacagtgctctgcttctctgtgtcgccccgcccagccccctggtgtggagggaggggtctcgtttgtgcgcgtgggtgtagctttgtgcatcctctcccagtggagcgatcacctgtgcctcccctccccctttgtttgcccctgtgtggttggtcaaggagggatgtgagggaaatagggaccccccgacttgccctcctgcctcagtctttcccccaccctgtctcttccttgtccttctctggaaaatgccaa

SEQ ID NO: 2112 - DNA, 528 bp, Homo sapiens
  misc_feature (75)..(75): n includes a, c, g, or t, or contains no nucleotide
  misc_feature (81)..(81): n includes a, c, g, or t, or contains no nucleotide
  misc_feature (99)..(99): n includes a, c, g, or t, or contains no nucleotide
  misc_feature (119)..(151): n includes a, c, g, or t, or contains no nucleotide
  misc_feature (171)..(171): n includes a, c, g, or t, or contains no nucleotide
  misc_feature (197)..(197): n includes a, c, g, or t, or contains no nucleotide
  misc_feature (202)..(202): n includes a, c, g, or t, or contains no nucleotide
  misc_feature (422)..(423): n includes a, c, g, or t, or contains no nucleotide
ctgaaaggaacactggcttgaaggactgcagacaggctctgaggggcacgccctcctcagcgagaggcagcaagntggccnacagtgtcactggtcagntgcttctcaccacgggaaannnnnnnnnnnnnnnnnnnnnnnnnnnnnnnnnaagcggcgccacagaccccngggtctccttggctgtctgtgggccnccccntggccaccttgtcctggctcgcagggtgcaggagcgcctcgttctctgggtggccggcttgctgctccggtttgggctgtcttaccataacaccgtcccagggctctgcaggccactgtgagcgctggctccctgggcagtgctcctccgtgtggactgtgcctcaggccagggctcaccagctggggtcctgtccggaaggatgggatctttctggganntgcgccggacagagtggggagctcctagtttgtggggggaagctttgatatccatgccacgtccatccaccccaccccttttcgtcacgagcacaatggtcttac

SEQ ID NO: 2113 - DNA, 305 bp, Homo sapiens
  misc_feature (68)..(84): n includes a, c, g, or t, or contains no nucleotide
  misc_feature (175)..(191): n includes a, c, g, or t, or contains no nucleotide
  misc_feature (193)..(213): n includes a, c, g, or t, or contains no nucleotide
  misc_feature (242)..(242): n includes a, c, g, or t, or contains no nucleotide
agcacgacctcaagagcctgatggagaccatgaaacagcccttcctgccaggggaggtgaagaccctnnnnnnnnnnnnnnnnnggggggtgaaacacctgcacgacaactggatcctgcaccgtgacctcaagacgtccaacctgctgctgagccacgccggcatcctcaagcnnnnnnnnnnnnnnnnngnnnnnnnnnnnnnnnnnnnnnctcctggcgtcttaggaatactccacggncgtggacatgtggtcagtgggctgcatcttcggggagctgctgactcagaagcctctgttccc

SEQ ID NO: 2114 - DNA, 487 bp, Homo sapiens
tggcaaggagtctgcctccatgctgcagtgttcgagtggattgtaggtgcaagatggaaaggattgtaggtgcaagctgtccagagaaaagagtccttgttccagccctattctgccactcctgacagggtgaccttgggtatttgcaatattcctttgggcctctgcttctctcacctaaaaaaagagaattagattatattggtggttctcagcaagagaaggagtatgtgtccaatgctgccttcccatgaatctgtctcccagttatgaatcagtgggcaggataaactgaaaactcccatttaagtgtctgaatcgagtgagacaaaattttagtccaaataacaagtaccaaagttttatcaagtttgggtctgtgctgctgttactgttaaccatttaagtggggcaaaaccttgctaattttctcaaaagcatttatcattcttgttgccacagctggagctctcaaactaaaagacat

SEQ ID NO: 2115 - DNA, 572 bp, Homo sapiens
  misc_feature (32)..(74): n includes a, c, g, or t, or contains no nucleotide
  misc_feature (155)..(155): n includes a, c, g, or t, or contains no nucleotide
gcaccctgtaaaccttttagagatttgaagtnnnnnnnnnnnnnnnnnnnnnnnnnnnnnnnnnnnnnnnnnnntgctgtcggtgtgtctgtgttggacaaaacaatctgtaatctacagcaaagtacattctacattccgttcatggggcacancccaggggaataagaataaaatgctattatgactaagttgtaaacctatgcacatcccttgcattttgggcaactttataaaaaaaaagaaactgatttttattaataataatcatgtagtgaaatgtgtttgtaattttgtctcaatttaatttgttgtaaggtggggtggggggaattgctggtttcaccatttcagatctgtgttgtctaagagtattaacgttttaattaagcaaagaaatgatttttaatctgtatgtaattgttttaaagcacccattttaagagaaaatactgtgcaatgaagaaaccagtttaggcatttgctataaactgaaatattccaaaagaatcatctataacagccctgtaaattcctttaaaatgataactaacaggacagtttgaccaatt

SEQ ID NO: 2116 - DNA, 475 bp, Homo sapiens
taagtaataattcgctggtgagcctgacctacgtgtccttccgcaacctgacacatctagaaagcctccacctggaggacaatgccctcaaggtccttcacaatggcaccctggctgagttgcaaggtctaccccacattagggttttcctggacaacaatccctgggtctgcgactgccacatggcagacatggtgacctggctcaaggaaacagaggtagtgcagggcaaagaccggctcacctgtgcatatccggaaaaaatgaggaatcgggtcctcttggaactcaacagtgctgacctggactgtgacccgattcttcccccatccctgcaaacctcttatgtcttcctgggtattgttttagccctgataggcgctattttcctcctggttttgtatttgaaccgcaaggggataaaaaagtggatgcataacatcagagatgcctgcagggatcacatggaagggta

SEQ ID NO: 2117 - DNA, 318 bp, Homo sapiens
  misc_feature (104)..(118): n includes a, c, g, or t, or contains no nucleotide
  misc_feature (159)..(159): n includes a, c, g, or t, or contains no nucleotide
ccagccgggttctcatggtgctcaaacccgctcccctcccctacgtcctgcactttctcggaccagtccccccactcccgacccgaccccagccccacctgagnnnnnnnnnnnnnnntactgtaggggaagaagtgggaactgaaatggtattttgtnaaaaaaaataaataaaataaaaaaattaaaggttttaaagaaagaactatgaggaaaaggaaccccgtccttcccagccccggccaactttaaaaaacacagaccttcacccccacccccttttctttttaagtgtgaaacaacccagggccagggcct

SEQ ID NO: 2118 - DNA, 476 bp, Homo sapiens
  misc_feature (400)..(414): n includes a, c, g, or t, or contains no nucleotide
  misc_feature (422)..(438): n includes a, c, g, or t, or contains no nucleotide
aactatggccggaacctccgcagctctccctctgcagagttccctaccctaagagaatgttaccacctgaacagtcctcggtgaatctgagaggagaggatggggtaaggcagaagcaccagctgtactactagaagggagcttttggtggtagatcccctggtgtctccaacctgactaggtggacagagctcaaagaggccctcttaccgctagcgaggtgataggacatctggcttgccacaaaggtctgttcgaccagacatatcctagctaagggatgtccaaacatcagaatgtgaggccaaccttctatcagagttaaacttttgacaagggaacaaatctcaaactgatccatcagtcatgtagctagctgtagagcttgcaacttaatagnnnnnnnnnnnnnnngccatgtnnnnnnnnnnnnnnnnntttggtttttttttccccttcagttttaatgttatgtg

SEQ ID NO: 2119 - DNA, 163 bp, Homo sapiens
cacccgtgaagagaagcctgctgtcaccgcagcccccaagaaatagatgccctttcttgaattgcattttttaaaacaagaaagtttccccaccagtgaatgaaagtcttgtgactagtgctgaagcttattaatgctaagggcaggcccaaattatcaagct

SEQ ID NO: 2120 - DNA, 328 bp, Homo sapiens
  misc_feature (96)..(96): n includes a, c, g, or t, or contains no nucleotide
  misc_feature (106)..(106): n includes a, c, g, or t, or contains no nucleotide
  misc_feature (110)..(112): n includes a, c, g, or t, or contains no nucleotide
  misc_feature (114)..(115): n includes a, c, g, or t, or contains no nucleotide
  misc_feature (180)..(180): n includes a, c, g, or t, or contains no nucleotide
  misc_feature (206)..(206): n includes a, c, g, or t, or contains no nucleotide
  misc_feature (212)..(212): n includes a, c, g, or t, or contains no nucleotide
  misc_feature (228)..(228): n includes a, c, g, or t, or contains no nucleotide
  misc_feature (235)..(235): n includes a, c, g, or t, or contains no nucleotide
  misc_feature (253)..(253): n includes a, c, g, or t, or contains no nucleotide
  misc_feature (267)..(267): n includes a, c, g, or t, or contains no nucleotide
  misc_feature (274)..(274): n includes a, c, g, or t, or contains no nucleotide
  misc_feature (280)..(280): n includes a, c, g, or t, or contains no nucleotide
  misc_feature (282)..(282): n includes a, c, g, or t, or contains no nucleotide
tagtctgtatgtttcaagcccttctgtaaaatatgaagaaaagtgctcttagcattctgtgtaaaactgtactgttaaatatatgtgtgtaatcanaaaaaaaaanaaannnannggaggcctgggaacagggtttatactaagtagtggaggagcgtatggttaagcccaaaggggcangaacaagaaagccacgggattgtatngaaatncaaacatgagtttgtnggtgtangactgctgtatgcagttnggaaaggacacgtngagagtnagctcnantggcagcagaggcagtttggaataagctgcggcaagttgaagaagc

SEQ ID NO: 2121 - DNA, 509 bp, Homo sapiens
  misc_feature (110)..(126): n includes a, c, g, or t, or contains no nucleotide
  misc_feature (342)..(342): n includes a, c, g, or t, or contains no nucleotide
  misc_feature (409)..(410): n includes a, c, g, or t, or contains no nucleotide
  misc_feature (417)..(421): n includes a, c, g, or t, or contains no nucleotide
  misc_feature (442)..(467): n includes a, c, g, or t, or contains no nucleotide
tacgtacagattctgcgataatgtgtggacttttgtactgaatgatgttgaattcagagaggtgacagaacttattaaagtggataaagtgaaaattgtagcctgtgatnnnnnnnnnnnnnnnnncaatactacagaatgaatagaaaaaatatgacttttttacaccatcttctgttattcattgcttttgaagagaagcatagaagagactttttatttattctagaattgcagaaatgactacactgtgctataccagagaattccagtagaaagaaacttgtaactctgtagcctcttacatcacctttattatacagcatgaaaaaccataacttntttttaaggacaaaagttgttgccttcctaagaaccttctttaataaactcattttaaaactctgannaaaaaannnnnaagctattaaggtagcaatannnnnnnnnnnnnnnnnnnnnnnnnncatttcctttgcaaggaacatgatgccctttcagaatgctta

SEQ ID NO: 2122 - DNA, 539 bp, Homo sapiens
  misc_feature (31)..(46): n includes a, c, g, or t, or contains no nucleotide
  misc_feature (140)..(234): n includes a, c, g, or t, or contains no nucleotide
tgagcaacagtgcagaggtgaaacgggagcnnnnnnnnnnnnnnnngggaggctgttgctatcgggtcaacaacagcttggaccatgagtaccaaccacggcccgtggaggtgatcatcagttctgcgaaggagatggtnnnnnnnnnnnnnnnnnnnnnnnnnnnnnnnnnnnnnnnnnnnnnnnnnnnnnnnnnnnnnnnnnnnnnnnnnnnnnnnnnnnnnnnnnnnnnnntggaaaaggccaaggttgaagtcggtgtggccacggcgcttggaatcctggttgttgctggatgctcttttgcgattaggagataccaaaaaaaagcgacagcctgaagcagccacaaaatcctgtgttagaagcagctgtgggggtcccagtggagatgagcctcccccatgcctccagcagcctgaccctcgtgccctgtctcaggcgttctctagatcctttcctctgtttccctctctcgctggcaaaagtatgatctaattgaaacaagactgaaggatcaataaacagccatctgcccc

SEQ ID NO: 2123 - DNA, 506 bp, Homo sapiens
agctctgaaacattgatgatctaagaggtattgatttctgaatattcataattgtgttacctgggtatgagagtgttggaagctgaattctagccctagattttggagtaaaaccccttcagcacttgaccgaaataccaaaaatgtctccaaaaaattgatagttgcaggttatcgcaagatgtcttagagtagggttaaggttctcagtgacacaagaattcagtattaagtacataggtatttactatggagtataattctcacaattgtattttcagttttctgcccaatagagtttaaataactgtataaatgatgactttaaaaaaatgtaagcaacaagtccatgtcatagtcaataaaaacaatcctgcagttgggttttgtatctgatccctgcttggagttttagtttaaagaatctatatgtagcaaggaaaaggtgctttttaattttaatccctttgatcaatatggcttttttccaaattggctaatggatc

SEQ ID NO: 2124 - DNA, 124 bp, Homo sapiens
agtgatggctgttttcttatcccatgcctgtacttttcagcggctccttgccagacatcataggtcattattaattattggtttgctatttcattcttttccaatgctcttaatgattgtacgg

SEQ ID NO: 2125 - DNA, 567 bp, Homo sapiens
  misc_feature (104)..(123): n includes a, c, g, or t, or contains no nucleotide
  misc_feature (430)..(500): n includes a, c, g, or t, or contains no nucleotide
  misc_feature (515)..(516): n includes a, c, g, or t, or contains no nucleotide
gcttccatggtggtttcagaaagggcagcccctccccatggtgcagtgaagaaaatgttttacaatggctgggtttgggcagtggagaggggacttggataggnnnnnnnnnnnnnnnnnnnntaggggtgggggagaatggctctggctacgacttgggacggaagtggcctgagaagagtcgagtgatatggcttgtagggtgaggcgtgggatccagagagaagcaccccaccacacacacccttccccactcccgtgatgaaacagctaggttaataggaggacagaaccaacgggtctgtgggactggcccacccctcttcccccttcccctgcgccctccctccctccacacctccacccgtcctggggtggttggaggcctggtctggagcccctatcctgcaccctctgctatgtctgtgannnnnnnnnnnnnnnnnnnnnnnnnnnnnnnnnnnnnnnnnnnnnnnnnnnnnnnnnnnnnnnnnnnnnnnctaccctttcccaannccttcggtattgttcaaagaacccccctccccaaggaagaacaaatatgat

SEQ ID NO: 2126 - DNA, 372 bp, Homo sapiens
  misc_feature (242)..(263): n includes a, c, g, or t, or contains no nucleotide
atccagcacaaaagaagtcagattccaagactgccccacacctccaggattacacagtggagaatctcatccgcatgggtgtggctggcttggtcctgctgttcctcgggattctgttatttgaggctcagcacagccagagaagccccccaaggtgcagccaggaggcaaacagcagaaaggacaatgcacccttcagagtggtggagccttgggaacagatctgatgatctgaggaggtnnnnnnnnnnnnnnnnnnnnnntggggaagtgtctgctgagaatatcaaggggaagaagcatgggtcaggtgcaggaagatgtctgggtgtctgtagaagatgcttcctccattaaactgtggtgctttcc

SEQ ID NO: 2127 - DNA, 361 bp, Homo sapiens
cctctcagaacatactgattgggaggtgcgtgttcagcagaacctgcacacaggacagcgggaaaaatcgatgagcgccacctctttaaaaactcacttacgttgtcctttttcactttgaaaagttggaaggactgctgaggcccagtgcatatgcaatgtatagtgtctattatcacattaatctcaaagagattcgaatgacggtaagtgttctcatgaagcaggaggcccttgtcgtgggatggcatttggtctcaggcagcaccacactgggtgcgtctccagtcatctgtaagagcttgctccagattctgatgcatacggctatattggtttatgtagtcagttgcattcatta

SEQ ID NO: 2128 - DNA, 305 bp, Homo sapiens
  misc_feature (204)..(204): n includes a, c, g, or t, or contains no nucleotide
attacttgatgaaaagcctgccagccttgaagcttccccatatgatacaggttttatgaacagtgcaacagggatgcatcaggcaggagtgactggcctattatggactggaccacaaagtattcagagtcaacactcagtcaatctgccaagcacagaagtctgtcttaggcatccagcacctctcttcccaccacacccctngtgacaatgtgtgctctcctgcatatctggcctcaggaatcttcctgtgaatatccattctgtgtctatgccaggactaaatgccccatggtctcccaaag

SEQ ID NO: 2129 - DNA, 380 bp, Homo sapiens
  misc_feature (229)..(229): n includes a, c, g, or t, or contains no nucleotide
  misc_feature (231)..(231): n includes a, c, g, or t, or contains no nucleotide
aggcagcaacagcagcagtggcccccccttgggtccctcacacagagacaccatcagccggagtggtataatcttacggagtccccggccagactttcggcctagggaaccttttctcagcagagacccatttcacagtttaaagagacccaggccaccttttgctaggggccctccgttctttgcaccaaaacgcccattcttccctcccaggtactgatggaaaccnangggaaaggcattttgaacagtctagagaacattggaagtaggagtttggtttattgttgttgtttttatttgttttctctttctcgattttttttttattataacaaagggcctctcttccaaagtaagaaatcacatacgcttacgtt

SEQ ID NO: 2130 - DNA, 440 bp, Homo sapiens
  misc_feature (89)..(89): n includes a, c, g, or t, or contains no nucleotide
atactagggtctgctgagctgttgtcactgatcggtgggcgctgggggggtagggtagcacaccagctgtcccaggctttgctccgggnggtaactgcacttgggcagggaatatagccttcctgggcacaactagctgacaatgacaggttgactgtgtacccccaaccaaggagctggggcccaaggccagtcctgccccagagacactccaagtccgccaggggcacagaccagttctgcagtgactgtccctggacaatgggtctttattctgagtttcctatggtttacaaagagggccccagcccagccccaccacagatcccagagataggggcccagtctccatgggggcaaggagcatagagatgttttccaggaaggggctcagaagctgcactaggccccgagtccccatgtgtctccttgaattgatg

SEQ ID NO: 2131 - DNA, 484 bp, Homo sapiens
  misc_feature (38)..(38): n includes a, c, g, or t, or contains no nucleotide
  misc_feature (61)..(61): n includes a, c, g, or t, or contains no nucleotide
  misc_feature (63)..(63): n includes a, c, g, or t, or contains no nucleotide
  misc_feature (285)..(285): n includes a, c, g, or t, or contains no nucleotide
  misc_feature (305)..(305): n includes a, c, g, or t, or contains no nucleotide
  misc_feature (312)..(312): n includes a, c, g, or t, or contains no nucleotide
  misc_feature (399)..(399): n includes a, c, g, or t, or contains no nucleotide
acccagacgaagaccttccacgaggccagcgaggactngcatctcgcgcgggggcaccctngngcacccctcagactggctcggagaacgacgccctgtatgagtacctgcgccagagcgtgggcaacgaggccgagatctggctgggcctcaacgacatggcggccgagggcacctgggtggacatgaccggcgcccgcatcgcctacaagaactgggagactgagatcaccgcgcaacccgatggcggcaagaccgagaactgcgcggtcctgtcaggcgcgnccaacggcaagtggttcgancaagcgntgccgcgatcagctgccctacatctgccagttcgggatcgtgtagccggcggggcgggggccgtggggggcctggaggagggcaggngccgcgggaggccgggaggagggtggggaccttgcagcccccatcctctccgtgcgcttggagcctctttttgcaaataaagttg

SEQ ID NO: 2132 - DNA, 328 bp, Homo sapiens
agctatcaaaaggtcaatcttagaaagctctccaagaactcctacaccattcaaacatgcacttgcagctcaagaaattaaatacggtcccctgaagatgctacctcagacaccctctcatctagtagaagatctgcaggatgtgatcaaacaggaatctgatgaatctggaattgttgctgagtttcaagaaaatggaccacccttactgaagaaaatcaaacaagaggtggaatctccaactgataaatcaggaaacttcttctgctcacaccactgggaaggggacagtctgaatacccaactgttcacgcagacctcgcctgtg

SEQ ID NO: 2133 - DNA, 532 bp, Homo sapiens
  misc_feature (217)..(245): n includes a, c, g, or t, or contains no nucleotide
  misc_feature (251)..(251): n includes a, c, g, or t, or contains no nucleotide
  misc_feature (260)..(260): n includes a, c, g, or t, or contains no nucleotide
  misc_feature (302)..(302): n includes a, c, g, or t, or contains no nucleotide
  misc_feature (317)..(317): n includes a, c, g, or t, or contains no nucleotide
tcttggatgggagctgtggcccacctcaaaaaaaaaggagcactctggacacgtgttcccacctgttgggtcccgtgtcttctgactgagggcattcaggagtaaatgcacaggtcggtccaggcccgtctgggtttgggatgcactgagttggaggttatgaaagctttggatcctcttctcctctgctgggcctcgcagcatcccaaggtcacannnnnnnnnnnnnnnnnnnnnnnnnnnnnctttgnccacttcanccctcgtgtctctctttgttgctaagttctttccctcttggnaggacagatctgccnggctgctatttatagttgcctttggcctttcactgctctgcgatttggcaggaaataaggcgattaaccctatgtgtccacaagcctcaagccttgtttcaggtcaccctcaaatcacactctctttaggcaaaacaggaaacttcttaagtgacaaattttaatgccagacatttaaggagaggattattgttgattccatttactcatgcttg

SEQ ID NO: 2134 - DNA, 618 bp, Homo sapiens
  misc_feature (35)..(78): n includes a, c, g, or t, or contains no nucleotide
  misc_feature (142)..(236): n includes a, c, g, or t, or contains no nucleotide
  misc_feature (274)..(346): n includes a, c, g, or t, or contains no nucleotide
  misc_feature (529)..(547): n includes a, c, g, or t, or contains no nucleotide
ggatcgtctcccagggtaacctcgaagagtgagtnnnnnnnnnnnnnnnnnnnnnnnnnnnnnnnnnnnnnnnnnnnnctcttctgcccctcccttctgccaacacagcagtcagcttctctcgtgagctttctggtaggannnnnnnnnnnnnnnnnnnnnnnnnnnnnnnnnnnnnnnnnnnnnnnnnnnnnnnnnnnnnnnnnnnnnnnnnnnnnnnnnnnnnnnnnnnnnnngctgtttcttgttctcttcgttgccatcgttctcaccnnnnnnnnnnnnnnnnnnnnnnnnnnnnnnnnnnnnnnnnnnnnnnnnnnnnnnnnnnnnnnnnnnnnnnnnngcatcttggtgaacatttacttgatggtccagttaagtgcagacacttgggtcagattcagcatttggatggcaattggcttcctgatttacttttcttatggcattagacacagcctggagggtcatctgagagatgaaaacaatgaagaagatgcttatccagacaacgttcatgcagcannnnnnnnnnnnnnnnnnnttcaagcaaatgaccatcacccaagaaatctcagttcacctttcatattccatgaaaagacaagtgaattc

SEQ ID NO: 2135 - DNA, 516 bp, Homo sapiens
  misc_feature (28)..(28): n includes a, c, g, or t, or contains no nucleotide
  misc_feature (41)..(41): n includes a, c, g, or t, or contains no nucleotide
  misc_feature (288)..(315): n includes a, c, g, or t, or contains no nucleotide
  misc_feature (410)..(410): n includes a, c, g, or t, or contains no nucleotide
  misc_feature (421)..(421): n includes a, c, g, or t, or contains no nucleotide
  misc_feature (423)..(423): n includes a, c, g, or t, or contains no nucleotide
  misc_feature (446)..(446): n includes a, c, g, or t, or contains no nucleotide
ccagttaatcagtctctgtacttgtttnccctttttgaaancaagtgtcttggttaactaattctgttttatggttgtgctaaattcatagcaggtgccttattctttgcttttagtcaaaccattccatatcagaattttccttggtttactatagatatttggctttaagttgttgtttgtgttttttaatgtacaatgttctgataaatttgactgttaaattgctatagctagcaatcattttacatatgtaaaattgcattccctttgtatttcatgtgtaannnnnnnnnnnnnnnnnnnnnnnnnnnnggttggattatgcatgtttaggtaaacgaaagctgtgtcttacttgatttattctttaaaaataaagttccctgaatatttgaaaaaaaaaaaanaaaaaaaaaanantttacagttatctgagtgtaccntttatagttagtaggaaaatgattttaaaggaatgtttagtattgtacttaaatgggtatgccagagggc

SEQ ID NO: 2136 - DNA, 475 bp, Homo sapiens
gagcagacccaagcttgtggcaccaggcatctgatggtgccaggaaagccactggaattgtcacacggcgagcacagagggccggccaccagtcctcgatgcttctgaaccctgaaccccgatgacatcttacgaggtggacgttggactgttcatgcgcatcgggtgtcagtgactcatggagaagaaatggggtaaatttttagtgatgttgctaatcattgaattctgttctctattaaattaagaaaatgttccaaaagccataagcctgaagattggccctgtgcacgcacgcacacacacacacacacacacacacacacacacacacacacgaaggagagagagagaaaactgatggggaaaacaagctgtgtcttcttaactgcccaagtgaaaagcaaccaagtccaggaaattacaatagctgttaaggaaaggaaataatggtacagatctttttctgtctatc

SEQ ID NO: 2137 - DNA, 578 bp, Homo sapiens
  misc_feature (30)..(100): n includes a, c, g, or t, or contains no nucleotide
  misc_feature (117)..(132): n includes a, c, g, or t, or contains no nucleotide
  misc_feature (182)..(215): n includes a, c, g, or t, or contains no nucleotide
  misc_feature (290)..(290): n includes a, c, g, or t, or contains no nucleotide
  misc_feature (498)..(518): n includes a, c, g, or t, or contains no nucleotide
gttcccatgagtcacttcctgaacccattnnnnnnnnnnnnnnnnnnnnnnnnnnnnnnnnnnnnnnnnnnnnnnnnnnnnnnnnnnnnnnnnnnnnnnntatatgcatacgtttcnnnnnnnnnnnnnnnnccattgtccacaaaactgatgttcttttggggttttatgtacagacttgnnnnnnnnnnnnnnnnnnnnnnnnnnnnnnnnnntgactccgcattgaagctctctgagttctttgattttaagttgggtttatggaattttttcaaatgttggaaggngtgtggttcttcctgccctccctccccttttggaaatatgaaagcaaatgtttagaagaattccttttgaaaagctgtgtcgtgttccctgtgaaactgagcaggtgtgtgttggcgcgctaagtgccacatgcttgtgtgtagaggaggaggtggccctgccggctccgcgctgctgtgcctgtgatccctacctgctccccgctcnnnnnnnnnnnnnnnnnnnnngcactcctttgtcatatactctgcatcactgtcatactcacaacttcgtgaataaagttg

SEQ ID NO: 2138 - DNA, 284 bp, Homo sapiens
caaatgctagtgtgttttaactagctaaacaaaactaagttaaatgaacatttaaaagtttccctagcgggccattccttagcaaaatgttggaatccctgttgctacattgactaaaaggtcatgatgaatggaatatgtaagacttggctcatagaaacctaatcagatggttagaggtgttggcagtttaggacctgctgtcataaatgtgtgaacaaccttttgtaacctaacctattgacctgcatgttttttctttaccccaattcattacatggagg

SEQ ID NO: 2139 - DNA, 461 bp, Homo sapiens
  misc_feature (378)..(381): n includes a, c, g, or t, or contains no nucleotide
ggccagtgagccagaaattgattaaggctttctttggtaggtaaatctagagtttatacagtgtacatgtacatagtaaagtatttttgattaacaatgtattttaataacatatctaaagtcatcatgaactggcttgtacatttttaaattcttactctggagcaacctactgtctaagcagttttgtaaatgtactggtaattgtacaatacttgcattccagagttaaaatgtttactgtaaatttttgttcttttaaagactacctgggacctgatttattgaaatttttctctttaaaaacattttctctcgttaattttcctttgtcatttcctttgttgtctacattaaatcacttgaatccattgaaannnnttcaagggtaatcttgggtttctagcaccttatctatgatgtttcttttgcaattggaataatcacttggtcaccttgcc

SEQ ID NO: 2140 - DNA, 526 bp, Homo sapiens
  misc_feature (123)..(137): n includes a, c, g, or t, or contains no nucleotide
  misc_feature (200)..(200): n includes a, c, g, or t, or contains no nucleotide
  misc_feature (202)..(276): n includes a, c, g, or t, or contains no nucleotide
  misc_feature (366)..(380): n includes a, c, g, or t, or contains no nucleotide
cccagttctagtagagcactttttttaaagctcccattttgtaaccactagtttgcggttgacttgagtactctggtgacttcctgcgtcaagcgttctcaagctgtgagaatgtgcgcagcnnnnnnnnnnnnnnntctcggagagttaagtcttcccttgaaggcagggaagcaggatggatacacatatatcacacncnnnnnnnnnnnnnnnnnnnnnnnnnnnnnnnnnnnnnnnnnnnnnnnnnnnnnnnnnnnnnnnnnnnnnnnnnnnccacatgcagcttccctggagggcaggccggaggcgctcccgcccctgggcttgaggatgctgcaccccgtgggcttccaggcctgcccnnnnnnnnnnnnnnngcctctgtccctggcggccatcctcaggccgattttgaccagcaatgatagactcttcttaaccctttcaaaataaatttttcagtgggacagaaaggagagttaaaaaacatttttttaaaggtggtaacatctgacccacaaag

SEQ ID NO: 2141 - DNA, 482 bp, Homo sapiens
  misc_feature (116)..(116): n includes a, c, g, or t, or contains no nucleotide
  misc_feature (180)..(180): n includes a, c, g, or t, or contains no nucleotide
  misc_feature (196)..(196): n includes a, c, g, or t, or contains no nucleotide
  misc_feature (210)..(210): n includes a, c, g, or t, or contains no nucleotide
  misc_feature (216)..(216): n includes a, c, g, or t, or contains no nucleotide
  misc_feature (264)..(264): n includes a, c, g, or t, or contains no nucleotide
ttttcggtatctgctgttcacagctctccactgtaatccgaatactttgccagtgcactaatctctttggagataaaattcattagtgtgttactaaatgttaattttcttttgcnggaaaatacagtaccgtgtctgaattaattattaatatttaaaatacttcattccttaactctnccctcatttgctttgncccacagcctattncagttncctttgtttggcaggattctgcaaaatgtgtctcacccactactgagnattgttcagcccctgatgtatttgtattgatttgtttctggtggtagcttgtcctgaaatgtgtgtagaaagcaagtattttatgataaaaatgttgtgtagtgcatgctctgtgtggaattcagaggaaaacccagattcagtgattaacaatgccaaaaaatgcaagtaactagccattgttcaaatgacagtggtgctatttctcttttgtggcc

SEQ ID NO: 2142 - DNA, 305 bp, Homo sapiens
  misc_feature (175)..(197): n includes a, c, g, or t, or contains no nucleotide
ctcgctggcggcttttcctggaggcgctggttgacagtgtggcccagggcatccctttccaacagcaccagtttgacaaaaatgtcttccaactggagcaggccttcgttctcagcaagcagaggtaccccagccagccgcgaggagacactgtggacctggccaagaagatctnnnnnnnnnnnnnnnnnnnnnnngtggccggctcttggtgatagattcgccaccactgggccttgttttccgctaattccagggcagattccagggcccagagctggacagacatcacaggataacccagg

SEQ ID NO: 2143 - DNA, 577 bp, Homo sapiens
  misc_feature (115)..(133): n includes a, c, g, or t, or contains no nucleotide
  misc_feature (224)..(239): n includes a, c, g, or t, or contains no nucleotide
  misc_feature (334)..(334): n includes a, c, g, or t, or contains no nucleotide
  misc_feature (336)..(337): n includes a, c, g, or t, or contains no nucleotide
  misc_feature (339)..(339): n includes a, c, g, or t, or contains no nucleotide
  misc_feature (341)..(394): n includes a, c, g, or t, or contains no nucleotide
  misc_feature (396)..(399): n includes a, c, g, or t, or contains no nucleotide
  misc_feature (487)..(501): n includes a, c, g, or t, or contains no nucleotide
gaggcgcagaaccaggcgctgccctccggacacagcaagcagacgcagtacgtgctggatgtgcagtactcccccacggcccggattcatgcctcccaagctgtggtgagggagnnnnnnnnnnnnnnnnnnncgtgtgctgtcacggggaaccccaggccaaaccagatccgctggaaccgcgggaatgagtctttgccggagagggcggaggccgtgggagnnnnnnnnnnnnnnnngggtctggtatccgcggataacggcacctacacttgcgaggcgtccaataagcacggccatgcgagggcgctctacgtacttgtggtctacggtnanngnannnnnnnnnnnnnnnnnnnnnnnnnnnnnnnnnnnnnnnnnnnnnnnnnnnnnnannnncagacgtcggttccctatgccattgtgggcggcatcctggcgctgctggtgtttctgatcatatgtgtgctagtgggcatggtctggnnnnnnnnnnnnnnnaagggttcctatctgacccacgaagccagtggcttggatgaacagggagaagcaagagaagccttcctcaatggca

SEQ ID NO: 2144 - DNA, 188 bp, Homo sapiens
  misc_feature (30)..(44): n includes a, c, g, or t, or contains no nucleotide
cctggaactgtgaccacgtgctcatgcacnnnnnnnnnnnnnnnggcgccgaagccaatctcatggatatcaacggctgtgctgccatccagtacgtgctgaaggtcacctccgtgcgccctgctgcccagcctgagatctgctaccagctcctgttgaaccatggggctgcccgaatataccctcca

SEQ ID NO: 2145 - DNA, 363 bp, Homo sapiens
  misc_feature (141)..(151): n includes a, c, g, or t, or contains no nucleotide
  misc_feature (188)..(189): n includes a, c, g, or t, or contains no nucleotide
  misc_feature (191)..(191): n includes a, c, g, or t, or contains no nucleotide
  misc_feature (193)..(197): n includes a, c, g, or t, or contains no nucleotide
  misc_feature (260)..(260): n includes a, c, g, or t, or contains no nucleotide
gataactgatttctatggctttcaaagctaaaatatataatatactaaaccaactctaatattgcttcttgtgttttactgtcagattaaattacagcttttatggatgattaaattttagtacattttcaaaaaaaaaannnnnnnnnnntattgtttatagattaaagcgtttattttataatgannanannnnnttaaatgcgacagtagctcctttctgcctagtatctgcagaacactggctttaaactatactnagtaactggtgatttctctaggaacagacctcgcactttctgttctaaatatatttattcctactatacagtaaaatacatcagacaacatagaatagttttg

SEQ ID NO: 2146 - DNA, 115 bp, Homo sapiens
gctacttcctgaccaagatcttccacccgaacgtgggcgccaatggcgagatctgcgtcaacgtgctcaagagggactggacggctgagctgggcatccgacacgtactgctgac

SEQ ID NO: 2147 - DNA, 277 bp, Homo sapiens
tggccctacttccaggatggatgcatcacactcaaggacaggagcctggtccttccctgatggcctttggacccagggcctgacttgagccactccttccttcaggactctgcgggaggctggggccccatcttgatctttgagcccattcttctgggtgtgctttttgggaccatcactgagagtcaggagttttactgcctgtagcaatggccagagcctctggcccctcacccaccatggaccagcccattggccgagctcctggggagctcct

SEQ ID NO: 2148 - DNA, 503 bp, Homo sapiens
  misc_feature (35)..(35): n includes a, c, g, or t, or contains no nucleotide
  misc_feature (85)..(99): n includes a, c, g, or t, or contains no nucleotide
  misc_feature (103)..(103): n includes a, c, g, or t, or contains no nucleotide
  misc_feature (105)..(105): n includes a, c, g, or t, or contains no nucleotide
  misc_feature (126)..(126): n includes a, c, g, or t, or contains no nucleotide
  misc_feature (208)..(238): n includes a, c, g, or t, or contains no nucleotide
ttccagagccagaaagggtgccagttgggctcgcnctgcccacatgggacctggccccaggctgtcaccctccaccgagccacgnnnnnnnnnnnnnnnactnantgagcaggctgtggggtggancactggactccggggccccactggctggaggaagtggggtctggcctgttgatgtttacatggcgccctgcctcctggaggnnnnnnnnnnnnnnnnnnnnnnnnnnnnnnngcagggtctgggctgggcacctgacttggctggggaggaccagggccctgggcagggcagggcagcctgtcacccgtgtgaagatgaaggggctcttcatctgcctgcgctctcgtcggtttttttaggattattgaaagagtctgggacccttgttggggagtgggtggcaggtgggggtgggctgctggccatgaatctctgcctctcccaggctgtccccctcctcccagggcctcctgggggacctttgtattaagccaat

SEQ ID NO: 2149 - DNA, 504 bp, Homo sapiens
  misc_feature (133)..(133): n includes a, c, g, or t, or contains no nucleotide
  misc_feature (150)..(150): n includes a, c, g, or t, or contains no nucleotide
  misc_feature (182)..(182): n includes a, c, g, or t, or contains no nucleotide
  misc_feature (200)..(200): n includes a, c, g, or t, or contains no nucleotide
  misc_feature (202)..(202): n includes a, c, g, or t, or contains no nucleotide
  misc_feature (208)..(208): n includes a, c, g, or t, or contains no nucleotide
  misc_feature (260)..(260): n includes a, c, g, or t, or contains no nucleotide
  misc_feature (266)..(266): n includes a, c, g, or t, or contains no nucleotide
  misc_feature (344)..(361): n includes a, c, g, or t, or contains no nucleotide
  misc_feature (424)..(439): n includes a, c, g, or t, or contains no nucleotide
gtgtgggactcttcctgcttctgctccagcccctcacggaccccaagctctacggcagccttcccctttgtgtgcttttggagcgggcaggggactcagaggctcccctgtgctcctgacctatgctcctggnatacgctatgaactctnaccggctccccagccctccccaccaaggggtnactgcaggggaagggctngntggggntccccgagatctcaggaatttttgtaggggattgaagccagagctagttgcngtcccnagggaccaagagaaagaagcagatatccaaagggtgcagccccttttgaaaggggtgtttacgagcagctgtgagtgnnnnnnnnnnnnnnnnnncccaggagccacacactcccttcctcactttggactgctgcttctcttagctcctctgcctcnnnnnnnnnnnnnnnngttttttatttataaaacctctccccaccccccaccccccaacttcctgggttttctcattgtct

SEQ ID NO: 2150 - DNA, 510 bp, Homo sapiens
  misc_feature (72)..(72): n includes a, c, g, or t, or contains no nucleotide
  misc_feature (78)..(78): n includes a, c, g, or t, or contains no nucleotide
  misc_feature (80)..(80): n includes a, c, g, or t, or contains no nucleotide
  misc_feature (84)..(84): n includes a, c, g, or t, or contains no nucleotide
  misc_feature (87)..(88): n includes a, c, g, or t, or contains no nucleotide
  misc_feature (93)..(93): n includes a, c, g, or t, or contains no nucleotide
  misc_feature (99)..(99): n includes a, c, g, or t, or contains no nucleotide
  misc_feature (107)..(107): n includes a, c, g, or t, or contains no nucleotide
  misc_feature (109)..(109): n includes a, c, g, or t, or contains no nucleotide
  misc_feature (123)..(123): n includes a, c, g, or t, or contains no nucleotide
  misc_feature (125)..(125): n includes a, c, g, or t, or contains no nucleotide
  misc_feature (128)..(128): n includes a, c, g, or t, or contains no nucleotide
  misc_feature (130)..(130): n includes a, c, g, or t, or contains no nucleotide
  misc_feature (151)..(151): n includes a, c, g, or t, or contains no nucleotide
  misc_feature (164)..(164): n includes a, c, g, or t, or contains no nucleotide
  misc_feature (166)..(166): n includes a, c, g, or t, or contains no nucleotide
  misc_feature (179)..(179): n includes a, c, g, or t, or contains no nucleotide
  misc_feature (183)..(183): n includes a, c, g, or t, or contains no nucleotide
  misc_feature (204)..(204): n includes a, c, g, or t, or contains no nucleotide
  misc_feature (386)..(401): n includes a, c, g, or t, or contains no nucleotide
  misc_feature (407)..(422): n includes a, c, g, or t, or contains no nucleotide
acatttggcttgtacatgttgttcttgagaattctgcagttattctttgttccactgtatgtaataatatangttttncncctntcnnctganttttancggttttncntctttgttgctganantcngnaaacttgactatgatgtgtcntttgtgtggtttncntttgtggtttttntccntgtggaatttattcaacttcngggatctgtaggttatagttttcacaaattggaaatttttgacattacttcttcagacactttttctgtcttcccctccatcattctgggatttgaattacatgtatacagtaactgttgttgtttcataggtgactaactgggtaggggaatgtctggttcccttactatccggtgaagtnnnnnnnnnnnnnnnngtaggnnnnnnnnnnnnnnnnctttactttcccttgaactctaggctagttccagaacctttggtggactggaaagaggaaatagttatgccacaatttttagtacatg

SEQ ID NO: 2151 - DNA, 105 bp, Homo sapiens
cgcgttcctcgttaagcagaagaagtcagtagttattctcccatgaacgttcttgtctgtgtacagtttttagaacattacaaaggatctgtttgcttagctgtc

SEQ ID NO: 2152 - DNA, 584 bp, Homo sapiens
  misc_feature (208)..(290): n includes a, c, g, or t, or contains no nucleotide
  misc_feature (335)..(350): n includes a, c, g, or t, or contains no nucleotide
  misc_feature (411)..(426): n includes a, c, g, or t, or contains no nucleotide
  misc_feature (492)..(506): n includes a, c, g, or t, or contains no nucleotide
ccatgtcagtgactgttgtgtttgtggggtcaggtggggggcatggtatttgcaaaaaaaacaaattatggctaatttattattttgttgcagtggggttaactgtaaactcatgtaagagtctgtgatttcctcattggttgatctctctctctgtaatcctcattgcaaattttcaccaggacagcgttttttgattagaggggannnnnnnnnnnnnnnnnnnnnnnnnnnnnnnnnnnnnnnnnnnnnnnnnnnnnnnnnnnnnnnnnnnnnnnnnnnnnnnnnnntcgtgtttctgagcgactctactttcattgtttgccagcgtggcnnnnnnnnnnnnnnnnataaagcttgtgtacgttcaaaaaaaaaaaaaaaaaaaaaaaaaaaaaaaaacatgaattnnnnnnnnnnnnnnnngactttttattataacgctcctattttttctttatttcatggtacatgaaatgtaaagaaaactcnnnnnnnnnnnnnnnattattttgattttggcaaaaaaaaccccaaatcaatgcatgttatttattattttgtactattgtccatcccagacg

SEQ ID NO: 2153 - DNA, 376 bp, Homo sapiens
  misc_feature (121)..(139): n includes a, c, g, or t, or contains no nucleotide
tgcaattctggaggtacctttcttttttgcctttgctcctacctcccattccaggatgctggatcacccaaagctgttttactgccccctttctttttacaacctgttggatgcctgttgnnnnnnnnnnnnnnnnnnnttaaggttgccatcaaaggtgtggaggtagctgtgcttagggtgcgtttattcttcagggatcagtttgttgaatagcgttgtgtgttatggtaaccattctgaaggctcgtttggctttataaacaaacaaacattgttttattagtccgtggcggggagtgccccggtgcgcatagcacgggattcatgcagtggtctccttcacatcagaagcagtatattctaacgcggtggc

SEQ ID NO: 2154 - DNA, 510 bp, Homo sapiens
  misc_feature (54)..(55): n includes a, c, g, or t, or contains no nucleotide
  misc_feature (57)..(58): n includes a, c, g, or t, or contains no nucleotide
  misc_feature (62)..(62): n includes a, c, g, or t, or contains no nucleotide
  misc_feature (64)..(70): n includes a, c, g, or t, or contains no nucleotide
  misc_feature (73)..(73): n includes a, c, g, or t, or contains no nucleotide
  misc_feature (76)..(76): n includes a, c, g, or t, or contains no nucleotide
  misc_feature (78)..(78): n includes a, c, g, or t, or contains no nucleotide
  misc_feature (80)..(101): n includes a, c, g, or t, or contains no nucleotide
  misc_feature (325)..(347): n includes a, c, g, or t, or contains no nucleotide
  misc_feature (453)..(453): n includes a, c, g, or t, or contains no nucleotide
cctcactcaacgaaaactcggttggaaactgttccgcctggcagtccttttttnntnntttncnnnnnnnttnccntncnnnnnnnnnnnnnnnnnnnnnngacttgctcatttagactgttcacggagtctgaatctgccaacgtggtgttggaggctccaccttgaaaagggccacagtcagggcaactttccccatacaggaaaacttgaaaattacatcaacagtctacgtcacagccaaattatatttcctttataccaaacaaaactatggagaactaaaagtacatcacacaaaacgtttatagtgttttgcatgtgnnnnnnnnnnnnnnnnnnnnnnntagattagtgctttctagcaaacggttctgttaattagcgagtcactgttgattctgctgtggtggtaagttgataccgtgtaactaatcccgtggatgcctcctngttatttttgtccaaacgaagcagccgtggtagtagctgtctatgattcttgctcag

SEQ ID NO: 2155 - DNA, 342 bp, Homo sapiens
  misc_feature (44)..(68): n includes a, c, g, or t, or contains no nucleotide
  misc_feature (70)..(70): n includes a, c, g, or t, or contains no nucleotide
  misc_feature (180)..(180): n includes a, c, g, or t, or contains no nucleotide
  misc_feature (183)..(215): n includes a, c, g, or t, or contains no nucleotide
  misc_feature (228)..(228): n includes a, c, g, or t, or contains no nucleotide
aattgcaaaactgtttagaacgctaataaaatttatgcagttannnnnnnnnnnnnnnnnnnnnnnnntnaagatgatgcagatttttttacagttgtattgtggtgcagaactggattttctgtaacttaaaaaaaaatccacagttttaaaggcaataatcagtaaatgttattttcnggnnnnnnnnnnnnnnnnnnnnnnnnnnnnnnnnngtaaatcttaccncaataaatataaaaaaatcttgtcagttacttttcttttacatattttgctgtgcaaaattgttttatatcttgagttactaactaaccacgcgtgttgttcctatgtgctttt

SEQ ID NO: 2156 - DNA, 411 bp, Homo sapiens
tccacttccatctgggagccccaagagggcgtgggaaggggggccatagcccatcaagctcctgccctggctgggcccctagactagagggcagaggtaaatgagtccctgtccccacctccagtccctccctcaccagcctcacccctgtggtgggctttttaagaggattttaactggttgtggggagggaagagaaggacagggtgttggggggatgaggacctcctacccccttggccccctcccctcccccagacctccacctcctccagaccccctcccctcctgtgtcccttgtaaatagaaccagcccagcccgtctcctcttcccttccctggcccccgggtgtaaatagattgttataatttttttcttaaagaaaacgtcgattcgcaccgtccaacctg

SEQ ID NO: 2157 - DNA, 568 bp, Homo sapiens
  misc_feature (68)..(68): n includes a, c, g, or t, or contains no nucleotide
  misc_feature (90)..(90): n includes a, c, g, or t, or contains no nucleotide
  misc_feature (99)..(99): n includes a, c, g, or t, or contains no nucleotide
  misc_feature (104)..(104): n includes a, c, g, or t, or contains no nucleotide
  misc_feature (111)..(111): n includes a, c, g, or t, or contains no nucleotide
  misc_feature (119)..(119): n includes a, c, g, or t, or contains no nucleotide
  misc_feature (145)..(145): n includes a, c, g, or t, or contains no nucleotide
  misc_feature (150)..(150): n includes a, c, g, or t, or contains no nucleotide
  misc_feature (155)..(155): n includes a, c, g, or t, or contains no nucleotide
  misc_feature (158)..(158): n includes a, c, g, or t, or contains no nucleotide
  misc_feature (162)..(163): n includes a, c, g, or t, or contains no nucleotide
  misc_feature (172)..(172): n includes a, c, g, or t, or contains no nucleotide
  misc_feature (179)..(180): n includes a, c, g, or t, or contains no nucleotide
  misc_feature (192)..(192): n includes a, c, g, or t, or contains no nucleotide
  misc_feature (195)..(195): n includes a, c, g, or t, or contains no nucleotide
  misc_feature (199)..(200): n includes a, c, g, or t, or contains no nucleotide
  misc_feature (208)..(213): n includes a, c, g, or t, or contains no nucleotide
  misc_feature (215)..(216): n includes a, c, g, or t, or contains no nucleotide
  misc_feature (218)..(222): n includes a, c, g, or t, or contains no nucleotide
  misc_feature (233)..(233): n includes a, c, g, or t, or contains no nucleotide
  misc_feature (241)..(241): n includes a, c, g, or t, or contains no nucleotide
  misc_feature (247)..(265): n includes a, c, g, or t, or contains no nucleotide
  misc_feature (318)..(318): n includes a, c, g, or t, or contains no nucleotide
  misc_feature (321)..(323): n includes a, c, g, or t, or contains no nucleotide
  misc_feature (346)..(365): n includes a, c, g, or t, or contains no nucleotide
  misc_feature (389)..(403): n includes a, c, g, or t, or contains no nucleotide
ggattcactttctgatagttaacccccataaatgtgcacgtacctgtgtcttatctatattttaaccngggagactgttgtcctggcatnggagatganccatngatgctnggggttancctcacagtccccaccctttcaaagnttgancatanggnccanncccattggnccagaannccacagacacanccntaanncctgtggnnnnnngnnannnnnaatagattttnccatttgnagaggnnnnnnnnnnnnnnnnnnncttgtttgaaggaggtggtgatggtggatagaggtgaaggaggtagggagtgnccnnnccaagtgcaaaaataacaaatannnnnnnnnnnnnnnnnnnnaattctcacacattgatttgtttnnnnnnnnnnnnnnngaaacccccttttttagcttttgcttggggtgggggtaggagttaaggtttattcaatcctgtcctgggtagggcgaaagttaatctagccatgtgatttttcagaaaagtaagtggaacatgctgccacttttcaattctgtcagtgcttccacatggaaacaa

SEQ ID NO: 2158 - DNA, 589 bp, Homo sapiens
  misc_feature (219)..(219): n includes a, c, g, or t, or contains no nucleotide
  misc_feature (221)..(221): n includes a, c, g, or t, or contains no nucleotide
  misc_feature (223)..(233): n includes a, c, g, or t, or contains no nucleotide
  misc_feature (235)..(235): n includes a, c, g, or t, or contains no nucleotide
  misc_feature (238)..(254): n includes a, c, g, or t, or contains no nucleotide
  misc_feature (385)..(385): n includes a, c, g, or t, or contains no nucleotide
gtacaactcaggagagctgtattttgaaggataaaatgtttataattggggagtggggagagaagaagaaattattgttcatggtaaaagatatttagcaactatggtattcttattctgaagatttttgcacactcaggctatctgagatactggtaatcatcctgtgaaaaatgtacagagatgcaggtctgtaatataaaaatcttaaaacattananannnnnnnnnnnanaannnnnnnnnnnnnnnnnttcatttgctaaatacccataatattttgtcaaatgcactaaacatttgggtggactttcttttttattttatagggatttttagttttgcctttttggtaggtggtgatttgaggctgtacatgccaganctgtgtggcgcacttcacataggaaaaaggtgaaattcgtctgcggactctgccatatctctggacttagtggcataatgatgtctttgcgaactgcctcgaagacagtggcatctctttggggggcgtggagttacctgccagatccggggaatcaaataggggggggactaacgttcgtgtagacccccaggaatctcgatg

SEQ ID NO: 2159 - DNA, 145 bp, Homo sapiens
ctgaacgggcgactgtgtcttgactacctttcaaaaccagcactgtgtgggaatgtccgccaggcagagctcggagcctcattgagacaggggagagagaaagacaaagaggggaccttcttccagatgccttcccagttgtaac

SEQ ID NO: 2160 - DNA, 578 bp, Homo sapiens
  misc_feature (54)..(86): n includes a, c, g, or t, or contains no nucleotide
  misc_feature (92)..(92): n includes a, c, g, or t, or contains no nucleotide
  misc_feature (113)..(113): n includes a, c, g, or t, or contains no nucleotide
  misc_feature (119)..(119): n includes a, c, g, or t, or contains no nucleotide
  misc_feature (123)..(123): n includes a, c, g, or t, or contains no nucleotide
  misc_feature (133)..(133): n includes a, c, g, or t, or contains no nucleotide
  misc_feature (139)..(139): n includes a, c, g, or t, or contains no nucleotide
  misc_feature (159)..(163): n includes a, c, g, or t, or contains no nucleotide
  misc_feature (166)..(167): n includes a, c, g, or t, or contains no nucleotide
  misc_feature (169)..(169): n includes a, c, g, or t, or contains no nucleotide
  misc_feature (181)..(182): n includes a, c, g, or t, or contains no nucleotide
  misc_feature (184)..(184): n includes a, c, g, or t, or contains no nucleotide
  misc_feature (265)..(266): n includes a, c, g, or t, or contains no nucleotide
  misc_feature (273)..(301): n includes a, c, g, or t, or contains no nucleotide
aaagcaaactttatggcaatacgggaaagggagaatcttatgggatcagtacgnnnnnnnnnnnnnnnnnnnnnnnnnnnnnnnnnagtaancaccagaggaactgagctatntttganagancatgaccacnttcganactcagatcgtctgatagannnnncannangcattgctatgnnancaaaagaaaatatgacttcacagagaggaatgttgaagtcaattcacagcaaaatgaacactttggccaatcgttttcctnntgtaaannnnnnnnnnnnnnnnnnnnnnnnnnnnnaagcggcgggactcgctcatcctagggggtgttattgggatctgtaccatcctgttgctgctgtatgcgttccattgatgggacatcttcagggactcttgacagccaccgctttcacaccctggtctggaataaggaaacatcggagggagaagttgactgtcttgataattagcctgaccagcaggatgaatgcaagactgacagtgatggactctgtgacatggtcaggttgagctgaagccacagtttctctgtgctgtgttttctaacacat

SEQ ID NO: 2161 - DNA, 552 bp, Homo sapiens
  misc_feature (77)..(77): n includes a, c, g, or t, or contains no nucleotide
  misc_feature (99)..(99): n includes a, c, g, or t, or contains no nucleotide
  misc_feature (424)..(446): n includes a, c, g, or t, or contains no nucleotide
  misc_feature (513)..(527): n includes a, c, g, or t, or contains no nucleotide
tgctgcatcaaaacagaataagctggagcaagtagaaaaggagttgttgagagtagcacaaatcctgaaggaacccnaaagtggctgcttctgttttgnaatccctatgtgaagcgttccattaaagtgaaaagcctaaatgacatcacagcaaaagagaggttctctcccctcactaccaacctgatcaatttgcttgctgaaaatggtcgattaagcaatacccaaggagtcgtttctgccttttctaccatgatgagtgtccatcgcggagaggtaccttgcacagtgacctctgcatctcctttagaagaagccacactctctgaattaaaaactgtcctcaagagcttcctaagtcaaggccaagtattgaaattggaggctaagactgatccgtcaatcttgggtggaatgattgtgnnnnnnnnnnnnnnnnnnnnnnncatgtctgtcaagaccaagattcagaagctgggcagggctatgcgggagattgtctaaaagtgttgnnnnnnnnnnnnnnntgaaaattcttaaacttggagcaac

SEQ ID NO: 2162 - DNA, 219 bp, Homo sapiens
ttgatcttttggtattaactctcagatgtttcataactttctgtctttttagtattcagggatattatgtaaagtttttcctgcactgaatctctgtgcttgagcctactgaaatgatccccctaagccatgctgcctgccttttgtgtttaatgtttttttacactgacttatctccttcgtgtgttcacctctcccccagaggaagacaacagaaca

SEQ ID NO: 2163 - DNA, 88 bp, Homo sapiens
tgttgtgaacctcacaggcaggctaaacaagtgtggggtgatcagccccagatttgacgtgcaactcaaagacctggaaaaatggcag

SEQ ID NO: 2164 - DNA, 404 bp, Homo sapiens
  misc_feature (77)..(77): n includes a, c, g, or t, or contains no nucleotide
  misc_feature (90)..(90): n includes a, c, g, or t, or contains no nucleotide
  misc_feature (96)..(96): n includes a, c, g, or t, or contains no nucleotide
  misc_feature (98)..(112): n includes a, c, g, or t, or contains no nucleotide
  misc_feature (281)..(281): n includes a, c, g, or t, or contains no nucleotide
gggcctgggcctcatcatcttctctcttggtgtgatcagctggcggagagctggccactctagttacactcctcttnctgggtccaattnttcagnannnnnnnnnnnnnnnctagaggcagaatcctacaacttccactccaagtgagaaggagattcaaactcaatgatgctaccatgcctctccaacatcttcaaccccctgacattatcttggatcctatggtttctccatccaattctttgaatttcccagtctcccctatgtaaaacttagcaanttgggggacctcattcctgggactatgctgtaaccaaattattgtccaaggctatatttctgggatgaatataatctgaggaagggagttaaagaccctcctggggctctcagtgtgccatag

SEQ ID NO: 2165 - DNA, 565 bp, Homo sapiens
  misc_feature (30)..(61): n includes a, c, g, or t, or contains no nucleotide
  misc_feature (114)..(154): n includes a, c, g, or t, or contains no nucleotide
  misc_feature (183)..(245): n includes a, c, g, or t, or contains no nucleotide
  misc_feature (390)..(415): n includes a, c, g, or t, or contains no nucleotide
  misc_feature (418)..(421): n includes a, c, g, or t, or contains no nucleotide
  misc_feature (424)..(429): n includes a, c, g, or t, or contains no nucleotide
  misc_feature (432)..(434): n includes a, c, g, or t, or contains no nucleotide
  misc_feature (436)..(437): n includes a, c, g, or t, or contains no nucleotide
agttctgtccgctgcgagcctggagatggnnnnnnnnnnnnnnnnnnnnnnnnnnnnnnnncaggagctttgtgggggccccgttccaggcgaggctcctaatggccaaggctnnnnnnnnnnnnnnnnnnnnnnnnnnnnnnnnnnnnnnnnnccaatttcttcctgcttttctccacttgnnnnnnnnnnnnnnnnnnnnnnnnnnnnnnnnnnnnnnnnnnnnnnnnnnnnnnnnnnnnnnnccaattcaccttctaaaaactcatgtgcaggtttgataaacaccagaacagaagacagtgatgctgtattattttagatttattacatagatttggaattcacttttttcatgacctagaaaaaaacattccagtgttcaactgnnnnnnnnnnnnnnnnnnnnnnnnnnttnnnnaannnnnnaannnannagtgttttctctttctacttttgtatatgtgcatgttttgtttcctctgacttggtatatgctcatctgagtgacggatatgtgaaatttgtagaactggttagtcaaatggccagactatttcatta

SEQ ID NO: 2166 - DNA, 182 bp, Homo sapiens
  misc_feature (98)..(98): n includes a, c, g, or t, or contains no nucleotide
  misc_feature (114)..(132): n includes a, c, g, or t, or contains no nucleotide
accagtggccatggttgggtcagccgcaatgggtggcattctcctagctttaattgaaggagctggtatcttgttgacaagatttgcctctgcacagntttcccaatggtcctnnnnnnnnnnnnnnnnnnntcccagttgccttcaactcagttaccttcctcaccttttggagactatcg

SEQ ID NO: 2167 - DNA, 112 bp, Homo sapiens
tgcagcctgacatcccgtttccccaggccagaggtaggtttgaagtgaggtctgtgtcactgtggtattatgattacgtttgggggtaagactacggtatggacgtctgggg

SEQ ID NO: 2168 - DNA, 475 bp, Homo sapiens
ctttggacatcctgtgatctgttttaaagttggggggtgggaaatttagctgactagggacaaacatgtaaacctattttcctatgaaaaaagttttaaatgtcccacttgaataacgtaattcttcatagtttttttaatctatggataaatggaaacctaattatttgtaatgaattatttagacagttctaagccctgtcttctgggagttatcaattttaaagagaacttttgtgcaattcaaatgaagtttttataagtaattgaaaatgacaacacaataacactttctgtataaaagtatatattttatgtgatttattcctactaaatgaaagtgcactactgcctcatgtaaagactcttgcacgcagagcctttaagtgactaaggaacaacatagatagtgagcatagtccccacctccacccctcacaatttatttgaatacttcaattgtgcctctcaattt

SEQ ID NO: 2169 - DNA, 454 bp, Homo sapiens
  misc_feature (249)..(249): n includes a, c, g, or t, or contains no nucleotide
  misc_feature (259)..(259): n includes a, c, g, or t, or contains no nucleotide
  misc_feature (262)..(262): n includes a, c, g, or t, or contains no nucleotide
  misc_feature (274)..(274): n includes a, c, g, or t, or contains no nucleotide
  misc_feature (277)..(277): n includes a, c, g, or t, or contains no nucleotide
  misc_feature (281)..(281): n includes a, c, g, or t, or contains no nucleotide
  misc_feature (296)..(296): n includes a, c, g, or t, or contains no nucleotide
  misc_feature (299)..(299): n includes a, c, g, or t, or contains no nucleotide
  misc_feature (320)..(327): n includes a, c, g, or t, or contains no nucleotide
  misc_feature (329)..(337): n includes a, c, g, or t, or contains no nucleotide
  misc_feature (341)..(346): n includes a, c, g, or t, or contains no nucleotide
ttacgggatcaaagtgggtctacaccagtgctgcttcctgaatgtttgtgtgtgaacccttgtttcctccaaaacaaacgacagcaacgaaaactccttaatcagaacactgatccaatgaggaatggagcttgtttctgtgacccaggagaacttagtgcaagactacaggagttaacagatggccagctccttattttttaatgtagaataactcctgagtttatatcaaatcctgaagaaataagnctcagttttncanctgtttttgatnagnatangaaagggagtgagtngtnaagatggtggttagcagtttnnnnnnnnannnnnnnnntttnnnnnncttgttcacatcaaaagatattggtgtcagaataccagcattttcctgccatgcaaaggattaaaacttagtttacactatgtggttaccaaatatatgtccatgtac

SEQ ID NO: 2170 - DNA, 353 bp, Homo sapiens
  misc_feature (154)..(169): n includes a, c, g, or t, or contains no nucleotide
  misc_feature (176)..(191): n includes a, c, g, or t, or contains no nucleotide
atacatcatgagtttaatcagtgacaacgcagcgaagattctgcccatcatgtttccttccttgtaccgcaactcaaagacccattggaacaagacaatacatggcttgatatacaacgccctgaagctcttcatggagatgaaccaaaagctnnnnnnnnnnnnnnnncaacagnnnnnnnnnnnnnnnntaaaagagaagctaaaaatgaaagaacgggaagaagcatgggttaaaatagaaaatctagccaaagccaatccccaggtactaaaaaagagaataacatgaaaacgcccagggttacttgaatgtttttataagataggaatatatgtcttcaccatggggg

SEQ ID NO: 2171 - DNA, 499 bp, Homo sapiens
  misc_feature (41)..(55): n includes a, c, g, or t, or contains no nucleotide
  misc_feature (314)..(345): n includes a, c, g, or t, or contains no nucleotide
  misc_feature (376)..(376): n includes a, c, g, or t, or contains no nucleotide
  misc_feature (378)..(378): n includes a, c, g, or t, or contains no nucleotide
  misc_feature (420)..(420): n includes a, c, g, or t, or contains no nucleotide
  misc_feature (426)..(426): n includes a, c, g, or t, or contains no nucleotide
agtaccctgcaatccctcaatatggtcaagtactggaaggnnnnnnnnnnnnnnngtgtcacacccaagctggtggaggagcacctcaaaagtgcccagtataagaaaccacccatcacaggtgggtggggggctgctgtgtgtcgggggcggtgggggagtgtcagtatatggactggtaggagtcaaggcctccttattgctgtcacatgatcccaaaccagtcagaccagctcccaggatggagcccggggcaggcctctcattcctgggcttccctgcccctccccagcacagcctgcccttttgttctnnnnnnnnnnnnnnnnnnnnnnnnnnnnnnnngaggagggcagccaggtgtgagctggcctgncncaggcccagccctgcctcccgccccttctccccacagtggantccgtntgcctcaagtgggcaccccccaagcacaagcaagtcaagctctccaagaagtgagcagcctggcccctgctgt

SEQ ID NO: 2172 - DNA, 592 bp, Homo sapiens
  misc_feature (221)..(245): n includes a, c, g, or t, or contains no nucleotide
  misc_feature (538)..(554): n includes a, c, g, or t, or contains no nucleotide
cagaaatcacctttagtcaaaaggtttaagaagcaaattatttagtagcagaacttatctcaggaaaggaaaatatgcatggttggtgagaatctaataacattaaaatgctggggcaagatgcagtacaaagttgaagagactttattctcaataagttgatttactgatgatatgtcatatgatgcaaaaaaggttttgtgtcattaactgaaaagtannnnnnnnnnnnnnnnnnnnnnnnngtcaacaggtttcactaatatttgtcatgctgtagcatttgtaagatttgtaaatgatgaaattcaaagaaaactttttctattgctaggagcctgccagaacaaaggccaatatataatgttgtgacatcatatctgataaccagaggtctggtatctacactcctggtgccccatcagtggttgtctccataagtcattttgcgttattaaaaaaaaaaaaagaaatcctgatgttgacattatagcacactgctttctccacagagatgctgatatcaaaaacttgaagnnnnnnnnnnnnnnnnnataatgttacaaaactggttacctgtatcaaagaccca

SEQ ID NO: 2173 - DNA, 581 bp, Homo sapiens
  misc_feature (80)..(82): n includes a, c, g, or t, or contains no nucleotide
  misc_feature (86)..(86): n includes a, c, g, or t, or contains no nucleotide
  misc_feature (110)..(110): n includes a, c, g, or t, or contains no nucleotide
  misc_feature (113)..(113): n includes a, c, g, or t, or contains no nucleotide
  misc_feature (115)..(115): n includes a, c, g, or t, or contains no nucleotide
  misc_feature (183)..(210): n includes a, c, g, or t, or contains no nucleotide
  misc_feature (392)..(393): n includes a, c, g, or t, or contains no nucleotide
  misc_feature (398)..(399): n includes a, c, g, or t, or contains no nucleotide
  misc_feature (401)..(426): n includes a, c, g, or t, or contains no nucleotide
cagctgctggatgacttgagatgaaaaaggagagacatggaaagggagacagccaggtggcacctgcagcggctgccctnnngggncacttggtagtgtccccagcctanctntncacaaggggattttgctgatgggttcttagagccttagcagccctggatggtggccagaaataaaggnnnnnnnnnnnnnnnnnnnnnnnnnnnntagtcacttgtaaggggaacagaaacatttttgttcttatggggtgagaatatagacagtgcccttggtgcgagggaagcaattgaaaaggaacttgccctgagcactcctggtgcaggtctccacctgcacattgggtggggctcctgggagggagactcagccttcctcctcatcctccnngaccnngnnnnnnnnnnnnnnnnnnnnnnnnnncccttggtccctggcagggcgccaagtttggcaccatgtcggcctcttcaggcctgatagtcattggaaattgaggtccatgggggaaatcaaggatgctcagtttaaggtacactgtttccatgttatgtttctacacattgatggtggtgacc

SEQ ID NO: 2174 - DNA, 519 bp, Homo sapiens
  misc_feature (106)..(124): n includes a, c, g, or t, or contains no nucleotide
  misc_feature (126)..(126): n includes a, c, g, or t, or contains no nucleotide
  misc_feature (212)..(228): n includes a, c, g, or t, or contains no nucleotide
cggtcatctccatggacttctgcaccccattccatacccttcttcacctggggtaccccttccagttttccccttgcttcccaggcccttgacatggcttacctgnnnnnnnnnnnnnnnnnnngncccaacaggataagctggatccccttggccttctgaatatcccagtgtcttcaggtttcccaagaccacttccctgtgggcttccnnnnnnnnnnnnnnnnnttctccagtctgtcaccctcctttcctgctcccatacacccaaggcttgtttcttcccctgtaaaaaccactgcctcaatctctggttcactcaactagtcaccatgtcctgaggcatgaagcctcctcagctcttggaattgctggcaaggggtgactgcctctgagtcattgtgtttttcaaagtgatttcttttctgtagctttttgacctaagatctcagcaatttgaacactaacctctcccctcctggctcaagaattactccgaagtcagtctgcagaaaataa

SEQ ID NO: 2175 - DNA, 558 bp, Homo sapiens
  misc_feature (402)..(417): n includes a, c, g, or t, or contains no nucleotide
cggccaactgcctggggatagatgctggtggaataagaggtaacagtgcaaaaggcatgatagaaaaaaaaagtgaggacttgggaccgattgtgtaggggcagtctgggatgcctccatttcttgactcgtcctagcctctccctctgtacttacctaggtcgatcgctagatcccactgtcacgtcaagagaaatgggatttttgtgtctctggtgcttcacttaaaattttgctggtgctaagtgcgttcctgctggtgctgctgtggtattctgttgacagacttggaaggccaggggacaagagagatttctattttgctgtttcagattcttttttttttttttttaagggacaagttgcaaaagtgccacttgagagtctcttctcttcttctannnnnnnnnnnnnnnncagaggtggtttggagcaaaccttggggtctaggacggaggatggcattgagaggcttgctggttatgaggcagaaagctgacctcatgcatgacttggttgctatctcccccacccccacaaaagtgtcctcggagttca

SEQ ID NO: 2176 - DNA, 439 bp, Homo sapiens
ctctcctcatgctgtttagtgatggcactgtccaggtgaacttctacggggaccacaccaagctgattctcagtggctgggagcccctccttgtgacttttgtggcccgaaatcgtagtgcttgtacttacctcgcttcccaccttcggcagctgggctgctctccagacctgcggcagcgactccgctatgctctgcgcctgctccgggaccgcagcccagcttaggacccaagccctgaaggcctgaggcctgtgcctgtcaggctctggcccttgcctttgtggccttcccccttcctttggtgcctcactgggggctttgggccgaatcccccagggaatcagggaccagctttactggagttgggggcggcttgtcttcgctggctcctaccccatctccaagataagcctgagccttagctcccagctagggg

SEQ ID NO: 2177 - DNA, 274 bp, Homo sapiens
  misc_feature (229)..(229): n includes a, c, g, or t, or contains no nucleotide
  misc_feature (234)..(234): n includes a, c, g, or t, or contains no nucleotide
agcttatttcttgtaccttgcagcatgctctacgcattcagtccttaaggggtttattttacaaactgtgcgcctgtaaggtttattagcaataagatagaaaattgagcaagtttataccataattttgtagaaaaaaagaatctgctcagttccatatttcatccgtgaaaaacttgcaatacgagcagtttcaaggaataaataaaaaggaaatgtaaaccattgnaaaantcttctgtcgaatgtgcctgatgcatgtattatcgtcttt

SEQ ID NO: 2178 - DNA, 291 bp, Homo sapiens
  misc_feature (162)..(162): n includes a, c, g, or t, or contains no nucleotide
  misc_feature (197)..(212): n includes a, c, g, or t, or contains no nucleotide
gccctgcaagaatcggccgccttttcccaggaccggagctaccaggggagcccaggagccctgctctgtctgggaacccccaaagaggcatcgtgatggttctgccttccagtatgagtatgagccaccctgcacgtccctctgtgctcgggtccaagctgncaggcttcctccccagctcatggcctgggccttgnnnnnnnnnnnnnnnncacagccagggtctgagccaactccgatgtgagacgtcacgcaggacagataccgctccacactctgcttcctttgagt

SEQ ID NO: 2179 - DNA, 539 bp, Homo sapiens
  misc_feature (364)..(393): n includes a, c, g, or t, or contains no nucleotide
  misc_feature (419)..(422): n includes a, c, g, or t, or contains no nucleotide
  misc_feature (432)..(432): n includes a, c, g, or t, or contains no nucleotide
  misc_feature (437)..(437): n includes a, c, g, or t, or contains no nucleotide
  misc_feature (439)..(439): n includes a, c, g, or t, or contains no nucleotide
  misc_feature (441)..(445): n includes a, c, g, or t, or contains no nucleotide
aaatttccagtgagcttatcatgctgtctttacatggggttttcaattttgcatgctcgattattccctgtacaatatttaaaatttattgcttgatacttttgacaacaaattaggttttgtacaattgaacttaaataaatgtcattaaaataaataaatgcaatatgtattaatattcattgtataaaaatagaagaatacaaacatatttgttaaatatttacatatgaaatttaatatagctatttttatggaatttttcattgatatgaaaaatatgatattgcatatgcatagttcccatgttaaatcccattcataactttcattaaagcatttactttgaatttctccaatgctnnnnnnnnnnnnnnnnnnnnnnnnnnnnnntaatcataataaaattcaaccattannnntttcttgttnataananannnnnttatatgttcaaatatgaaatgtgtatgcacctattgaaatatgtttaatgcatttattaacatttgcaggacacttttacaggccccaattat

SEQ ID NO: 2180 - DNA, 421 bp, Homo sapiens
  misc_feature (45)..(45): n includes a, c, g, or t, or contains no nucleotide
  misc_feature (53)..(53): n includes a, c, g, or t, or contains no nucleotide
  misc_feature (92)..(115): n includes a, c, g, or t, or contains no nucleotide
agagggtcttattgccattgtcttttcctctgccccttgagccancctaaggnccctggagtctgtttctttaggcggatgaactgacatgnnnnnnnnnnnnnnnnnnnnnnnnggcaaggctcctcacagtatccttgagaggtgggcatggaagtgcccatttctcaggtacagaaaccttcagagaggataaatagcttgccctgtagaagcaggactgaaacccttgtccgcctgactcccccagctactctgcccactgtagccccctgccttactgtcctggcacacccctcaccatcctgtataccttaaatatcaaagagggcaagagagaaagggctttaaagataagttatttttttaaggaaccttaatattatttttaagaagtaaccaaattagtgacgtgaaatgc

SEQ ID NO: 2181 - DNA, 322 bp, Homo sapiens
  misc_feature (256)..(256): n includes a, c, g, or t, or contains no nucleotide
ctgcgacaattctatttgaggaaaagatttgtttttcccttttcccaaggaagctcgtgggacagcatgggcactactcttcatgtgcggtgacaccagcccccagatgccttgaattaagtgtcctcacctttatgcatgactgcaaagccagctggagcattttctatggagcctccgtatgttttaggcccatgaccttcgtgaggtgacgggcactcactcccatgagccctggctgtgtgctgttgtgtgnctatcggcagatccatccttcctgcctccaaggaggatacacagagaatggcttcctgttgttttg

SEQ ID NO: 2182 - DNA, 606 bp, Homo sapiens
  misc_feature (88)..(88): n includes a, c, g, or t, or contains no nucleotide
  misc_feature (98)..(98): n includes a, c, g, or t, or contains no nucleotide
  misc_feature (117)..(117): n includes a, c, g, or t, or contains no nucleotide
  misc_feature (122)..(122): n includes a, c, g, or t, or contains no nucleotide
  misc_feature (130)..(131): n includes a, c, g, or t, or contains no nucleotide
  misc_feature (134)..(134): n includes a, c, g, or t, or contains no nucleotide
  misc_feature (137)..(137): n includes a, c, g, or t, or contains no nucleotide
  misc_feature (139)..(139): n includes a, c, g, or t, or contains no nucleotide
  misc_feature (141)..(141): n includes a, c, g, or t, or contains no nucleotide
  misc_feature (143)..(144): n includes a, c, g, or t, or contains no nucleotide
  misc_feature (151)..(152): n includes a, c, g, or t, or contains no nucleotide
  misc_feature (168)..(168): n includes a, c, g, or t, or contains no nucleotide
  misc_feature (190)..(190): n includes a, c, g, or t, or contains no nucleotide
  misc_feature (212)..(212): n includes a, c, g, or t, or contains no nucleotide
  misc_feature (226)..(226): n includes a, c, g, or t, or contains no nucleotide
  misc_feature (232)..(232): n includes a, c, g, or t, or contains no nucleotide
  misc_feature (239)..(239): n includes a, c, g, or t, or contains no nucleotide
  misc_feature (241)..(242): n includes a, c, g, or t, or contains no nucleotide
  misc_feature (244)..(244): n includes a, c, g, or t, or contains no nucleotide
  misc_feature (247)..(248): n includes a, c, g, or t, or contains no nucleotide
  misc_feature (250)..(250): n includes a, c, g, or t, or contains no nucleotide
  misc_feature (252)..(252): n includes a, c, g, or t, or contains no nucleotide
  misc_feature (254)..(256): n includes a, c, g, or t, or contains no nucleotide
  misc_feature (406)..(440): n includes a, c, g, or t, or contains no nucleotide
tagaggagcaccaggcacgcgcctggcagggtgccatggacgcaggcgcggctagccgggagcacgccaggtggcaaggtggcgagangggcctgtcngggccctcggggccggggnacatngcaagccnnggnggngngncnnggcgagnnggctttgcacaaggtngacattcccagggccacgtggngccaggtggcggactggaaggnggcggagtggccanccaggnccggggnannanagnncntnannnacaccctcatccccccccgtacccccacttcacccgccgctactaagtcccactcgctgcgagttttcgggtgggcagacgcactgttgaatctggtagccagggttccctcgaacttgggggatctttttaaaagcaaagtaaatcctnnnnnnnnnnnnnnnnnnnnnnnnnnnnnnnnnnnctttttttttttttttaaataaatgtgttcttgttctgccatttttaaatcaaggtttctgttaacgaggcattccattttccattaataaagtttaccattcgcaaaaaaaaaatgtgttcttgttctgccatttttaaatcaaggtttctgttaacgaggcatt

SEQ ID NO: 2183 - DNA, 490 bp, Homo sapiens
gaagaccagtactgtggacctgccaatcgagaatcagctatatggcagatagacagagagatgctcaacttgtacattgaaaatgagggtaagatgatcatgcaggataaactggagaaggagcggaatgatgctaagaacgcagtggaggaatatgtgtatgaaatgagagacaagcttagtggtgaatatgagaagtttgtgagtgaagatgatcgtaacagttttactttgaaactggaagatactgaaaattggttgtatgaggatggagaagaccagccaaagcaagtttatgttgataagttggctgaattaaaaaatctaggtcaacctattaagatacgtttccaggaatctgaagaacgaccaaattatttgaagaactagagaacttagggaaacagatccaacagtatatgaaaataatcagctcctttcaaaaacaaggaggaccaggtatgatcatttggatgctgctgacatgaca

SEQ ID NO: 2184 - DNA, 590 bp, Homo sapiens
  misc_feature (131)..(131): n includes a, c, g, or t, or contains no nucleotide
  misc_feature (146)..(146): n includes a, c, g, or t, or contains no nucleotide
  misc_feature (148)..(148): n includes a, c, g, or t, or contains no nucleotide
  misc_feature (191)..(211): n includes a, c, g, or t, or contains no nucleotide
  misc_feature (491)..(494): n includes a, c, g, or t, or contains no nucleotide
aacctttaagtctgagtatgcctgtaattacagaagaagaagagaatgaaagtttgagtggaacagagttcactgcatccaagaagaggagaaaacactgaacaaagagcctggtgtagtttttaattttnagttttctgacagangnaaagattgatattttgtgtattgaacaggaagactgccagtannnnnnnnnnnnnnnnnnnnntctgtaggttatttcttggaaattgcaatacgtagttctagaataaaagtacaaaaaattagaataagaattctttaacattttctttaatgatttgcataaatggagataaaacttgtatttagtatgtaatagaaaaaattctgttattcgcagattgttactatttcctataaggttttgtgatactatactgtcctaatacagtctggtaatactattctattttatttaaaatattttttattgaaatattaatgtttattacatgcaaataacnnnntattttgtatctacagtcggataatggattttttattttgtatatttattctattttgtatattgttaagtgcaataaagtttttgccttgcttta

SEQ ID NO: 2185 - DNA, 220 bp, Homo sapiens
  misc_feature (32)..(32): n includes a, c, g, or t, or contains no nucleotide
  misc_feature (88)..(98): n includes a, c, g, or t, or contains no nucleotide
  misc_feature (100)..(103): n includes a, c, g, or t, or contains no nucleotide
  misc_feature (124)..(124): n includes a, c, g, or t, or contains no nucleotide
  misc_feature (126)..(126): n includes a, c, g, or t, or contains no nucleotide
  misc_feature (151)..(153): n includes a, c, g, or t, or contains no nucleotide
  misc_feature (158)..(158): n includes a, c, g, or t, or contains no nucleotide
  misc_feature (160)..(165): n includes a, c, g, or t, or contains no nucleotide
  misc_feature (167)..(183): n includes a, c, g, or t, or contains no nucleotide
agccaaggtgcgatttgggcacctgactgtcnagtttaccttaacaagtttgggaatccatgtgatgtttttgatacttcttcctcannnnnnnnnnncnnnnggagcatttgggcttccgggngncccctgagaccaaagaagaggggcnnngtacncnnnnnnannnnnnnnnnnnnnnnnaaagactggttgtgagttgcagctgtcccgaaggccc

SEQ ID NO: 2186 - DNA, 398 bp, Homo sapiens
gagcttttcacatcacctttatggtttcaatccctagctcaaagcttcctggaatcttttattttttgtaaacttttttttcttttgttaaaataaataaaacattcaatgtttttctccttttctctcttattacttctttcctttggcattttcaatttgaaatgctttcctttggttgttggttttattctccccctacccctccccttttcttattattcagaatataaacctgcaaagctctgctctgttttggttttgaaagtttaagcttttctgcttctgtgagagcacaggcttctgtcccttttgattccaactgaacttttgtgttctctaatgatactaacacggtgtaggttttacagtctcctaatttgtactggtaatgcata

SEQ ID NO: 2187 - DNA, 317 bp, Homo sapiens
  misc_feature (240)..(254): n includes a, c, g, or t, or contains no nucleotide
gggcaggccctgagccttctgacctcacatcctctgccacaccacagtggagaaaccagaactggaggagcagccagaatgcagagaagaaaaaagaggttctctgcatgtttggaagtcggaattggttgaagttgaagatgatgtgtatctgaggcacagctcttccctgacttataggctttgacactgctgttgaggtttgactcgaagcccagagttttggtgtggatgagcagnnnnnnnnnnnnnnncatgaagaagagtaaaattaagcaagtggaacatatgccctttgcctctgctctgcacagtga

SEQ ID NO: 2188 - DNA, 317 bp, Homo sapiens
cccggagaggtgctggacctcacctacagccccccggccgaggccttcccgccgcccccgcacttctctttcccggcgccgctgtccctggacgccggccccggcgtcgtgccgctgggcacccccgacgcccaggccgaccctgcggccctcgcgcaccagggctgcgacatcaacttcaaggaggtgctggaggacatgctgcgctcgctgcacgcggggccgccctccgagggcgcgctgggggagggcgcgggggcggggggcgcggcgggcggtggtcccgagcggcagagcgtgatccagttcagcccacc

SEQ ID NO: 2189 - DNA, 613 bp, Homo sapiens
cccggtggctctggtatgaattcacccgaagcgcttctgcaccaactcacctggccgctaagttgctgatgggtagtacctgtactaaaccacctcagaaaggattttacagaaacgtgttaaaggttttctctaacttctcaagtcccttgttttgtgttgtgtctgtggggaggggttgttttggggttgtttttgttttttcttgccaggtagataaaactgacatagagaaaaggctggagagagattctgttgcatagactagtcctatggaaaaaaccaagcttcgttagaatgtctgccttactggtttccccagggaaggaaaaatacacttccacccttttttctaagtgttcgtctttagttttgattttggaaagatgttaagcatttatttttagttaaaaataaaaactaatttcatactatttagattttcttttttatcttgcacttattgtcccctttttagttttttttgtttgcctcttgtggtgaggggtgtgggaagaccaaaggaaggaacgctaacaatttctcatacttagaaacaaaaagagctttccttctccaggaatactgaacatgggagctcttgaaatatgta

SEQ ID NO: 2190 - DNA, 547 bp, Homo sapiens
aattatgggacctaatgacagcccatatcaaggcggtgtattctttttgacaattcattttcctacagactaccccttcaaaccacctaaggttgcatttacaacaagaatttatcatccaaatattaacagtaatggcagcatttgtctcgatattctaagatcacagtggtcgcctgctttaacaatttctaaagttcttttatccatttgttcactgctatgtgatccaaacccagatgaccccctagtgccagagattgcacggatctataaaacagacagagataagtacaacagaatatctcgggaatggactcagaagtatgccatgtgatgctaccttaaagtcagaataacctgcattatagctggaataaactttaaattactgttccttttttgattttcttatccggctgctcccctgatcagacctcatcttttttaattttattttttgtttacctccctccattcattcacatgctcatctgagaagacttaagttcttccagctttgacaataactgcttttagaaactgt

SEQ ID NO: 2191 - DNA, 493 bp, Homo sapiens
  misc_feature (340)..(340): n includes a, c, g, or t, or contains no nucleotide
  misc_feature (348)..(348): n includes a, c, g, or t, or contains no nucleotide
  misc_feature (350)..(354): n includes a, c, g, or t, or contains no nucleotide
  misc_feature (356)..(361): n includes a, c, g, or t, or contains no nucleotide
  misc_feature (363)..(364): n includes a, c, g, or t, or contains no nucleotide
  misc_feature (366)..(373): n includes a, c, g, or t, or contains no nucleotide
  misc_feature (375)..(375): n includes a, c, g, or t, or contains no nucleotide
  misc_feature (377)..(377): n includes a, c, g, or t, or contains no nucleotide
  misc_feature (411)..(425): n includes a, c, g, or t, or contains no nucleotide
  misc_feature (461)..(461): n includes a, c, g, or t, or contains no nucleotide
gaggcccacagactcaaagttactctccttccccctacctgggccagtgaaatagaaagcctttctattttttggtgcgggagggaagacctctcacttagggcaagagccaggtatagtctcccttcccagaatttgtaactgagaagatcttttctttttcctttttttggtaacaagacttagaaggagggcccaggcactttctgtttgaacccctgtcatgatcacagtgtcagagacgcgtcctctttcttggggaagttgaggagtgcccttcagagccagtagcaggcaggggtgggtaggcaccctccttcctgtttttatctaataaaangctaaccngnnnnnannnnnnannannnnnnnngngnttcccctgggccaaacagtgatttgtctccctcnnnnnnnnnnnnnnnccgctcccaccaccgctaccacaaggacccccgggnctgcagcctcctctttctgtctctgatcagag

SEQ ID NO: 2192 - DNA, 483 bp, Homo sapiens
ctatcactgcaaaggggtgatatgtatgtattatataaaaaaaaaaacccttaatgcactgttatctcctaaatatttagtaaattaatactatttaatttttttaaagatttgtctgtgtagacactaaaagtattacacaaaatctggactgaaggtgtcctttttaacaacaatttaaagtactttttatatatgttatgtagtatatcctttctaaactgcctagtttgtatattcctataattcctatttgtgaagtgtacctgttcttgtctcttttttcagtcattttctgcacgcatccccctttatatggttatagagatgactgtagcttttcgtgctccactgcgaggtttgtgctcagagccgctgcaccccagcgaggcctgctccatggagtgcaggacgagctactgctttggagcgagggtttcctgcttttgagttgacctgacttccttcttgaaatgactgtta

SEQ ID NO: 2193 - DNA, 598 bp, Homo sapiens
  misc_feature (29)..(30): n includes a, c, g, or t, or contains no nucleotide
  misc_feature (38)..(39): n includes a, c, g, or t, or contains no nucleotide
  misc_feature (42)..(42): n includes a, c, g, or t, or contains no nucleotide
  misc_feature (56)..(57): n includes a, c, g, or t, or contains no nucleotide
  misc_feature (83)..(83): n includes a, c, g, or t, or contains no nucleotide
  misc_feature (92)..(99): n includes a, c, g, or t, or contains no nucleotide
  misc_feature (106)..(129): n includes a, c, g, or t, or contains no nucleotide
  misc_feature (217)..(217): n includes a, c, g, or t, or contains no nucleotide
  misc_feature (456)..(489): n includes a, c, g, or t, or contains no nucleotide
  misc_feature (540)..(540): n includes a, c, g, or t, or contains no nucleotide
gtttcactcagaatacaggcctcattgannatcaaaanntcnacactggtgagaanncctatcagtgtaatgcgtgtggaaanggcttcacnnnnnnnncataccnnnnnnnnnnnnnnnnnnnnnnnntagggaaaaacatcctatcacagtgacccatgccatacatgccagagttggtgctcatttgtcactgatctgaagccactccccctgnagtctcaactatagaaattgtgggctgggctttatttaccactacacattatcaggtgttagaaaatgtagactgggttagacaaattatcttctaagttctagaaggggtttgtaatcaaaacatatttgataggaggctacgggagagttgtctagaagaggtaagacctgaaactgtttgttctctcccactagaattaaatggatgtttagactggctacttgccctaaaccagnnnnnnnnnnnnnnnnnnnnnnnnnnnnnnnnnntttgggggctgcttctctgaccattctttttgactgtaatgaatcctccanagttggtcagattcataaagtcttatatccccctctgtgccttttctgcaggtgctaa

SEQ ID NO: 2194 - DNA, 340 bp, Homo sapiens
  misc_feature (203)..(204): n includes a, c, g, or t, or contains no nucleotide
  misc_feature (207)..(219): n includes a, c, g, or t, or contains no nucleotide
  misc_feature (224)..(228): n includes a, c, g, or t, or contains no nucleotide
  misc_feature (231)..(231): n includes a, c, g, or t, or contains no nucleotide
  misc_feature (233)..(234): n includes a, c, g, or t, or contains no nucleotide
  misc_feature (238)..(238): n includes a, c, g, or t, or contains no nucleotide
  misc_feature (240)..(241): n includes a, c, g, or t, or contains no nucleotide
  misc_feature (243)..(243): n includes a, c, g, or t, or contains no nucleotide
  misc_feature (245)..(248): n includes a, c, g, or t, or contains no nucleotide
gttcttgttcttcttaaatgtgacatgaaataattgtgctgctacattatactggaaattaacaggggaaaagggaagagctcttggctcccttgaggttctgctagtggtgttaggagtggttacaactgagcttttagtaaccatttaaccgtatgtaaacttggtttctaattaaaaaaaaatttctttttccaaaaaannaannnnnnnnnnnnnttaannnnnaantnntttntnnanannnntacaacaactttgatacaaaaatactgaaacagcaactaccacctggaatggcacactaagtccacactgttaggattttctccttagaaag

SEQ ID NO: 2195 - DNA, 111 bp, Homo sapiens
gtgagaaaggtcctggtccgcgccagagcccagcgcgcctcgtcgccatgcctcggaaaattgaggaaatcaaggacttcctgctcacagcccgacgaaaggatgccaaat

SEQ ID NO: 2196 - DNA, 507 bp, Homo sapiens
  misc_feature (157)..(176): n includes a, c, g, or t, or contains no nucleotide
  misc_feature (265)..(292): n includes a, c, g, or t, or contains no nucleotide
  misc_feature (334)..(348): n includes a, c, g, or t, or contains no nucleotide
cctggaggcttcagaggtgaatttatgcttgggaagcctgatcccaaacctgaagggaagggacttggatctccttatattgaataagctgtttggaggaaggtgtctgtctgggaggatggggcagtaaatgaggttggcagagtggcagtggggnnnnnnnnnnnnnnnnnnnnggagcctgctcattctgggcccttgctgccaaggagcccagcctcacctagcaggaaaggagatgaaggccctcctcccaggaggtagnnnnnnnnnnnnnnnnnnnnnnnnnnnntttgaaatctcttagatgtggaaatattttttcgaacctgannnnnnnnnnnnnnnaatttcaatggaagcataatccatgtaaaatatattttagttgatattttgtaaaatgcactttttgtgtgtgttgatcctggtttcccagatctgtatttcagtgtttacaagggaggaaggacctttcctcacctcccttttgacagagattagaag

SEQ ID NO: 2197 - DNA, 617 bp, Homo sapiens
  misc_feature (26)..(26): n includes a, c, g, or t, or contains no nucleotide
  misc_feature (31)..(41): n includes a, c, g, or t, or contains no nucleotide
  misc_feature (121)..(184): n includes a, c, g, or t, or contains no nucleotide
  misc_feature (196)..(197): n includes a, c, g, or t, or contains no nucleotide
  misc_feature (217)..(217): n includes a, c, g, or t, or contains no nucleotide
  misc_feature (242)..(242): n includes a, c, g, or t, or contains no nucleotide
  misc_feature (253)..(253): n includes a, c, g, or t, or contains no nucleotide
  misc_feature (255)..(255): n includes a, c, g, or t, or contains no nucleotide
  misc_feature (283)..(283): n includes a, c, g, or t, or contains no nucleotide
  misc_feature (310)..(349): n includes a, c, g, or t, or contains no nucleotide
  misc_feature (364)..(364): n includes a, c, g, or t, or contains no nucleotide
  misc_feature (381)..(381): n includes a, c, g, or t, or contains no nucleotide
  misc_feature (383)..(383): n includes a, c, g, or t, or contains no nucleotide
  misc_feature (531)..(531): n includes a, c, g, or t, or contains no nucleotide
  misc_feature (534)..(539): n includes a, c, g, or t, or contains no nucleotide
tataaaagcccgtcctatctccaccngcagnnnnnnnnnnnccgaggaggctttcgtgaaggaatccaaggaggagaccccaggcacagagtgggagaaggtggcccagctatgtgacttnnnnnnnnnnnnnnnnnnnnnnnnnnnnnnnnnnnnnnnnnnnnnnnnnnnnnnnnnnnnnnnnaagcagacgccnnctgtcccgctaggtgcctgntaggtgcatggccacagagcatggnctgggcctggncnacaggaggagcagctgctttggtcgggntggagactcgcagcagctgctacccannnnnnnnnnnnnnnnnnnnnnnnnnnnnnnnnnnnnnnnggggccctcaccccntcacgcctcgctccctncntggccctctggtccagcccctcacgcctcctctcagtctactcaattgtgactgtccctcctgatgtattttttttcttggcttaaagggtgtgttgttgactctttttacacttatttattatcattctcacttctctggaagccanaannnnnntcagggctcggtttgtgcttagaactttcccagcttcatgaccttgagagaagggagaatgttcccccatttcccagc

SEQ ID NO: 2198 - DNA, 378 bp, Homo sapiens
gatcaccctttccatatgcaggtctttcttattcccaaccaacataataggtatttgtactttccccaccatatccaacaatttgccatggataactttaatcacttcaaaacttttgattgatgtaacagaatacacaagaatatagccattaatatctatggagtatgtctgaggaaagatagaatattcatcttgcccggctgtgtctacaagttgaagatgatattcttgtccatttactgtgatcaactttgtaaaagtgttttctatggttggatcgtaggagtccacaaattggccttcaacaaattgaatcgtcaatgaggatttccccacagaccggtagcccaggatcgcgatcttccgggacttgga

SEQ ID NO: 2199 - DNA, 399 bp, Homo sapiens
  misc_feature (94)..(126): n includes a, c, g, or t, or contains no nucleotide
  misc_feature (312)..(318): n includes a, c, g, or t, or contains no nucleotide
ttcatcacttgaaatgtggtagctcttacaaagtttattgatttgatttttttaaaaatcaaaagccaattgaacaacaggatatatagactgnnnnnnnnnnnnnnnnnnnnnnnnnnnnnnnnntgtcttcaacttgatttgtctgtttaattgaaaagaattataagagttactgttgcattttctgacctactatttttaaaattcctgttgagtttctttgtgtttacaaggaaaggactgaactttttctcatcaaaactagcttttttccccacaaataaattatcaggttaaactttcaaaaannnnnnntctgttttttgtttttggggggtttttgtttgtttttgtttttttaatgtttttggtacactgggcagacttcagagcagt

SEQ ID NO: 2200 - DNA, 435 bp, Homo sapiens
  misc_feature (119)..(119): n includes a, c, g, or t, or contains no nucleotide
  misc_feature (132)..(132): n includes a, c, g, or t, or contains no nucleotide
  misc_feature (136)..(136): n includes a, c, g, or t, or contains no nucleotide
  misc_feature (159)..(159): n includes a, c, g, or t, or contains no nucleotide
  misc_feature (166)..(166): n includes a, c, g, or t, or contains no nucleotide
  misc_feature (183)..(183): n includes a, c, g, or t, or contains no nucleotide
  misc_feature (189)..(189): n includes a, c, g, or t, or contains no nucleotide
  misc_feature (199)..(200): n includes a, c, g, or t, or contains no nucleotide
  misc_feature (220)..(221): n includes a, c, g, or t, or contains no nucleotide
  misc_feature (229)..(229): n includes a, c, g, or t, or contains no nucleotide
  misc_feature (235)..(235): n includes a, c, g, or t, or contains no nucleotide
  misc_feature (240)..(240): n includes a, c, g, or t, or contains no nucleotide
  misc_feature (250)..(250): n includes a, c, g, or t, or contains no nucleotide
  misc_feature (257)..(257): n includes a, c, g, or t, or contains no nucleotide
  misc_feature (264)..(264): n includes a, c, g, or t, or contains no nucleotide
  misc_feature (281)..(282): n includes a, c, g, or t, or contains no nucleotide
  misc_feature (293)..(293): n includes a, c, g, or t, or contains no nucleotide
  misc_feature (311)..(311): n includes a, c, g, or t, or contains no nucleotide
  misc_feature (341)..(341): n includes a, c, g, or t, or contains no nucleotide
ggtatctgacatatactcaaaacagtaatttcctggtcacatcattaactgctaattctgtatttataaagaattttcagatggacatgtacaaatttgaactcaaaccatccccagtnccagatacagggncagncgtgtaggtgaccacaccagagncctcagncctcggtccttctcagnccgtcngggatagganntccaggcatttcttttaaanntctcaganggtagncagtnaaacttttcnagtattngctgttnagcaagtgtgtgtttgnnccaatagatancccattatactaatgtgnccaagtaaatgttcattgcacatctgcttnccactgtgttcccacgggtgccatgaagtgtgtgaggagcccctcatctggagggatgagtgctgcgttgactactgctatcaggattgtgttg

SEQ ID NO: 2201 - DNA, 331 bp, Homo sapiens
tattccacatttacctgctagcggtgctggcctacagcatcaccctggttatgctctggtccatctggcagtacgcttgagtgggtacagcccagtggaggagggggtacagtcctggttaggtggggacagaggatttctgcttaggcccctcaggacccagggaatgccagggacattttcaagacacagacaaagtcccgtgccctgtttccaatgccaattcatctcagcaatcacaagccaaggtctgaacccttccaccaaaaactgggtgttcaaggcccttacacccttgtcccacccccagcagctcaccatggctttaaaa

SEQ ID NO: 2202 - DNA, 446 bp, Homo sapiens
attttgtgagctccaagggttatccccgttactgcactgtcacgactctctcagatggctctgtggtcctaaacggaggccgttcccggagggggaaactgaggggcccaccggagagcagagagtgggggaacgcgctgaaggggtgtgatgatccccttttccttgacttcttaaaacagtgtttagagtgggatcctgcagtgcgcatgaccccaggccaggctttgcggcacccctggctgaggaggcggttgccaaagcctcccaccggggagaaaacgtcagtgaaaaggataactgagagcaccggtgctatcacatctatatccaagttacctccaccttctagctcagcttccaaactgaggactaatttggcgcagatgacagatgccaatgggaatattcagcagaggacagtgttgccaaaacttgttagctga

SEQ ID NO: 2203 - DNA, 601 bp, Homo sapiens
  misc_feature (74)..(98): n includes a, c, g, or t, or contains no nucleotide
  misc_feature (295)..(296): n includes a, c, g, or t, or contains no nucleotide
  misc_feature (333)..(349): n includes a, c, g, or t, or contains no nucleotide
  misc_feature (391)..(391): n includes a, c, g, or t, or contains no nucleotide
  misc_feature (466)..(483): n includes a, c, g, or t, or contains no nucleotide
  misc_feature (485)..(485): n includes a, c, g, or t, or contains no nucleotide
  misc_feature (507)..(508): n includes a, c, g, or t, or contains no nucleotide
ggtgctgctgcctaccctagtctcaccaatcgtggatctaactttgctcctgagactggacagactgcaggacnnnnnnnnnnnnnnnnnnnnnnnnntgtgggtgtctggccacagtggcagggccagcagcctcatcatcgttcaagttctagtgagcaacatgttcaacaaccgccagcacagcaacctggccagcctgaggtcttccaggagatgctgtccatgctgggagatcagagcaacagctacaacaatgaagaattccctgatctaactatgtttcccccctttnnagaatagaactattggggtgaggataaggggtggggnnnnnnnnnnnnnnnnntgtttttaaaaagcaaatctttctgtaaacagaataaaagtncctctcccttcccttccctcacccctgacatgtaccccctttcccttctggctgttcccctgctctgttgcctcnnnnnnnnnnnnnnnnnntntaaggtaacatttatagaaganntggaatgaatctccaaggcttttaggactgtctgaaaatttgaggctgggtgaagttaaaacacctttccttatgtctcctgacctgaaattg

SEQ ID NO: 2204 - DNA, 476 bp, Homo sapiens
gcgaacaaaacgagacgctgaagaaaagaggcgacaggaagaagggtattacagccgcctggaagccgagaggcgcagacagcacgacgaggcggcgcgcaggttgctggagcccgaggcgcccggtctgtgccgccctccgcttccccgggactacgagcccccgtccccgtcccccgcgcccggcgcccctcctcccccgcctcagcgaaacgcctcctacctcaaaacacaggtcctctcccccgactcgctgttcactgccaagtttgttgcatacaatgaggaggaggaggaggaggactgcagcctagcaggtcaggataagtactccagcacaagaaagtctcatggggaccttcttcctgcccctcttaaaccacggccacccccctgccagccacgcccggcctccgatggcgtctttctctccaactcattccagccaccctcagccaaagccaacagtactgctc

SEQ ID NO: 2205 - DNA, 427 bp, Homo sapiens
  misc_feature (105)..(105): n includes a, c, g, or t, or contains no nucleotide
  misc_feature (108)..(112): n includes a, c, g, or t, or contains no nucleotide
  misc_feature (293)..(295): n includes a, c, g, or t, or contains no nucleotide
  misc_feature (357)..(402): n includes a, c, g, or t, or contains no nucleotide
ttaccaatgctgcagtcctgcagtcacctatacattatttaaatgtatttaactgttaaatgcgctacccaccaataatgaaatagacctttatgaaaactgtgnaannnnntgcatgtttgtttttatgttcctttagaaaacattgactgttaccattgaatgagatggatcagtggatattaagatgaggttacaaattttgttaagttcagccattattacttttggtatcccagaacatgacaaattatgaataaaacaagtatacataaaaaaaaaaaaaaaaaaannncggagttccacgtttgccagctaggatcaaatccccgtggtagctagccaatacttgatttnnnnnnnnnnnnnnnnnnnnnnnnnnnnnnnnnnnnnnnnnnnnnnttctgtgtccctagattccacgagc

SEQ ID NO: 2206 - DNA, 606 bp, Homo sapiens
  misc_feature (261)..(295): n includes a, c, g, or t, or contains no nucleotide
ccgacaatacactaggcaccgagatgactgtggaagatcagcttgcacgtggactgaagctgaccttcgattcatccttcttacctaagactgggggaaaaaagatgctaaaatcaagacagggtacaagcaggagcacattaccctggactgcaacatagatttcgacattgctgggccttccatccgggctgctctggtgctgggttacaagggctggctggccggctaccagatgaattttgagactgcaaagtccgnnnnnnnnnnnnnnnnnnnnnnnnnnnnnnnnnnnactgatgaattccagcttcacactaatgtgaatgacgggacagagtttggtggcctcatttaccagaaagtgaacaagaagttggagactgctgtcaatctcacctggacagcaggaaacagtaacacgcgtttcgaaatagcagccaagtatttgattgaccctgaagcctgcttcttggctaaagtgaacaactccagcctgataggtttaggatacactcagaccctaaagccaggtatcaaactgacactgtcagctcttctggatggcaagaacgtcaatgctggtggccacaagcttggtctagg

SEQ ID NO: 2207 - DNA, 587 bp, Homo sapiens
gccgaatgcggtgaaggagttagtagaaaacagtctggatgctggtgccactaatgttgatctaaagcttaaggactatggagtggatctcattgaagtttcaggcaatggatgtggggtagaagaagaaaacttcgaaggctttactctgaaacatcacacatgtaagattcaagagtttgccgacctaactcaggtggaaacttttggctttcggggggaagctctgagctcactttgtgcactgagtgatgtcaccatttctacctgccgtgtatcagcgaaggttgggactcgactggtgtttgatcactatgggaaaatcatccagaaaaccccctacccccgccccagagggatgacagtcagcgtgaagcagttattttctacgctacctgtgcaccataaagaatttcaaaggaatattaagaagaaacgtgcctgcttccccttcgccttctgccgtgattgtcagtttcctgaggcctccccagccatgcttcctgtacagcctgtagaactgactcctagaagtaccccaccccacccctgctccttggaggacaacgtgatcactgtattcagct

SEQ ID NO: 2208 - DNA, 444 bp, Homo sapiens
  misc_feature (145)..(160): n includes a, c, g, or t, or contains no nucleotide
  misc_feature (340)..(340): n includes a, c, g, or t, or contains no nucleotide
cgatctgtgctgagtgttggctccaccggcctcttcatcttcctctactcagttttctattatgcccggcgctccaacatgtctggggcagtacagacagtagagttcttcggctactccttactcactggttatgtcttcttcnnnnnnnnnnnnnnnntctcctttttttcttccctaaagttcatccggtatatctatgttaacctcaagatggactgagttctgtatggcagaactattgctgttctctccctttcttcatgccctgttgaactctcctaccagcttctcttctgattgactgaattgtgtgatggcattgttgccttcccttttnccctttgggcattccttccccagagagggcctggaaattataaatctctatcacataaggattatatatttgaactttttaagttgcctttagttttggtcctg

SEQ ID NO: 2209 - DNA, 542 bp, Homo sapiens
  misc_feature (107)..(126): n includes a, c, g, or t, or contains no nucleotide
  misc_feature (312)..(312): n includes a, c, g, or t, or contains no nucleotide
  misc_feature (346)..(411): n includes a, c, g, or t, or contains no nucleotide
cccgagctgagctggggtccacagacaatgaccttgagcgacaggaggatgagcaggacacagactatgaccacgtcgcggatggtggcctgcaggctgaccctggnnnnnnnnnnnnnnnnnnnngagaggcgtccagcccagagcaggtccccgtgcgggctgaggaagccagagacagtgacacggagggcgacctggtcctcggctccccaggaccagcgagcgcagggggcagtgctgaggccctgctgagtgacctgcacgcctttgctggcagcgcagcctgggatgacagcgccagggcagctnggggccagggcctccatgtcaccgcactgtagannnnnnnnnnnnnnnnnnnnnnnnnnnnnnnnnnnnnnnnnnnnnnnnnnnnnnnnnnnnnnnnnncatggctggactggacccccagcccacatgaccatgcctcagactgtcaccccctaccagttcccaagtccatgtgtaccccgctcaccacgggaacggccccccccaaccacaggcatcaggcaaccatt

SEQ ID NO: 2210 - DNA, 481 bp, Homo sapiens
  misc_feature (159)..(159): n includes a, c, g, or t, or contains no nucleotide
gtagacagctgaactcacaccacacccagcttatagaatgtccatggaagatgaaggcgcaccagaagggaaggaccctgcgcagaatggacgtggtgaatggtgtttaaaatgccagatgccaaagagtaacacgattccctgctgaccccttaactntaatccatccagcaccatggagcagcctgcatgtgaggaatggaaggagcattcagggcctccaagtgacagtctctaaaatggggtggtgccaggcagattagcatgttcaaagctgacaccactgaggtcgtgttttttgggtgacaaagccaaaggagagaaaggccaaatattccagccctggccgaaagatgatcactcaccagacggaagcaagcgtgctgcgtggagcatccatgcgaagatgtcaattccatagatcaataggtttccagttttcttcgtgatatgttaatatagcaaacttaccatgatccgg

SEQ ID NO: 2211 - DNA, 493 bp, Homo sapiens
cgtaacatccaggttgatgaagctaatttattgacttggcaagggcttattgttcctgacaaccctccatatgataagggagccttcagaatcgaaatcaactttccagcagagtacccattcaaaccaccgaagatcacatttaaaacaaagatctatcacccaaacatcgacgaaaaggggcaggtctgtctgccagtaattagtgccgaaaactggaagccagcaaccaaaaccgaccaagtaatccagtccctcatagcactggtgaatgacccccagcctgagcacccgcttcgggctgacctagctgaagaatactctaaggaccgtaaaaaattctgtaagaatgctgaagagtttacaaagaaatatggggaaaagcgacctgtggactaaaatctgccacgattggttccagcaagtgtgagcagagaccccgtgcagtgcattcagacaccccgcaaagcaggactctgtggaaattgacacg

SEQ ID NO: 2212 - DNA, 469 bp, Homo sapiens
  misc_feature (238)..(256): n includes a, c, g, or t, or contains no nucleotide
  misc_feature (416)..(416): n includes a, c, g, or t, or contains no nucleotide
tgtcgtctttggagcgatacagttgtgttgttaatctggtttattatttttcttcagtgtttggtttttctttttctttttgtttggttcgtcggtttgtttttgtttttgtttttttccccctttctcctcccctcctcctttttatgaaacttgaaaacttgaaggactgctgtgtatttgtaaataacaaaactattgtgcactctgtgcttgtaaatgtccctcgtccaaaccnnnnnnnnnnnnnnnnnnntggcagaggatgtggtctgtttttgatgtcccccctcccgcccccctggtgtgaacgtgtgggaccagaccctgtcctgggggtgcgcccaagtcactttaaccacaaaacgccatcgtcgtcagggtaagctctgctctctacaaagactcgcgagccnggccaaggggccttgtcttggctgggtttgtcagaggtcaaaccggctctttt

SEQ ID NO: 2213 - DNA, 548 bp, Homo sapiens
  misc_feature (255)..(255): n includes a, c, g, or t, or contains no nucleotide
  misc_feature (263)..(263): n includes a, c, g, or t, or contains no nucleotide
  misc_feature (270)..(278): n includes a, c, g, or t, or contains no nucleotide
  misc_feature (475)..(475): n includes a, c, g, or t, or contains no nucleotide
  misc_feature (523)..(523): n includes a, c, g, or t, or contains no nucleotide
gaaagccgtgcgtgcgcgttatttatttaagtgcgcctgtgtgcgcgggtgtgggagcacactttgcaaagccacagcgtttctggttttgggtgtacagtcttgtgtgcctggcgagaagaatattttctatttttttaagtcatttcatgtttctgtctggggaaggcaagttagttaagtatcactgatgtgggttgagaccagcactctgtgaaaccttgaaatgagaagtaaaggcagatgaaaagaaanaaaaaaanaaaaaannnnnnnnnatgttctcggctcaaaaagaaacaagggagtgtaggtttaaaaccaaaacaggagagaagacaaaccccgctccggctggagttagttagaaccagaactttattgtagcggatacactttctgacctatcatgagtatacacatctgcgaagggaaaccgcgcggcgacacggtgaaggacatcccctgggcgtgnggtctgtccgctgtctaaacagagcagctacagggacgggacatggangatggcacacatagcacagccacca

SEQ ID NO: 2214 - DNA, 229 bp, Homo sapiens
  misc_feature (57)..(74): n includes a, c, g, or t, or contains no nucleotide
  misc_feature (87)..(87): n includes a, c, g, or t, or contains no nucleotide
  misc_feature (94)..(94): n includes a, c, g, or t, or contains no nucleotide
  misc_feature (113)..(114): n includes a, c, g, or t, or contains no nucleotide
  misc_feature (133)..(133): n includes a, c, g, or t, or contains no nucleotide
  misc_feature (195)..(196): n includes a, c, g, or t, or contains no nucleotide
cctgaggaccaggaagtagagcagcaggtgcagaaagagctggaacaggtggaaatnnnnnnnnnnnnnnnnnnagaggagctccangctcagngccagcccattggcgcctnngttgcccgcatccaggccntgcggcaggccctgtgctagcgtgttcgcaccaggaacgcaggtgctgggctgtcggggagnnctcaggccacctccaggaacagaacacagtttt

SEQ ID NO: 2215 - DNA, 323 bp, Homo sapiens
  misc_feature (279)..(279): n includes a, c, g, or t, or contains no nucleotide
ggggacctcccttgggagatcaatcccctgtactcctgttctttgctccgtgagaaagatccacctacgacctcaggtcctcagaccgaccagcccaaggaacatctcaccaattttaaatccggagcttgctacacttgctggaaatctggccactgggcaaggaatgcccgcagcccgggattcctcctaagccgcgtcccgtctgtgtgggaccccactgaaaatcggactgttcaactcacctggcagccactcccagagcccctggaactctgnccaaggctctctgactgactccttcccagatcttctcggcttag

SEQ ID NO: 2216 - DNA, 401 bp, Homo sapiens
  misc_feature (26)..(43): n includes a, c, g, or t, or contains no nucleotide
ccatgagactcctgggtatttgcatnnnnnnnnnnnnnnnnnnttaccaccatctctgatatagacacactttttgagttgcagtttctgttagaattttttggagactaacttgccaattctgtgaatgttattgaatatttaaaaagctgggtctgtaatgggaggcattttattagctgttgtgattgggtaacatgtccccttagatttcctgatttaaaattatacaaaattactatttttgataaaataaaggaacacctacagaaaattaagtttctaagatgtttctatacttcattagaaaagattttattactattacttatggttattggtgattaacacttaatgcgtctcctctgattttgtgttccatgaggtgcttggaacatttg

SEQ ID NO: 2217 - DNA, 519 bp, Homo sapiens
  misc_feature (83)..(83): n includes a, c, g, or t, or contains no nucleotide
  misc_feature (98)..(98): n includes a, c, g, or t, or contains no nucleotide
  misc_feature (103)..(103): n includes a, c, g, or t, or contains no nucleotide
  misc_feature (109)..(109): n includes a, c, g, or t, or contains no nucleotide
  misc_feature (113)..(113): n includes a, c, g, or t, or contains no nucleotide
  misc_feature (244)..(282): n includes a, c, g, or t, or contains no nucleotide
  misc_feature (384)..(399): n includes a, c, g, or t, or contains no nucleotide
tccagatgtgtttgcccgagaaagactagcagccaaaatagatctacctgaagcaagaatacaggtatggttttctaatcgangggccaaatggagangagangaaaanctgnggaatcagagaagacaggccagcaacacacctagtcatattcctatcagcagtagtttcagcaccagtgtctaccaaccaattccacaacccaccacaccggtttcctccttcacatctggctccatgttnnnnnnnnnnnnnnnnnnnnnnnnnnnnnnnnnnnnnnntctgccgcctatgcccagcttcaccatggcaaataacctgcctatgcaacccccagtccccagccagacctcctcatactcctgcatgctgcccaccagccnnnnnnnnnnnnnnnngagttatgatacctacacccccccacatatgcagacacacatgaacagtcagccaatgggcacctcgggcaccacttcaacaggactcatttcccctggtgtgtcagttccagttcaagt

SEQ ID NO: 2218 - DNA, 320 bp, Homo sapiens
  misc_feature (64)..(123): n includes a, c, g, or t, or contains no nucleotide
  misc_feature (167)..(200): n includes a, c, g, or t, or contains no nucleotide
agctagcttcagagccggtgcctccggagccagcgtggtggccatagacaacaagttcgaacannnnnnnnnnnnnnnnnnnnnnnnnnnnnnnnnnnnnnnnnnnnnnnnnnnnnnnnnnnngaaggagcagatccgagagctggtggagaagaactcccagctannnnnnnnnnnnnnnnnnnnnnnnnnnnnnnnnngcccagagcagctggagaagttccagtcctgtctgagccctgaagagccagctcccgaatccccacaagtgcccgaggcccctggtggttctgcggtgtaagtcgctctgtcctcagggt

SEQ ID NO: 2219 - DNA, 511 bp, Homo sapiens
gtgtctcctcctcgtgtagcagcttgagaagaggcttgggagtgcagcttctcaaaggagaccgatgcttgctcaggatgtcgacagctgtggcttccttgtttttgctagccatatttttaaatcagggttgaactgacaaaaataatttaaagacgtttacttcccttgaactttgaacctgtgaaatgctttaccttgtttacaatttggcaaagttgcagtttgttcttgtttttagtttagttttgttttggtgttttgatacctgtactgtgttcttcacagaccctttgtagcgtggtcaggtctgctgtaacatttcccaccaactctcttgctgtccacatcaacagctaaatcatttattcatatggatctctaccatccccatgccttgcccaggtccagttccatttctctcattcacaagatgctttgaaggttctgattttcaactgatcaaactaatgcaaaaaaaaaaagtatgtattcttcactactgagtttc

SEQ ID NO: 2220 - DNA, 439 bp, Homo sapiens
agcacgacattgagactattgaggaaaaggaggaagatcttaagagagaagaggaaattgccaagctaaataactccagtccaaattccagtggaggagttaaagaggattgcactgcctccatggaaccttcagcaattgaactcccagattatttgataaaatatatcgctatcgtctcctatgagcaacgccagaattataaggatgacttcaatgcagagtatgatgagtacagagctttgcatgccaggatggagactgtagctagaagatttatcaaactagatgcacaaagaaagcgcctttctccaggctcaaaagagtatcagaatgttcatgaagaagtcttacaagaatatcagaagataaagcagtctagtcccaattaccatgaagaaaaatacagatgtgaatatcttcataacaagctggctca

SEQ ID NO: 2221 - DNA, 353 bp, Homo sapiens
  misc_feature (150)..(150): n includes a, c, g, or t, or contains no nucleotide
  misc_feature (187)..(187): n includes a, c, g, or t, or contains no nucleotide
ttgatacccgcttcacacggcagacgccggtggacagtcctgatgacacagccctcagcgagagtgccaaccaggccttcctgggcttcacatacgtggcgccgtctgtcctggacagcatcaaggagggcttctccttccagcccaagntgcgctcacccaggcgcctcaacagtagcccccgggnccccgtcagccccctcaagttctccccttttgaggggtttcggcccagccccagcctgccggagcccacggagctacctctacctccactcctgccaccgccgccgccctcgaccaccgcccctctccccatccgtcccccctcagggaccaagaagtccaagagg

SEQ ID NO: 2222 - DNA, 410 bp, Homo sapiens
  misc_feature (37)..(38): n includes a, c, g, or t, or contains no nucleotide
  misc_feature (53)..(57): n includes a, c, g, or t, or contains no nucleotide
  misc_feature (149)..(197): n includes a, c, g, or t, or contains no nucleotide
  misc_feature (218)..(219): n includes a, c, g, or t, or contains no nucleotide
agagcagctatggtgtggctgcccccgtggacttccnncgcaaacagagccannnnnttcgctcgaggggccccagccaggcggagcgtgagggcccgggaacaccacccaccaccctggcacggggcaaagcacggagcatcagcctnnnnnnnnnnnnnnnnnnnnnnnnnnnnnnnnnnnnnnnnnnnnnnnnntttattgacacacccaagggnnccgaggggctgcgtgtgggaggctggggacccagacttttggccccagcgctggcccccccagccccacaccctatatctccgtgtgctcctcggtgttacttccctttcatatgaggggacccagcgccggggggagggaggagggcgtgggcatgggcgcagaggcttttccagtgtgtataaatccat

SEQ ID NO: 2223 - DNA, 394 bp, Homo sapiens
  misc_feature (190)..(191): n includes a, c, g, or t, or contains no nucleotide
  misc_feature (193)..(193): n includes a, c, g, or t, or contains no nucleotide
  misc_feature (195)..(203): n includes a, c, g, or t, or contains no nucleotide
  misc_feature (205)..(207): n includes a, c, g, or t, or contains no nucleotide
  misc_feature (209)..(209): n includes a, c, g, or t, or contains no nucleotide
  misc_feature (327)..(344): n includes a, c, g, or t, or contains no nucleotide
  misc_feature (358)..(369): n includes a, c, g, or t, or contains no nucleotide
aaagtaagagactccagcatggccttctgtttgccccgcagtaaagtaacttccatataaaatggtatttgaaagtgagagttcatgacaacagaccgttttccatttcatctgtattttatctccgtgactccaacttgtgggtttgttctgtttttccatgagaataaaatactggcggtttttttcnnanannnnnnnnnannnanaagtaggttactagaattatgttactgtgtcttattggttcaatgatgatttctctggcatattagacttttattttttcccccatggaagcacttgaggaaataaatagtacactgnnnnnnnnnnnnnnnnnnaaaaaaaaaaaaannnnnnnnnnnnttgagaattgctagtctgcttctga

SEQ ID NO: 2224 - DNA, 493 bp, Homo sapiens
  misc_feature (61)..(63): n includes a, c, g, or t, or contains no nucleotide
  misc_feature (73)..(73): n includes a, c, g, or t, or contains no nucleotide
gttctcagtatcagcccatggtttcaggatcaaagctgtcatgttggagattggtaatggnnntcctgtcttngtacagttgaattcctagtcttccttcatccttgccctctgttggcacaggcattatctctgcaattttagaaaatgacaagtagagaatactacattgagaaactaaaccctcttcttggggtcctgatactcattcccatttgtcccagtgctgacaacccaatcttcccaatactttcaggcctgctctacaaaagtacctgttcttgtagaaattttacagtctgccattttgggtgcccaccccaatttttaccttttagtaagttggcatgaaattttggtaaaatctgaaaatcacatttcagaataaaacaattgggcaaaactacctaggctttactcttgagtgtctccttttgatagggattgtttctggaccagtttgtctaagtcctggctcttattggttcatatg

SEQ ID NO: 2225 - DNA, 281 bp, Homo sapiens
  misc_feature (26)..(63): n includes a, c, g, or t, or contains no nucleotide
ctccaaacagctctcagagtaggcannnnnnnnnnnnnnnnnnnnnnnnnnnnnnnnnnnnnntgcaaattcccttccacccatccctctacctcctctggggatggcttgccgacatgctttagaaactcccctcttgggaatgctcctctgactgagggctccaacagctttaatgaaatcagccgagagggtaaaaaccaacctgttgcatagaatggaggggggaaaaagcacatactcaatagatttttgagtgtggtactctgtatttttgcagc

SEQ ID NO: 2226 - DNA, 555 bp, Homo sapiens
  misc_feature (72)..(72): n includes a, c, g, or t, or contains no nucleotide
  misc_feature (101)..(115): n includes a, c, g, or t, or contains no nucleotide
  misc_feature (260)..(260): n includes a, c, g, or t, or contains no nucleotide
  misc_feature (326)..(326): n includes a, c, g, or t, or contains no nucleotide
  misc_feature (353)..(384): n includes a, c, g, or t, or contains no nucleotide
  misc_feature (397)..(397): n includes a, c, g, or t, or contains no nucleotide
  misc_feature (439)..(439): n includes a, c, g, or t, or contains no nucleotide
  misc_feature (453)..(453): n includes a, c, g, or t, or contains no nucleotide
  misc_feature (469)..(469): n includes a, c, g, or t, or contains no nucleotide
  misc_feature (473)..(473): n includes a, c, g, or t, or contains no nucleotide
  misc_feature (479)..(480): n includes a, c, g, or t, or contains no nucleotide
  misc_feature (494)..(494): n includes a, c, g, or t, or contains no nucleotide
  misc_feature (499)..(499): n includes a, c, g, or t, or contains no nucleotide
  misc_feature (528)..(528): n includes a, c, g, or t, or contains no nucleotide
cagcctatcaagctggccagggtcaccaaggtcctgggcaggaccggttctcagggacagtgcacgcaggtncgcgtggaattcatggacgacacgagccnnnnnnnnnnnnnnnatgtaaaaggccccgtgcgcgagggcgacgtgctcacccttttggagtcagagcgagaagcccggaggttgcgctgagcttggctgctcgctgggtcttggatgtcgggttcgaccacttggccgatgggaatggtctgtcacantctgctccttttttttgtccgccacacgtaactgagatgctcctttaaataaagcgtttgtgtttncaagttaaaaaaaaaaaaaaaaaaaannnnnnnnnnnnnnnnnnnnnnnnnnnnnnnntcaggttcttgtnctgggttatacgactagggtttctccaggtttcttgagtggnctcccagggcggtncaccgatcctccgcantctnggaaannctgggccgtgcggntcttnccaaacgaagcttttccttttttgaggcnggtgggttcgtgtttgttcgattgcac

SEQ ID NO: 2227 - DNA, 604 bp, Homo sapiens
ggccccagggctccaggcggtgcttgttcctcagcctcttctccttcctgatcgtggcaggcgccaccacgctcttctgcctgctgcactttggagtgatcggcccccagagggaagagttccccagggacctctctctaatcagccctctggcccaggcagtcagatcatcttctcgaaccccgagtgacaagcctgtagcccatgttgtagcaaaccctcaagctgaggggcagctccagtggctgaaccgccgggccaatgccctcctggccaatggcgtggagctgagagataaccagctggtggtgccatcagagggcctgtacctcatctactcccaggtcctcttcaagggccaaggctgcccctccacccatgtgctcctcacccacaccatcagccgcatcgccgtctcctaccagaccaaggtcaacctcctctctgccatcaagagcccctgccagagggagaccccagagggggctgaggccaagccctggtatgagcccatctatctgggaggggtcttccagctggagaagggtgaccgactcagcgctgagatcaatcggcccgactatctcgactttgccgagtctgg

SEQ ID NO: 2228 - DNA, 455 bp, Homo sapiens
  misc_feature (34)..(49): n includes a, c, g, or t, or contains no nucleotide
catcaaacttgtgaggtgtttgcatgtggccatnnnnnnnnnnnnnnnntgaagcattggacatttatagataattgatataaaagaatcgccatgcccatggactaagaacgatgctggctttcaagcaaaaaagaaaaataatcattgtttattgtatactgcctttttgtaatcctgtacaattgcatcacgggtggggataaaaagaggaatattctggtttatttcctagactgttatttaaaaaaaaaaaaaacattgtgttaggacagcatataaatgtaataagtatcacactgtatataaacatatcaatgtttgtcctgtataagaattactaaattacaaatgcaatttcatttaaacttctaggttaagtttgagcctgaaattttaatgaagtgcaatactgagtgtgcctcattatcttgcagctgtaaacatattggaat

SEQ ID NO: 2229 - DNA, 354 bp, Homo sapiens
  misc_feature (256)..(256): n includes a, c, g, or t, or contains no nucleotide
cttaatggttgtgtagtcttatacgtgactcctgacttcaaggatcctggtctgtacctctttaggtcaacacgttttgagtgaactggtgttggttatttggaattagatataaagtcatatattctttggtgaggaatggcttcatataggagttcacaygcaaaacaagctttgccaaaataatagagtgaaaattggtagatcagagttgaggctgattggagggccaaactgaaagactggctgggcatgntggctcacacctgaaaacccagcactttgggagcccaaggcaggcagattgtttgagcccaggaattcaagaccagcctagataacctgggtatccca

SEQ ID NO: 2230 - DNA, 418 bp, Homo sapiens
  misc_feature (98)..(152): n includes a, c, g, or t, or contains no nucleotide
tcttgagggagcttagccaatgtgggagcagcggtttggggagcagagacactaacgacttcagggcagggctctgatattccatgaatgtatcaggnnnnnnnnnnnnnnnnnnnnnnnnnnnnnnnnnnnnnnnnnnnnnnnnnnnnnnnagtgtgagtaagagctggtgtctgattgttaagtctaaatatttccttaaactgtgtggactgtgatgccacacagagtggtctttctggagaggttataggtcactcctggggcctcttgggtcccccacgtgacagtgcctgggaatgtattattctgcagcatgacctgtgaccagcactgtctcagtttcactttcacatagatgtccctttcttggccagttatcccttccttttagcctagttcatccaatcctcactgg

SEQ ID NO: 2231 - DNA, 307 bp, Homo sapiens
gcttcaatagtccatcgagccctgactttgtcttcatgctgagcagcaaagctgggggctgtggcctcaatctcattggggctaaccggctggtcatgtttgaccctgactggaacccagccaatgatgaacaagccatggcccgggtctggcgagatggtcaaaagaagacttgctatatctaccgcctgctgtctgcagggaccattgaggagaagatcttccagcgtcagagccacaagaaggcactgagcagctgtgtggtggatgaggagcaggatgtagagcgccacttctctctgggcga

SEQ ID NO: 2232 - DNA, 124 bp, Homo sapiens
gatccagtaccactctttggatgtgatagcattcctgctggcctgcgtggcaactgtgatatttatcatcacaaaattttgcctgttttgtttccgaaagcttgccaaaacaggaaagaagaag

SEQ ID NO: 2233 - DNA, 261 bp, Homo sapiens
  misc_feature (29)..(29): n includes a, c, g, or t, or contains no nucleotide
  misc_feature (226)..(226): n includes a, c, g, or t, or contains no nucleotide
tttgacaaaactgtgagtgaccctttttnaaacaatgctgagcaggccctgagctataatcaacggtgagctttaatgtctatgctgacagttaggttttgctctcttttgtaacaggttacgtagaccagcagtgtttaaatctaaatacgttgtgagtctgttatctgtcctatcgcgttttttaaatgactttttattctttatcatagctaagtaaataccnaaaaaaaaaaaaagctttgtaggacacttgtactt

SEQ ID NO: 2234 - DNA, 106 bp, Homo sapiens
aaaggacattcgtggcttagctgctgggtcagcagagactctccctgcaaacttccgggtgacttcttctatgtcttccccctctatgcagccaaagaagatgcag

SEQ ID NO: 2235 - DNA, 442 bp, Homo sapiens
ttagattggtccttttcaaaattcaaaaaaaaaagcaacatcttcatagatgaatgaaacccttgtataagtaatacttcagtaataattatgtatgttatggcttaaaagcaagtttcagtgaaggtcacctggcctggttgtgtgcacaatgtcatgtctgtgattgccttcttacaacagagatgggagctgagtgctagagtaggtgcagaagtggtaggtcagctacaaatttgaggacaagataccaaggcaaaccctagattggggtagagggaaaagggttcaacaaaggctgaactggattcttaaccaagaaacaaataatagcaatggtggtgcaccactgtaccccaggttctagtcatgtgttttttaggacgatttctgtctccacgatggtggaaacagtggggaactactgctggaaaaagcccta

SEQ ID NO: 2236 - DNA, 400 bp, Homo sapiens
  misc_feature (343)..(346): n includes a, c, g, or t, or contains no nucleotide
  misc_feature (355)..(355): n includes a, c, g, or t, or contains no nucleotide
  misc_feature (357)..(358): n includes a, c, g, or t, or contains no nucleotide
  misc_feature (360)..(360): n includes a, c, g, or t, or contains no nucleotide
  misc_feature (362)..(364): n includes a, c, g, or t, or contains no nucleotide
gcatatctcaaatgtatggcatctacctctacctgggtcacaaccaagtgggtttctactagatcggtgttccttgacagccaacaagggagctgacactgccctcctaagttctgatcttgctcctgttcaactggaacttgatggatcccatgtggtttcccccatcctgacgctgtggctcagacactctccctaagctggtccttccctccaaatcctgccttaaacacactcagaaggtagaaaacacttcagcagcaaagtcctcttcccaagccaacagttgtgttcttccaatcacatgatcttaccttttcaataaaaggcaaaacaaaccaannnncaacatagnannanannntttaaaaccattcacttctcatagtgattcacagag

SEQ ID NO: 2237 - DNA, 470 bp, Homo sapiens
  misc_feature (31)..(31): n includes a, c, g, or t, or contains no nucleotide
  misc_feature (46)..(70): n includes a, c, g, or t, or contains no nucleotide
  misc_feature (72)..(72): n includes a, c, g, or t, or contains no nucleotide
  misc_feature (313)..(329): n includes a, c, g, or t, or contains no nucleotide
  misc_feature (345)..(348): n includes a, c, g, or t, or contains no nucleotide
  misc_feature (378)..(419): n includes a, c, g, or t, or contains no nucleotide
aggcacaggaggatctctaaagcagtagccnaaacaccactttgtnnnnnnnnnnnnnnnnnnnnnnnnngnaaaaccattggggaggactaggacccatatgggaattattacctctcagggccgagaggacagaatggatataatctgaatcctgttaaattttctctaaactgtttcttagctgcactgtttatggaaataccaggaccagtttatgtttgtggttttgggaaaaattatttgtgttgggggaaatgttgtgggggtggggttgagttgggggtattttctaattttttttgtacatttnnnnnnnnnnnnnnnnntgagacccctttaaannnnaaaaaaaaaaaaaaaaaaaaaaaaaaaaannnnnnnnnnnnnnnnnnnnnnnnnnnnnnnnnnnnnnnnnnttgataattgtcataatgttgtgtgaaatattctctttagggagcctggga

SEQ ID NO: 2238 - DNA, 558 bp, Homo sapiens
  misc_feature (265)..(280): n includes a, c, g, or t, or contains no nucleotide
  misc_feature (319)..(336): n includes a, c, g, or t, or contains no nucleotide
  misc_feature (456)..(473): n includes a, c, g, or t, or contains no nucleotide
catcgtggtggctgtcttcatcttctgctggcttcccttctacatattcaacgtttcttccgtctccatggccatcagccccaccccagcccttaaaggcatgtttgactttgtggtggtcctcacctatgctaacagctgtgccaaccctatcctatatgccttcttgtctgacaacttcaagaagagcttccagaatgtcctctgcttggtcaaggtgagcggcacagatgatggggagcggagtgacagtaagcaggacaannnnnnnnnnnnnnnnaccacggagacccagaggaccctcctcaatggagacctnnnnnnnnnnnnnnnnnntgcttggggggtgggaaagaaccaagccatgctctgtctactggcaatgggctccctacccacactggcttcctgcctcccacccctcacacctggcttctagaatagaggattgctcannnnnnnnnnnnnnnnnngagaacggtgtttgagtcagcttgtctgattgaatgataatgtgctaaattgattacctcccccttaaagcgaacactgaaatgc

SEQ ID NO: 2239 - DNA, 232 bp, Homo sapiens
taatctcttgttatgcagggagtacagttcttttcattcatacataagttcagtagttgcttccctaactgcaaaggcaatctcatttagttgagtagctcttgaaagcagctttgagttagaagtatgtgtgttacaccctcacattagtgtgctgtgtggggcagttcaacacaaatgtaacaattatttttgtgaatgagagttggcatgtcaaatgcatcctctagaa

SEQ ID NO: 2240 - DNA, 367 bp, Homo sapiens
  misc_feature (137)..(204): n includes a, c, g, or t, or contains no nucleotide
  misc_feature (206)..(209): n includes a, c, g, or t, or contains no nucleotide
  misc_feature (212)..(212): n includes a, c, g, or t, or contains no nucleotide
cctcggcagatcatcagttagagcggagagggctagccctgagcccggccctcccccagctccttggctgcagccatcccgcttagcctgcctcacccacacccgtgtggtaccttcagccctggccaagctttgannnnnnnnnnnnnnnnnnnnnnnnnnnnnnnnnnnnnnnnnnnnnnnnnnnnnnnnnnnnnnnnnnnncnnnnttnttacccgaaagcatcactgccttggcccctccctcccggctgcccccatcacctctactgtctcctccctgggctaagcaggggagaagcgggctgggggtagcctggatgtgggccaagtccactgtcctccttggcggcaaaagcccattgaa

SEQ ID NO: 2241 - DNA, 590 bp, Homo sapiens
  misc_feature (76)..(76): n includes a, c, g, or t, or contains no nucleotide
  misc_feature (299)..(409): n includes a, c, g, or t, or contains no nucleotide
  misc_feature (549)..(551): n includes a, c, g, or t, or contains no nucleotide
  misc_feature (553)..(553): n includes a, c, g, or t, or contains no nucleotide
  misc_feature (556)..(565): n includes a, c, g, or t, or contains no nucleotide
cctggaccggatcctgcgggctatggggaaggcctaccaccctggctgcttcacctgcgtggtgtgtcaccgcggncctcgacggcatccccttcacagtggatgctacgagccagatccactgcattgaggactttcacaggaagtttgccccaagatgctcagtgtgcggtggggccataatgcctgagccaggtcaggaggagactgtgagaattgttgctctggatcgaagttttcacattggctgttacaagtgcgaggagtgtgggctgctgctctcctctgagggcgagtgnnnnnnnnnnnnnnnnnnnnnnnnnnnnnnnnnnnnnnnnnnnnnnnnnnnnnnnnnnnnnnnnnnnnnnnnnnnnnnnnnnnnnnnnnnnnnnnnnnnnnnnnnnnnnnngtacctgctgggttctcagttccagttcccatcctttgattgatcactctccctgacatccacctgtatgactttgtcaccaaatgctgtcttctctttctccaatcaagaaataataatccctcgagtttacaaaacannnanaannnnnnnnnngtctgttgtctcatctgattctccc

SEQ ID NO: 2242 - DNA, 208 bp, Homo sapiens
ttacctgcctagaggcagcgggatggactacatgacctcctggagtcccagccagttctgggagtctgttaagtccgggatgtgtgggagctttttaaggactgatcattggctctgaggacacttcaactagttagccttctatcttgaggtatataaactgtgaaaaagggtttctattctctctgaaagcacatgtctgtgttga

SEQ ID NO: 2243 - DNA, 128 bp, Homo sapiens
tcttccacaagagctttgtcaggaccaggttgttactggttcagcaactctgcagaaaatgtcctcccttgtggcttccttagctcctgttcttggcctgaagcctcacagctttgatggcagtgcct

SEQ ID NO: 2244 - DNA, 265 bp, Homo sapiens
tggtatcccgtaaggctgtggctgctctgctggtggtgcatgtagctgccatgctggcctcccagacggaagccttcgtccccatcttcacctatggcgaactccagaggatgcaggaaaaggaacggaataaagggcaaaagaaatccctgagtgtatggcagaggtctggggaggaaggtcctgtagaccctgcggagcccatcagggaagaagaaaacgaaatgatcaagctgactgctcctctggaaattggaatgaggat

SEQ ID NO: 2245 - DNA, 501 bp, Homo sapiens
  misc_feature (69)..(69): n includes a, c, g, or t, or contains no nucleotide
  misc_feature (71)..(71): n includes a, c, g, or t, or contains no nucleotide
  misc_feature (118)..(118): n includes a, c, g, or t, or contains no nucleotide
  misc_feature (286)..(286): n includes a, c, g, or t, or contains no nucleotide
  misc_feature (288)..(321): n includes a, c, g, or t, or contains no nucleotide
ccttgtagatggagcaagtgagcactgagggtctggtgccaatcctgtaggcacaaaaccagaagtttntnacattctctatttttgttaatcatcttctctttttccagaatttggnaagctagaatggtgggaatgtcagtagtgccagaaagagagaaccaagcttgtctttaaagttactgatcacaggacgttgctttttcactgtttcctattaatcttcagctgaacacaagcaaaccttctcaggaggtgtctcctaccctcttattgttcctcttangnnnnnnnnnnnnnnnnnnnnnnnnnnnnnnnnnnattttcctttctgtattaattataccagtgttaagtgacatagataagaactttgcacacttcaaatcagagcagtgattctctcttctctccccttttccttcagagtgaatcatccagactcctcatggataggtcgggtgttaaagttgttttgattatgtaccttttgatagatcc

SEQ ID NO: 2246 - DNA, 415 bp, Homo sapiens
gttcggatttgactgcctgtatatgttttgtgaaatggtcctgtttttgggtaggtgacacgtggactctagtatgtaaatgttacttgaatctgtgcttcataatagtgtgtggcatgtatgtgcagactcttggatgctttatgcctgcgcaccaggagccctgtcctcacgttcccaggagggcggcttcacccttcgtaaccaggagacaaggcggccatggatttgcccttgattctattttgctaatggaagatagaaaggagagaaggtttttttttttttttaacattctgaagatggtgctgtgtcaagaaggaccttttttttcccctctcccctattttttaagtaccttggaggaggagaggttggtgacatgcatggtggggatctatggcctctggtgctt

SEQ ID NO: 2247 - DNA, 373 bp, Homo sapiens
  misc_feature (257)..(273): n includes a, c, g, or t, or contains no nucleotide
  misc_feature (298)..(298): n includes a, c, g, or t, or contains no nucleotide
  misc_feature (316)..(316): n includes a, c, g, or t, or contains no nucleotide
ccgggcggggcagacgatgactcgcccctcgcccacccgctcgctgcccggccctccccggctatgacgcccccggcccgtgctcaacaccgcctgggccacagctaggccctcccaccggctcgctgcagagccgggcccagcgcgccctgtccccgtgccagggaaccggggttgaccgcccccgcccagcccgcgctatatatttgtacaataggactgtttactgcccacctccgcctgccagcccaccccannnnnnnnnnnnnnnnnggcggcgggtttgcttcctgcgctntgagatgagctgccctcngctccctccggggtggcgcgcccgggggaggggggagttgggggctggatagcttcc

SEQ ID NO: 2248 - DNA, 103 bp, Homo sapiens
  misc_feature (35)..(35): n includes a, c, g, or t, or contains no nucleotide
  misc_feature (43)..(54): n includes a, c, g, or t, or contains no nucleotide
  misc_feature (58)..(58): n includes a, c, g, or t, or contains no nucleotide
ggtgcaagccatcgtccgcacggctggtggctggncagctgcnnnnnnnnnnnngaanggcggggagcctgccggctactgagtgctccaggaggacaaggct

SEQ ID NO: 2249 - DNA, 459 bp, Homo sapiens
  misc_feature (72)..(86): n includes a, c, g, or t, or contains no nucleotide
  misc_feature (100)..(118): n includes a, c, g, or t, or contains no nucleotide
  misc_feature (127)..(128): n includes a, c, g, or t, or contains no nucleotide
  misc_feature (138)..(139): n includes a, c, g, or t, or contains no nucleotide
  misc_feature (162)..(162): n includes a, c, g, or t, or contains no nucleotide
  misc_feature (188)..(188): n includes a, c, g, or t, or contains no nucleotide
  misc_feature (235)..(235): n includes a, c, g, or t, or contains no nucleotide
  misc_feature (245)..(245): n includes a, c, g, or t, or contains no nucleotide
  misc_feature (276)..(276): n includes a, c, g, or t, or contains no nucleotide
  misc_feature (335)..(335): n includes a, c, g, or t, or contains no nucleotide
attggtgaagtcctgggcaagaagctggaggaaaggggttttgacaaggcctatgttgtccttggccagttnnnnnnnnnnnnnnnagatgaagacctcnnnnnnnnnnnnnnnnnnnacacttgtnngcgccaacgnncaagcagtcccgggactgcttcnggatgccttcgagagtggtgcgacgnccttcttgtgatgctctctgggaagctctcaatccccagccctcatnccagagtttngcagccgagtagggactcctcccctgtcctnctacgaaggaaaagattgctattgtcgtactcacctccgacgtactccggggtcttttngggagttttctcccctaaccatttcaacttttttttggattctcgctcttgcatgcctcccccgtcctttttcccttgccagttccctggtgacagttaccagctttcctgaatggattcccgg

SEQ ID NO: 2250 - DNA, 428 bp, Homo sapiens
  misc_feature (26)..(26): n includes a, c, g, or t, or contains no nucleotide
  misc_feature (100)..(114): n includes a, c, g, or t, or contains no nucleotide
cactggtttcagctcctagagcaacnactgcagaatctccatggtccaaagtcctccagaacactcaatgtcggaacgttccgaagatgacgtcggagcnnnnnnnnnnnnnnngtctctcggctgctgctgccgaaggaacagggaaaaagcaacaagaaggaagagcaatggcgacactggatcgcaaagtgcccagtccggaggcgtttctgggcaaaccctggtcctcctggatcgacgccgccaaattacactgctccgacaatgtagatttagaagaggctggaaaagagggtggaaaaagcagggaggttatgaggcttaataaagaagcatggaaatacggtacctgaaatgggacacactgagtagataggtcatcccagaccaagatatgcaagagaagccacaacctgctgcaattg

SEQ ID NO: 2251 - DNA, 281 bp, Homo sapiens
  misc_feature (100)..(100): n includes a, c, g, or t, or contains no nucleotide
  misc_feature (183)..(200): n includes a, c, g, or t, or contains no nucleotide
attcatgaagtgatcgtagtcatgcctcagaagcagtcccccctgtaaatagtccttggatattaccgtctggttgtcgtctgtcatctcctcctgtctnggcccgaggccgccccgtgactgtgaccgagggagggagggctgcctgatccctctcctcgcctgccttctggaagacttcannnnnnnnnnnnnnnnnngtgccaggaagccaaagcttactttgtagaactgacactaaactacccgaaggacttaggtgctttgtgtacttaacccca

SEQ ID NO: 2252 - DNA, 404 bp, Homo sapiens
  misc_feature (110)..(110): n includes a, c, g, or t, or contains no nucleotide
  misc_feature (162)..(162): n includes a, c, g, or t, or contains no nucleotide
  misc_feature (186)..(204): n includes a, c, g, or t, or contains no nucleotide
  misc_feature (265)..(265): n includes a, c, g, or t, or contains no nucleotide
  misc_feature (283)..(283): n includes a, c, g, or t, or contains no nucleotide
  misc_feature (299)..(299): n includes a, c, g, or t, or contains no nucleotide
  misc_feature (331)..(331): n includes a, c, g, or t, or contains no nucleotide
  misc_feature (379)..(379): n includes a, c, g, or t, or contains no nucleotide
gcagagccgtgctcagcttcctctgctgcgggtgtctccggctgggcatgcgagggcccggggactgcctggcccgggccgtcgaggctcactccggagcttccaccacngacagctctctgaggccaagggacagctttcgcggctcccgctcgctcagcnttcggatgcgggagcccctgtccnnnnnnnnnnnnnnnnnnngcatctgaagttgcagtcttgcgtgtggatggtgcagccaccgggtgcgtgccaggcaggnccctcctggggtacaggnaagctgtgtgcacgcnagcctcgcctgtatggggagcagggaacgggnacaggcccccatggtcttcccggtggcctctcggggcttctgacgccnaatgggcttcccatggtcaccctgg

SEQ ID NO: 2253 - DNA, 553 bp, Homo sapiens
attggctctttctaaatcatgtgacgttttgactggcttgagattcagatgcataatttttaattattgtgaagtggagagcctcaagataaaactctgtcattacgaagatgattttactcagcttatccaaaattatctctgtttactttttagaattttgtacattatcttttgggatccttaattagagatgatttctggaacattcagtctagaaagaaaacattggaattgactgatctctgtggtttggtttagaaaattcccctgtgcatggtattacctttttcaagctcagattcatctaatcctcaactgtacatgtgtacattcttcacctcctggtgccctatcccgcaaaatgggcttcctgcctgggtttttctcttctcacattttttaaatggtcccctgtgtttgtagagaactcccttatacagagttttggttctagttttatttcgtagattttgcattttgtaccttttgagactatgtatttatatttggatcagatgcatatttattaatgtacagtcactgctagtgt

SEQ ID NO: 2254 - DNA, 475 bp, Homo sapiens
  misc_feature (55)..(104): n includes a, c, g, or t, or contains no nucleotide
  misc_feature (114)..(132): n includes a, c, g, or t, or contains no nucleotide
  misc_feature (147)..(170): n includes a, c, g, or t, or contains no nucleotide
  misc_feature (388)..(406): n includes a, c, g, or t, or contains no nucleotide
tcagcggcaccatccgatttaacctggaccctgagaggaagtgctcagatagcannnnnnnnnnnnnnnnnnnnnnnnnnnnnnnnnnnnnnnnnnnnnnnnnnctgccaggannnnnnnnnnnnnnnnnnncagaaggcggggagnnnnnnnnnnnnnnnnnnnnnnnnctgttctgcctggcccgggccttcgtgaggaagaccagcatcttcatcatggacgaggccacggcttccattgacatggccacggaaaacatcctccaaaaggtggtgatgacagccttcgcagaccgcactgtggtcaccatcgcgcatcgagtgcacaccatcctgagtgcagacctggtgatcgtcctgaagcggggtgccatccttgagttcgnnnnnnnnnnnnnnnnnnncagccggaaggacagcgtcttcgcctccttcgtccgtgcagacaagtgacctgccagagcccaagtgcc

SEQ ID NO: 2255 - DNA, 395 bp, Homo sapiens
  misc_feature (29)..(29): n includes a, c, g, or t, or contains no nucleotide
  misc_feature (336)..(350): n includes a, c, g, or t, or contains no nucleotide
cgagcagctcttcttcgtccgtttggtangtaaaacccccatcgaaactctcatccgcgatatgttactgtctgggagcagcttcaactggccttacatgtccatccagtgctcctagaccttgggcgcttcccacctgccccgtccccctagagactcagaggacccacctgggccaaggactccaaagccgcggggacaccgggaagtgcagcgggccaggcaggctgggtgggagggaggagggccgagacaggagcagcccacccagcagaaatacaatccgagctacaaagcatgggaaaaagagactcttttaggatcagatctgtgagnnnnnnnnnnnnnnnaaacaaaacaaacaaaaaaaagaaccttgtgtctgtctggtgaaa

SEQ ID NO: 2256 - DNA, 274 bp, Homo sapiens
  misc_feature (40)..(40): n includes a, c, g, or t, or contains no nucleotide
  misc_feature (172)..(172): n includes a, c, g, or t, or contains no nucleotide
  misc_feature (222)..(223): n includes a, c, g, or t, or contains no nucleotide
gacgtggacccgttctactatgactatgagaccgttcgcnaatgggggcctgatcttcgctggactggccttcatcgtggggctcctcatcctcctcagcagaagattccgctgtgggggcaataagaagcgcaggcaaatcaatgaagatgagccgtaacagcagcctcgncggtgccacccactgcactggggccagctgggaagccaagcatggccctnnctctggcgcctccccttcttccctgggctttagacctttgtccccgtcact

SEQ ID NO: 2257 - DNA, 524 bp, Homo sapiens
  misc_feature (103)..(103): n includes a, c, g, or t, or contains no nucleotide
atcctgggtctcttggcctgtcctgtagctggtttattttttactttgccccctccccactttttttgagatccatcctttatcaagaagtctgaagcgactntaaaggtttttgaattcagatttaaaaaccaacttataaagcattgcaacaaggttacctctattttgccacaagcgtctcgggattgtgtttgacttgtgtctgtccaagaacttttcccccaaagatgtgtatagttattggttaaaatgactgttttctctctctatggaaataaaaaggaaaaaaaaaaaggaaactttttttgtttgctcttgcattgcaaaaattataaagtaatttattatttattgtcggaagacttgccacttttcatgtcatttgacattttttgtttgctgaagtgaaaaaaaaagataaaggttgtacggtggtctttgaattatatgtctaattctatgtgttttgtctttttcttaaatattatgtgaaatcaaagcgccatatgtagaattatatc

SEQ ID NO: 2258 - DNA, 217 bp, Homo sapiens
cctaggtggtgccaggccagagtccaagctcagggacagcagtccctcctgtgggggcccctgaactgggctcacatcccacacattttccaaaccactcccattgtgagcctttggtcctggtggtgtccctctggttgtgggaccaagagcttgtgcccatttttcatctgaggaaggaggcagcagaggccacgggctggtctgggtcccactc

SEQ ID NO: 2259 - DNA, 293 bp, Homo sapiens
  misc_feature (189)..(211): n includes a, c, g, or t, or contains no nucleotide
atatttggtagtacacaggttctcccttgttcttttaaattttgtgaaatataacttacaaataagtacttaaaacagagcttaatgggtaaagcaacagctgtgtaatcacaaactagatgcagaggaggtcttgccagcactccaaaatctctgtgtgtcccctcttgacactcactgtttcccccnnnnnnnnnnnnnnnnnnnnnnngtaattctccctctgtccttttaagaattattttaccagttatgtgtataacaatatggtttacattttgctcacttttgac

SEQ ID NO: 2260 - DNA, 504 bp, Homo sapiens
  misc_feature (26)..(26): n includes a, c, g, or t, or contains no nucleotide
  misc_feature (29)..(29): n includes a, c, g, or t, or contains no nucleotide
  misc_feature (31)..(31): n includes a, c, g, or t, or contains no nucleotide
  misc_feature (33)..(34): n includes a, c, g, or t, or contains no nucleotide
  misc_feature (40)..(40): n includes a, c, g, or t, or contains no nucleotide
  misc_feature (42)..(43): n includes a, c, g, or t, or contains no nucleotide
  misc_feature (46)..(47): n includes a, c, g, or t, or contains no nucleotide
  misc_feature (50)..(50): n includes a, c, g, or t, or contains no nucleotide
  misc_feature (52)..(52): n includes a, c, g, or t, or contains no nucleotide
  misc_feature (56)..(56): n includes a, c, g, or t, or contains no nucleotide
  misc_feature (60)..(61): n includes a, c, g, or t, or contains no nucleotide
  misc_feature (63)..(63): n includes a, c, g, or t, or contains no nucleotide
  misc_feature (67)..(68): n includes a, c, g, or t, or contains no nucleotide
  misc_feature (71)..(72): n includes a, c, g, or t, or contains no nucleotide
  misc_feature (76)..(81): n includes a, c, g, or t, or contains no nucleotide
  misc_feature (83)..(83): n includes a, c, g, or t, or contains no nucleotide
  misc_feature (150)..(151): n includes a, c, g, or t, or contains no nucleotide
  misc_feature (171)..(187): n includes a, c, g, or t, or contains no nucleotide
  misc_feature (227)..(242): n includes a, c, g, or t, or contains no nucleotide
  misc_feature (244)..(244): n includes a, c, g, or t, or contains no nucleotide
  misc_feature (276)..(276): n includes a, c, g, or t, or contains no nucleotide
  misc_feature (282)..(282): n includes a, c, g, or t, or contains no nucleotide
  misc_feature (296)..(322): n includes a, c, g, or t, or contains no nucleotide
  misc_feature (350)..(350): n includes a, c, g, or t, or contains no nucleotide
  misc_feature (369)..(369): n includes a, c, g, or t, or contains no nucleotide
  misc_feature (388)..(388): n includes a, c, g, or t, or contains no nucleotide
  misc_feature (430)..(430): n includes a, c, g, or t, or contains no nucleotide
  misc_feature (434)..(434): n includes a, c, g, or t, or contains no nucleotide
  misc_feature (437)..(437): n includes a, c, g, or t, or contains no nucleotide
  misc_feature (442)..(442): n includes a, c, g, or t, or contains no nucleotide
agttcatgctgttagccactacccangcncngnnctgggntnntcnngcncntccngccnngngggnncannctgnnnnnncnggtgctggggctgctggtgtgggcgctgattgcggacaccccgtaccacctgtatccggcctatggnngggtgatgttcgtcgctgtnnnnnnnnnnnnnnnnncaatcgtcctcttcaacctctacctgtttcagctgcacannnnnnnnnnnnnnnntncctggccactggtgttaatgatctttaacatnagcgcnaccgttctctacannnnnnnnnnnnnnnnnnnnnnnnnnncagttgacctgacatccctgaggggcanccggccttataaccagcgngcggctgcctcgttctttngcgtgtttggtgatgatcgcctatggagtgagtgccttcttncagntancaggnctggcgaggagtaggcagcaatgcggccaccagtcagatggctggcggctatgcctaaacca

SEQ ID NO: 2261 - DNA, 249 bp, Homo sapiens
  misc_feature (26)..(26): n includes a, c, g, or t, or contains no nucleotide
  misc_feature (32)..(33): n includes a, c, g, or t, or contains no nucleotide
  misc_feature (47)..(47): n includes a, c, g, or t, or contains no nucleotide
  misc_feature (49)..(49): n includes a, c, g, or t, or contains no nucleotide
  misc_feature (52)..(52): n includes a, c, g, or t, or contains no nucleotide
  misc_feature (60)..(60): n includes a, c, g, or t, or contains no nucleotide
  misc_feature (143)..(143): n includes a, c, g, or t, or contains no nucleotide
  misc_feature (219)..(219): n includes a, c, g, or t, or contains no nucleotide
tcatcttctactatctggagggcacnaaggcnnagtatctggcagcnanggncctaaagnagcagtcatggcgattccacaccaagtacatgatgtggttccagaggcacgaggagcccaagaccatcactgacgagtttgancagggcacctacatctactttgactacgagaagtggggccagcggaagaaggaaggcttcacctttgagtaccgcnacctggaggaccgggacctccagtgacacc

SEQ ID NO: 2262 - DNA, 427 bp, Homo sapiens
  misc_feature (200)..(226): n includes a, c, g, or t, or contains no nucleotide
  misc_feature (316)..(331): n includes a, c, g, or t, or contains no nucleotide
  misc_feature (375)..(389): n includes a, c, g, or t, or contains no nucleotide
  misc_feature (400)..(402): n includes a, c, g, or t, or contains no nucleotide
agtttgcccattgtggcaaatggtttgtaagcactggaaaggacaaccttctgaatgcctggagaacaccttatggggccagtatattccagtccaaagaatcctcatcggtgcttagctgtgacatctccgtggacgacaaatacattgtcactggctctggggataagaaggccacagtttatgaagttatttattannnnnnnnnnnnnnnnnnnnnnnnnnntctcctcctggtagcactttgctctgtcatcctttttgttcacccccatccccgcatctaaaaccaaggatttcagatactcattgcagnnnnnnnnnnnnnnnncctttcttaacctcacttcccacttgctattgaattgtgaatannnnnnnnnnnnnnntgataccaaannntcagctgtctacttggaagaacatg

SEQ ID NO: 2263 - DNA, 519 bp, Homo sapiens
  misc_feature (48)..(48): n includes a, c, g, or t, or contains no nucleotide
agactctaaagaagctgtcaagaagaaggcagctgagcaaacagctgncccgggaacaggcaaaggaggcgtgcaaagctgcagcagaacaggccatctccgtccgacagcaggtcgtgctagaaaatgctgcaaagaagagagagcgagcaacaagcgacccaaggaccacagaacagaaacaagagaagaaacgactcaaaatttccaagaagccaaaggacccagagccaccagaaaaagagtttacgccttacgactacagccagtcagacttcaaggcttttgctggaaacagcaaatccaaagtttcttctcagtttgatccaaataaacagaccccgtctggcaagaaatgcattgcagccaaaaaaattaaacagtcggtgggaaacaaaagcatgtcctttccaactggaaagtcagacagaggcttcaggtacaactggccacagagatagtcctggaagacacgtggcgcctgtggaccggaagcaccaaatgctggtgctgcttttg

SEQ ID NO: 2264 - DNA, 474 bp, Homo sapiens
  misc_feature (44)..(73): n includes a, c, g, or t, or contains no nucleotide
  misc_feature (157)..(157): n includes a, c, g, or t, or contains no nucleotide
  misc_feature (186)..(186): n includes a, c, g, or t, or contains no nucleotide
  misc_feature (211)..(211): n includes a, c, g, or t, or contains no nucleotide
  misc_feature (225)..(225): n includes a, c, g, or t, or contains no nucleotide
  misc_feature (238)..(238): n includes a, c, g, or t, or contains no nucleotide
  misc_feature (278)..(278): n includes a, c, g, or t, or contains no nucleotide
  misc_feature (290)..(290): n includes a, c, g, or t, or contains no nucleotide
  misc_feature (304)..(304): n includes a, c, g, or t, or contains no nucleotide
  misc_feature (346)..(362): n includes a, c, g, or t, or contains no nucleotide
cttttgactgtaagtgacataatgcattctaaactagctgaagnnnnnnnnnnnnnnnnnnnnnnnnnnnnnnctggcttacataaccagaccaagggaaggacatgggtatgctggcctctggtacaaatgaaaccaggactttttttccatcttnccctgtcattggtgccatctttgtttccnttgggctactttttgctgttcaacnggaaacaatgtccnatcagtagctccntggcctcacattttataacttcatcagtagagagcttctncccttaattccnaatttgaaaatccntggggaaaaaccaagatgggcctggcttggaaacacctgccnnnnnnnnnnnnnnnnngacgacctctgcgatgggcaacaactttcacagaacaggatagttgcaatgagggggagcgcccctcagaggaggtgagggtactgatcagaacaatagctgtccctgcact

SEQ ID NO: 2265 - DNA, 371 bp, Homo sapiens
  misc_feature (53)..(53): n includes a, c, g, or t, or contains no nucleotide
  misc_feature (61)..(61): n includes a, c, g, or t, or contains no nucleotide
  misc_feature (68)..(68): n includes a, c, g, or t, or contains no nucleotide
  misc_feature (97)..(97): n includes a, c, g, or t, or contains no nucleotide
  misc_feature (103)..(103): n includes a, c, g, or t, or contains no nucleotide
  misc_feature (116)..(116): n includes a, c, g, or t, or contains no nucleotide
  misc_feature (133)..(133): n includes a, c, g, or t, or contains no nucleotide
  misc_feature (152)..(152): n includes a, c, g, or t, or contains no nucleotide
  misc_feature (161)..(161): n includes a, c, g, or t, or contains no nucleotide
  misc_feature (175)..(175): n includes a, c, g, or t, or contains no nucleotide
  misc_feature (218)..(218): n includes a, c, g, or t, or contains no nucleotide
  misc_feature (310)..(330): n includes a, c, g, or t, or contains no nucleotide
ctcggtatcagcagtttaaagattttcaacgacgaattcttgtggctaccaancctatttnggccganggcatggacatcgagcgggtgaacattgncttttnaattatgacatgncctgaggattctgacancctacctgcatcgggtggnccagagcanggccggtttggcanccaagggcttggctatcacatttgtgtccgatgagaatgatgnccaagatcctcaatgatgtgcaggatcgctttgaggtcaatattagtgagctgcctgatgagatagacatctcctcctacattgaacagacnnnnnnnnnnnnnnnnnnnnnttggaatgtgaccgtctgtccttcaggagaggacaccaggg

SEQ ID NO: 2266 - DNA, 262 bp, Homo sapiens
tgccgttcctggagctggacacgaatttgcccgccaaccgagtgcccgcggggctggagaaacgactctgcgccgccgctgcctccatcctgggcaaacctgcggaccgcgtgaacgtgacggtacggccgggcctggccatggcgctgagcgggtccaccgagccctgcgcgcagctgtccatctcctccatcggcgtagtgggcaccgccgaggacaaccgcagccacagcgcccacttctttgagtttctcaccaagga

SEQ ID NO: 2267 - DNA, 268 bp, Homo sapiens
  misc_feature (220)..(241): n includes a, c, g, or t, or contains no nucleotide
taccaaaaccagtgaagtgtaagaaacccagactgaacttaccgtgagcgacaaagatgatttaaaagggaagtctagagttcctagtctccctcacagcacagagaagacaaaattagcaaaaccccactacacagtctgcaagattctgaaacattgctttgaccactcttcctgagttcagtggcactcaacatgagtcaagagcatcctgcttctnnnnnnnnnnnnnnnnnnnnnngtttaaggtgacccaatgattcagcta

SEQ ID NO: 2268 - DNA, 397 bp, Homo sapiens
  misc_feature (26)..(40): n includes a, c, g, or t, or contains no nucleotide
  misc_feature (72)..(72): n includes a, c, g, or t, or contains no nucleotide
  misc_feature (102)..(117): n includes a, c, g, or t, or contains no nucleotide
  misc_feature (164)..(205): n includes a, c, g, or t, or contains no nucleotide
  misc_feature (326)..(348): n includes a, c, g, or t, or contains no nucleotide
cagatcaagatcaagaccggcgtggnnnnnnnnnnnnnnnaagaaaaagtgatgtatgaaaaagaggcaaancaacaagaagaaaagattgaaaaaatgagnnnnnnnnnnnnnnnnaattatgacattaaaaagcaggcagagatcctacaagaatccaggannnnnnnnnnnnnnnnnnnnnnnnnnnnnnnnnnnnnnnnnntggatcttcaacggatactagaaaatgaaaaagacttggaagaagctgaggaatataaagaagcacgtttagtactggattcagtgaagttagaagcctgaaacttttctcgtatggggtnnnnnnnnnnnnnnnnnnnnnnntccattttacaatccattatttttgaccactgctatgtgttcaagtagt

SEQ ID NO: 2269 - DNA, 423 bp, Homo sapiens
  misc_feature (282)..(282): n includes a, c, g, or t, or contains no nucleotide
accactggtgcatccagggctgcagcgccgtcaccggggagaacctgctgccgggcatcgactggctcctggatgacatttccagccgcattttcacagctgactgaaccactccagatgccccccacctagcagtccaggtccctcaaccttcaccaaacactacccatggggggttgggagtcagccggccaaactaacactccccctcctccaccccagcctgctgctgctactgctgcccgctgctgctctgtggccacccggctcccatggcggganggctgtgccctggctgtctctctggctcctgacctggcctttggctaccataccaagaagagagggctgggcggggaggagctgctactgctgctaccgaggctgtgggcctcatccttcactcagttgtgaaataaaccg

SEQ ID NO: 2270 - DNA, 523 bp, Homo sapiens
  misc_feature (329)..(329): n includes a, c, g, or t, or contains no nucleotide
  misc_feature (332)..(334): n includes a, c, g, or t, or contains no nucleotide
tacccagaaccctaagtctctgacgctataggatagcgaaagaggtaggcaatcgtaacagacactgtataggataaatagggaagagaatgagagaaccaaaataaaaataatttaagaaacaattgttttactgtacatgtgaataacaagaaatggtacggggaatgtgaataacacgaaatggtatggggaatgtgtgactagtgaagcatattttaacttttttattactggaggaacagagctaaaggcctaaagaaggccttacagtatataacagtaaatagaagagtaacatctttatacaataaactgttagaaatganaannntaaagttgtgcgtctctgcggctcctgaacttgaagattattatgaatagattggaccagcattatatattaaaaactttgatacttagaactttccaactttaaaattcagaatcataaatggtgacaacagtagtagtattgaaccaaaaatagtcaagtaaataatgtctcagtaaagcaaaagca

SEQ ID NO: 2271 - DNA, 107 bp, Homo sapiens
  misc_feature (36)..(36): n includes a, c, g, or t, or contains no nucleotide
atttaagtacagttttcatgaggaagttttaaaagnccatgttcctaagcttccaagaaggttttggatactagaagtattaatctatggcttttctcccagtaaaa

SEQ ID NO: 2272 - DNA, 189 bp, Homo sapiens
  misc_feature (32)..(32): n includes a, c, g, or t, or contains no nucleotide
  misc_feature (97)..(97): n includes a, c, g, or t, or contains no nucleotide
aggccttcttcaagggtgcgtggtccaacgtncctgcggggcatggggggcgccttcgtgctggtcctgtacgacgagctcaagaaggtgatctaangggccgcggcctcctccacacacacacacacaccaggggaaccaagagaaccacgtagaatcctcaaccgtgcggaccatcaaccttcgaga

SEQ ID NO: 2273 - DNA, 445 bp, Homo sapiens
tgacttcttgcttgtgcttcccactctccccgacttcattcactcaaacttctttaaatggggaaaaatatttgtgactctgtggctggcagaagaaataagcccatgcaagtggaagggctgctttgtcaggaggttgtggaatttctttcttctccccttcttccctcccaaaagcttagctatgtataaagtgccacagataggaaacagctgttaattacaaagagaaagaattgtcatagcatcttattttgttcctagttttataacattaccatccttcgttttgaactacagatgttgtagtgggttttggaggagggagtggagtaagatgccctcccacttttatcagtttagtagtagtactgagaaaaatcccttcagctctaagaacactgaaaaatccaccgattttttgggtaagcttcttggcaatacc

SEQ ID NO: 2274 - DNA, 527 bp, Homo sapiens
cttttgccaatgatctttaatggagttaaaatgtttatggtaattgtaacctttcaaatgagttacgtgaaaagagcatctcacttttaatacacccagatattttcttcaagtctttgtgcattttagcaggacttaattttcttaatttattctttcctttcaattatagtgacatagagtagttggccttataagtagatcccatttagcccctgaacataataccatctgcagtattataaaagtcatttagaaggtcagggggataatctagaggcaggattttggacattgtgaaggaaatgtgctccttctcagctcacttcaataactattttctgagactgaagttttttagacaagaataagaaaactttgctttcttcagttatcacatgtgaaagcttttgctttttgttaggaaaaggtgtggatgactctactgcgtggatggttacatttgctttccgtgaaatgctcagaaaatgtcaggacattccttttccaattgtgtgtcagtgcgt

SEQ ID NO: 2275 - DNA, 310 bp, Homo sapiens
gtgttctgcagttcccaggaccccatcctctcagaaggtaggggaagggcgggaggattgagaagggacaagccaccttgaccgtagggaaggaggaatgtgggctgggggaagatgccctcaactcaccccctacacacacatgagagagagcccccacccagttccttggcctaggtctcccctccaggctgagggcctctctacttccccagatgcctgggtgcaaagaacggcttggcttggctcctcctctggagttaaaatttatagtcattctaactgcactttggaaaccaagcaaggggag

SEQ ID NO: 2276 - DNA, 348 bp, Homo sapiens
accctgccgtgtaccagctgagagactctaaatccagtgacaagtctgtctgcctattcaccgattttgattctcaaacaaatgtgtcacaaagtaaggattctgatgtgtatatcacagacaaaactgtgctagacatgaggtctatggacttcaagagcaacagtgctgtggcctggagcaacaaatctgactttgcatgtgcaaacgccttcaacaacagcattattccagaagacaccttcttccccagcccagaaagttcctgtgatgtcaagctggtcgagaaaagctttgaaacagatacgaacctaaactttcaaaacctgtcagtgattgggttccgaa

SEQ ID NO: 2277 - DNA, 556 bp, Homo sapiens
  misc_feature (95)..(95): n includes a, c, g, or t, or contains no nucleotide
  misc_feature (222)..(222): n includes a, c, g, or t, or contains no nucleotide
  misc_feature (302)..(342): n includes a, c, g, or t, or contains no nucleotide
  misc_feature (407)..(422): n includes a, c, g, or t, or contains no nucleotide
  misc_feature (440)..(440): n includes a, c, g, or t, or contains no nucleotide
attggtgctgaagacatggacggcttccaggcagacacggaggaggaggaagaggaggagggcgactgtatgatcgtggatgtcccggatgctgnggaggtccaagccccgtgtggagccgcttccggagctgggggtggtgtgggggtggacaccggcaaggccaccctgaccgcgagcccactgggtgcatcctgagagcaggggtgacgtatgtagaangcttagggtgtcctccccacagagcagatacttgaaccgactcaattcctgtgtaaagagcactttgtcctgcttcacgnnnnnnnnnnnnnnnnnnnnnnnnnnnnnnnnnnnnnnnnnttagttcctttgatatttgtaaaaattcccccaagagccgcatatgaatctgccctttaataaannnnnnnnnnnnnnnntggcctattggggaagcntgcgggcacaggagcaggcgtggaatccaatacttgtaaatgaattgaagcgtcaggaccacccgcctggccacgtgcgcgggcccctggacctaacgaggcagtgtataaactta

SEQ ID NO: 2278 - DNA, 337 bp, Homo sapiens
acttgctcggaaagcgtaagacaagatgaagagcaggcgccattataaatatcaaagcccaagaaatggaactttgggcagagatcatgttagaatcaagtggatgatgagaccaattacaggccgtctctctgcacagcacagaaattctcaatcactgaaatgagtaactgcaaaataaatagttgattgtactgttctcatgctataaaagtggacaggtactctacaacaaatctgttttctcatttttatcaaatatatgtatcatcaaaggttgcatctgtacagtatgtaaatgctattaatgtcgtcactcacatgcacgacagtcctt

SEQ ID NO: 2279 - DNA, 552 bp, Homo sapiens
  misc_feature (84)..(84): n includes a, c, g, or t, or contains no nucleotide
  misc_feature (131)..(131): n includes a, c, g, or t, or contains no nucleotide
  misc_feature (133)..(134): n includes a, c, g, or t, or contains no nucleotide
  misc_feature (137)..(153): n includes a, c, g, or t, or contains no nucleotide
  misc_feature (157)..(231): n includes a, c, g, or t, or contains no nucleotide
  misc_feature (237)..(237): n includes a, c, g, or t, or contains no nucleotide
  misc_feature (243)..(244): n includes a, c, g, or t, or contains no nucleotide
  misc_feature (246)..(266): n includes a, c, g, or t, or contains no nucleotide
  misc_feature (437)..(453): n includes a, c, g, or t, or contains no nucleotide
cgatatcagcttttgtgatggcattgtggtcatcagcttcatgacattttacccatttgcagtgatcctgtgtaaaactgccanggaaagtaattacctgtaggagtttgctgagcttgaagagtgaaaantnntgnnnnnnnnnnnnnnnnnaaannnnnnnnnnnnnnnnnnnnnnnnnnnnnnnnnnnnnnnnnnnnnnnnnnnnnnnnnnnnnnnnnnnnnnnnnnntttttntttttnntnnnnnnnnnnnnnnnnnnnnngtgcagtgtattatagaaaaaataaaaactacaatcattagcagttttaatactgctgtgtcagttttgtaaaaaatgtacattatgtcttttgacatgttgaattttaaactagggaaatgacattgtaaatcatagtagcctcttttaatttaatatgaaaaatgccannnnnnnnnnnnnnnnnaatgtattgtatatatttctctactttggttctagctattttatatgattgacatgttatttaaaagataactgccttgaacttttggagacttgtact

SEQ ID NO: 2280 - DNA, 487 bp, Homo sapiens
  misc_feature (34)..(34): n includes a, c, g, or t, or contains no nucleotide
  misc_feature (62)..(113): n includes a, c, g, or t, or contains no nucleotide
  misc_feature (132)..(132): n includes a, c, g, or t, or contains no nucleotide
  misc_feature (156)..(156): n includes a, c, g, or t, or contains no nucleotide
  misc_feature (162)..(162): n includes a, c, g, or t, or contains no nucleotide
  misc_feature (172)..(172): n includes a, c, g, or t, or contains no nucleotide
  misc_feature (216)..(216): n includes a, c, g, or t, or contains no nucleotide
  misc_feature (218)..(237): n includes a, c, g, or t, or contains no nucleotide
  misc_feature (239)..(241): n includes a, c, g, or t, or contains no nucleotide
  misc_feature (297)..(297): n includes a, c, g, or t, or contains no nucleotide
  misc_feature (308)..(308): n includes a, c, g, or t, or contains no nucleotide
ctctgctccttcaggaacaggacatcttcctggnccttaatccattatagcagccgtgatgnnnnnnnnnnnnnnnnnnnnnnnnnnnnnnnnnnnnnnnnnnnnnnnnnnnnaagtatttaccatcagctnacagtccaaaattgctttttgttncaaggnagatttatgnaaaagactctgacaaggactcttgaatacaagttcctgataacntnnnnnnnnnnnnnnnnnnnnannnagaactttcaaaattttaatgaacaggctgatacttcatgaaattcaagacaaagnaaaaaaacccnaattttattggactaaatagtcaaaacaatgttttcataattttctatttgaaaatgtgctgattctttgaatgttttattctccagatttatgcactttttttcttcagcaattggtaaagtatacttttgtaaacaaaaattgaaacatttgcttttgctccctaagtgccccagaa

SEQ ID NO: 2281 - DNA, 580 bp, Homo sapiens
  misc_feature (26)..(26): n includes a, c, g, or t, or contains no nucleotide
  misc_feature (48)..(48): n includes a, c, g, or t, or contains no nucleotide
  misc_feature (69)..(69): n includes a, c, g, or t, or contains no nucleotide
  misc_feature (75)..(75): n includes a, c, g, or t, or contains no nucleotide
  misc_feature (128)..(187): n includes a, c, g, or t, or contains no nucleotide
caaccttcggccatctggcaggtggntacgacgcccagtactacgggnacctgtggagcgaggtgtatnccatgnacatgttccacacgcgcttcaagcaggagggtgtcctgaacagcaaggttggnnnnnnnnnnnnnnnnnnnnnnnnnnnnnnnnnnnnnnnnnnnnnnnnnnnnnnnnnnnngaggcgcttcctgggccgtgaccccaagcaggacgccttcctcctgagcaaggggctgcaggtcgggggctgcgagcccgagccgcaggtctgctgaggcctggcactgcgactgcccagtctggcctgcgctcccgccgccctggtgccttagcccccggcacaggatggggcaggctctggcacagtgcctgggactggcagggtggctgagcggctgtcttgcctcttgtcattgtctgtccccacccggtcgtggcccacccggctagagacggcgtcctcaaggcatctggagggctttcgtggctgccagggcctggtctttgttgcactaacacgtctcctctctgggaaacgtcccttgtcaggagacggctcttctttgaaatg

SEQ ID NO: 2282 - DNA, 473 bp, Homo sapiens
  misc_feature (177)..(194): n includes a, c, g, or t, or contains no nucleotide
  misc_feature (210)..(232): n includes a, c, g, or t, or contains no nucleotide
  misc_feature (289)..(327): n includes a, c, g, or t, or contains no nucleotide
  misc_feature (402)..(416): n includes a, c, g, or t, or contains no nucleotide
caggaaaaccggaacttgttgatgaacttgttttcaaaatatcatctcatcaacgaggcctggacaaacaagccctgaggagggatctgcaacaaccctgaagacaacaaggaaagaaaccatgaaagtctgtctgtactgcagtgggaattcttgagtgaggtcttacctcttctnnnnnnnnnnnnnnnnnngtcctgattatgtccnnnnnnnnnnnnnnnnnnnnnnnttcttaacctggatagaagccaggggtaaccatgaacttgatggaagaaaatgttannnnnnnnnnnnnnnnnnnnnnnnnnnnnnnnnnnnnnnctcccaagttataaatgctggcaacaaatcacagtagtaaaagcagtacctgggattttcccaccaatacaaacnnnnnnnnnnnnnnntaatgtaacataaaaagggcatcttgaagtattgttcatatttgtcacctcttggaa

SEQ ID NO: 2283 - DNA, 520 bp, Homo sapiens
  misc_feature (83)..(111): n includes a, c, g, or t, or contains no nucleotide
  misc_feature (113)..(223): n includes a, c, g, or t, or contains no nucleotide
gatcagccagccaatgaagggcaagagcgtggtcacagcccccatcatcaaaggcaaccttggagccaacctcagtgggttgnnnnnnnnnnnnnnnnnnnnnnnnnnnnnannnnnnnnnnnnnnnnnnnnnnnnnnnnnnnnnnnnnnnnnnnnnnnnnnnnnnnnnnnnnnnnnnnnnnnnnnnnnnnnnnnnnnnnnnnnnnnnnnnnnnnnnnnnnnncctgcatcccatctccaacagggaacagcttctggctcctccaaagcagtctccactgttgttgtgactacagctccgtctcctaaacaggcacctgagcaacaatgattatgagagaggatggcttccgtgaaagaccatgcctggtctgctctggctgagaagggaccagggaggttgcatcattgttttaagcttgcctgttcaaggcagccaggcgaggggtgatggcaacggtggcctggattcgtggcctggattctgctgccacgtgccatagtggagcaccctgagaaa

SEQ ID NO: 2284 - DNA, 379 bp, Homo sapiens
ttcttttctaaccaagaggctggttttggcatctctgtcccattccctgggatctggtggtcagccctaggataaaaagccagggctggagaacaagaaagggccaggagatggaattccttcaggccggcacccacaccctaggacatgtaagccctcatgtccaagggagcctcatgcagatagtaggaaatcaggtctggaaatttaaaaataaaaggcatgagactaaggctatctgcttcccttatgccctgactggagaggggagggaggagaggcaaggcccacagagggcatcccagctaggccttgggatggctgcagtgaggagaaatcccgggaactgtattgacacaaagattcttattgcacttgt

SEQ ID NO: 2285 - DNA, 495 bp, Homo sapiens
  misc_feature (105)..(105): n includes a, c, g, or t, or contains no nucleotide
  misc_feature (199)..(218): n includes a, c, g, or t, or contains no nucleotide
ttgacgcttgcagcttcggagtcacgggtttgaaacttcaaggggccacgtgcaacaacaacaagctgtcactgtccaatgccatctcaaccgcccttcccctgnacgcagctgcgctgggtcaagcagacaaacaccgagaagaaggccagtgtggtaaccttacctgtctacctgaacttcacccgtgcagacctcnnnnnnnnnnnnnnnnnnnngaaattgctacaaaggaggatcctcgcagcttctacgagcggggtgtcgcagtcttgtgcacagagtaaacttttctagctgcccctttctgtaatagtgaaagttggtatttaacatttattcatttttaaaatatttggaaggtctgagcttgtgaaaagaaagtggttggtctgaggttggaggaagctgaatggaatctgacggttgggagtggtggaaattggaaggataccaggaggtatttgggaaggccaatggcgtggctcctttgag

SEQ ID NO: 2286 - DNA, 603 bp, Homo sapiens
  misc_feature (71)..(189): n includes a, c, g, or t, or contains no nucleotide
  misc_feature (406)..(408): n includes a, c, g, or t, or contains no nucleotide
  misc_feature (410)..(426): n includes a, c, g, or t, or contains no nucleotide
  misc_feature (516)..(532): n includes a, c, g, or t, or contains no nucleotide
ctagccctagaatgcctagaacaggaagaggcagctggtgttctgcaaaacttggacaggggcaaagttgnnnnnnnnnnnnnnnnnnnnnnnnnnnnnnnnnnnnnnnnnnnnnnnnnnnnnnnnnnnnnnnnnnnnnnnnnnnnnnnnnnnnnnnnnnnnnnnnnnnnnnnnnnnnnnnnnnnnnnntaacaaaaaatgctaaatattttatccatgaaaatgacttccagaaaaggaagaatatgaaccccagaccgaaggggaaaagatagttaatagtattatctaacctggttggtatttgtaatgaatggtgattttaattagtcattagccataatgatgtttatttacagtataactcctgaatgctacttaaataaaccaggattcaaactgcaannnannnnnnnnnnnnnnnnntttaaaacgttttaatcggggcttccgggtagaaggtggagcggcagggtgtaattgggttgatgggtgggacctgtcttgaccatcggnnnnnnnnnnnnnnnnnccaggagggcccgggttgctctcctggttatgtatgtacttgtacataaccacctaaagaatggtgaaata

SEQ ID NO: 2287 - DNA, 492 bp, Homo sapiens
  misc_feature (256)..(272): n includes a, c, g, or t, or contains no nucleotide
  misc_feature (298)..(312): n includes a, c, g, or t, or contains no nucleotide
  misc_feature (342)..(356): n includes a, c, g, or t, or contains no nucleotide
ctctgaggacgagatcaagaaagcttatcggaaacgggccttgatgcaccatccagatcggcatagtggagccagtgctgaggttcagaaggaggaggagaagaagttcaaggaagttggagaggcctttactatcctctctgatcccaagaaaaagactcgctatgacagtggacaggacctagatgaggagggcatgaatatgggtgattttgatccaaacaatatcttcaaggcattctttggcggtcctggnnnnnnnnnnnnnnnnncatctggtccagggaatttctttttnnnnnnnnnnnnnnnaagggcaaccacccagaacccagaaaatgnnnnnnnnnnnnnnntaatcttgaatgtggaaacagttcacctcctcccttcatcacgtctccgtgtgcttagagcagtttcgttttctcagttggatgccctgtgtctctgtgagtggggtggagcaaagggaaccaatgccgaagaccg

SEQ ID NO: 2288 - DNA, 564 bp, Homo sapiens
  misc_feature (246)..(263): n includes a, c, g, or t, or contains no nucleotide
  misc_feature (288)..(302): n includes a, c, g, or t, or contains no nucleotide
  misc_feature (395)..(413): n includes a, c, g, or t, or contains no nucleotide
  misc_feature (473)..(488): n includes a, c, g, or t, or contains no nucleotide
  misc_feature (494)..(508): n includes a, c, g, or t, or contains no nucleotide
agtgcctctaagtcccaatttctcgtcattcttctttcagaatctggggggtggggatgcacaaagccctttagggcagtagaacaagtgacacggggggagttccaagggtgtgagtgcggattctgagaaacactgatcagcttcccatggatgctggctccttccagccaggggaccccgccctggggcagagcgagagactcctcgctggggaggacgtggagaccatactgcatcttatcnnnnnnnnnnnnnnnnnnttacaccagcagtccagaagagatnnnnnnnnnnnnnnntctgctttttctttcttttttaatgactataggacactgatatgtaactgattttctgctagaagtttgatatcctctgaatttagctaaagnnnnnnnnnnnnnnnnnnngggtggaagaggctgtcctgtagcaattacagctcaggactgtggctaacatctgaggannnnnnnnnnnnnnnnagaggnnnnnnnnnnnnnnngagtactgcctatttcataaccactgtagttaccgtttccaaacctgtcagctgct

SEQ ID NO: 2289 - DNA, 524 bp, Homo sapiens
  misc_feature (87)..(87): n includes a, c, g, or t, or contains no nucleotide
  misc_feature (127)..(127): n includes a, c, g, or t, or contains no nucleotide
  misc_feature (160)..(160): n includes a, c, g, or t, or contains no nucleotide
  misc_feature (173)..(173): n includes a, c, g, or t, or contains no nucleotide
  misc_feature (176)..(177): n includes a, c, g, or t, or contains no nucleotide
  misc_feature (207)..(207): n includes a, c, g, or t, or contains no nucleotide
  misc_feature (212)..(212): n includes a, c, g, or t, or contains no nucleotide
  misc_feature (218)..(218): n includes a, c, g, or t, or contains no nucleotide
  misc_feature (221)..(224): n includes a, c, g, or t, or contains no nucleotide
  misc_feature (233)..(234): n includes a, c, g, or t, or contains no nucleotide
  misc_feature (253)..(253): n includes a, c, g, or t, or contains no nucleotide
  misc_feature (261)..(261): n includes a, c, g, or t, or contains no nucleotide
  misc_feature (273)..(274): n includes a, c, g, or t, or contains no nucleotide
  misc_feature (277)..(278): n includes a, c, g, or t, or contains no nucleotide
  misc_feature (289)..(289): n includes a, c, g, or t, or contains no nucleotide
  misc_feature (294)..(294): n includes a, c, g, or t, or contains no nucleotide
  misc_feature (297)..(297): n includes a, c, g, or t, or contains no nucleotide
  misc_feature (310)..(310): n includes a, c, g, or t, or contains no nucleotide
  misc_feature (314)..(314): n includes a, c, g, or t, or contains no nucleotide
  misc_feature (324)..(324): n includes a, c, g, or t, or contains no nucleotide
  misc_feature (329)..(329): n includes a, c, g, or t, or contains no nucleotide
  misc_feature (352)..(352): n includes a, c, g, or t, or contains no nucleotide
gtccctaaggaagatttttgcagcactctctggagctgaggggagtgaaatttggtccagagaaggcggaaggaaatagttttcctngtttccttttctcgaggtggatgtcctcaggcttccttcnacacctccttctcatgggtgcggctggcagtancagtcaggctgtnggnnaggagggctgagaagaaaggggcactggtnccagnccccanggnnnntttggtctnngagacaggtacacagcagnataccatncccaccttcctnnctnnctaaagaacanggccnagnccacacatataancccntttccctacntttanctaatgtatcccttatgtggtanccagcaatggaggacaggcagacttaccccctgccatctagagagaatgttgttattacccgtaaaacttgaccacccccatatcccactcctttttgtaaaaacaaatgcttaaacctgtgagcctgccgttcctttctatgtgttaatcagtttccttccatttgagctg

SEQ ID NO: 2290 - DNA, 448 bp, Homo sapiens
  misc_feature (116)..(116): n includes a, c, g, or t, or contains no nucleotide
  misc_feature (118)..(118): n includes a, c, g, or t, or contains no nucleotide
  misc_feature (151)..(151): n includes a, c, g, or t, or contains no nucleotide
  misc_feature (254)..(254): n includes a, c, g, or t, or contains no nucleotide
  misc_feature (356)..(370): n includes a, c, g, or t, or contains no nucleotide
cgggcccgcagctctacgacgtgatggacgcggtcccagcgcggcgctggaaggagttcgtgcgcacgctggggctgcgcgaggcagagatcgaagccgtggaggtggagatcggncncttccgagaccagcagtacgagatgctcaagcnctggcgccagcagcagcccgcgggcctcggagccgtttacgcggccctggagcgcatggggctggacggctgcgtggaagacttgcgcagccgcctgcagcgnggcccgtgacacgcagcccacttgccacctaggcgctctggtggcccttgcagaagccctaagtacggttacttatgcgtgtagacattttatgtcacttannnnnnnnnnnnnnnggccctgcgtaggcacaccagccggccccacccctgctcgcccctatcgctccagccaaggcgaagaagcacgaacga

SEQ ID NO: 2291 - DNA, 482 bp, Homo sapiens
  misc_feature (49)..(49): n includes a, c, g, or t, or contains no nucleotide
  misc_feature (156)..(156): n includes a, c, g, or t, or contains no nucleotide
  misc_feature (162)..(177): n includes a, c, g, or t, or contains no nucleotide
  misc_feature (285)..(369): n includes a, c, g, or t, or contains no nucleotide
  misc_feature (438)..(438): n includes a, c, g, or t, or contains no nucleotide
aacttctcccggtgcctggagctgcagtgtcagcccgactcctcaaccntgccacccccatggagtccccggcccctggaggccacagccccgacagccccgcagccccctctgctcctcctactgctgctgcccgtgggcctcctgctgctggcngctgcnnnnnnnnnnnnnnnncagaggacgcggcggaggacaccccgccctggggagcaggtgccccccgtccccagtccccaggacctgctgcttgtggagcactgacctggccaaggcctcatcctnnnnnnnnnnnnnnnnnnnnnnnnnnnnnnnnnnnnnnnnnnnnnnnnnnnnnnnnnnnnnnnnnnnnnnnnnnnnnnnnnnnnncccttccttgggcccctctcattccctccccagaatggaggcaacgccagaatccagcaccggccccanttacccaactctgtacaaagcccttgtccccatgaaattgtata

SEQ ID NO: 2292 - DNA, 174 bp, Homo sapiens
gaagcgcggctaacttattccgagaatgccgaggagttgtcgtttttagctttgtgtttactttttggctggagcggagatgaggggccaccccgtgcccctgtgctgcggggccttttgcccggaggccgggccctaaggttttgttgtgttctgttgaaggtgccattttaa

SEQ ID NO: 2293 - DNA, 457 bp, Homo sapiens
tgtggggcctgatggtgctcacgactcttcctgcaaagggaactgaagacctccacattaagtggctttttaacatgaaaaacacggcagctgtagctcccgagctactctcttgccagcattttcacattttgcctttctcgtggtagaagccagtacagagaaattctgtggtgggaacattcgaggtgtcaccctgcagagctatggtgaggtgtggataaggcttaggtgccaggctgtaagcattctgagctggcttgttgtttttaagtcctgtatatgtatgtagtagtttgggtgtgtatatatagtagcatttcaaaatggacgtactggtttaacctcctatccttggagagcagctggctctccaccttgttacacattatgttagagaggtagcgagctgctctgctatatgccttaagccaatatttactcatcaggtcattat

SEQ ID NO: 2294 - DNA, 174 bp, Homo sapiens
ccttgtccaggctgggatctaattgatacaataggtcgttgactccctcctagtagagctatctaggtttgtctggaaagtttccgaccctggcttataggcaccacacctcatgtactcctcatggcttggatctctgtattcagcctttgttcagtccaataaactttgagt

SEQ ID NO: 2295 - DNA, 51 bp, Homo sapiens
tagttttatgtcaaacccagggccaagtatgctactgtctccagaacacga

SEQ ID NO: 2296 - DNA, 459 bp, Homo sapiens
  misc_feature (96)..(97): n includes a, c, g, or t, or contains no nucleotide
  misc_feature (101)..(103): n includes a, c, g, or t, or contains no nucleotide
  misc_feature (105)..(106): n includes a, c, g, or t, or contains no nucleotide
  misc_feature (111)..(172): n includes a, c, g, or t, or contains no nucleotide
  misc_feature (366)..(431): n includes a, c, g, or t, or contains no nucleotide
aagttcctgccttttgtctctgagcctgatgtgtgtaggggtgatggaaaggctcactgcccaggggtcagccagaggggaggtgggctgcactcnnctcnnncnnggagnnnnnnnnnnnnnnnnnnnnnnnnnnnnnnnnnnnnnnnnnnnnnnnnnnnnnnnnnnnnnnccccacccagtcttggagagagatgaatgttaaatcagaggttcaaatgctagagaactgagaagccctggtggcaggcatggtctggagtgctgggcagatgctgtttctgggcccgtctgcctggtgggggtgctgtcctcccccctgtgcacacgtgagcatcgtgcatgtggcccctctgcagtgcaggnnnnnnnnnnnnnnnnnnnnnnnnnnnnnnnnnnnnnnnnnnnnnnnnnnnnnnnnnnnnnnnnnnagtccaatgtgtgcctctacagtaatgt

SEQ ID NO: 2297 - DNA, 445 bp, Homo sapiens
  misc_feature (216)..(237): n includes a, c, g, or t, or contains no nucleotide
cacccacaagggaggctagggcaatggagcaggccaccagcagcagctgtgcagcatggaactcaggccaggctccgaggctgggggatctgcttggagttttctgccccccaccccaaacttctgtcgaggagcaaggcttgccagcaagtcagaaggatttgaaccgagcagccaatctttccagccctcccctaccgacctctgcctggagannnnnnnnnnnnnnnnnnnnnnggcctctggtttgttgtattatagtatatttcgctgtggaaaatgtcacgtttagtcaccttggagcccactcacctggtcctgttgttttaccccatcccttctctcgcgcgcctattgatttgtttctgaggagagtacaccgttcactattgtagagtaacccctgtgactcaatattaccatagtgcgatgtcgttttgtgcta

SEQ ID NO: 2298 - DNA, 383 bp, Homo sapiens
  misc_feature (78)..(78): n includes a, c, g, or t, or contains no nucleotide
  misc_feature (84)..(84): n includes a, c, g, or t, or contains no nucleotide
  misc_feature (123)..(123): n includes a, c, g, or t, or contains no nucleotide
  misc_feature (135)..(135): n includes a, c, g, or t, or contains no nucleotide
ctcaggaaggtggttctgtgcatgcctgggtgtggttaaggcgtggcccagaaggcttccctggtgctctcagtccangcaaancccagagcatctgagcacgtctctgacttccagtggcancacagtttgaangtggtgaaacagggtgtagttcttttccacattctgtgtcatctagtcgtgcaggtagggaaaaagttggtctaattgaagattgtgcatttcctagtgacaggtgccaagaggttatgatacgggtttcttgggtctgatgtacagtgtgaataaatgcttgcagctcttagctcttttttgatcgatgaagcacttttttattaatattttcctttgttaaaggaggaaccgtaactctccatagc

SEQ ID NO: 2299 - DNA, 425 bp, Homo sapiens
  misc_feature (32)..(32): n includes a, c, g, or t, or contains no nucleotide
  misc_feature (36)..(36): n includes a, c, g, or t, or contains no nucleotide
  misc_feature (40)..(40): n includes a, c, g, or t, or contains no nucleotide
caacaaactaccaacactgtagaggagccccntggnatcnttatcaggctcagcctagatgagcgaatttatgtgaaaatgagaaatgaccgagagcttcgaggcagattacatgcttatgatcaacatttaaatatgatcttgggagatgtggaagaaactgtgactactatagaaattgatgaagaaacatatgaagagatatataaatcaacgaaacggaatattccaatgctctttgtccggggagatggcgttgtcctggttgcccctccactgagagttggctgaaacaaagaatttgtcctgtatggaaaacgggagactttgtacagtggcctctctaaaagtacaaaacattcataagagaaacctgcatacattttgatattaagaaataattccggggattcttccactcctga

SEQ ID NO: 2300 - DNA, 247 bp, Homo sapiens
gtccacaagacagaagctgaagtgcatccaaaggtgctcagagagccggcccgcctgaatcattctcgatttaactcgagaccttttcaacttggcttcctttcttggttcataaatgaattttagtttggttcacttacagatagtatctagcaatcacaacactggctgagcggatgcatctggggatgaggttgcttactaagctttgccagctgctgctggatcacagctgctttctgttgtc

SEQ ID NO: 2301 - DNA, 411 bp, Homo sapiens
  misc_feature (89)..(105): n includes a, c, g, or t, or contains no nucleotide
caaggtgacacattacaaagccaccctaccatgaatccgctcccaagggtctcactgctcacctgaggataactcaatataactatgtnnnnnnnnnnnnnnnnntgaagaccatggatttcatggtgattccagcaagtacagagattctatgaagcccacccagaaaaaacttgctggtcctggctatttttgtgtcatttattcaagtattgagaacctggcctgtggtaggcactgtacttaatactaggatacagaaatgcaaaagatacggcccatgcaattttattaaatgcatcaatatgtattacaaatggtgaatggatttccaactttatcatggaatttaatgctgaatatatagaattcagaaaattgttgggaggacagcccttttgtgaaccttgt

SEQ ID NO: 2302 - DNA, 307 bp, Homo sapiens
  misc_feature (225)..(252): n includes a, c, g, or t, or contains no nucleotide
  misc_feature (257)..(257): n includes a, c, g, or t, or contains no nucleotide
  misc_feature (262)..(263): n includes a, c, g, or t, or contains no nucleotide
tcccgtgaagaggaggagctcccaccggcccccttcccatgtggggtggagtcggggctgtggggtgaggcagcgtcttgctatccggaagcccttgagaaagcttccttctctcgagctgctctctggtctgtagagctgatgggtaccgctgcttggctgacatcgtggtagccacccccggccgcctggtggaccacatcgaccagaccccaggattcagcnnnnnnnnnnnnnnnnnnnnnnnnnnnncgacnaggcnntgaccggatgattgacagcatgcatcagtcctggctgccgcggg

SEQ ID NO: 2303 - DNA, 194 bp, Homo sapiens
  misc_feature (132)..(133): n includes a, c, g, or t, or contains no nucleotide
gacttctagctggacaacctacacaaaccttagcgtctagagtcactctaaccttgctaaggaaggatgcagagttccctagagagacttgcactgatggggtgacttctgctttggtccttccaccacccnnaccaagtaaaccacctgtggcagcggctgttccctcaacctgctacttctgcgtccataag

SEQ ID NO: 2304 - DNA, 438 bp, Homo sapiens
  misc_feature (124)..(163): n includes a, c, g, or t, or contains no nucleotide
  misc_feature (172)..(209): n includes a, c, g, or t, or contains no nucleotide
cctaacagataccagcgtgtacacggaacttccaaatgctgagcccagatccaaagttgtctcctgcccacgagcaccacagtcaggtcttgagggggttttctagggagacaacagccctgtnnnnnnnnnnnnnnnnnnnnnnnnnnnnnnnnnnnnnnnnaatctgaannnnnnnnnnnnnnnnnnnnnnnnnnnnnnnnnnnnnnaccacgaatctgaacatgcctctctcttgcttacaaatgcctaaggtcgccactgcctgctgcagagaaaacacactcctttgcttagcccacaagtatctatttcacttgacccctgcccacctctccaacctaactggcttacttcctagtcctacttgaggctgcaatcacactgaggaactcacaattccaaacatacaagaggctccctcttaacacggcactt

SEQ ID NO: 2305 - DNA, 248 bp, Homo sapiens
  misc_feature (41)..(97): n includes a, c, g, or t, or contains no nucleotide
  misc_feature (126)..(126): n includes a, c, g, or t, or contains no nucleotide
  misc_feature (128)..(128): n includes a, c, g, or t, or contains no nucleotide
agagccagtctcagggtctgggatttccctgcaggagctcnnnnnnnnnnnnnnnnnnnnnnnnnnnnnnnnnnnnnnnnnnnnnnnnnnnnnnnnncagcccccagaggcctggccttgagtttntnagcatgggccgaggacgttgcctgtagaatcctcctctgcctgggagtggctctgtgtggaccagtccctcactggcccattctttttttgacgcagccaatctgtgaccacgattcctc

SEQ ID NO: 2306 - DNA, 475 bp, Homo sapiens
  misc_feature (101)..(101): n includes a, c, g, or t, or contains no nucleotide
  misc_feature (110)..(110): n includes a, c, g, or t, or contains no nucleotide
  misc_feature (196)..(196): n includes a, c, g, or t, or contains no nucleotide
  misc_feature (248)..(301): n includes a, c, g, or t, or contains no nucleotide
ggaacccaggtcgagatgggacattgtgcggctcatcccacctcagacgtacctgcaagctgagggtgaagacggccagaacttggagaagagacggaatnttctgaacntgcctcatcgtccgaatcctcaaggcccatggagatgaggggctgcacattgaccagcttgtctgtctggtgctggaggcttggcnagaagggcccgtgtcctcccaggggtttggtcagcagccttggtaaggggtnnnnnnnnnnnnnnnnnnnnnnnnnnnnnnnnnnnnnnnnnnnnnnnnnnnnnnggcacgctgagacgccatgacgaccggccccaggtgctgtcctatgcagtccctgtgactgtcatggagcctcacactgagtccctgaacccaggctcctcaggccccaacccacccctcaccttccataccctacagattcgctcccggggtgtgccctatgcctcctgcact

SEQ ID NO: 2307 - DNA, 411 bp, Homo sapiens
  misc_feature (137)..(137): n includes a, c, g, or t, or contains no nucleotide
  misc_feature (215)..(230): n includes a, c, g, or t, or contains no nucleotide
ctagcttaggctgacgttctgatgagtctctgcttgctgagctcatcactgtgggatggtgacctgcagagctgcagattggagcaagtggacagaggagggagccagctaagccaaatccgtcactgccacttggntggcaggccttataagagggcggatctgggcccgtttgcaggaggccattgcctaccctctccccacagtgagccagnnnnnnnnnnnnnnnncccacctgggaaaccttcatgcctctctgatggttactgcccacccttaccccacccctcagctcagcctggtatggaaagcaaggtgcacgttggtctttgattgttctgtcctcacagcagagccagctttccccccatgttgctgctgcttttgctgctcatgctgcttgttgttttc

SEQ ID NO: 2308 - DNA, 278 bp, Homo sapiens
acgacttagaggttgctcagacaactgctctcccggatgaggatgatgacctgtgagaatgaagctggagcccagcgtcagaagtctagttttataggcagctgtcctgtgatgtcagcggtgcagcgtgtgtgccacctcattattatctagctaagcggaacatgtgcttcatctgtgggatgctgaaggagatgagtgggcttcggagtgaatgtggcagtttaaaaaataacttcattgtttggacctgcatatttagctgttttggaacgcag

SEQ ID NO: 2309 - DNA, 411 bp, Homo sapiens
  misc_feature (141)..(141): n includes a, c, g, or t, or contains no nucleotide
attatcatgctcacctgaaagaggtatgctctcttaggaatacagtttctagcattaaacaaataaacaaggggagaaaataaaactcaaggagtgaaaatcaggaggtgtaataaaatgttcctcgcattcccccccgcntttttttttttttttgactttgccttggagagccagagcttccgcattttctttactattctttttaaaaaaagtttcactgtgtagagaacatatatgcataaacataggtcaattatatgtctccattagaaaaataataattggaaaacatgttctagaactagttacaaaaataatttaaggtgaaatctctaatatttataaaagtagcaaaataaatgcataattaaaatatatttggacataacagacttggaagcagatgat

SEQ ID NO: 2310 - DNA, 408 bp, Homo sapiens
tgacattcgttcacaatagcactattttaaataaattataagctttaaggtacgaagtatttaatagatctaatcaaatatgttgattcatggctataataaagcaggagcaattataaaatcttcaatcaattgaacttttacaaaaccacttgagaatttcatgagcactttaaaatctgaactttcaaagcttgctattaaatcatttagaatgtttacatttactaaggtgtgctgggtcatgtaaaatattagacactaatattttcatagaaattaggctggagaaagaaggaagaaatggttttcttaaatacctacaaaaaagttactgtggtatctatgagttatcatcttagctgtgttaaaaatgaatttttactatggcagatatggtatggatcg

SEQ ID NO: 2311 - DNA, 553 bp, Homo sapiens
cccaaaagcggcattaagcagtttccaaaaggttttggaacttgaaggtgaaaaaggagaatggggatttaaagcactgaaacaaatgattaagattaacttcaagttgacaaactttccagaaatgatgaatagatataagcagctattgacctatattcggagtgcagtcacaagaaattattctgaaaaatccattaattctattcttgattatatctctacttctaaacagatggatttactgcaggaattctatgaaacaacactggaagctttgaaagatgctaagaatgatagactgtggtttaagacaaacacaaagcttggaaaattatatttagaacgagaggaatatggaaagcttcaaaaaattttacgccagttacatcagtcgtgccagactgatgatggagaagatgatctgaaaaaaggtacacagttattagaaatatatgctttggaaattcaaatgtacacagcacagaaaaataacaaaaaacttaaagcactctatgaacagtcacttcacatcaagtctgccatccctcat

SEQ ID NO: 2312 - DNA, 462 bp, Homo sapiens
  misc_feature (28)..(28): n includes a, c, g, or t, or contains no nucleotide
  misc_feature (35)..(36): n includes a, c, g, or t, or contains no nucleotide
  misc_feature (39)..(39): n includes a, c, g, or t, or contains no nucleotide
  misc_feature (83)..(83): n includes a, c, g, or t, or contains no nucleotide
  misc_feature (112)..(112): n includes a, c, g, or t, or contains no nucleotide
  misc_feature (116)..(116): n includes a, c, g, or t, or contains no nucleotide
  misc_feature (120)..(120): n includes a, c, g, or t, or contains no nucleotide
  misc_feature (167)..(167): n includes a, c, g, or t, or contains no nucleotide
  misc_feature (303)..(303): n includes a, c, g, or t, or contains no nucleotide
  misc_feature (382)..(382): n includes a, c, g, or t, or contains no nucleotide
  misc_feature (392)..(392): n includes a, c, g, or t, or contains no nucleotide
agtacaagtgcaaggtctccaacaaagncctcccnnccnccatcgagaaaaccatctccaaagccaaagggcagccccgaganccacaggtgtacaccctgcccccatcccnggangagntgaccaagaaccaggtcagcctgacctgcctggtcaaaggcttctancccagcgacatcgccgtggagtgggagagcaatgggcagccggagaacaactacaagaccacgcctcccgtgctggactccgacggctccttcttcctctacagcaagctcaccgtggacaagagcaggtggcagnaggggaacgtcttctcatgctccgtgatgcatgaggctctgcacaaccactacacgcagaagagcctctccctgtctcngggtaaatgnagtgcgacggccggcaagcccccgctccccgggctctcgcggtcgcacgaggatgcttggcacgtacccc

SEQ ID NO: 2313 - DNA, 451 bp, Homo sapiens
  misc_feature (26)..(26): n includes a, c, g, or t, or contains no nucleotide
  misc_feature (31)..(31): n includes a, c, g, or t, or contains no nucleotide
  misc_feature (38)..(38): n includes a, c, g, or t, or contains no nucleotide
  misc_feature (40)..(40): n includes a, c, g, or t, or contains no nucleotide
  misc_feature (46)..(60): n includes a, c, g, or t, or contains no nucleotide
gatttcccatgttggtttgcaacatngcagnaagtatngncaattnnnnnnnnnnnnnnnttgcgctgctatgattatccaactcctcactcttgcgcttcaatccacatcgctgggggccttctaggaaatgcaatctgtttcgccacgccccaatctgaggtgcctgcacgtgagcttgctgtgcctgagctgctatgacctttgtagcacctgcagtgtttttcaaaacaacagcacttgtctgcaatgaaaagttgtgtcctcgaggtctattaaatggtatctttgtctgaaaagcactacccttagtgggaggatgagaatttccaaagtttctaccattcacataggtccgtggatagtttctttcctggaatacacaactgcttggctctactttgagtttcttcacactacaaaaggcacttgactgagtttgataaacata

SEQ ID NO: 2314 - DNA, 307 bp, Homo sapiens
gtggtgtggttcctcagagtgcaccaccagtgccaacagcctcttcccggttccatttcccacctctggacacccattctccaaccaatgatgtgcagccgggacggttctctgctagctcccaactgcttctggccaggagtccagtaatggtactgatagaaagactgagctttcagagctggaggatggctcagctgctgactggcgccggggtgtggatcccgtgtcctccaggaatgccattggtggaggagggattggccatcagaaacgcaagcctgacataatgcttcctctgtttgct

SEQ ID NO: 2315 - DNA, 499 bp, Homo sapiens
aagtcaggcacgtagctcagcggcggccgcggcgcgtgcgtctgtgcctctgcgcgggtctcctggtccttctgccatcatgccgatgttcatcgtaaacaccaacgtgccccgcgcctccgtgccggacgggttcctctccgagctcacccagcagctggcgcaggccaccggcaagcccccccagtacatcgcggtgcacgtggtcccggaccagctcatggccttcggcggctccagcgagccgtgcgcgctctgcagcctgcacagcatcggcaagatcggcggcgcgcagaaccgctcctacagcaagctgctgtgcggcctgctggccgagcgcctgcgcatcagcccggacagggtctacatcaactattacgacatgaacgcggccaatgtgggctggaacaactccaccttcgcctaagagccgcagggacccacgctgtctgcgctggctccacccgggaacccgccgcacgctgtgttctaggcccgc

SEQ ID NO: 2316 - DNA, 301 bp, Homo sapiens
  misc_feature (61)..(61): n includes a, c, g, or t, or contains no nucleotide
  misc_feature (219)..(236): n includes a, c, g, or t, or contains no nucleotide
aaccagagagggtcccaggcgcccgaggacaagacgcaggaggcagaatgaccgcgtgtcnttgcctgaccacctggggaacacccctggacccaggcatcggccaggaccccatagagcaccccggtctgccctgtgccctgtggacagtggaagatgaggtcatctgccactttcaggacattgtccgggagcccttcatttaggacaaaacgggcnnnnnnnnnnnnnnnnnntcagggtggtcagaactggatacggtgtttacaattccaatctctctatttctgggtgaagggtc

SEQ ID NO: 2317 - DNA, 198 bp, Homo sapiens
  misc_feature (38)..(67): n includes a, c, g, or t, or contains no nucleotide
  misc_feature (142)..(142): n includes a, c, g, or t, or contains no nucleotide
  misc_feature (162)..(162): n includes a, c, g, or t, or contains no nucleotide
cgccctgtggccatgcttccatgggctcctgactctcnnnnnnnnnnnnnnnnnnnnnnnnnnnnnnaccgagacactatcaccaaaactggagactctgggaataggatgtcatgtgttaagcatcagaatgtcccctccnacaagctaagagtgtctacncttgccaccctgtcatcattgtgcttgaggtcaaag

SEQ ID NO: 2318 - DNA, 480 bp, Homo sapiens
  misc_feature (37)..(37): n includes a, c, g, or t, or contains no nucleotide
  misc_feature (117)..(117): n includes a, c, g, or t, or contains no nucleotide
  misc_feature (185)..(186): n includes a, c, g, or t, or contains no nucleotide
  misc_feature (189)..(189): n includes a, c, g, or t, or contains no nucleotide
  misc_feature (191)..(397): n includes a, c, g, or t, or contains no nucleotide
tgtgtgtaacaggtgccctaggtgacccttataatcngggaagtttggtgaacaaaaatcgaacccatgagtgaacataaattaaaaagttgatcaacctattaaaatgtgtatttncattgggtagcttttctcactgtagacagattttttccttcttcaatgaaaaggcttttaaattagtnnaantnnnnnnnnnnnnnnnnnnnnnnnnnnnnnnnnnnnnnnnnnnnnnnnnnnnnnnnnnnnnnnnnnnnnnnnnnnnnnnnnnnnnnnnnnnnnnnnnnnnnnnnnnnnnnnnnnnnnnnnnnnnnnnnnnnnnnnnnnnnnnnnnnnnnnnnnnnnnnnnnnnnnnnnnnnnnnnnnnnnnnnnnnnnnnnnnnnnnnnnnnnnnnnntccctagctgcagtgtagatggctcttgtttttgtttttttgttttaatcatttggcattcacatgtggctgttaatatgtgc

SEQ ID NO: 2319 - DNA, 331 bp, Homo sapiens
  misc_feature (38)..(64): n includes a, c, g, or t, or contains no nucleotide
  misc_feature (267)..(267): n includes a, c, g, or t, or contains no nucleotide
tccgagccatgtgagccccctgatgccaccgagcaggnnnnnnnnnnnnnnnnnnnnnnnnnnnaggctgtggcggacactctcggggttgtctgcaggagagcaagccaggaggacatgggcctggacgacacggcctcgcagcaaagtgtgtcagacgagcagtgacgggcgtgcggccgggcggggaggctggctcccccacacctcccacctgcattgctctccctcgtgctccccaaatcaccacaaccaaccaataccgcnatccatgagggactcctcctgtggaaaaggagagctgttccagaacacagaactgatctcaggt

SEQ ID NO: 2320 - DNA, 558 bp, Homo sapiens
  misc_feature (26)..(115): n includes a, c, g, or t, or contains no nucleotide
  misc_feature (167)..(168): n includes a, c, g, or t, or contains no nucleotide
  misc_feature (233)..(234): n includes a, c, g, or t, or contains no nucleotide
  misc_feature (236)..(237): n includes a, c, g, or t, or contains no nucleotide
  misc_feature (380)..(380): n includes a, c, g, or t, or contains no nucleotide
ggcagatttccttctaaccaaaaagnnnnnnnnnnnnnnnnnnnnnnnnnnnnnnnnnnnnnnnnnnnnnnnnnnnnnnnnnnnnnnnnnnnnnnnnnnnnnnnnnnnnnnnnnnggctatatcacagcaactgccttgctgacgctctcttgcggattaagcacanngtgtcagtcagggatttatatcaatgtcttagatattgctccaaggtattccagttttctcatgnnannatcaagaggattttcgagcatagcacctgtcattgtacccactgtcagcggatttcttcttagtcaggaccctgagtttgggtggaggaatgtcttcttcttgctgtttgccgttaacctgttaggactactcttctacctcntatttggagaagcagatgtccaagaatgggctaaagagagaaaactcactcgtttatgaagttatcccaccttggatggaaaagtcattaggcaccgtattgcataaaatagaaggcttccgtgatgaaaataccagtgaaaagatttttttttcctgtggctcttttcaattatgag

SEQ ID NO: 2321 - DNA, 562 bp, Homo sapiens
  misc_feature (187)..(207): n includes a, c, g, or t, or contains no nucleotide
  misc_feature (513)..(513): n includes a, c, g, or t, or contains no nucleotide
gccatctggttctcctcttaaggccagttgaagatggtcccttacagcttcccaagttaggttagtgatgtgaaatgctcctgtccctggccctacctccttccctgtccccacccctgcataaggcagttgttggttttcttccccaattcttttccaagtaggttttgtttaccctactccccannnnnnnnnnnnnnnnnnnnngggtgcttatactcccaaaccttgagtgtccagccttcccctgttgtttttagtctcttgtgctgtgcctagtggcacctgggctggggaggacactgccccgtctaggtttttataaatgtcttactcaagttcaaacctccagcctgtgaatcaactgtgtctcttttttgacttggtaagcaagtattaggctttggggtggggggaggtctgtaatgtgaaacaacttcttgtctttttttctcccactgttgtaaataacttttaatggccaaaccccagatttgtacttttttttttttnctaactgctaaaaccattctcttccacctggttttactgtaacatttgg

SEQ ID NO: 2322 - DNA, 540 bp, Homo sapiens
gagaccagtgtatcaggtcagggacttggacaggagtcagtgtctggctttttcctctgagcccagctgcctggagagggtctcgctgtcactggctggctcctaggggaacagaccagtgaccccagaaaagcataacaccaatcccagggctggctctgcactaagagaaaattgcactaaatgaatctcgttcccaaagaactacccccttttcagctgagccctggggactgttccaaagccagtgaaatgtgaaggaaagtggggtccttcggggcgatgctccctcagcctcagaggagctctaccctgctccctgctttggctgaggggcttgggaaaaaaacttggcactttttcgtgtggatcttgccacatttctgatcagaggtgtacactaacatttcccccgagctcttggcctttgcatttatttatacagtgccttgctcggcgcccaccaccccctcaagccccagcagccctcaacaggcccagggagggaagtgtgagcgccttggtatgacttaaaattgg

SEQ ID NO: 2323 - DNA, 516 bp, Homo sapiens
  misc_feature (26)..(42): n includes a, c, g, or t, or contains no nucleotide
  misc_feature (83)..(146): n includes a, c, g, or t, or contains no nucleotide
  misc_feature (231)..(275): n includes a, c, g, or t, or contains no nucleotide
  misc_feature (311)..(326): n includes a, c, g, or t, or contains no nucleotide
ccagccctgatgtggagacacatggnnnnnnnnnnnnnnnnntctggaggaatgcatgtcacaggcgggactttcttcagagnnnnnnnnnnnnnnnnnnnnnnnnnnnnnnnnnnnnnnnnnnnnnnnnnnnnnnnnnnnnnnnngccgcccgaaggagcctgctttggtactatggaacttttcttaggggacacgtcctcctttcacagcttctaaggtgtccagtgnnnnnnnnnnnnnnnnnnnnnnnnnnnnnnnnnnnnnnnnnnnnncagccctctcagggagcagtcttccatcatgctgannnnnnnnnnnnnnnngctgcccctatggggcggggccgcagggccagccttgtttctctaacaaacaaacaaacaaacagccttgtttctctagtcacatcatgtgtatacaaggaagccaggaatacaggttttcttgatgatttgggttttaattttgtttttattgcacctgacaaaatacagttatctgatggtccctcaa

SEQ ID NO: 2324 - DNA, 595 bp, Homo sapiens
  misc_feature (65)..(92): n includes a, c, g, or t, or contains no nucleotide
  misc_feature (335)..(352): n includes a, c, g, or t, or contains no nucleotide
  misc_feature (384)..(404): n includes a, c, g, or t, or contains no nucleotide
ctaaactggagtgatgttagcagacccagcttagagttcttctttctttcttaagccctttgctnnnnnnnnnnnnnnnnnnnnnnnnnnnnactcacagcttctccaagcatcaccctgggagtttcctgagggttttctcataaatgagggctgcacattgcctgttctgcttcgaagtattcaataccgctcagtattttaaatgaagtgattctaagatttggtttgggatcaataggaaagcatatgcagccaaccaagatgcaaatgttttgaaatgatatgaccaaaattttaagtaggaaagtcacccaaacacttctgctttcacnnnnnnnnnnnnnnnnnnatactgtaggaacaagcatgatcttgttactnnnnnnnnnnnnnnnnnnnnngtactcactttttccaaatgatcctagtaattgcctagaaatatctttctcttacctgttatttatcaatttttcccagtatttttatacggaaaaaattgtattgaaaacacttagtatgcagttgataagaggaatttggtataattatggtgggtgattattttttatactgtatgtgccaaagcttt

SEQ ID NO: 2325 - DNA, 518 bp, Homo sapiens
  misc_feature (98)..(113): n includes a, c, g, or t, or contains no nucleotide
  misc_feature (228)..(251): n includes a, c, g, or t, or contains no nucleotide
  misc_feature (368)..(373): n includes a, c, g, or t, or contains no nucleotide
  misc_feature (378)..(382): n includes a, c, g, or t, or contains no nucleotide
  misc_feature (384)..(384): n includes a, c, g, or t, or contains no nucleotide
cctttaaatcattggtaagtgtacaagtggtggaactgaagcatttactggacaaagtaatgttactctaatggttacttgctcgtgcgttgccacannnnnnnnnnnnnnnnttcatttccttgctatttgatacatagtgtgcatttctctgtcactgtaactattgtaatgacaaattttcatcttactgcacaatcaaaatgacattgataggaatgaactccnnnnnnnnnnnnnnnnnnnnnnnntggtcgctcaggcctggtgctcagtcgtacgacctgtacctctcaacttttgccctatctgttaaatatatgctatgtcattaaatgcttttaaatctaaaaaaaaaaaaaaaaaannnnnnaaaannnnnantagttgttgttcttcctctgtctgcgtgtgcatgcccagtagggaaactgcaaagggagaaatgacaaacaagaaacattttacaaccagtctgggctcacttttgcattttttatgcatgtctggtgcacaag

SEQ ID NO: 2326 - DNA, 581 bp, Homo sapiens
  misc_feature (107)..(151): n includes a, c, g, or t, or contains no nucleotide
  misc_feature (175)..(175): n includes a, c, g, or t, or contains no nucleotide
  misc_feature (180)..(184): n includes a, c, g, or t, or contains no nucleotide
  misc_feature (186)..(203): n includes a, c, g, or t, or contains no nucleotide
  misc_feature (205)..(205): n includes a, c, g, or t, or contains no nucleotide
  misc_feature (207)..(254): n includes a, c, g, or t, or contains no nucleotide
  misc_feature (256)..(268): n includes a, c, g, or t, or contains no nucleotide
  misc_feature (295)..(295): n includes a, c, g, or t, or contains no nucleotide
  misc_feature (303)..(303): n includes a, c, g, or t, or contains no nucleotide
  misc_feature (367)..(367): n includes a, c, g, or t, or contains no nucleotide
  misc_feature (439)..(439): n includes a, c, g, or t, or contains no nucleotide
  misc_feature (465)..(465): n includes a, c, g, or t, or contains no nucleotide
  misc_feature (474)..(474): n includes a, c, g, or t, or contains no nucleotide
  misc_feature (479)..(479): n includes a, c, g, or t, or contains no nucleotide
  misc_feature (485)..(485): n includes a, c, g, or t, or contains no nucleotide
  misc_feature (508)..(508): n includes a, c, g, or t, or contains no nucleotide
  misc_feature (511)..(512): n includes a, c, g, or t, or contains no nucleotide
  misc_feature (529)..(529): n includes a, c, g, or t, or contains no nucleotide
  misc_feature (536)..(536): n includes a, c, g, or t, or contains no nucleotide
cctgcccacgggaggacaagcaataactctctacaggaatatattttttaaacgaagagacagaactgtccacatctgcctcctctcctcctcagctgcatggagcnnnnnnnnnnnnnnnnnnnnnnnnnnnnnnnnnnnnnnnnnnnnnccagagtgggagaggctgggaggntgggnnnnngnnnnnnnnnnnnnnnnnngngnnnnnnnnnnnnnnnnnnnnnnnnnnnnnnnnnnnnnnnnnnnnnnnnannnnnnnnnnnnnctctgtggctgtctctattagctgggntccgggangcagagaggagtgaccgggcactggcactgcgatcaggaagactggacccccagcccccagggnccccctccccccacttagtgctggtcctaggtcctctgaggcactcatctactgaatgacctctctacttcnccttcttgccattattaacccatttntgtttattntcctnaaattnttagccatttctccatgggccancgnncagctcatgtaggtgancctgggnagcttctgttggcagagcttttgcatttcctgtgtttgtcctggg

SEQ ID NO: 2327 - DNA, 526 bp, Homo sapiens
  misc_feature (265)..(265): n includes a, c, g, or t, or contains no nucleotide
  misc_feature (270)..(270): n includes a, c, g, or t, or contains no nucleotide
  misc_feature (327)..(327): n includes a, c, g, or t, or contains no nucleotide
  misc_feature (345)..(345): n includes a, c, g, or t, or contains no nucleotide
  misc_feature (348)..(352): n includes a, c, g, or t, or contains no nucleotide
  misc_feature (354)..(469): n includes a, c, g, or t, or contains no nucleotide
  misc_feature (471)..(471): n includes a, c, g, or t, or contains no nucleotide
  misc_feature (473)..(473): n includes a, c, g, or t, or contains no nucleotide
  misc_feature (475)..(475): n includes a, c, g, or t, or contains no nucleotide
  misc_feature (477)..(477): n includes a, c, g, or t, or contains no nucleotide
  misc_feature (480)..(480): n includes a, c, g, or t, or contains no nucleotide
  misc_feature (482)..(483): n includes a, c, g, or t, or contains no nucleotide
  misc_feature (485)..(486): n includes a, c, g, or t, or contains no nucleotide
  misc_feature (488)..(490): n includes a, c, g, or t, or contains no nucleotide
  misc_feature (492)..(499): n includes a, c, g, or t, or contains no nucleotide
  misc_feature (501)..(501): n includes a, c, g, or t, or contains no nucleotide
tggtgatggacatcccctatgagctgtggaacgagacttctgcagaggtggctgacctcaagaagcagtgtgatgtgctggtggaagagtttgaggaggtgatcgaggactggtacaggaaccaccaggaggaagacctgactgaattcctctgcgccaaccacgtgctgaagggaaaagacaccagttgcctggcagagcagtggtccggcaagaagggagacacagctgccctgggagggaagaagtccaagaagaagagcancaggnccaaggcagcaggcggcaggagtagcagcagcaaacaaaggaaggagctgggtggcnttgagggagaccccagcnccnnnnngnnnnnnnnnnnnnnnnnnnnnnnnnnnnnnnnnnnnnnnnnnnnnnnnnnnnnnnnnnnnnnnnnnnnnnnnnnnnnnnnnnnnnnnnnnnnnnnnnnnnnnnnnnnnnnnnnnnnanancncnaanannannannntnnnnnnnntntgcactccacttaagtgtggagact

SEQ ID NO: 2328 - DNA, 97 bp, Homo sapiens
ttccttaagtctgctcctgccaatgctgccctgtatctcagtaagaggagccaggaccagaccctggcttctgaaaggctcgctctcatcttgtaca

SEQ ID NO: 2329 - DNA, 424 bp, Homo sapiens
  misc_feature (110)..(110): n includes a, c, g, or t, or contains no nucleotide
  misc_feature (246)..(273): n includes a, c, g, or t, or contains no nucleotide
  misc_feature (315)..(315): n includes a, c, g, or t, or contains no nucleotide
  misc_feature (346)..(346): n includes a, c, g, or t, or contains no nucleotide
  misc_feature (380)..(380): n includes a, c, g, or t, or contains no nucleotide
cattcttctctctttgaagagagcagtcaacattcttagtagtgggtttctgttctattggatgactttgagatttgtctttgtttccttttggaattgttcaaatgttncttttaatgggtggttgaatgaacttcagcattcaaatttatgaatgacagtagtcacacatagtgctgtttatatagtttaggagtaagagtcttgttttttattcagattgggaaatccattccattttgtgannnnnnnnnnnnnnnnnnnnnnnnnnnnagtattcatttagaaatgtgaatgagcagtaaaactgatganataaagaaattaaaagatatttaattcttgncttatactcagtctattcggtaaaattttttttnaaaaatgtgcatacctggatttccttggcttctttgagaatgta

SEQ ID NO: 2330 - DNA, 387 bp, Homo sapiens
  misc_feature (56)..(71): n includes a, c, g, or t, or contains no nucleotide
  misc_feature (77)..(77): n includes a, c, g, or t, or contains no nucleotide
  misc_feature (127)..(127): n includes a, c, g, or t, or contains no nucleotide
  misc_feature (129)..(129): n includes a, c, g, or t, or contains no nucleotide
  misc_feature (234)..(236): n includes a, c, g, or t, or contains no nucleotide
  misc_feature (238)..(239): n includes a, c, g, or t, or contains no nucleotide
  misc_feature (294)..(294): n includes a, c, g, or t, or contains no nucleotide
aggagcaccagattgtccttgtggagggcggccgcacccaggacctgccaggcgtnnnnnnnnnnnnnnnncgtggnaagtacgactgtggccacgtgcagaagaagtgacggctgggggcacagtngnctgggcgcccctgcagaacatgaaccttccgctcctggctgccacagggtcctccgatgctggcctttgcgcctctagaggcagccactcatggattcaagtccnnncnncgcctcttccatcaggaccactattaagccataggagtcctgggggtgcaaaggntgcccctctgtcaacacccttggctcctgtgtttagaggggtggcctgaaggaccttttctgctgggacaagacactgtactgccctctgctg

SEQ ID NO: 2331 - DNA, 565 bp, Homo sapiens
  misc_feature (198)..(438): n includes a, c, g, or t, or contains no nucleotide
  misc_feature (516)..(516): n includes a, c, g, or t, or contains no nucleotide
  misc_feature (540)..(540): n includes a, c, g, or t, or contains no nucleotide
ggaattatctagtccccagattgatcatctcccctggcaacgtgactctgttttttgtgtgtgtttccatgctgactagtcccctactgttaatatcactactaattaggctataaccaggtctttcctggcctgagaaatattctcttaaaatgacctttgttttaatctcattcatgatgttgattttttttcaannnnnnnnnnnnnnnnnnnnnnnnnnnnnnnnnnnnnnnnnnnnnnnnnnnnnnnnnnnnnnnnnnnnnnnnnnnnnnnnnnnnnnnnnnnnnnnnnnnnnnnnnnnnnnnnnnnnnnnnnnnnnnnnnnnnnnnnnnnnnnnnnnnnnnnnnnnnnnnnnnnnnnnnnnnnnnnnnnnnnnnnnnnnnnnnnnnnnnnnnnnnnnnnnnnnnnnnnnnnnnnnnnnnnnnnnnnnnnnnnggggatgccctctctcctatgtatggtctacacattctgattttttttttagattgaataaaatttgtaaatcattantttcatttcataagtaaaaaaaanttggactgcctattatgttcttggg

SEQ ID NO: 2332 - DNA, 507 bp, Homo sapiens
  misc_feature (26)..(47): n includes a, c, g, or t, or contains no nucleotide
  misc_feature (121)..(121): n includes a, c, g, or t, or contains no nucleotide
  misc_feature (147)..(147): n includes a, c, g, or t, or contains no nucleotide
  misc_feature (157)..(157): n includes a, c, g, or t, or contains no nucleotide
  misc_feature (390)..(408): n includes a, c, g, or t, or contains no nucleotide
ggagcagtttatcctttcccaggttnnnnnnnnnnnnnnnnnnnnnngccttggtgcccatgctggacagtgctcacatcaaagccgttcctgagcatgctgcccgcctgcagcgcttggncccagatccacattcagcagcagganccagtgtgtnggaaatcactgaggagtccaaggctctcctggaggaatacaacaagactacaatgcttctctccaagcaattcgtgcagtgggatgagctactttgccagctagaggccgccacgcaagtgaagccagcagaggagtgatagctgctccccatcccaaagtgggcctgggcagtcaggctccagggccctatgccaacctgcctttgttacaaggcagaggaagctttgtatnnnnnnnnnnnnnnnnnnncctctctgtactctgggctctaaagttggaggtcaggttacctgaggtttgcaatttgcaacacccaccctccccccaatcagtgttcttatttcagtg

SEQ ID NO: 2333 - DNA, 397 bp, Homo sapiens
  misc_feature (86)..(86): n includes a, c, g, or t, or contains no nucleotide
  misc_feature (99)..(148): n includes a, c, g, or t, or contains no nucleotide
  misc_feature (156)..(156): n includes a, c, g, or t, or contains no nucleotide
  misc_feature (185)..(185): n includes a, c, g, or t, or contains no nucleotide
  misc_feature (195)..(195): n includes a, c, g, or t, or contains no nucleotide
  misc_feature (273)..(273): n includes a, c, g, or t, or contains no nucleotide
  misc_feature (277)..(277): n includes a, c, g, or t, or contains no nucleotide
  misc_feature (296)..(298): n includes a, c, g, or t, or contains no nucleotide
  misc_feature (303)..(335): n includes a, c, g, or t, or contains no nucleotide
cctgctcttgtttatactgctggtttacactgtttctccaagccatcacagatatctcctgctgctatccccaaactgccactctnaactcttgaagtnnnnnnnnnnnnnnnnnnnnnnnnnnnnnnnnnnnnnnnnnnnnnnnnnnctctaatnagatgtcctaggtcctcccaattcttagnccttttatanctgtttttctccttctcttattccatttagtttttcaattcatacaaaaccgtatccaggccatcaccaatcattctntacnacaaatgtttcttctaacnnncccannnnnnnnnnnnnnnnnnnnnnnnnnnnnnnnntctaggttcccacgccgcccctaatcccgcttgaagcagccctgagaaacatcgcccattct

SEQ ID NO: 2334 - DNA, 252 bp, Homo sapiens
  misc_feature (107)..(107): n includes a, c, g, or t, or contains no nucleotide
  misc_feature (175)..(175): n includes a, c, g, or t, or contains no nucleotide
  misc_feature (188)..(188): n includes a, c, g, or t, or contains no nucleotide
  misc_feature (227)..(227): n includes a, c, g, or t, or contains no nucleotide
atgggctaagagatcccttggtgtgggggtgatcttacagtagtcagagcagatggacagtccttttcacccttgcttaatagccagagctgtttcatgcctggggnacacacaattctaatgctggactttttcctgggtcatgctgcaacactgatgtcagagcatgtttttnaatgttctgtggncaggggcagtgattattctgggtgtggataatgtaagangttacagcagagctccattctaagg

SEQ ID NO: 2335 - DNA, 468 bp, Homo sapiens
  misc_feature (27)..(43): n includes a, c, g, or t, or contains no nucleotide
  misc_feature (78)..(78): n includes a, c, g, or t, or contains no nucleotide
  misc_feature (82)..(82): n includes a, c, g, or t, or contains no nucleotide
  misc_feature (92)..(127): n includes a, c, g, or t, or contains no nucleotide
  misc_feature (131)..(131): n includes a, c, g, or t, or contains no nucleotide
  misc_feature (278)..(296): n includes a, c, g, or t, or contains no nucleotide
caccttccctttcaacgaggatgaggnnnnnnnnnnnnnnnnncagaacgccgccttcatgtacccggccagcccctnggangccacatctnnnnnnnnnnnnnnnnnnnnnnnnnnnnnnnnnnnnaggntgaagatgcgcaaacgctacagcgtggacaaatctctcagccacccctggttacaggagtaccagacgtggctggacctccgagagctggaggggaagatgggagagcgatacatcacgcatgagagtgacgacgcgcgctgggagnnnnnnnnnnnnnnnnnnncgctgcctgggtctgggctgcccacggacagggatctcggtggggcctgtccaccacaggaccacgacatgcaggggctggcggagcgcatcagtgttctctgaggtcctgtgccctcgtccagctgctgccctccacagcggttcttcacaggatcccagcaatgaactgt

SEQ ID NO: 2336 - DNA, 249 bp, Homo sapiens
  misc_feature (155)..(172): n includes a, c, g, or t, or contains no nucleotide
taatgttacgcctgtgcaatttttaagtggcatattatggcagattaaaatttagatacttggcttttcttgggcaagccactaagttgtggcggaatgttttctggtgttcttggactgcaattatgcactattaaagtagtggcctgctacannnnnnnnnnnnnnnnnnatttctgcagtgcgtaactgtgaggaacgtagtaccgcaaatggcaatggacattaggacccggatgtagtattcct

SEQ ID NO: 2337 - DNA, 298 bp, Homo sapiens
  misc_feature (70)..(70): n includes a, c, g, or t, or contains no nucleotide
acattgatcatgaccggaacatggactgggtttccacccagctccaggccacatgcaatgtccacaagtntgccttcaatgactggttcagtggacacctcaacttccagattgagcaccatctttttcccacgatgcctcgacacaattaccacaaagtggctcccctggtgcagtccttgtgtgccaagcatggcatagagtaccagtccaagcccctgctgtcagccttcgccgacatcatccactcactaaaggagtcagggcagctctggctagatgcctatcttcaccaata

SEQ ID NO: 2338 - DNA, 604 bp, Homo sapiens
  misc_feature (32)..(59): n includes a, c, g, or t, or contains no nucleotide
  misc_feature (97)..(130): n includes a, c, g, or t, or contains no nucleotide
  misc_feature (144)..(166): n includes a, c, g, or t, or contains no nucleotide
  misc_feature (259)..(277): n includes a, c, g, or t, or contains no nucleotide
  misc_feature (313)..(328): n includes a, c, g, or t, or contains no nucleotide
gcaaaacttatgtgaccccgcggagacccttnnnnnnnnnnnnnnnnnnnnnnnnnnnnaagctgatcggcgagtatgggctccggaacaaacgtgnnnnnnnnnnnnnnnnnnnnnnnnnnnnnnnnnnccgcaaggccgccnnnnnnnnnnnnnnnnnnnnnnngaaggacccacggcgtctgttcgaaggcaacgccctgctgcggcggctggtccgattgggggtgctggatgagggcaagatgaagctggattnnnnnnnnnnnnnnnnnnnagaggatttcttagagagacgcctgcagacccaggnnnnnnnnnnnnnnnnggccaagtccatccaccacgctcgcgtgctgatccgccagcgccatatcagggtccgcaagcaggtggtgaacatcccgtccttcattgtccgcctggattcccagaagcacattgacttctctctgcgctctcctacgggggttggccgcccgggccgcgtgaagaggaagaatgccaagaagggccagggtggggctggggctggagacgacgaggaggaggattaagtccacctgtccctcctgggctgctggattgtctcgttttcctgcca

SEQ ID NO: 2339 - DNA, 349 bp, Homo sapiens
atcggctaccagatgctgatgaagatgggctggaaggagggcgaggggctgggctcagagggccagggcatcaagaacccagtgaacaagggcaccaccacagtggacggcgctggcttcggcattgaccggccggcggagctctccaaggaggacgacgagtatgaggcgttccgcaagaggatgatgctggcctaccgcttccggcccaaccccctgaacaatcccagacggccttactactgagtgttctggaaatacatactttctgaatgaccaaccgtccctggactgtggaatgttccggcctgcatttctgcccaccccttccgttgtcacgagtgccgtg

SEQ ID NO: 2340 - DNA, 284 bp, Homo sapiens
  misc_feature (60)..(60): n includes a, c, g, or t, or contains no nucleotide
  misc_feature (100)..(100): n includes a, c, g, or t, or contains no nucleotide
  misc_feature (102)..(130): n includes a, c, g, or t, or contains no nucleotide
  misc_feature (146)..(146): n includes a, c, g, or t, or contains no nucleotide
  misc_feature (148)..(148): n includes a, c, g, or t, or contains no nucleotide
  misc_feature (152)..(152): n includes a, c, g, or t, or contains no nucleotide
  misc_feature (155)..(155): n includes a, c, g, or t, or contains no nucleotide
  misc_feature (175)..(175): n includes a, c, g, or t, or contains no nucleotide
  misc_feature (178)..(245): n includes a, c, g, or t, or contains no nucleotide
gatctctgtttacttagatctctgccaacttcctttgggtctccctatggaatgtaagancccgactcttcctggtgaagcatctgatgcacgttccatncnnnnnnnnnnnnnnnnnnnnnnnnnnnnnactccctggagccttntncccnagntgcgcgggtgaccttggcanatnnnnnnnnnnnnnnnnnnnnnnnnnnnnnnnnnnnnnnnnnnnnnnnnnnnnnnnnnnnnnnnnnnnntcccttggtgttccccttttactgccaggacactgagat

SEQ ID NO: 2341 - DNA, 445 bp, Homo sapiens
atgcttctaatgcttgcatttacaacaatgccgatgacatagtcggaatggaagcgtcatccatgccatcagcagatttatatggtatttctgatcccaacatgctgtctaattgttctgtgaatatgatgacaaccagcagtgacagcatgggagagactgataatccaagacttctgagcatgaatcttgaaaacccctcatgtaattcagtgttagacccaagagacttgagacagctccatcagatgtcctcttccagtatgtcagcaggcgccaattccaatactactgtttttgtttcacaatcagatgcatttgagggatctgacttcagttgtgcagataacagcatgataaatgagtcgggaccatcaaacagtactaatccaaacagtcatggttttgttcaagatagtcagtattcaggtattggcagtatgca

SEQ ID NO: 2342 - DNA, 583 bp, Homo sapiens
gcgccacataatcaacagaaagatggggctgtcccagccgtaagtcaggctcgagggagactgatcccctgaccaattcacctgataaactctagggacactggcagctgtggaaatgaatgaggcacagccgtagagctgtggctaagggcaagccccttcctgccccaccccattccttatattcagcaagcaacaaggcaatagaaaagccagggttgtctttatattctttatccccaaataatagggggtggggggaggggcggtgggaggggcaggagagaaaaccacttagactgcacttttctgttccgtttactctgtttacacattttgcacttgggaggagggaggctaaggctgggtcctcccctctgaggtttctcaggtggcaatgtaactcatttttttgtcccaccatttatcttctctgcccaagccctgtcttaaggcccagggggaggttaggagactgatagcatgtgatggctcaggctgaagaaccggggttctgtttaagtccctgcttttatcctggtgcctgattggggtggggactgtcctactgtaacccctgtga

SEQ ID NO: 2343 - DNA, 228 bp, Homo sapiens
ggatctgctcgtcatcatttttccttcccttctccatctctctggccctctacccctgatctgacatccccactcacgaatattatgcccagtttctgcctctgagggaaagcccagaaaaggacagaaacgaagtagaaaggggcccagtcctggcctggcttctcctttggaagtgaggcattgcacggggagacgtacgtatcagcggccccttgactctgggga

SEQ ID NO: 2344 - DNA, 483 bp, Homo sapiens
  misc_feature (160)..(160): n includes a, c, g, or t, or contains no nucleotide
  misc_feature (220)..(220): n includes a, c, g, or t, or contains no nucleotide
  misc_feature (398)..(413): n includes a, c, g, or t, or contains no nucleotide
acattattgagtgttgtagccactagaattttaaaatcaagttggatttatagagtttgactagttttttcgattagatttgtatttgttataaacttgtttatggagtttgactaattttttctattcaatttgtatttgttaaactcaagccagggtngaaagacactgcatacgtttgtattattagttagaaggcatgaagacttttttccctgcntggagagtgtcataagttattgttttgcatatctactgcatgccaagcactttctgcatcatctaatttagccctcacagccactgggtcaagatgtccaattttccagagtaaggatagaggagtcaaattcaaatacaggttttctgacattaacttatgtgatgacttgatcgannnnnnnnnnnnnnnnatcactgtcctggttccatctctgctatatgggaatgaaaataaagaaacatatttcttggcttgtctaa

SEQ ID NO: 2345 - DNA, 443 bp, Homo sapiens
  misc_feature (124)..(124): n includes a, c, g, or t, or contains no nucleotide
  misc_feature (278)..(278): n includes a, c, g, or t, or contains no nucleotide
  misc_feature (386)..(387): n includes a, c, g, or t, or contains no nucleotide
  misc_feature (401)..(401): n includes a, c, g, or t, or contains no nucleotide
ctgctgatacgaaggttgggcatgaggggtctgggacggtggttgctgggagtagggtggctgctgctgctgagggtgaggactttgctggttgtaatatggagtctggccctgttgaccatanccgctggggccttgttgtccataaggaggaatctgctgtgtataagagaggccgcccatggcactctgcgcccggccctgcatggtcatcgggtaccgctgcggggtctgggacccgtatggctgccctgggtacccatgtccttgctgcggtnctgacggaggtccctgttgctgcgagtatgggttagtcccgccatatggctgaggtctcatcttgcccatctgatccattggactggatggctgaggggtccgggcgnncggctgccccccgncgccgctgctcccggggctcatgggcgcgtggtggctccttt

SEQ ID NO: 2346 - DNA, 476 bp, Homo sapiens
  misc_feature (143)..(157): n includes a, c, g, or t, or contains no nucleotide
  misc_feature (378)..(399): n includes a, c, g, or t, or contains no nucleotide
tggaggcgtttctctgaccagtttcctcttcccttaaaagagcgtcttgcagctttttatggtgtttaatctaatacacttaagctgcagtcccaaaattaggggtccttcagtcttggagactataagggagcctctgcacnnnnnnnnnnnnnnnccctttacaggggggaagggtaaaccagtagggaatacagtacaatcccaaccctactgggaggggcgggagggaggtgttgccgtcactgtattaagtcgatgttgggaaacgttttaacatctggagcctttgtgggtggaaatatgtctccagttacaactccgcagtggatgtgaagaagcaaaaaaaaaaaaatctattcagtctactcacaaaannnnnnnnnnnnnnnnnnnnnngggaattgtaccaaaacaagaaccatataaatgatgcctagggacaagaaagaggaacaattctatagcgcacaata

SEQ ID NO: 2347 - DNA, 454 bp, Homo sapiens
  misc_feature (95)..(95): n includes a, c, g, or t, or contains no nucleotide
  misc_feature (99)..(99): n includes a, c, g, or t, or contains no nucleotide
  misc_feature (101)..(101): n includes a, c, g, or t, or contains no nucleotide
  misc_feature (118)..(118): n includes a, c, g, or t, or contains no nucleotide
  misc_feature (132)..(132): n includes a, c, g, or t, or contains no nucleotide
  misc_feature (139)..(139): n includes a, c, g, or t, or contains no nucleotide
  misc_feature (142)..(142): n includes a, c, g, or t, or contains no nucleotide
  misc_feature (185)..(203): n includes a, c, g, or t, or contains no nucleotide
  misc_feature (336)..(336): n includes a, c, g, or t, or contains no nucleotide
  misc_feature (338)..(338): n includes a, c, g, or t, or contains no nucleotide
  misc_feature (359)..(359): n includes a, c, g, or t, or contains no nucleotide
  misc_feature (414)..(415): n includes a, c, g, or t, or contains no nucleotide
atcatggcctcctcagtgatgccaaaggggatgttgcccacgtagaggcgccgggcttgtctggtcatctggctcccgaccacgggcaccggcgntggngncacagccagaccgtcangggtcatggtgggnagaagancantggctggaatctgacccgcagcttgcatggccttgtactgcannnnnnnnnnnnnnnnnnngcctgggggtggcacgtcccagtatttacggaccttcttcttcttctcgtggcggggggaacgaatcagtccaccgtgctcctctttagcgcctctggtcaaaggtttgctgcgtcgtcgcctgtcccgggangngctccgctggtcccggttgcnccggtcgcggctccggctccggcgtttgcggtcccggctccgagagcggctgtgnntgcgcttccgatgccggttctccttgtcccgctcttgtt

SEQ ID NO: 2348 - DNA, 409 bp, Homo sapiens
tctacttgtctccagatcggactggctcctcctttgggaagaactccgaaaggagggagaggatgggccaccacgacgactactacagcaggctgcggggaaggagaaaccctagtccagaccactcctacaaaagaaatggggaatccgagaggaaaagtagtcgtcacagggggaagaaatctcacaaacgcacatcaaagagtcgggagaggcacaattcacgaagcagaggaagaaatagggaccgcagcagggaccgcagccggggccggggcagccggagccggagccggagccggagccgcaggagccgccgcagccggagccaaagttcctctaggtcccgaagtcgtggcaggaggaggtcgggtaatagagacagaactgttcagagtcccaaatccaa

SEQ ID NO: 2349 - DNA, 444 bp, Homo sapiens
  misc_feature (241)..(261): n includes a, c, g, or t, or contains no nucleotide
aacggagactgtgctctgtgccctgggcctggtgctgggcctagtcggcatcatcgtgggcaccgtcctcatcataaagtctctgcgttctggccatgacccccgggcccaggggaccctgtgaaatactgtaaaggtgacaaaatatctgaacagaagaggacttaggagagatctgaactccagctgccctacaaactccatctcagcttttcttctcacttcatgtgaaaactactcnnnnnnnnnnnnnnnnnnnnnacccttcaagctctgtccttatccattacctcaaagcagtcattccttagtaaagtttccaacaaatagaaattaatgacactttggtagcactaatatggagattatcctttcattgagccttttatcctctgttctcctttgaagaacccctcactgtcaccttcccgagaataccctaag

SEQ ID NO: 2350 - DNA, 347 bp, Homo sapiens
  misc_feature (229)..(229): n includes a, c, g, or t, or contains no nucleotide
ggtcttgtctgctgtgattcgactctggatgctgtgagcttgatgctggccagggaagcagaggatgtgagaggcagaggcaggctcctggggctgagctccttcctctgcatcattctgggcttggcctggacagcacccgccagtgagagctgtgggcctcaccctctggcagctgagccaagcactgtcattcttggtgccatcttcccctgccgcaccggcagtntcagcccagcccccacctttgggttgtaggttgggctcccaagcaacacagaccactcttccccttgcccctcccccagagggacttgactttctttctggactgtttgtattgaaac

SEQ ID NO: 2351 - DNA, 481 bp, Homo sapiens
  misc_feature (60)..(60): n includes a, c, g, or t, or contains no nucleotide
  misc_feature (145)..(145): n includes a, c, g, or t, or contains no nucleotide
  misc_feature (161)..(161): n includes a, c, g, or t, or contains no nucleotide
  misc_feature (178)..(178): n includes a, c, g, or t, or contains no nucleotide
  misc_feature (303)..(303): n includes a, c, g, or t, or contains no nucleotide
  misc_feature (305)..(323): n includes a, c, g, or t, or contains no nucleotide
  misc_feature (325)..(325): n includes a, c, g, or t, or contains no nucleotide
  misc_feature (331)..(333): n includes a, c, g, or t, or contains no nucleotide
  misc_feature (402)..(421): n includes a, c, g, or t, or contains no nucleotide
tgcctctgtggaagagattcctattactgcagtacatacgtctgccaggggtaacctggnccactgtccctgtccttctacagaacctgagggcaaagatggtggctgtgtctctccccggtaatgtcactgtttttattccttnccatctagcagctggncctaatcactctgagtncacaggtgtgggatggagagtggggagaggcacttaatctgtaacccccaaggaggaaataactaagagattcttctaggggtagctggtggttgtgccttttgtaggctgttccctttgccttnannnnnnnnnnnnnnnnnnncnagcctnnnggcagcatgcccagattcccagaccttaagacactgtgagagttgtctctgttggtccactgtgtttannnnnnnnnnnnnnnnnnnntgtggtggtgttttttgttactgttttaaagggtgcccatttgtgatcagcattgtgact

SEQ ID NO: 2352 - DNA, 332 bp, Homo sapiens
  misc_feature (34)..(34): n includes a, c, g, or t, or contains no nucleotide
acacacgaatgtcctcagtatccaggaacataanggcaagaagcaagtcaacttacctattaaatattcctctattagatgtttcaacactataatttaattgggaaaaattgctttcagaattttattatgccatatttcccttcattatagtaaaatatatgctcacgaatcaatgctgatttttaaaatatgtataatctgaagtggaaattgtttgcttagagtttttaaaaacctagtctttgaaaagcagtttgtgctatacttttcccccaaccctccaataaatcttaaatttaaaacctacaatgtagtgtctcccctttagg

SEQ ID NO: 2353 - DNA, 112 bp, Homo sapiens
  misc_feature (39)..(39): n includes a, c, g, or t, or contains no nucleotide
caccctcatagaacctgttgcatgcaacttagtttcacnagctttgcctcttctttttgatgtatttattccagacctttctgccacttagcacttgtataatcagactgga

SEQ ID NO: 2354 - DNA, 487 bp, Homo sapiens
accctgagatccaggaggccttgcacgaggaagtggtgggtgtggtgccagccgggcaagtgccccagcacaaggactttgcccacatgccgttgctcaaagctgtgcttaaggagactctgcgtctctaccctgtggtccccacaaactcccggatcatagaaaaggaaattgaagttgatggcttcctcttccccaagaacacccagtttgtgttctgccactatgtggtgtcccgggaccccactgccttctctgagcctgaaagcttccagccccaccgctggctgagaaacagccagcctgctacccccaggatccagcacccatttggctctgtgccctttggctatggggtccgggcctgcctgggccgcaggattgcagagctggagatgcagctactcctcgcaaggctgatccagaagtacaaggtggtcctggccccggagaccggggagttgaagagtgtggcccgcattgtcct

SEQ ID NO: 2355 - DNA, 147 bp, Homo sapiens
tttgggactctgttgggaacatttcggggcgggagaggccaaggttgctggggaaatgcccattctccacttcccttctccctgtccgtgcccgatttgatttgagcctcataactcgaagaaaggtcagcttcctcgctgttttgg

SEQ ID NO: 2356 - DNA, 251 bp, Homo sapiens
atatgacgtcattgccagcacctaccctgctcagaatggacaagtaaagaaaaacaaccatcaagaagataaaattgaatttgataatgaagtggacaaagtaaagcaggatgctaattgtgttaatccacttggtgccccagaaaagctccctgaagcaaaggaacaggctgaaggttctgaacccacgagtggcactgaggggccagaacattctgtcaatggtcctgcaagtccagctttaaatcaag

SEQ ID NO: 2357 - DNA, 483 bp, Homo sapiens
  misc_feature (318)..(380): n includes a, c, g, or t, or contains no nucleotide
  misc_feature (427)..(457): n includes a, c, g, or t, or contains no nucleotide
ccagatctccctgcaagagacagcttggcttggctttggctgttggggaggagtccctgccatcccggtgagcctggggctgttgcttagggtcttctgggtggacacgtggagaaagagaaggcaaacgttggaacactaggaaaagctagaaattcagacaacacacatggatccccttaaaacatgtaaatgtgtcagaacacggttgacctgccgccttcttgaacctggtggcccccgttggaactatcagtggcgtctcccatgcacacgccctctgctttctctttcctagactcgcggtgctcacatccnnnnnnnnnnnnnnnnnnnnnnnnnnnnnnnnnnnnnnnnnnnnnnnnnnnnnnnnnnnnnnntttttgcaatcttgtgtcccgctcggtgatgttctacaaactctgtnnnnnnnnnnnnnnnnnnnnnnnnnnnnnnntctcaaaacagtgctaaaatcaaagg

SEQ ID NO: 2358 - DNA, 469 bp, Homo sapiens
tggttgcccatctctgctatgaacaaggttgcagaagttttacaagtacctccaatgagagtatatgaagtagcaactttttatacaatgtataatcgaaagccagttggaaagtatcacattcaggtctgcactactacaccctgcatgcttcgaaactctgacagcatactggaggccattcagaaaaagcttggaataaaggttggggagactacacctgacaaacttttcactcttatagaagtggaatgtttaggggcctgtgtgaacgcaccaatggttcaaataaatgacaattactatgaggatttgacagctaaggatattgaagaaattattgatgagctcaaggctggcaaaatcccaaaaccagggccaaggagtggacgcttctcttgtgagccagctggaggtcttacctctttgactgaaccacccaagggacctggatttggtgtacaagcag

SEQ ID NO: 2359 - DNA, 245 bp, Homo sapiens
  misc_feature (64)..(81): n includes a, c, g, or t, or contains no nucleotide
gctctgcctcctgtgcttatatcatccaaaaactttttaaaaaggtccagaattctattttaannnnnnnnnnnnnnnnnntaaaacgttcgtatgtgtgttgcactaattctaaactttggaggcattttgctgtgtgaggccgatcgccactgtaaaggtcctagagttgcctgtttgtctctggagatggaattaaaccaaataaagagcttccactggaggcttgtattgaccttgtaact

SEQ ID NO: 2360 - DNA, 136 bp, Homo sapiens
cgtcaggcatgcgaggtacgcgccctaaggagctgctctgcttgggcttgggatgggattatgtgctccacggagggtgaagtgatttgggaaaagtgtctgcaagttaaggaaaatgaatgcctcatttggaatg

SEQ ID NO: 2361 - DNA, 402 bp, Homo sapiens
  misc_feature (74)..(109): n includes a, c, g, or t, or contains no nucleotide
  misc_feature (113)..(134): n includes a, c, g, or t, or contains no nucleotide
  misc_feature (346)..(368): n includes a, c, g, or t, or contains no nucleotide
gtaggatgtcttggatgctgctttcctgcctgatgttcctttcttgggtggaaggtgaagaatctcaaaagaannnnnnnnnnnnnnnnnnnnnnnnnnnnnnnnnnnntgtnnnnnnnnnnnnnnnnnnnnnntcactgattttgataccacagacctggtctaatgcagaactatcctgccagatgcatttctcaggacacctggcatttcttctcagtactggtgaaattaccttcgtgtcctcccttgtgaagaacagtttgacggcctaccagtacatctggattggactccatgatccctcacatggtacactacccaacggaagtggatggaagtggannnnnnnnnnnnnnnnnnnnnnntataactgggagaggaacccctctattgctgctg

SEQ ID NO: 2362 - DNA, 87 bp, Homo sapiens
aagttaatttcctgttgcctttctgtgtcagccacaatatcaggtctaaccctaatccagggatgccagtaaactgaaggcaatttt

SEQ ID NO: 2363 - DNA, 49 bp, Homo sapiens
cctgtcttgtcaacatctgtgctagctattaccaacacagcagtagctt

SEQ ID NO: 2364 - DNA, 498 bp, Homo sapiens
  misc_feature (32)..(32): n includes a, c, g, or t, or contains no nucleotide
  misc_feature (70)..(70): n includes a, c, g, or t, or contains no nucleotide
  misc_feature (176)..(176): n includes a, c, g, or t, or contains no nucleotide
  misc_feature (304)..(304): n includes a, c, g, or t, or contains no nucleotide
  misc_feature (307)..(307): n includes a, c, g, or t, or contains no nucleotide
  misc_feature (348)..(362): n includes a, c, g, or t, or contains no nucleotide
agggttgcccgctgtggcctgctcccagggancaacagagaggccaccaagcagaggcccgtggggctgnaggatggagccgcccccagccgactccaagcccgcagagggcagacgccaccctggactgctctccctgcccagctgggcctctctggcctattcctaccttccanggcccactgcactcctgtctgggaggcccttatgagggcagcccagcccccgcacccacccccaaccagagaagcacagatcttggggagctgccccacaagccccgctggccaccgagggctgcagncgntgcgctgccggcttctccccaccaccctgccacctccactnnnnnnnnnnnnnnntccctcgtctgttcccccaggatctcgaagtgactccgggctgagcagtggggcggctgggggaggggtgacgattctcctcaggctttggccctgcaagcaaacccacatatctgctctgtatgtaataaatgtc

SEQ ID NO: 2365 - DNA, 539 bp, Homo sapiens
  misc_feature (70)..(87): n includes a, c, g, or t, or contains no nucleotide
  misc_feature (451)..(466): n includes a, c, g, or t, or contains no nucleotide
ctccttggaaagcaaagtagaacatcgaagtagtgatgttttctcaggaccattctgaagactagggcannnnnnnnnnnnnnnnnncaatgtgactcttcctgacaagcagatgcacaccagggcacatccccatggaagcatcaggaagcacatttgccccgtatcttccctctgccggtgctgcacatttttgatgagctgtacccatttctgtcagctgttgccatttcttcatcaggtataagaccaaacaacgcatggcccaccttggtgcggtcagatgcaatcataaagaaagagtaaagcaaatgctgacttcggagtttcttctgagctctgaggtagtaaatgcaaaattaattaataagtctctgcccagatttcatcctgaagtgagtttcatgtgccctcactaccatcttgaatgttccgagtcctactaaaatcnnnnnnnnnnnnnnnnaacctgtgggcaggacatggaagaagcagaacagtctgggctctctccctgccagggccctcattttgatgga

SEQ ID NO: 2366 - DNA, 541 bp, Homo sapiens
  misc_feature (133)..(170): n includes a, c, g, or t, or contains no nucleotide
  misc_feature (172)..(175): n includes a, c, g, or t, or contains no nucleotide
  misc_feature (177)..(179): n includes a, c, g, or t, or contains no nucleotide
  misc_feature (182)..(182): n includes a, c, g, or t, or contains no nucleotide
  misc_feature (186)..(186): n includes a, c, g, or t, or contains no nucleotide
  misc_feature (189)..(193): n includes a, c, g, or t, or contains no nucleotide
  misc_feature (225)..(225): n includes a, c, g, or t, or contains no nucleotide
  misc_feature (296)..(296): n includes a, c, g, or t, or contains no nucleotide
  misc_feature (350)..(368): n includes a, c, g, or t, or contains no nucleotide
cgactgggctaagtctggaaaattcacacagcaagacatcgacgaagccaaactttctgtcttctcaaccgtagatgctcctgtcgctccttcagacaaaggaatggaccacttcttgtacggcctctcggannnnnnnnnnnnnnnnnnnnnnnnnnnnnnnnnnnnnntnnnncnnnacnagcnccnnnnnccgtgagcgataggtacctcggcactgggaanagcacacacggcctggccatcctcggacccgagaacccgaaaattgccaaggacccatcctggatcatccnatgagcagccgtggcgctcgactgcacaggagcccgagacaatacacctccgannnnnnnnnnnnnnnnnnngaaatgctactgctttttccaagaatattatgtcattgagtgtcgccaaagcccttgactggcgagtcaaaaactcagatctatcttaagagtgaccaggaagaggttcattgaaataatcatgcatgaagcgccaaagatgcaccatgtagaattttcactttgtactggca

SEQ ID NO: 2367 - DNA, 454 bp, Homo sapiens
  misc_feature (31)..(47): n includes a, c, g, or t, or contains no nucleotide
  misc_feature (216)..(216): n includes a, c, g, or t, or contains no nucleotide
cactctccgtgtgaggctcgcaggggcgcannnnnnnnnnnnnnnnnaggaggccacagttcaggaggtggacgtgatccctgaggacggggcggccgacgtgagggtcatcatcagcaactcagcctacggcaaattccggaagctctttccaggatgaacggacgcccacagaggcctgcggggtgggggcatcgctgcctggggagctgaggngttaccgctgtgttgggggcagcttggtgtcaggtgcagcagggtcctccttgtctggttctgcacccgtctcgctcccagccatttgctgggatgaccgtgcaggccggtgacacggccgcacctgccccaaagcgggccgcccgagcgtccactccaagcctgagcatccacacaattccagtgggccctcggtgcctgctgtgaactgctttccctcggaatgtttccgtaacag

SEQ ID NO: 2368 - DNA, 211 bp, Homo sapiens
  misc_feature (26)..(26): n includes a, c, g, or t, or contains no nucleotide
  misc_feature (44)..(44): n includes a, c, g, or t, or contains no nucleotide
  misc_feature (59)..(59): n includes a, c, g, or t, or contains no nucleotide
  misc_feature (62)..(62): n includes a, c, g, or t, or contains no nucleotide
  misc_feature (105)..(105): n includes a, c, g, or t, or contains no nucleotide
  misc_feature (110)..(112): n includes a, c, g, or t, or contains no nucleotide
  misc_feature (118)..(118): n includes a, c, g, or t, or contains no nucleotide
  misc_feature (122)..(123): n includes a, c, g, or t, or contains no nucleotide
  misc_feature (149)..(149): n includes a, c, g, or t, or contains no nucleotide
tcctggaaatctggacccagtgggtntcccagaggcttgggtcnggccactcagaaggnctncggggcagggctttctccctagtgctgacctggctttggggtnggggnnnggagcntcannagggcctccagctgcctgagctttgnctgtgcacaccccacctcgtgctggagctccaagaactctccgtactggtcctcaaaaccag

SEQ ID NO: 2369 - DNA, 391 bp, Homo sapiens
  misc_feature (27)..(27): n includes a, c, g, or t, or contains no nucleotide
  misc_feature (32)..(32): n includes a, c, g, or t, or contains no nucleotide
  misc_feature (110)..(110): n includes a, c, g, or t, or contains no nucleotide
  misc_feature (127)..(127): n includes a, c, g, or t, or contains no nucleotide
  misc_feature (188)..(188): n includes a, c, g, or t, or contains no nucleotide
  misc_feature (192)..(192): n includes a, c, g, or t, or contains no nucleotide
  misc_feature (208)..(208): n includes a, c, g, or t, or contains no nucleotide
  misc_feature (213)..(213): n includes a, c, g, or t, or contains no nucleotide
  misc_feature (231)..(231): n includes a, c, g, or t, or contains no nucleotide
  misc_feature (238)..(238): n includes a, c, g, or t, or contains no nucleotide
  misc_feature (244)..(244): n includes a, c, g, or t, or contains no nucleotide
  misc_feature (269)..(269): n includes a, c, g, or t, or contains no nucleotide
gttagagtctgttctacatgggcctgncctcnctgtgatgggcagaggctcctggtacatcgagaagattcctgtggatcccgtcaggagggacttagtggctctgccgnccagtgagacttcccgnccggcagctgtgcgcaccaaagactcgggagaactggaaaggctgtctggggtcttctganctgncaggggaaggatgtanctttnccaaacaaatgatacaanccctganccaagnctaaaagacgcttgttaaaggctanttttctatatttattgttgggaaaagtcactttaaagacttgtgctatttggaagcaaagctattttttttgtcagtggaatgcagtttttttactattccatcatgaggaacaacatagat

SEQ ID NO: 2370 - DNA, 428 bp, Homo sapiens
  misc_feature (185)..(185): n includes a, c, g, or t, or contains no nucleotide
  misc_feature (344)..(344): n includes a, c, g, or t, or contains no nucleotide
  misc_feature (354)..(354): n includes a, c, g, or t, or contains no nucleotide
  misc_feature (360)..(360): n includes a, c, g, or t, or contains no nucleotide
tgtgccaagagcacgcggctgtgctgctccaccgggccttcctggtgggcatgtacggccagatggaccccagcgcgcagatctccgaggccctgaggatcctgcatatggaggccgtgatgtgagcctgtggcagccgacccccctccaagccccggcccgtcccgtccccggggatcctcgangcaaagcccaggaagcgtgggcgttgctggtctgtccgaggaggtgagggcgccgagccctgaggccaggcaggcccaggagcaatactccgagccctggggtggctccgggccggccgctggcatcaggggccgtccagcaagccctcattcaccttntgggccacangccctnccgcggagcggcggatccccccgggcatggcctgggctggttttgaatgaaacgacctgaactgtcaa

SEQ ID NO: 2371 - DNA, 512 bp, Homo sapiens
  misc_feature (97)..(97): n includes a, c, g, or t, or contains no nucleotide
  misc_feature (176)..(176): n includes a, c, g, or t, or contains no nucleotide
  misc_feature (229)..(239): n includes a, c, g, or t, or contains no nucleotide
  misc_feature (386)..(386): n includes a, c, g, or t, or contains no nucleotide
  misc_feature (411)..(485): n includes a, c, g, or t, or contains no nucleotide
tcccctttgctttcttgtgttccagccacctgccatttcctccctgcctcccaccctccctccctgccccctgtcctgcttcccaccccctgcctgnccagcctgggccctgcagtgtggagagacacataagccttactgtcctctgggggcaggagccgagcctttttgttgcnccgctcccaggagagtgagggtgacgcaattgattaaaaccattttgttctannnnnnnnnnntggcatttgtggggtgcagatgggtcttggaaccaaagtgagggcacctggtccctcacctctgtagctctatgacttagtaaccacacctctactggacagaatgaggcctgccttgaagggtcaccgtgagcagcggccacccancccagcagggctgagtgcagagccnnnnnnnnnnnnnnnnnnnnnnnnnnnnnnnnnnnnnnnnnnnnnnnnnnnnnnnnnnnnnnnnnnnnnnnnnnntggaatcttagtggtttttcaaaccat

SEQ ID NO: 2372 - DNA, 568 bp, Homo sapiens
  misc_feature (57)..(57): n includes a, c, g, or t, or contains no nucleotide
  misc_feature (130)..(131): n includes a, c, g, or t, or contains no nucleotide
  misc_feature (136)..(137): n includes a, c, g, or t, or contains no nucleotide
  misc_feature (139)..(139): n includes a, c, g, or t, or contains no nucleotide
  misc_feature (141)..(141): n includes a, c, g, or t, or contains no nucleotide
  misc_feature (144)..(144): n includes a, c, g, or t, or contains no nucleotide
  misc_feature (171)..(207): n includes a, c, g, or t, or contains no nucleotide
  misc_feature (209)..(209): n includes a, c, g, or t, or contains no nucleotide
  misc_feature (219)..(219): n includes a, c, g, or t, or contains no nucleotide
  misc_feature (222)..(222): n includes a, c, g, or t, or contains no nucleotide
  misc_feature (266)..(281): n includes a, c, g, or t, or contains no nucleotide
  misc_feature (346)..(360): n includes a, c, g, or t, or contains no nucleotide
agatgtcctcttaagaaaatgatgcatcaggaagcaacgtgatggaggacttggggnaaaaggatcacatactcagtctatggaagcaacgtccctggaagaagaggctgcctattgaaaaggcccggcnncgtannantngantgatgctggttagctattaaggtggcnnnnnnnnnnnnnnnnnnnnnnnnnnnnnnnnnnnnncntctgattgcnccnggggaaaacacgccttgtcctgaagaacaaatggctgtccagtnnnnnnnnnnnnnnnncaactgcacttccagtcacccaggccttgcagataaataatggagcatgcagtgagcacatctannnnnnnnnnnnnnnaccttttcccccgtcttttctgaaaaattgtaaatctgatcatatcaacatgtatgaacttaaaatatggagaatgttatggaagaaatagtttataagtttgttaagtacttataacatggtttatctttttgattattaattttttacgctaaccattgtttctgtagttaaaattgttttcttggtgttatcttttctcagaata

SEQ ID NO: 2373 - DNA, 259 bp, Homo sapiens
taccatttgcagagtcctgcacagttttctggctggagcctagaacaggcctcccaagttttaggacaaacagctcagttctagtctctctggggccacacagaaactctttttgggctcttttttctccctctggatcaaagtaggcaggaccatgggaccaggtcttggagctgagcctctcacctgtactcttccgaaaaatcctcttcctctgaggctggatcctagccttatcctctgatctccatggcttcct

SEQ ID NO: 2374 - DNA, 128 bp, Homo sapiens
  misc_feature (76)..(76): n includes a, c, g, or t, or contains no nucleotide
ctgtacaacgtgtccctggtcatgtccgacacagctggcacctgctactgaccctgctggcctgcccacaggctcngggcggctggccgctctgtgtgtgcatgcaaactaaccgtgtcaacggggtg

SEQ ID NO: 2375 - DNA, 553 bp, Homo sapiens
  misc_feature (37)..(37): n includes a, c, g, or t, or contains no nucleotide
  misc_feature (74)..(74): n includes a, c, g, or t, or contains no nucleotide
  misc_feature (86)..(86): n includes a, c, g, or t, or contains no nucleotide
  misc_feature (199)..(214): n includes a, c, g, or t, or contains no nucleotide
  misc_feature (490)..(490): n includes a, c, g, or t, or contains no nucleotide
acacggtctatgagcaataatgtgatttctggacatngcccatgtataatcctcactgatgatttcaagctaangcaaaccacctnatacagagatctagaatctctttatgttctccagaggaaggtggaagaaaccatgggcaggagtaggaattgagtgataaacaattgggctaatgaagaaaacttctcttatnnnnnnnnnnnnnnnnattataacttcaatgggacactttagaccattagacaattgacactggattaaacaaattcacataatgccaaatacacaatgtatttatagcaacgtataatttgcaaagatggactttaaaagatgctgtgtaactaaactgaaataattcaattacttattatttagaatgttaaagcttatgatagtcttttctaattcttaacactcatacttgaaatctttctgagtttccccagaagagaatatgggattttttttgacatttttgacncatttaataatgctcttgtgtttacctagtatatgtagactttgtcttatgtgtcaaaagtcc

SEQ ID NO: 2376 - DNA, 451 bp, Homo sapiens
  misc_feature (234)..(258): n includes a, c, g, or t, or contains no nucleotide
  misc_feature (292)..(300): n includes a, c, g, or t, or contains no nucleotide
  misc_feature (303)..(304): n includes a, c, g, or t, or contains no nucleotide
  misc_feature (307)..(307): n includes a, c, g, or t, or contains no nucleotide
  misc_feature (312)..(312): n includes a, c, g, or t, or contains no nucleotide
  misc_feature (422)..(422): n includes a, c, g, or t, or contains no nucleotide
tgactgtgtttgtacggtctttcgatggattttctagtgcccaaaagaatcaagaacaacttttgacattagcaagcattttaagggaagatggaaaagttttcgatgagaaggtttactacactgcaggctacaacagtcctgtcaaattgcttaatagaaataatgaagtgtggttgattcaaaaaaatgaacccaccaaagaaaacgaatgagaaaaatgaaaggaagttnnnnnnnnnnnnnnnnnnnnnnnnnttatcatagacatcaacatgacctataagtaaannnnnnnnntanngtnttctnttgagagtactactattaattaagcttatttccaatgtgcctttttaatgcttgaagttttatctacatacacaggtaacagaggacagtagtctgtaaacatataaatnggtcataactatcgtggtctttatttctg

SEQ ID NO: 2377 - DNA, 572 bp, Homo sapiens
  misc_feature (112)..(126): n includes a, c, g, or t, or contains no nucleotide
  misc_feature (237)..(237): n includes a, c, g, or t, or contains no nucleotide
  misc_feature (247)..(247): n includes a, c, g, or t, or contains no nucleotide
  misc_feature (250)..(258): n includes a, c, g, or t, or contains no nucleotide
  misc_feature (260)..(260): n includes a, c, g, or t, or contains no nucleotide
  misc_feature (262)..(312): n includes a, c, g, or t, or contains no nucleotide
gtgaagctccttccagacgatgaaaacacgccggaaaagcgagccgagaagatctggaagtactttggaaagaatgatgatgataaacttacagagaaagaattcattgagnnnnnnnnnnnnnnnaaggaaattctgcgactgatccagtttgagcctcaaaaagtgaaggaaaagatgaagaacgcctgatgccaactgttcagctgtcctccctccacctaccactcacatganacccgtgagngcnnnnnnnnnanannnnnnnnnnnnnnnnnnnnnnnnnnnnnnnnnnnnnnnnnnnnnnnnnnncccagggccaagagaaaggcctgcacacaagcccacagcacagctccctgccaaactgaagcatctgtagtgacccactggttccttcttcctgggtcttcagcattccctcccatcatgcccggtcccacccctccctctgtccaccagcccatggccctgtgctaatcccaggattaggccataggagtcctaagtgtcaccccgctgtaagctcctttgtggagtgctgggtaagcagtttccaataaacgcaagct

SEQ ID NO: 2378 - DNA, 378 bp, Homo sapiens
  misc_feature (117)..(118): n includes a, c, g, or t, or contains no nucleotide
  misc_feature (121)..(121): n includes a, c, g, or t, or contains no nucleotide
  misc_feature (123)..(124): n includes a, c, g, or t, or contains no nucleotide
  misc_feature (127)..(129): n includes a, c, g, or t, or contains no nucleotide
  misc_feature (131)..(134): n includes a, c, g, or t, or contains no nucleotide
  misc_feature (136)..(137): n includes a, c, g, or t, or contains no nucleotide
  misc_feature (139)..(141): n includes a, c, g, or t, or contains no nucleotide
  misc_feature (143)..(146): n includes a, c, g, or t, or contains no nucleotide
  misc_feature (148)..(215): n includes a, c, g, or t, or contains no nucleotide
  misc_feature (262)..(262): n includes a, c, g, or t, or contains no nucleotide
  misc_feature (264)..(264): n includes a, c, g, or t, or contains no nucleotide
  misc_feature (301)..(301): n includes a, c, g, or t, or contains no nucleotide
  misc_feature (325)..(325): n includes a, c, g, or t, or contains no nucleotide
gatacttccagatttagaaatgtgtcaaaggaaaaattggtgatactcttctttcccctgccagaaacagcccagatctcctcttaagcggaaaagagattgaccttctagcagagnnaangnnaannncnnnnanntnnntnnnntnnnnnnnnnnnnnnnnnnnnnnnnnnnnnnnnnnnnnnnnnnnnnnnnnnnnnnnnnnnnnnnnnnnngggtgtgcccatatgcacacatatattttcccgcataaccgtatccnantgctagcatttagaggaaggcatttagccacccaaangtccatccatctatgctgcttccnacagagaaaacattttctctttcctcctcttgaacttacataatatcctcctc

SEQ ID NO: 2379 - DNA, 470 bp, Homo sapiens
  misc_feature (46)..(46): n includes a, c, g, or t, or contains no nucleotide
  misc_feature (401)..(445): n includes a, c, g, or t, or contains no nucleotide
gcctggacggctgttctgtgacttgacagtggctcccccagccccnaaagccagcccccttcatctgtgacttaatctgttgtagtggtgagctgatacattcaggtgtgaccgttggtgaaaacttgtgccccttctgtggtatgcccttgccctgttctataaatatctataaatactcatatatatacacacctacacatggccaaccgcctcgcctctagcgctgggaatcagtcactgtgctatccttgtggagtcttgtggcccaactaccagagaacgctgtcccccgacatcccactccaaagtgtgccacctccagtgagcctccttgtcatgcccggcctgtggacagccagcccccgccatccctcccaccccctaccaagcatgggggnnnnnnnnnnnnnnnnnnnnnnnnnnnnnnnnnnnnnnnnnnnnnctgtccctcggctgagaataaaacc

SEQ ID NO: 2380 - DNA, 51 bp, Homo sapiens
aaagcgggaagactcatcggagcgtgtggatttgagccgccgcatttttta

SEQ ID NO: 2381 - DNA, 414 bp, Homo sapiens
  misc_feature (57)..(57): n includes a, c, g, or t, or contains no nucleotide
  misc_feature (60)..(60): n includes a, c, g, or t, or contains no nucleotide
  misc_feature (62)..(63): n includes a, c, g, or t, or contains no nucleotide
  misc_feature (66)..(67): n includes a, c, g, or t, or contains no nucleotide
  misc_feature (69)..(76): n includes a, c, g, or t, or contains no nucleotide
  misc_feature (78)..(164): n includes a, c, g, or t, or contains no nucleotide
  misc_feature (166)..(171): n includes a, c, g, or t, or contains no nucleotide
  misc_feature (175)..(179): n includes a, c, g, or t, or contains no nucleotide
  misc_feature (183)..(184): n includes a, c, g, or t, or contains no nucleotide
  misc_feature (346)..(361): n includes a, c, g, or t, or contains no nucleotide
gctggccctgagacatccagtcttccacactcaactgtgggatgggagggtggcgtngcntnnccnnannnnnnnngnnnnnnnnnnnnnnnnnnnnnnnnnnnnnnnnnnnnnnnnnnnnnnnnnnnnnnnnnnnnnnnnnnnnnnnnnnnnnnnnnnnnnnngnnnnnngggnnnnnaggnncaggtaagatctggaagacagacgtacagcttggagggcagggggactctaaggcaaggagatttacagttgggaaggaggcagtggcagaggggtgagggacaggggcccttaagtccagcgaggaaagctcggtgtgggcccgctctacgctccgtttgnnnnnnnnnnnnnnnnctcttctcccagctccctccagccatcagcagcctcttgtcaagcttctgcct

SEQ ID NO: 2382 - DNA, 558 bp, Homo sapiens
  misc_feature (159)..(159): n includes a, c, g, or t, or contains no nucleotide
  misc_feature (170)..(170): n includes a, c, g, or t, or contains no nucleotide
  misc_feature (174)..(191): n includes a, c, g, or t, or contains no nucleotide
  misc_feature (196)..(196): n includes a, c, g, or t, or contains no nucleotide
  misc_feature (474)..(504): n includes a, c, g, or t, or contains no nucleotide
tccgatatgggcaaaccaagaagatgatggacaaggtggagtttgtccatatgctcaatgctaccatgtgcgccactacccgtaccatctgcgccatcctggagaactaccagacagagaagggcatcactgtgcctgagaaattgaaggagttcatgnccgccaggacntgcnnnnnnnnnnnnnnnnnntgtgnaagcctgcgcccattgagcaggagccatcaaagaagcagaagaagcaacatgagggcagcaaaaagaaagcagcagcaagagacgtcaccctagaaaacaggctgcagaacatggaggtcaccgatgcttgaacattcctgcctccctatttgccaggctttcatttctgtctgctgagatctcagagcctgcccaacagcagggaagccaagcacccattcatccccctgcccccatctgactgcgtagctgagaggggaacagtgccatgtaccannnnnnnnnnnnnnnnnnnnnnnnnnnnnnnagggacccatcattgatgactgatgaaaccatgtaataaagcatctctggggag

SEQ ID NO: 2383 - DNA, 452 bp, Homo sapiens
  misc_feature (49)..(49): n includes a, c, g, or t, or contains no nucleotide
  misc_feature (67)..(67): n includes a, c, g, or t, or contains no nucleotide
  misc_feature (159)..(159): n includes a, c, g, or t, or contains no nucleotide
tcatgtccatacactttgttgcaagatgtgaattattgacactgaactnaataactgtgtactgttnggaaggggttcctcaaattttttgactttttttgtatgtgtgttttttctttttttttaagttcttatgaggaggggagggtaaataaaccnactgtgcgtcttggtgtaatttgaagattgccccatctagactagcaatctcttcattattctctgctatatataaaacggtgctgtgagggaggggaaaagcatttttcaatatattgaacttttgtactgaatttttttgtaataagcaatcaaggttataattttttttaaaatagaaattttgtaagaaggcaatattaacctaatcaccatgtaagcactctggatgatggattccacaaaacttggttttatggttacttcttctcttagattcttaattcatgagg

SEQ ID NO: 2384 - DNA, 402 bp, Homo sapiens
agtattcaggtttgccatggacatcagaagtttgaattccagtcttatcttatgttccatggctgaattttaaagctgtttaggtttaacaatgaagggatttattctttagtcaaaattgttgtttttactctagctcaggattcgtatttttaaagatttagttaatataaacacagcacagatttgtcagaagaaaaaaaatttgctgtaataccaaaactaacctcatcaaagatacagaaaaaaagaaatatagtgagccctaaaggacacatacattgaataaataattggaacatgtggttatctttagatccacatcttagctgtcatttgttcactctaaaactgatgttcatctttctgttaatttccctctgcctaaagactacatgacag

SEQ ID NO: 2385 - DNA, 401 bp, Homo sapiens
  misc_feature (87)..(106): n includes a, c, g, or t, or contains no nucleotide
  misc_feature (245)..(262): n includes a, c, g, or t, or contains no nucleotide
  misc_feature (267)..(281): n includes a, c, g, or t, or contains no nucleotide
  misc_feature (283)..(283): n includes a, c, g, or t, or contains no nucleotide
  misc_feature (289)..(299): n includes a, c, g, or t, or contains no nucleotide
accaccattggacctatcttggcttctcggctggggctgcgggtgctggatttaggcagcccccaactggccatgcactctatccgnnnnnnnnnnnnnnnnnnnngagtcctccagaccctcaccctcttcaagggcttctttgagctgttcccttctctaagccataatctcttagtggattgagccctcttggaaagacttctctgccatccctttgcacctgagaggggaagttctcagcnnnnnnnnnnnnnnnnnnttaannnnnnnnnnnnnnnanaaaaannnnnnnnnnnttatttggagactagaggagtgggagttgagcctggcttgaacctttggaaccagaaaagttggggagcaggtggaggaggccacactcctgggagctgatg

SEQ ID NO: 2386 - DNA, 130 bp, Homo sapiens
ctccgaaggcccagggaacatacctccccctcccccaaccaactgagaagctgctccctcccccagcaagcccagcgccaggtgctcttgccttttcccactgagagaaggctgctcttttgtactgccc

SEQ ID NO: 2387 - DNA, 302 bp, Homo sapiens
  misc_feature (260)..(275): n includes a, c, g, or t, or contains no nucleotide
ttgctgcaagaggaatgaggctctgtaaccttatctaagaacttggaagccgtcagccaagtcgccacatttctctgcaaaatgtcatagcttatataaatgtacagtattcaattgtaatgcatgccttcggttgtaagtagccagatccctctccagtgacattggaacatgctactttttaattggccctgtacagtttgcttatttataaattcattaaaaacactacaggtgttgaatggttaaaatgtaggccnnnnnnnnnnnnnnnnttattttctgagtgtgcagacagctat

SEQ ID NO: 2388 - DNA, 583 bp, Homo sapiens
  misc_feature (48)..(48): n includes a, c, g, or t, or contains no nucleotide
  misc_feature (118)..(118): n includes a, c, g, or t, or contains no nucleotide
  misc_feature (137)..(137): n includes a, c, g, or t, or contains no nucleotide
  misc_feature (140)..(140): n includes a, c, g, or t, or contains no nucleotide
  misc_feature (456)..(456): n includes a, c, g, or t, or contains no nucleotide
  misc_feature (475)..(496): n includes a, c, g, or t, or contains no nucleotide
  misc_feature (498)..(500): n includes a, c, g, or t, or contains no nucleotide
  misc_feature (502)..(511): n includes a, c, g, or t, or contains no nucleotide
  misc_feature (514)..(519): n includes a, c, g, or t, or contains no nucleotide
gctcgatttggtctgcgtcatcccccctttgtacaaggctaatctttnggggtaagcttgatttccaaggcatagactcttcagtgagtgaaagcaaagcaggaataggcttctgctnccctgaggtaacaggtttngtngcagtgattccacctcctgggtttactttagtatctaagctgctgggctcgcagtcatcccaagatgactcttccacatccaaggtagtgcactgggacttgacatcatcacaaggttctctaggccaaatctgtatgttgacagtttgattttcaggctcctcaggttcactccagtcaggccactcctcagactttttagaacttgatgggaagttttcactgtcctccgaagtattttttacatctgagagtccatttatgggaaatttaataggctgagaaaatggatcgccttctagagaaaggtcagtantttttagtaaaacttgggnnnnnnnnnnnnnnnnnnnnnntnnntnnnnnnnnnncannnnnntctggtccaagcagagagaccagcactgctaggctatgcagagtaattgccacaatggaatcgc

SEQ ID NO: 2389 - DNA, 276 bp, Homo sapiens
  misc_feature (186)..(201): n includes a, c, g, or t, or contains no nucleotide
ttcatgccatttgtcaaggaattatcggaagccctgaccaggcatggagtatctcacaaagtagacgattcctctgggtcaatcggaaggcgctatgccaggactgatgagattggcgtggcttttggtgtcaccattgactttgacacagtgaacaagaccccccacactgcaactctgagggannnnnnnnnnnnnnnncagataagagcagagatctctgagctgcccagcatagtccaagacctagccaatggcaacatcacatgggctgat

SEQ ID NO: 2390 - DNA, 235 bp, Homo sapiens
cttctgattgacaactatgtgccccctttggagggactgcctatcttcattcttcgactagccactgaggtgaattgggacgaagaaaaggaatgttttgaaagcctcagtaaagaatgcgctatgttctattccatccggaagcagtacatatctgaggagtcgaccctctcaggccagcagagtgaagtgcctggctccattccaaactcctggaagtggactgtggaacaca

SEQ ID NO: 2391 - DNA, 439 bp, Homo sapiens
acccccaaggaggtgaaagctgctaccacctctgtgcccccccggtaatgccaccaactggatcctacccgaatttatgattaagattgctgaagagctgccaaacactgctgccaccccctctgttcccttattgctgcttgtcactgcctgacattcacggcagaggcaaggctgctgcagcctcccctggctgtgcacattccctcctgctccccagagactgcctccgccatcccacagatgatggatcttcagtgggttctcttgggctctaggtcctggagaatgttgtgaggggtttatttttttttaatagtgttcataaagaaatacatagtattcttcttctcaagacgtggggggaaattatctcattatcgaggccctgctatgctgtgtgtctgggcgtgttgtatgtcctgctgccgatgccttc

SEQ ID NO: 2392 - DNA, 557 bp, Homo sapiens
  misc_feature (187)..(252): n includes a, c, g, or t, or contains no nucleotide
  misc_feature (272)..(286): n includes a, c, g, or t, or contains no nucleotide
  misc_feature (377)..(392): n includes a, c, g, or t, or contains no nucleotide
  misc_feature (423)..(437): n includes a, c, g, or t, or contains no nucleotide
  misc_feature (513)..(527): n includes a, c, g, or t, or contains no nucleotide
acctggcactgaggagaatggtagagaggagaggagagagagagagaatgtgatttttggccttgtggcagcacatcctcacacccaaagaagtttgtaaatgttccagaacaacctagagaacacctgagtactaagcagcagttttgcaaggatgggagactgggatagcttcccatcacagaannnnnnnnnnnnnnnnnnnnnnnnnnnnnnnnnnnnnnnnnnnnnnnnnnnnnnnnnnnnnnnnnnaataatcctctctgtgaacnnnnnnnnnnnnnnntatgaggctaagagaatatcaagtccccaggtctggaagaaaagtagaaaagagtagtactattgtccaatgtcatgaaagtggtaaaagnnnnnnnnnnnnnnnnttgaaaccaaattagaaacacattccttggnnnnnnnnnnnnnnntgggacttgatcatacattttatatggttgggacttctctcttcgggagatgatatcttgtttaaggagacctctnnnnnnnnnnnnnnnttcatcagatatttgagtgcccactctgtg

SEQ ID NO: 2393 - DNA, 431 bp, Homo sapiens
  misc_feature (42)..(42): n includes a, c, g, or t, or contains no nucleotide
  misc_feature (96)..(96): n includes a, c, g, or t, or contains no nucleotide
  misc_feature (99)..(102): n includes a, c, g, or t, or contains no nucleotide
  misc_feature (104)..(104): n includes a, c, g, or t, or contains no nucleotide
  misc_feature (106)..(106): n includes a, c, g, or t, or contains no nucleotide
  misc_feature (110)..(110): n includes a, c, g, or t, or contains no nucleotide
  misc_feature (112)..(117): n includes a, c, g, or t, or contains no nucleotide
  misc_feature (119)..(125): n includes a, c, g, or t, or contains no nucleotide
  misc_feature (127)..(127): n includes a, c, g, or t, or contains no nucleotide
  misc_feature (131)..(131): n includes a, c, g, or t, or contains no nucleotide
  misc_feature (134)..(170): n includes a, c, g, or t, or contains no nucleotide
  misc_feature (254)..(254): n includes a, c, g, or t, or contains no nucleotide
  misc_feature (364)..(365): n includes a, c, g, or t, or contains no nucleotide
  misc_feature (372)..(372): n includes a, c, g, or t, or contains no nucleotide
agctcagaagcagtaatgcagatgctgaagaaaagttggacnggagccatgacaagtcggacaggggccatgacaagtcggaccgcagccatgagnaannnnanangggncnnnnnnannnnnnncngggnccnnnnnnnnnnnnnnnnnnnnnnnnnnnnnnnnnnnnncaaggtagacagagagagagagcgagacagggaacgggatcgggaccgcgggtatgacaaggcagaccgggaagagggcaaagnaacggcgccaccatcgccgggaggagctggctccctatcccaagagcaagaaggcagtaagccgaaaggatgaagagttagaccccatggaccctagctcatactcagannccccccnggggcacgtggtcaacaggactccccaagcggaatgaggccaagactggcgctgacacc

SEQ ID NO: 2394 - DNA, 265 bp, Homo sapiens
  misc_feature (47)..(72): n includes a, c, g, or t, or contains no nucleotide
  misc_feature (88)..(88): n includes a, c, g, or t, or contains no nucleotide
ctacatgatcctcttgtggaatggagtaaaccagtgaaagggcattnnnnnnnnnnnnnnnnnnnnnnnnnngaagttgtcaatgaanaggccaagacccatgttcttgacattgagcagcgactacaaggtgtaatcaagactcgaaatagagtgacaggactgccgttatctattgaaggacatgtgcattaccttatacaagaagctactgatgaaaacttactatgccagatgtatcttggttggactccatatatgtgaa

SEQ ID NO: 2395 - DNA, 409 bp, Homo sapiens
gaatcatgagcctgctggaagcccagcccctactgctgtgaaccctggggcctgactgctcagaacttgctgctgtcttgttgcggatggatggaaggttggatggatgggtggatggccgtggatggccgtggatgcgcagtgccttgcatacccaaaccaggtgggagcgttttgttgagcatgacacctgcagcaggaatatatgtgtgcctatttgtgtggacaaaaatatttacacttagggtttggagctattcaagaggaaatgtcacagaagcagctaaaccaaggactgagcaccctctggattctgaatctcaagatgggggcagggctgtgcttgaaggccctgctgagtcatctgttagggccttggttcaataaagcactgagcaagttgagaaaa

SEQ ID NO: 2396 - DNA, 288 bp, Homo sapiens
  misc_feature (35)..(35): n includes a, c, g, or t, or contains no nucleotide
  misc_feature (195)..(242): n includes a, c, g, or t, or contains no nucleotide
tttattcagcgtagcctgtcaccttgctgcggagncaagtggtcatccctatcttacagtgggccattgcctctactaccctggaccaccgggatgccaattgtagtgtcatgaggtttctacgagacctcattcatacaggggtagccaatgatcatgaagaagactttgaattacggaaagaactgattggannnnnnnnnnnnnnnnnnnnnnnnnnnnnnnnnnnnnnnnnnnnnnnnacctgctgcttttgcctccccccctataccctaccagatgtggctg

SEQ ID NO: 2397 - DNA, 168 bp, Homo sapiens
aaagctagtgatcaacagtggcaatggagctgtggaggacagaaagccaagtggactcaacggagaggccagcaagtctcaggaaatggtgcatttggtgaacaaggagtcgtcagaaactccagaccagtttatgacagctgatgagacaaggaacctgcagaatgt

SEQ ID NO: 2398 - DNA, 489 bp, Homo sapiens
  misc_feature (76)..(76): n includes a, c, g, or t, or contains no nucleotide
  misc_feature (224)..(243): n includes a, c, g, or t, or contains no nucleotide
  misc_feature (297)..(333): n includes a, c, g, or t, or contains no nucleotide
cagccctgtccattggcctgtctgtcaccctgggccaccttgtcggaatctacttcactggctgctccatgaaccnagcccgctcttttggccctgcggtggtcatgaatcggttcagccccgctcactgggttttctgggtagggcccatcgtgggggcggtcctggctgccatcctttacttctacctgctcttccccaactccctgagcctgagtgagcgnnnnnnnnnnnnnnnnnnnncgtatgagcctgacgaggactgggaggagcagcgggaagagcggaagaagaccnnnnnnnnnnnnnnnnnnnnnnnnnnnnnnnnnnnnngccagcccctcagcccctgagccaagggggaaaagaagaaaaagtacctaacacaagcttcctttttgcacaaccggtcctcttggctgaggaggaggagctggtcaccctggctgcacagttagagaggggagaaggaacccatgatgggactcc

SEQ ID NO: 2399 - DNA, 396 bp, Homo sapiens
  misc_feature (32)..(32): n includes a, c, g, or t, or contains no nucleotide
  misc_feature (47)..(47): n includes a, c, g, or t, or contains no nucleotide
  misc_feature (59)..(59): n includes a, c, g, or t, or contains no nucleotide
  misc_feature (61)..(62): n includes a, c, g, or t, or contains no nucleotide
  misc_feature (83)..(83): n includes a, c, g, or t, or contains no nucleotide
  misc_feature (85)..(89): n includes a, c, g, or t, or contains no nucleotide
  misc_feature (91)..(164): n includes a, c, g, or t, or contains no nucleotide
  misc_feature (182)..(199): n includes a, c, g, or t, or contains no nucleotide
  misc_feature (218)..(218): n includes a, c, g, or t, or contains no nucleotide
  misc_feature (265)..(265): n includes a, c, g, or t, or contains no nucleotide
  misc_feature (277)..(277): n includes a, c, g, or t, or contains no nucleotide
  misc_feature (283)..(283): n includes a, c, g, or t, or contains no nucleotide
  misc_feature (288)..(288): n includes a, c, g, or t, or contains no nucleotide
  misc_feature (306)..(306): n includes a, c, g, or t, or contains no nucleotide
  misc_feature (309)..(310): n includes a, c, g, or t, or contains no nucleotide
  misc_feature (321)..(321): n includes a, c, g, or t, or contains no nucleotide
  misc_feature (325)..(328): n includes a, c, g, or t, or contains no nucleotide
  misc_feature (348)..(348): n includes a, c, g, or t, or contains no nucleotide
  misc_feature (361)..(361): n includes a, c, g, or t, or contains no nucleotide
  misc_feature (365)..(365): n includes a, c, g, or t, or contains no nucleotide
tcttcctggtgatggcagaggggcttcttttnagctagtttgatctnttgggagtctgncnntccttagccgtctgagtgagntnnnnnannnnnnnnnnnnnnnnnnnnnnnnnnnnnnnnnnnnnnnnnnnnnnnnnnnnnnnnnnnnnnnnnnnnnnnnnncgtgagatcctctccttnnnnnnnnnnnnnnnnnnactcaggtaaggcctcgcnaagcctctatgcaccccacaaagtttctgcctccatgccgtccacangcgcctcttccnagacangccanggcccatctgctgcccanggnnaagcgcaggcncctnnnnagggacgctatggacaccgntgagtccaaggcngctngctcctgccttgaagccacgcgctccacgcc

SEQ ID NO: 2400 - DNA, 529 bp, Homo sapiens
  misc_feature (217)..(222): n includes a, c, g, or t, or contains no nucleotide
  misc_feature (224)..(230): n includes a, c, g, or t, or contains no nucleotide
  misc_feature (232)..(232): n includes a, c, g, or t, or contains no nucleotide
  misc_feature (234)..(237): n includes a, c, g, or t, or contains no nucleotide
  misc_feature (255)..(255): n includes a, c, g, or t, or contains no nucleotide
  misc_feature (263)..(263): n includes a, c, g, or t, or contains no nucleotide
  misc_feature (267)..(267): n includes a, c, g, or t, or contains no nucleotide
  misc_feature (271)..(271): n includes a, c, g, or t, or contains no nucleotide
  misc_feature (283)..(283): n includes a, c, g, or t, or contains no nucleotide
  misc_feature (288)..(288): n includes a, c, g, or t, or contains no nucleotide
  misc_feature (290)..(290): n includes a, c, g, or t, or contains no nucleotide
cttgccaagtaatcctgcacagatcgatacctttccccaaatagcctctcctttgtagtcgtacattatgtgtttctcctcagaagtgatcaggtctttactgaatgttagaagaggcctttggaagaaaattatgtaaagtttaatctataacaaatgctttattatttataatgcttggaatgggagaggcaataaataaatgttttagtgctannnnnnannnnnnnanannnnttctttgagatagaaatnttcaaaancatnaagntagttcaaaaancgagntncagagcatataataaatttggatgtcaactgagaaaggagtgagaaggaagaaacaatgcgcaaaggaaagcagtctttcagaatctgtcagccaagtgtctttctagttactgctaatggagaagaaaacagggggtctgggagaaaatagagaacatgatagcaaaatctaaaaggaaaatcaaaactaataaaattgctgaagagttgatccctttgtcctatcgtggggctttgt

SEQ ID NO: 2401 - DNA, 471 bp, Homo sapiens
  misc_feature (97)..(111): n includes a, c, g, or t, or contains no nucleotide
  misc_feature (147)..(147): n includes a, c, g, or t, or contains no nucleotide
  misc_feature (239)..(239): n includes a, c, g, or t, or contains no nucleotide
  misc_feature (242)..(242): n includes a, c, g, or t, or contains no nucleotide
  misc_feature (269)..(269): n includes a, c, g, or t, or contains no nucleotide
  misc_feature (278)..(278): n includes a, c, g, or t, or contains no nucleotide
  misc_feature (352)..(383): n includes a, c, g, or t, or contains no nucleotide
ctaacttccattaggggccatggtctcactgccatcacttattagccatgagaatttggttgtagttttcaggtaggttggtttcttcctcatttgnnnnnnnnnnnnnnntgttcctttttatttattaacatcccaatcaatttncagctgccatcattacataaatatttttctgttataaaaagaagtgtgatctgtttttttagtgatttcctttgtttgggaatagagattgnaancacatactcagacctgttttgttaacntagaattcntttaaaagctgatgccaaacatctttacagaggaactgtagttcacatccacctgtctgacattgtcccctaannnnnnnnnnnnnnnnnnnnnnnnnnnnnnnntctgttcagtttgtcaaggaggataattatgcttgggagagatctgaaaagaaggtgaatattttgcacttttgatactcttaggaac

SEQ ID NO: 2402 - DNA, 426 bp, Homo sapiens
  misc_feature (164)..(181): n includes a, c, g, or t, or contains no nucleotide
ttgccctgggaactctggcaccttgggctgtggaaggctctggaaagtccttcaaagctggagtctgtcctcctaagaaatctgcccagtgccttagatacaagaaacctgagtgccagagtgactggcagtgtccagggaagaagagatgttgtcctgacacnnnnnnnnnnnnnnnnnnggatcctgttgacaccccaaacccaacaaggaggaagcctgggaagtgcccagtgacttatggccaatgtttgatgcttaacccccccaatttctgtgagatggatggccagtgcaagcgtgacttgaagtgttgcatgggcatgtgtgggaaatcctgcgtttcccctgtgaaagcttgattcctgccatatggaggaggctctggagtcctgctctgtgtggtccaggtcctttccaccctga

SEQ ID NO: 2403 - DNA, 621 bp, Homo sapiens
  misc_feature (544)..(561): n includes a, c, g, or t, or contains no nucleotide
gatgacttacctgttcagtactctacaattcctctgataatatattttcaaggatgtttttctttatttttgttaatattaaaaagtctgtatggcatgacaactactttaaggggaagataagatttctgtctactaagtgatgctgtgataccttaggcactaaagcagagctagtaatgctttttgagtttcatgttggttctttcacagatggggtaacgtgcactgtaagacgtatgtaacatgatgttaactttgtgtggtctaaagtgtttagctgtcaagccggatgcctaagtagaccaaatcttgttattgaagtgttctgagctgtatcttgatgtttagaaaagtattcgttacatcttgtaggatctactttttgaacttttcattccctgtagttgacaattctgcatgtactagtcctctagaaataggttaaactgaagcaacttgatggaaggatctctccacagggcttgttttccaaagaaaagtattgtttggaggagcaaagttaaaagcctacctaagcatnnnnnnnnnnnnnnnnnntactcgagcccagtcttgtggatggaaatgtagtgctcgagtcacattctgcttaaagtt

SEQ ID NO: 2404 - DNA, 52 bp, Homo sapiens
aaagctgcaggttactttgagacagtcgtcccaaatgcattagaggaactgt

SEQ ID NO: 2405 - DNA, 412 bp, Homo sapiens
  misc_feature (26)..(26): n includes a, c, g, or t, or contains no nucleotide
  misc_feature (112)..(112): n includes a, c, g, or t, or contains no nucleotide
  misc_feature (158)..(158): n includes a, c, g, or t, or contains no nucleotide
  misc_feature (166)..(166): n includes a, c, g, or t, or contains no nucleotide
  misc_feature (348)..(348): n includes a, c, g, or t, or contains no nucleotide
  misc_feature (382)..(382): n includes a, c, g, or t, or contains no nucleotide
cgcctgccagctctgcaaccagagantttgtgtgggagacaaattcttcctgaagaacaacatgatcttgtgtcagatggactatgaggaagggcagctcaatggcaccttngaatcccaagttcagtaacgcccggcgcctggcctccaggcccgtntgtccatntgcccgcctgcccacctgcctggccggccagccagccactctaccagtgcaggctggccagccgctctcctgccacattagaacttctccgtcctcgatgggagggatggcccttcctcctccaccaccgcccgtctgtgtgtgacccctcctggggccaggccgggcctgtacagtctgtnttctgtatataaatgggaacatttattttatganaaatgtaatgcgattttattactggcgtgg

SEQ ID NO: 2406 - DNA, 535 bp, Homo sapiens
cgtcagcaggccatactgtgttggggcaaaggtgtcccgtgtagcactcagataagtatacagcgacaatcctgttttctacaagaatcctgtctagtaaataggatcatttattgggcagttgggaaatcagctctctgtcctgttgagtgttttcagcagctgctcctaaaccagtcctcctgccagaaaggaccagtgccgtcacatcgctgtctctgattgtccccggcaccagcaggccttggggctcactgaaggctcgaaggcactgcacaccttgtatattgtcagtgaagaacgttagttggttgtcagtgaacaataactttattatatgagtttttgtagcatcttaagaattatacatatgtttgaaatattgaaactaagctacagtaccagtaattagatgtagaatcttgtttgtaggctgaattttaatctgtatttattgtcttttgtatctcagaaattagaaacttgctacagacttacccgtaatatttgtcaagatcatagctgactttaaaaa

SEQ ID NO: 2407 - DNA, 485 bp, Homo sapiens
tctcacagaaggagaacttgaagagtataagaggacaatcgaacgtaaacaacaaggcctagaagaaaaccatgagctgttttccaagagcttcatctccatggaagtgcctgtcatggtagtaaatggcaaggatgatatgcatgatgttgaagatgagcttgctaagcgagtgagtaggttaagcacaagtacaaccatagaaaacatcgagattactattaagtctccagagaaaatcgaagaagtcctgtcacctgaaggctccccttcaaaatcgccatccaagaaaaagaagaaattccgcactccttcttttctgaaaaagaacaaaaaaaaggagaaagttgaggcctaaataaagtctttttataattattattataacaatgtgacattgcacatctaaataccacatttaagttgatcattaatatgcaatggtagatcagattgggggatgtagcaaactggactttaagaac

SEQ ID NO: 2408 - DNA, 515 bp, Homo sapiens
  misc_feature (41)..(41): n includes a, c, g, or t, or contains no nucleotide
  misc_feature (66)..(66): n includes a, c, g, or t, or contains no nucleotide
ctcagggccttgttcatggaagggagatgagtcaggttganagctcatcgtgtagggttctgtgcngggcccttacaggactggaccgcagccaagatgcctgcctgttaaccatgcccagcccccgtcatttccgcgtgaagccgcaggcctcggagccttggtctgaaatgcctgtggagtaacctcggtccataaacatgggtgcacagtctgttctccccaagtacagggcaggaggaaacaccgccctctgtagctgctcgaatggaaagggctcttttctctgaggtctttatacattagaaagctcttctgggaagaatgtttgaatccatagtgtctttctgtattcacttttaattgctttctaaattagctgagaaattctgacttgaaatattgtcaggtaagcatttcttcagttttcatgtgtgtatgtaacagtagctttgcatggaaattgtaatcagagtcaaatacagtattgaatggaatgtactgccttctcctcc

SEQ ID NO: 2409 - DNA, 65 bp, Homo sapiens
ggaaagcatgtctgctgggtgtgaccatgtttcctctcaataaagttcccctgtgacactcaaaa

SEQ ID NO: 2410 - DNA, 614 bp, Homo sapiens
  misc_feature (65)..(101): n includes a, c, g, or t, or contains no nucleotide
  misc_feature (188)..(188): n includes a, c, g, or t, or contains no nucleotide
  misc_feature (515)..(515): n includes a, c, g, or t, or contains no nucleotide
  misc_feature (540)..(540): n includes a, c, g, or t, or contains no nucleotide
agcaagacccactctgttccagaagccctataagtcagagttggacaactcaatgtaaatttcannnnnnnnnnnnnnnnnnnnnnnnnnnnnnnnnnnnnaactcaccaaaatgttcaacaccataacaacagctgctcaaactgtaaacaaggaaaacaagttgatgacttcacactgtggacagnttttcccaagatgtcagaataagactccccatcatgatgaggctctcacccctcttagctgtccttgcttgtgcctgcctctttcacttggcaggataatgcagtcattagaatttcacatgtagtataggagcttctgagggtaacaacagagtgtcagatatgtcatctcaacctcagacttttacataacatctcaggaggaaatgtggctctctccatcttgcatacagggctcccaatagaaatgaacacagagatattgcctgtgtgtttgcagagaagatggtttctataaagagtaggaaagctgaaattatagtagantcccctttaaatgcacattgtgtgnatggctctcaccatttcctaagagatacattgtaaaacgtgacagtaagactgattctagcagaataaaacatg

SEQ ID NO: 2411 - DNA, 187 bp, Homo sapiens
gctgctgaccgatggccactacatgacgctgcccgtgtctccggaccagctgccctgtgacgaccccatggcgggcagcggaggcgcccccgtgctgcgggtgggccatgaccacggctgccaccagcagccacgtatctgcaacgcgcccctccctggccctggaccctatcgtacagaacctgct

SEQ ID NO: 2412 - DNA, 576 bp, Homo sapiens
  misc_feature (124)..(126): n includes a, c, g, or t, or contains no nucleotide
  misc_feature (128)..(128): n includes a, c, g, or t, or contains no nucleotide
  misc_feature (130)..(130): n includes a, c, g, or t, or contains no nucleotide
  misc_feature (132)..(147): n includes a, c, g, or t, or contains no nucleotide
  misc_feature (159)..(159): n includes a, c, g, or t, or contains no nucleotide
  misc_feature (176)..(176): n includes a, c, g, or t, or contains no nucleotide
  misc_feature (525)..(525): n includes a, c, g, or t, or contains no nucleotide
gggaaccggagatccttcctcaagcccctgctaatgctcatctgaaggacttggatgaagaaatctttgatgatgatgacttttaccaccagctccttcgagaactcatagaacggaagaccannncntngnnnnnnnnnnnnnnnnggccatgggaanggcagtggcttgcaatnccagaagttacgaagcaaaatccacaaaaaagtagataggaaagccagcaaaggcaggaaacttcggtttcatgtccttagcaagctactgagtttcatggcacctattgaccatactacaatgaatgatgatgccaggacagaactgtaccgctctctttttggccagctccaccctcccgacgaaggccacggggattgacatcgcccacctccgacacccagtgggcgccttggctggtgcggctgctggtccagatggaggaaaccagtgactttatggggctgagctagtagggaagcccctggaaagatgctgcgttccgaacctgtgcctaatacacgcaanggcgctgtcccgcccaaccccgcctttaaacgccacaaataaagagcattg

SEQ ID NO: 2413 - DNA, 562 bp, Homo sapiens
  misc_feature (26)..(26): n includes a, c, g, or t, or contains no nucleotide
  misc_feature (52)..(74): n includes a, c, g, or t, or contains no nucleotide
  misc_feature (94)..(94): n includes a, c, g, or t, or contains no nucleotide
  misc_feature (106)..(106): n includes a, c, g, or t, or contains no nucleotide
  misc_feature (129)..(129): n includes a, c, g, or t, or contains no nucleotide
  misc_feature (453)..(485): n includes a, c, g, or t, or contains no nucleotide
aggcgctgctcactgttttcctgctncagtttttctcttatagtaccatcannnnnnnnnnnnnnnnnnnnnnntccacccagagatggctttnccaacacatttnaattaaaggaactgagtacattnccctgatgtctaaatggaccaaagatctgagatccattgtgattatatctgtatcaggtcagcagaagaaggaactgagcagttgaactctgagttcatcaattgtaatatttggaaattatctacaatggaatcttccctctgttctctgataacctacttgcttactcaatgcctttaagccaagtcaccctgttgcctatgggaggaggtggaaggatttggcaagctcaaccacatgctatttagttagcatcagttgtcaccaacagtctttctgcaaagggcaggagagctttgggggaaaggaaaaggcttaccagnnnnnnnnnnnnnnnnnnnnnnnnnnnnnnnnngcaatctaaaagcgccaaaattcgctatgtttacagtgatactattaagaaaatgaatgtgattctgctctgtcttt

SEQ ID NO: 2414 - DNA, 167 bp, Homo sapiens
atgacaagtattttctactaaaccagaaattggtagaaggatttaaataagtaaaagctactatgtactgccttagtgctgatgcctgtgtactgccttaaatgtacctatggcaatttagctctcttgggttcccaaatccctctcacaagaatgtgcagaagaaa

SEQ ID NO: 2415 - DNA, 490 bp, Homo sapiens
  misc_feature (139)..(139): n includes a, c, g, or t, or contains no nucleotide
  misc_feature (267)..(267): n includes a, c, g, or t, or contains no nucleotide
  misc_feature (270)..(285): n includes a, c, g, or t, or contains no nucleotide
  misc_feature (421)..(421): n includes a, c, g, or t, or contains no nucleotide
cctgcatcaccaccttggttttgttttattttgcttcttggtcaagaaaggaggggagaacccagcgcacccctccccccctttttttaaacgcgtgatgaagacagaaggctccggggtgacgaatttggccgatggnagatgttttgggggaacgccgggactgagagactccacgcaggcgaattcccgtttggggcttttttttcctccctcttttccccttgccccctctgcagccggaggaggagatgttgaggggagganggnnnnnnnnnnnnnnnngcgctaggaaatgacccgagaaccccgttggaagcgcagcagcgggagctaggggcgggggcggaggaggacacgaactggaagggggttcacggtcaaactgaaatggatttgcacgttggggagctggcggcgncggctgctgggcctccgccttcttttctacgtgaaatcagtgaggtgagacttcccagaccccggaggc

SEQ ID NO: 2416 - DNA, 512 bp, Homo sapiens
  misc_feature (174)..(174): n includes a, c, g, or t, or contains no nucleotide
ttcttggatcctcagaactctttgctcttgtcggggtgggggtgggaactcacgtggggagcggtggctgagaaaatgtaaggattctggaatacatattccatgggactttccttccctctcctgcttcctcttttcctgctccctaacctttcgccgaatggggcagcaccnactgacgtttctgggcggccagtgcggctgccaggttcctgtactactgccttgtacttttcattttggctcaccgtggattttctcataggaagtttggtcagagtgaattgaatattgtaagtcagccactgggacccgaggatttctgggaccccgcagttgggaggaggaagtagtccagccttccaggtggcgtgagaggcaatgactcgttacctgccgcccatcaccttggaggccttccctggccttgagtagaaaagtcggggatcggggcaagagaggctgagtacggatgggaaactattgtgcacaagtctttccagaggagtttc

SEQ ID NO: 2417 - DNA, 536 bp, Homo sapiens
  misc_feature (29)..(46): n includes a, c, g, or t, or contains no nucleotide
  misc_feature (148)..(184): n includes a, c, g, or t, or contains no nucleotide
ttattgttgaatccttagatgcctcattnnnnnnnnnnnnnnnnnnccagttttatatccagaatttcacagctcttcctctgaacactgtagtgccaccccagagacaggcaacttttgagtactctttcattcctgcagagcccannnnnnnnnnnnnnnnnnnnnnnnnnnnnnnnnnnnnctacaaagatttgaacggcaatgtattccaagatgcagtcttcaatcaaacagttacagttattgaaagagaggatgggttagatggagaaacaatctttatgtatatgttccttgctggtcttgggcttctggttattgttggccttcatcaactcctagaatctagaaagcgtaagagacccatacagaaagtagaaatgggtacatcaagtcagaatgatgttgacatgagttggattcctcaggaaacattgaatcaaatcaataaagcttcaccaagaaggttgcccaggaaacgggcacagaagagatcagtgggatctgatgagtaaatgttcctttgtgcaaca

SEQ ID NO: 2418 - DNA, 459 bp, Homo sapiens
  misc_feature (37)..(38): n includes a, c, g, or t, or contains no nucleotide
  misc_feature (41)..(56): n includes a, c, g, or t, or contains no nucleotide
  misc_feature (195)..(254): n includes a, c, g, or t, or contains no nucleotide
  misc_feature (264)..(284): n includes a, c, g, or t, or contains no nucleotide
tcattgctgatggaggaatccaaaatgtgggtcatannttnnnnnnnnnnnnnnnnttggggcctccacagtcatgatgggctctctcctggctgccaccactgaggcccctggtgaatacttcttttccgatgggatccggctaaagaaatatcgcggtatgggttctctcgatgccatggacaagcacctcannnnnnnnnnnnnnnnnnnnnnnnnnnnnnnnnnnnnnnnnnnnnnnnnnnnnnnnnnnngtctggtgcnnnnnnnnnnnnnnnnnnnnnatccacaaatttgtcccttacctgattgctggcatccaacactcatgccaggacattggtgccaagagcttgacccaagtccgagccatgatgtactctggggagcttaagtttgagaagagaacgtcctcagcccaggtggaaggtggcgtccatagcctccattcgtatgaga

SEQ ID NO: 2419 - DNA, 381 bp, Homo sapiens
  misc_feature (318)..(337): n includes a, c, g, or t, or contains no nucleotide
tcttcaaaactagactgatgtggaaaaaacacctttctcttctagttttgagagacttcctcttggctcccacaaggagggatttcctggctttgacacacatagccactttagcatgaaagccttaaggaggggaaaacaaatttatttttatgtcctcttttctctttccaccttcagcatacacttaactcccttaaaccgagatacctgttgggacctgaccctcaataattgattatcagcgtgtcaggcaatctggactttccagtgaaaccactgagatggtgcccctcaaaagagcagcggttctctttnnnnnnnnnnnnnnnnnnnncaaattctcccattttcatttcacttcctgaaagtcatgcttgg

SEQ ID NO: 2420 - DNA, 545 bp, Homo sapiens
aagggtccgagcacaagccaagaagtttgcgccctcataagcagcgaccttgtggcatcgtcagaaggaagggattggtttggcaagaacttgtttacaacatttttgcaaatctaaagttgctccatacaatgactagtcacctgggggggttgggcgggcgccatcttccattgccgccgcgggtgtgcggtctcgattcgctgaattgcccgtttccatacagggtctcttccttcggtcttttgtatttttgattgttatgtaaaactcgcttttattttaatattgatgtcagtatttcaactgctgtaaaattataaacttttatacttgggtaagtcccccaggggcgagttcctcgctctgggatgcaggcatgcttctcaccgtgcagagctgcacttggcctcagctggctgtatggaaatgcaccctccctcctgccgctcctctctagaaccttctagaacctgggctgtgctgcttttgagcctcagaccccagggcagcatctcggttctgcgccacttcctttgtgttta

SEQ ID NO: 2421 - DNA, 197 bp, Homo sapiens
  misc_feature (57)..(57): n includes a, c, g, or t, or contains no nucleotide
  misc_feature (76)..(76): n includes a, c, g, or t, or contains no nucleotide
  misc_feature (152)..(152): n includes a, c, g, or t, or contains no nucleotide
cctgtaacatctgctgaacgggcccacccacacgttgtatattcagagagagagagngagtcaaggtgtgaccgtngaccacagccagtgtcaggcctctgcctctgggcctttgctttgtggcctcactgcaacacaaagctccaccaggnggctggttcacgtcccctaccacggaagcgaggtcccagaaggcc

SEQ ID NO: 2422 - DNA, 458 bp, Homo sapiens
  misc_feature (41)..(69): n includes a, c, g, or t, or contains no nucleotide
  misc_feature (87)..(109): n includes a, c, g, or t, or contains no nucleotide
  misc_feature (112)..(112): n includes a, c, g, or t, or contains no nucleotide
  misc_feature (203)..(203): n includes a, c, g, or t, or contains no nucleotide
  misc_feature (364)..(409): n includes a, c, g, or t, or contains no nucleotide
gctttgctgttaatcaccatcactgccaccaacttctcagnnnnnnnnnnnnnnnnnnnnnnnnnnnnngctgctgtgcccaagagnnnnnnnnnnnnnnnnnnnnnnnccnagtgggaacacagttccagctcggggtggccttcctatcacccagctcttcagaatcctcaatcctaacaaggcccccctgcggctaaagntgcgcctcacctacgaccactttcaccagtcggtgcaggagatctttgaggtgaacaacttgcctgtggaatcgtggcagtaactgtctccactcacagcctgaaattctcctgtgtcccaaaccccagggggccccagcagcttcgaacctacacctgannnnnnnnnnnnnnnnnnnnnnnnnnnnnnnnnnnnnnnnnnnnnngaccagcccccttctcccacaaataaagcccaataaagcctgagaagtg

SEQ ID NO: 2423 - DNA, 385 bp, Homo sapiens
  misc_feature (42)..(42): n includes a, c, g, or t, or contains no nucleotide
  misc_feature (72)..(72): n includes a, c, g, or t, or contains no nucleotide
  misc_feature (75)..(75): n includes a, c, g, or t, or contains no nucleotide
  misc_feature (79)..(81): n includes a, c, g, or t, or contains no nucleotide
  misc_feature (83)..(83): n includes a, c, g, or t, or contains no nucleotide
  misc_feature (85)..(85): n includes a, c, g, or t, or contains no nucleotide
  misc_feature (87)..(126): n includes a, c, g, or t, or contains no nucleotide
  misc_feature (143)..(147): n includes a, c, g, or t, or contains no nucleotide
  misc_feature (151)..(181): n includes a, c, g, or t, or contains no nucleotide
  misc_feature (198)..(198): n includes a, c, g, or t, or contains no nucleotide
  misc_feature (217)..(217): n includes a, c, g, or t, or contains no nucleotide
  misc_feature (229)..(229): n includes a, c, g, or t, or contains no nucleotide
  misc_feature (231)..(250): n includes a, c, g, or t, or contains no nucleotide
  misc_feature (253)..(253): n includes a, c, g, or t, or contains no nucleotide
  misc_feature (266)..(266): n includes a, c, g, or t, or contains no nucleotide
  misc_feature (268)..(268): n includes a, c, g, or t, or contains no nucleotide
  misc_feature (273)..(274): n includes a, c, g, or t, or contains no nucleotide
  misc_feature (287)..(288): n includes a, c, g, or t, or contains no nucleotide
  misc_feature (309)..(309): n includes a, c, g, or t, or contains no nucleotide
  misc_feature (313)..(313): n includes a, c, g, or t, or contains no nucleotide
  misc_feature (330)..(331): n includes a, c, g, or t, or contains no nucleotide
  misc_feature (350)..(350): n includes a, c, g, or t, or contains no nucleotide
gtgtcaaccacaacaagtacatggtgactgaacgcgccaccntacatcggaacctccaactggtctggcaantanttcnnngnanannnnnnnnnnnnnnnnnnnnnnnnnnnnnnnnnnnnnnnngggaggggcggcctgcnnnnnggannnnnnnnnnnnnnnnnnnnnnnnnnnnnnnctgggactccccttacnagccatgaccttgacaccntcagctgacagngnnnnnnnnnnnnnnnnnnnnctngctctgaggcccngnatccnnagtgggcaggccnnaaggcctgctgggcccccgcnggancccaggtgctctgggtnncacggtccctgtccccgcncccccgcttctgtctgccccattgtggctcctcag

SEQ ID NO: 2424 - DNA, 468 bp, Homo sapiens
  misc_feature (42)..(42): n includes a, c, g, or t, or contains no nucleotide
  misc_feature (262)..(339): n includes a, c, g, or t, or contains no nucleotide
agcttgactcactcgcacaccatgtgtccctccgcgcgcagnacgggggacttttcggtggggattttgggcgccgaccagacgcggcattttcggaaaatagcgccctgtgcagctgaagcgctttgtgtgtagcggggccgcgtcagcccggccgggtacgaggcgcctcgggtccccgcaccacctcctgctgccttcccgtcgccgctcccgaagcttttccaggtcagtgcgggtctgtgtagggccctgttaccannnnnnnnnnnnnnnnnnnnnnnnnnnnnnnnnnnnnnnnnnnnnnnnnnnnnnnnnnnnnnnnnnnnnnnnnnnnnnctgtttattgcattaaggcgccgggtttccggggctcctggccccgcttattccgcgggggtcggcggggtcggcctgggcgcccgcgccgccgctgcgctttgtccgctgggcacactgcttctggga

SEQ ID NO: 2425 - DNA, 492 bp, Homo sapiens
  misc_feature (59)..(75): n includes a, c, g, or t, or contains no nucleotide
  misc_feature (245)..(245): n includes a, c, g, or t, or contains no nucleotide
  misc_feature (247)..(247): n includes a, c, g, or t, or contains no nucleotide
  misc_feature (259)..(259): n includes a, c, g, or t, or contains no nucleotide
  misc_feature (261)..(263): n includes a, c, g, or t, or contains no nucleotide
  misc_feature (265)..(265): n includes a, c, g, or t, or contains no nucleotide
  misc_feature (267)..(271): n includes a, c, g, or t, or contains no nucleotide
  misc_feature (273)..(275): n includes a, c, g, or t, or contains no nucleotide
  misc_feature (277)..(285): n includes a, c, g, or t, or contains no nucleotide
  misc_feature (343)..(343): n includes a, c, g, or t, or contains no nucleotide
  misc_feature (347)..(347): n includes a, c, g, or t, or contains no nucleotide
  misc_feature (368)..(368): n includes a, c, g, or t, or contains no nucleotide
  misc_feature (449)..(450): n includes a, c, g, or t, or contains no nucleotide
  misc_feature (458)..(458): n includes a, c, g, or t, or contains no nucleotide
  misc_feature (463)..(463): n includes a, c, g, or t, or contains no nucleotide
gaggcactacttctgatttattgcaatgttcagtcctagtttttacttttattcttaannnnnnnnnnnnnnnnntcaattttatgtaccttagttctgagttagacctgcagatgtgtacagatagttcatatttatgtattgcacataatcatgctattcagcattgatgctatattgtattatgtaaataataaaagccatgtacagagggaaaaaaaaaaaaaaaaaaaaaaaaaaaaaananagttggagtccnannngngnnnnntnnnannnnnnnnntttacatggctatataattttttttcctttgccatcgctgaacttgttcaagtgatantcangagatattagaagcatttgcnaggtatgatacctgataggcagtttatttttgaagaattcaataggcacctttgggattaaaacaattttaaaatttgagnnagatgaantttgnacaattatggcctacctcgcttctccatg

SEQ ID NO: 2426 - DNA, 451 bp, Homo sapiens
  misc_feature (28)..(29): n includes a, c, g, or t, or contains no nucleotide
  misc_feature (31)..(47): n includes a, c, g, or t, or contains no nucleotide
  misc_feature (49)..(49): n includes a, c, g, or t, or contains no nucleotide
  misc_feature (53)..(53): n includes a, c, g, or t, or contains no nucleotide
  misc_feature (56)..(56): n includes a, c, g, or t, or contains no nucleotide
  misc_feature (62)..(62): n includes a, c, g, or t, or contains no nucleotide
  misc_feature (66)..(66): n includes a, c, g, or t, or contains no nucleotide
  misc_feature (68)..(68): n includes a, c, g, or t, or contains no nucleotide
  misc_feature (151)..(152): n includes a, c, g, or t, or contains no nucleotide
  misc_feature (154)..(184): n includes a, c, g, or t, or contains no nucleotide
  misc_feature (229)..(229): n includes a, c, g, or t, or contains no nucleotide
  misc_feature (335)..(335): n includes a, c, g, or t, or contains no nucleotide
  misc_feature (348)..(349): n includes a, c, g, or t, or contains no nucleotide
  misc_feature (353)..(354): n includes a, c, g, or t, or contains no nucleotide
tggagacacacttcccagatcaccgcanngnnnnnnnnnnnnnnnnngntctnggncgttcnggcntncctgccgggtggcttcttcaatcccgtctccttcccaagctcccggctttttctaatcaggcaggcgtctgtcaaccctctcnncnnnnnnnnnnnnnnnnnnnnnnnnnnnnnnntgcgccaacctgtgtggggtcttcttcgggcctccctctccgccncgctcctgctcctacctgcagcacccccagctccgactccagactctctgcatcaggtctccccactccacgctccgggcgccccaactccaacaccacgtcctgncgcgcaggttctnncccnngcggaggagcgcgcagggtgggcggcttaccatagcaagtgatcctgcgatagggaacgcgcccttgccccgaggctgcactaccacaggaaataac

SEQ ID NO: 2427 - DNA, 451 bp, Homo sapiens
  misc_feature (48)..(48): n includes a, c, g, or t, or contains no nucleotide
  misc_feature (85)..(85): n includes a, c, g, or t, or contains no nucleotide
  misc_feature (261)..(261): n includes a, c, g, or t, or contains no nucleotide
ggtccctttgtgtgtgaggacagcatctctcggacgccacgttggcgnctgtgtggcattgtgagttggggcactggctgtgccntggcccagaagccaggcgtctacaccaaagtcagtgacttccgggagtggatcttccaggccataaagactcactccgaagccagcggcatggtgacccagctctgaccggtggcttctcgctgcgcagcctccagggcccgaggtgatcccggtggtgggatccacgctgggccnaggatgggacgtttttcttcttgggcccggtccacaggtccaaggacaccctccctccagggtcctctcttccacagtggcgggcccactcagccccgagaccacccaacctcaccctcctgacccccatgtaaatattgttctgctgtctgggactcctgtctaggtgcccctgatgatgggatgctct

SEQ ID NO: 2428 - DNA, 541 bp, Homo sapiens
tgctgataccttcaatttgttacttttcaagatttttaaaaataactagtgtagcttatcttaaacattttataaaaccttcagatgtctttaagcagattggaagtatgcaagtgcttccttagcagggacagtggataatccttaatggtttatcatagatttcaccctccccccttctcagaagagtgagtatgctcttaaatgtcaaacacatttttgttgttttgttttttaaatgatcagtgtctatttgatgtgatgcagatcttataaatttgggaattataatattgacatttctgtgatttttatatatgtaatgtcttaattgagatttgtgttaaggcagaaataattaggctagggctcttagttttcattcctattgccccaagtattgtcaaactatggtattattttaatgttactttaaaaatccataatctgctagttttgcatgtacttatatgaaaacagtgcagtaagttgaaaactcagtatctatggaattgataaatgttgatctggtgtagtatat

SEQ ID NO: 2429 - DNA, 110 bp, Homo sapiens
tgaatttccactgctttggagagtcccacccactaagcactgtgcatgtaaacaggttcctttgctcagatgaaggaagtagggggtggggctttccttgtgtgatgcct

SEQ ID NO: 2430 - DNA, 194 bp, Homo sapiens
ttgccaactagtaatgcatactggaaatcaaaagatactgaaagaatggtgaacttctcttagtggtattgtcatgctaaaagatgttaatatacatcataaaagcaaagtcagccagctgatattttggttctcaaaaactgcattattaataatattttagtatacagagctattctacagtttttacattg

SEQ ID NO: 2431 - DNA, 568 bp, Homo sapiens
  misc_feature (185)..(186): n includes a, c, g, or t, or contains no nucleotide
  misc_feature (195)..(195): n includes a, c, g, or t, or contains no nucleotide
  misc_feature (205)..(207): n includes a, c, g, or t, or contains no nucleotide
  misc_feature (220)..(221): n includes a, c, g, or t, or contains no nucleotide
  misc_feature (230)..(232): n includes a, c, g, or t, or contains no nucleotide
  misc_feature (292)..(292): n includes a, c, g, or t, or contains no nucleotide
  misc_feature (432)..(432): n includes a, c, g, or t, or contains no nucleotide
  misc_feature (480)..(495): n includes a, c, g, or t, or contains no nucleotide
ccttctttagaatatgatttggctagaaagattcttaaatatgtggaatatgattattcttagctggaatattttctctacttcctgtctgcatgcccaaggcttctgaagcagccaatgtcgatgcaacaacatttgtaactttaggtaaactgggattatgttgtagtttaacattttgtaannctgtgtgcnttatagtttnnncaagtgagacccnngatatgtcnnnttatgcatacttatattatcttaagcatgtgtaatgctggatgtgtacagtacagtactnaacttgtaatttgaatctagtatggtgttctgttttcagctgacttggacaacctgactggctttgcacaggtgttccctgagttgtttgcaggtttctgtgtgtggggtggggtatggggaggagaaccttcatggtgncccacctggcctggttgtccaagctgtgcctcgacacatcctcatccnnnnnnnnnnnnnnnncaagatgaataataattcacaaaatttctgtgaaatcaaatccagttttaagaggagccacttatcaaagaga

SEQ ID NO: 2432 - DNA, 439 bp, Homo sapiens
  misc_feature (57)..(57): n includes a, c, g, or t, or contains no nucleotide
  misc_feature (74)..(74): n includes a, c, g, or t, or contains no nucleotide
  misc_feature (85)..(85): n includes a, c, g, or t, or contains no nucleotide
  misc_feature (91)..(91): n includes a, c, g, or t, or contains no nucleotide
  misc_feature (103)..(103): n includes a, c, g, or t, or contains no nucleotide
  misc_feature (108)..(108): n includes a, c, g, or t, or contains no nucleotide
  misc_feature (120)..(120): n includes a, c, g, or t, or contains no nucleotide
  misc_feature (123)..(123): n includes a, c, g, or t, or contains no nucleotide
  misc_feature (132)..(132): n includes a, c, g, or t, or contains no nucleotide
  misc_feature (141)..(141): n includes a, c, g, or t, or contains no nucleotide
  misc_feature (176)..(176): n includes a, c, g, or t, or contains no nucleotide
  misc_feature (189)..(189): n includes a, c, g, or t, or contains no nucleotide
  misc_feature (225)..(225): n includes a, c, g, or t, or contains no nucleotide
  misc_feature (242)..(242): n includes a, c, g, or t, or contains no nucleotide
  misc_feature (336)..(336): n includes a, c, g, or t, or contains no nucleotide
cagctcagagggaaagccttacgtgaccaaggaggagctctaccagaacctgacccngggaacaagccgactantgcgtctcccnacatgnaagccctacgtnggacnggcaagggccgncgnagctccccnaccgcgttncgactacgtggagttcacccgctcgcttttcgtgnaactgagccactnccctgggtcacccacccctcgctgcttgccctgcgntcgccttgctgcatgtnccgctcctctgtgtgctctcactttccactgtaaccttaagcctgcttagcttggaataagacttaggagaaaatggtgcttcactaacccgcnttccggtccagtcacaatcatcatgtcactgtggggacccagatctgtgtcttgaagcagctgccctcattccgacttcagaaaatcgaagcagctggctcct

SEQ ID NO: 2433 - DNA, 422 bp, Homo sapiens
acctgttgatctatttgaggtcttttgtgtttatcaaacttattcttaagtttaaaaaagaaattaaaagggtggtttttttaagattttaaagtttgctaacatattaaaaatcttcaaatgcttattaaatagagcagttcttgccacccagtcttgtattctgtctttagctagccaaattgtccttgaatttgggttttccacaacctcaaagggttatttgaaatcttttgttgtattttaaaatattttttggaagagctgctaattttattttaaaaaacaaagttgtgaaaacatgcctcctttttaaaaaataacccctccatccaggatatggaatccagcaccacagtgcacaggtcagggctcggagggagcctctgtgcagatgtgctttctttacagtggctgtaaaa

SEQ ID NO: 2434 - DNA, 457 bp, Homo sapiens
  misc_feature (57)..(57): n includes a, c, g, or t, or contains no nucleotide
ataggaacctgcattgtcattctctgaattaagaactgatggtttctatcattattnagccccacctttgtattttaaaatccttcagaatacatttatgaaccaatgcgactggacttagccacacacaatggaaattcagaccttgactatttggtgtttccagttcacaaaggtgatgaagactgtcttgggagcagcttaatcccaaaatttgtacatttcttgctgctcctggcgtggaaacttaagtgagaccaccaaatacattggtcctgtccaattctactgaatgggggtggacctggcatttatctggccaaaaacaggagccagagaaatatgaatataccaaagttgtttgtttagcctccaacttaaattacattagtcaacttatagatactcatatgatcacttttctttttagatactacatcaactagattcaggagta

SEQ ID NO: 2435 - DNA, 457 bp, Homo sapiens
gaacactattgtgtacggatgtggcagcgagaggactagacattcctgaagtcgactggattgttcagtatgaccctccggatgaccctaaggaatatattcatcgtgtgggtagaacagccagaggcctaaatgggagagggcatgccttgctcattttgcgcccagaagaattgggttttcttcgttacttaaaacaatccaaggttccattaagtgaatttgacttttcctggtctaaaatttctgacattcagtctcagcttgagaaattgattgaaaagaattactttcttcataagtcagcccaggaagcatataagtcatacatacgagcctatgattcccattctctgaaacagatctttaatgttaataacctaaatttgcctcaggttgctctgtcatttggtttcaaggtgcctcccttcgttgatctgaacgtcaacagtaatga

SEQ ID NO: 2436 - DNA, 534 bp, Homo sapiens
  misc_feature (184)..(203): n includes a, c, g, or t, or contains no nucleotide
  misc_feature (252)..(253): n includes a, c, g, or t, or contains no nucleotide
  misc_feature (260)..(260): n includes a, c, g, or t, or contains no nucleotide
  misc_feature (267)..(267): n includes a, c, g, or t, or contains no nucleotide
  misc_feature (269)..(270): n includes a, c, g, or t, or contains no nucleotide
  misc_feature (289)..(291): n includes a, c, g, or t, or contains no nucleotide
  misc_feature (297)..(316): n includes a, c, g, or t, or contains no nucleotide
  misc_feature (330)..(349): n includes a, c, g, or t, or contains no nucleotide
  misc_feature (352)..(352): n includes a, c, g, or t, or contains no nucleotide
  misc_feature (354)..(354): n includes a, c, g, or t, or contains no nucleotide
  misc_feature (356)..(357): n includes a, c, g, or t, or contains no nucleotide
  misc_feature (359)..(366): n includes a, c, g, or t, or contains no nucleotide
  misc_feature (368)..(368): n includes a, c, g, or t, or contains no nucleotide
  misc_feature (370)..(371): n includes a, c, g, or t, or contains no nucleotide
  misc_feature (374)..(374): n includes a, c, g, or t, or contains no nucleotide
  misc_feature (376)..(376): n includes a, c, g, or t, or contains no nucleotide
  misc_feature (410)..(428): n includes a, c, g, or t, or contains no nucleotide
tggactcctgctctacatccgagcaccgcctggggaaggactcgccctccaacaaactgctctacgccaaggacatccccaactacaagagctgggtggagaggtattatcgagacattgcaaagatggcatccatcagcgaccaggacatggatgcctacctggtggagcagtcccgcctccnnnnnnnnnnnnnnnnnnnnctgagtgcgctcaacgagctgtatttctatgtcaccaagtaccgccagnngattctnacggctntnngaccgagatgcctcttgtnnnggaagnnnnnnnnnnnnnnnnnnnnacagatcatcagcnnnnnnnnnnnnnnnnnnnnagntngnngnnnnnnnnangnnggngnttctcagtcctgtgccgtcctcccatccaggggnnnnnnnnnnnnnnnnnnnggtccccgggctgagccctggattgggtatcgtggggcaggtcaccctggccacgatgcccccggcacacccaggcccccttcattagtgccttgctttgggccct

SEQ ID NO: 2437 - DNA, 568 bp, Homo sapiens
  misc_feature (47)..(126): n includes a, c, g, or t, or contains no nucleotide
  misc_feature (166)..(182): n includes a, c, g, or t, or contains no nucleotide
  misc_feature (265)..(279): n includes a, c, g, or t, or contains no nucleotide
  misc_feature (494)..(526): n includes a, c, g, or t, or contains no nucleotide
gagctttggcactggctctgaccacctccgagagaaggatggcctgnnnnnnnnnnnnnnnnnnnnnnnnnnnnnnnnnnnnnnnnnnnnnnnnnnnnnnnnnnnnnnnnnnnnnnnnnnnnnnnnatttggccgccactactattgcaggtttgactatgagggnnnnnnnnnnnnnnnnncatattatatcatgagggacctggaggccctggtcacagacaaatccttcattggccagcagtttgctgtggggagccatgtnnnnnnnnnnnnnnngacggatagttttgaatacgtggaccctgtggatggcactgtgaccaagaaacagggcctaaggatcattttctcggatgcatcacggctcatcttccggctcagttcctccagtggtgtgcgggccaccctcagactgtacgcagagagctacgagagggatcccagcggccatgaccaggagccacaggcagtgctgagccctctcatagccnnnnnnnnnnnnnnnnnnnnnnnnnnnnnnnnnactggccggaggggacccactgtcatcacctgaatagaggaa

SEQ ID NO: 2438 - DNA, 472 bp, Homo sapiens
  misc_feature (39)..(39): n includes a, c, g, or t, or contains no nucleotide
ctgttgggctgctttctgtattgtctcctaaccctctangttttaattggacacttctttgctgttgcaatctatgccgtgtatttttgctttaagtcagaaccttggattacaaaacctcgagcccttctcagtagtggtgctgtattgtacaaagcgtgttctgtaatatttcctctaatttactcagaaatgaagtatatggttcattaagcttaaaggggaaccatttgtgaatgaatatttggaacttaccaagtcctaagagacttttggaagaggatatatatagcatagtaccataccacttataaagtggaaactcttggaccaagatttggattaatttgtttttgaagttttttgtatataaatatgtaaatacatgctttaatttgcaatttaaaatgaaggggttaaataagttagacatttaaaagaaatgattgttaccataaattagtgctaatgc

SEQ ID NO: 2439 - DNA, 514 bp, Homo sapiens
  misc_feature (53)..(67): n includes a, c, g, or t, or contains no nucleotide
  misc_feature (200)..(214): n includes a, c, g, or t, or contains no nucleotide
  misc_feature (236)..(236): n includes a, c, g, or t, or contains no nucleotide
  misc_feature (240)..(241): n includes a, c, g, or t, or contains no nucleotide
  misc_feature (323)..(323): n includes a, c, g, or t, or contains no nucleotide
  misc_feature (414)..(415): n includes a, c, g, or t, or contains no nucleotide
cacttggccaagcagggaggaagaagcttaggcagggctctctttccttcttnnnnnnnnnnnnnnnctcccaggggctggcttcaggagggagcatagaaggcaggtgagcaaccagttggctaggggagcagggggcccaccagagctgtggagaggggaccctaagactcctcggcctggctcctacccaccgcccnnnnnnnnnnnnnnnctgctcactacctcctcagggnatgnncgttggccacgtcttccttctgcctgagcttcccccccaccacaggccctttcctcaggcaaggtctggcctcaggtgggcngcaggcgggaaaagcagcccttggccagaagtcaagcccagccacgtggagcctagagtgagggcctgaggtctggctgcttgcccccatnntggcgccaacaacttctccatcctttctgcctctcaacatcacttgaatcctagggcctgggttttcatgtttttgaaacagaaccataaagcatatgt

SEQ ID NO: 2440 - DNA, 457 bp, Homo sapiens
  misc_feature (162)..(181): n includes a, c, g, or t, or contains no nucleotide
  misc_feature (239)..(256): n includes a, c, g, or t, or contains no nucleotide
  misc_feature (346)..(361): n includes a, c, g, or t, or contains no nucleotide
ggtatgagaaccacaacatctccattacaaatgccacagttgaagacagtggaacctactactgtacgggcaaagtgtggcagctggactatgagtctgagcccctcaacattactgtaataaaagctccgcgtgagaagtactggctacaattttttatcnnnnnnnnnnnnnnnnnnnngtttgctgtggacacaggattatttatctcaactcagcagcaggtcacatttctcttnnnnnnnnnnnnnnnnnngaaaggcttcagacttctgaacccacatcctaagccaaaccccaaaaacaactgatataattactcaagaaatatttgcaacattagttnnnnnnnnnnnnnnnnaattgctactcaattgtcaaacacagcttgcaatatacatagaaacgtctgtgctcaaggatttatagaaatgcttcattaaactgagtgaaactg

SEQ ID NO: 2441 - DNA, 434 bp, Homo sapiens
  misc_feature (133)..(148): n includes a, c, g, or t, or contains no nucleotide
  misc_feature (305)..(329): n includes a, c, g, or t, or contains no nucleotide
cgtccagatcctgctgcctgtgggggagcctgtgaccaacgtccgcttgcagccggctgccacctggaacctggaggagaagcggctcacttggaggcttccagatgtgtccgaggcaggcggttctggccgnnnnnnnnnnnnnnnngagccgctctcagggcccagcacacccagccccgtggctgcacagttcaccagcgaggggaccactctgtcgggcgtggacttggaactggtgggcagcggttaccgcatgtcgctggtgaagaggaggtttgccacagggatgtacctggtgagcnnnnnnnnnnnnnnnnnnnnnnnnnccagctctacactgcgccctggtgctggctgaccaccccctgccctcctgccggaccctggggcctcccaccccagcctccctgaggcccatactccacggagag

SEQ ID NO: 2442 - DNA, 364 bp, Homo sapiens
  misc_feature (38)..(57): n includes a, c, g, or t, or contains no nucleotide
  misc_feature (68)..(68): n includes a, c, g, or t, or contains no nucleotide
  misc_feature (93)..(93): n includes a, c, g, or t, or contains no nucleotide
  misc_feature (97)..(97): n includes a, c, g, or t, or contains no nucleotide
  misc_feature (111)..(111): n includes a, c, g, or t, or contains no nucleotide
  misc_feature (119)..(119): n includes a, c, g, or t, or contains no nucleotide
  misc_feature (253)..(253): n includes a, c, g, or t, or contains no nucleotide
  misc_feature (330)..(331): n includes a, c, g, or t, or contains no nucleotide
gacacttagtcctccacagtgggtggaagagtgcaagnnnnnnnnnnnnnnnnnnnnacgcagaaccntgctggtgcaagctgggcaggtccntganccaacctgcatcanggggatgnccctgagctccacaggtcttcatgggcaggggttgtgggtcctggtgaaggaagtgcatcctcaggcctgggctgtagcaagctgtctgcccttgggttcaagaaccagactgtggagccaaaggtgaccgcangggggccccagggctggagccacaaggataccctcactttgcatgaggagctgaaactgaccagtgtccagtgttannccccacatggggctgctcttgcttctactaaaa

SEQ ID NO: 2443 - DNA, 431 bp, Homo sapiens
  misc_feature (178)..(180): n includes a, c, g, or t, or contains no nucleotide
  misc_feature (357)..(376): n includes a, c, g, or t, or contains no nucleotide
agagggttcttatcgcgtctcctgtgatcagcctctggccccctggaggaggaaacctcagcgctgcccctgcccccaccctcacccccaacaccaagagtgaggtgggcgtgccccaggcagcgtcctcagccctggccagctactgtgatgccatcttctcccccatccccttctnnngggggcccacccgtcccccacccccaccccttagaccctcatcgggtccctttttttttttttttttcagttgtctcctcccatcttcagatcattcgaatcattttggggacttaatcatgtacatggacaagtgtaaattatgatttttggttttgttttctgttattttttaannnnnnnnnnnnnnnnnnnnctatttaatttgaggttgatgttctatccaatggccgaagatagcagcaggtttt

SEQ ID NO: 2444 - DNA, 590 bp, Homo sapiens
  misc_feature (30)..(30): n includes a, c, g, or t, or contains no nucleotide
  misc_feature (59)..(59): n includes a, c, g, or t, or contains no nucleotide
  misc_feature (82)..(82): n includes a, c, g, or t, or contains no nucleotide
  misc_feature (210)..(228): n includes a, c, g, or t, or contains no nucleotide
  misc_feature (237)..(237): n includes a, c, g, or t, or contains no nucleotide
  misc_feature (239)..(239): n includes a, c, g, or t, or contains no nucleotide
  misc_feature (283)..(320): n includes a, c, g, or t, or contains no nucleotide
  misc_feature (369)..(383): n includes a, c, g, or t, or contains no nucleotide
ggcctcgaaggaagcacaaaccctccatcnacttcccatttcctctgcccttttccacntcccccttccatcccaccagctnccagtggctcccagaaagccttattgagccccttgttgacacttggggctgcggaggcctctccctactggtctggcctttcctgagaggcaggtcttccgtcctcagagcctttctggaacaaggannnnnnnnnnnnnnnnnnngacacacangncctggcctgtcgctctcacttgtcttccagcggggagcttcacnnnnnnnnnnnnnnnnnnnnnnnnnnnnnnnnnnnnnncaaggtgctagggaagtttcagggtacgctggttcccctctccagctgnnnnnnnnnnnnnnngggactgcagatttttctactctgtgatcgattcaatgcccgatgcttctgtttcattcccgaccctttctactatgcattttccttttatcaggtgtataaagttaaatactgtgtatttatcactaaaaagtacatgaacttaagagacaactaagcctttcgtgtttttccacaggtgtttaagcttctctgtacagttgaaat

SEQ ID NO: 2445 - DNA, 325 bp, Homo sapiens
aatgacctttccttaacttgaagctacttttaaaatttgagggtctggaccaaaagaagaggaatatcaggttgaagtcaagatgacagataaggtgagagtaatgactaactccaaagatggcttcactgaagaaaaggcattttaagattttttaaaaatcttgtcagaagatcccagaaaagttctaattttcattagcaattaataaagctatacatgcagaaatgaatacaacagaacactgctctttttgattttatttgtactttttggcctgggatatgggttttaaatggacattgtctgtaccagcttcattaaa

SEQ ID NO: 2446 - DNA, 450 bp, Homo sapiens
  misc_feature (41)..(41): n includes a, c, g, or t, or contains no nucleotide
  misc_feature (56)..(58): n includes a, c, g, or t, or contains no nucleotide
  misc_feature (63)..(63): n includes a, c, g, or t, or contains no nucleotide
  misc_feature (68)..(68): n includes a, c, g, or t, or contains no nucleotide
  misc_feature (70)..(71): n includes a, c, g, or t, or contains no nucleotide
  misc_feature (78)..(78): n includes a, c, g, or t, or contains no nucleotide
  misc_feature (86)..(88): n includes a, c, g, or t, or contains no nucleotide
  misc_feature (91)..(91): n includes a, c, g, or t, or contains no nucleotide
  misc_feature (106)..(106): n includes a, c, g, or t, or contains no nucleotide
  misc_feature (114)..(114): n includes a, c, g, or t, or contains no nucleotide
  misc_feature (116)..(117): n includes a, c, g, or t, or contains no nucleotide
  misc_feature (119)..(119): n includes a, c, g, or t, or contains no nucleotide
  misc_feature (128)..(129): n includes a, c, g, or t, or contains no nucleotide
  misc_feature (132)..(146): n includes a, c, g, or t, or contains no nucleotide
  misc_feature (161)..(218): n includes a, c, g, or t, or contains no nucleotide
tccttgcagccatgctcctgggcaacccaggtctggtcttntctcgtctgagcccnnngtacnacgancnngcaagancccacctnnntgntgaggagaaatcctngcccgtgncnngnccaggaggnnccnnnnnnnnnnnnnnngaccaaaacacaggnnnnnnnnnnnnnnnnnnnnnnnnnnnnnnnnnnnnnnnnnnnnnnnnnnnnnnnnnnggataagcccacccagagaagtgtttccaatgctgcgacccgggtgtgtaggacggggaggtcacgatggcgcgacgtctgcagaaatttcatgaggaggtatcagtctagagttacccagggcctcgtggccggagaaactgcccagcagatctgtgaggacctcaggttgtgtataccttctacaggtcccctctgagccctctcaccttgtcctgtggaagaagcacag

SEQ ID NO: 2447 - DNA, 411 bp, Homo sapiens
tatccaatacagtgccatctagtgacaaatcatttacttgctggttattgaaaatagttgactacaagttttatgtcctgataagtcaggaacttcacttctaattgtgcaaattcttaagatattttaagcgactatttctaaataaataaaatatttgtaaatagagagctggaaaatattttctaaccctcaggttttatacatatgtatcacaatgtgtcttatttaatgccacgtggacccaggagtaaaatcaaaatcagtgttttgtctaataaggtggtaataggattattttagaaatgtgatgtaaaggaatgagcatggctttaaaatcaaacagacacgagtttgtctatttggacttatttttcttatgacttagcaggtaattactacctgcttgga

SEQ ID NO: 2448 - DNA, 449 bp, Homo sapiens
  misc_feature (140)..(204): n includes a, c, g, or t, or contains no nucleotide
  misc_feature (221)..(221): n includes a, c, g, or t, or contains no nucleotide
  misc_feature (233)..(233): n includes a, c, g, or t, or contains no nucleotide
  misc_feature (236)..(236): n includes a, c, g, or t, or contains no nucleotide
  misc_feature (267)..(267): n includes a, c, g, or t, or contains no nucleotide
  misc_feature (270)..(270): n includes a, c, g, or t, or contains no nucleotide
  misc_feature (274)..(274): n includes a, c, g, or t, or contains no nucleotide
  misc_feature (326)..(326): n includes a, c, g, or t, or contains no nucleotide
  misc_feature (334)..(334): n includes a, c, g, or t, or contains no nucleotide
  misc_feature (338)..(338): n includes a, c, g, or t, or contains no nucleotide
  misc_feature (342)..(370): n includes a, c, g, or t, or contains no nucleotide
  misc_feature (375)..(416): n includes a, c, g, or t, or contains no nucleotide
tctgcagtgtcatacaggagggttggagagaggcatccttttccctaggctgtgcctgggggacaagagagaggggaagtacagctggcactgccgtgccaggggcagggtccaggccagccgtgccacctgagcgggcnnnnnnnnnnnnnnnnnnnnnnnnnnnnnnnnnnnnnnnnnnnnnnnnnnnnnnnnnnnnnnnnnttgatgatgtctgtgtncaggttcagcgnagnaaacacatactcttctgggctcagggacagntgnttgntccccagcagaagctgggtgtccactgcgaggaagcaggtgaagagcagagngcccagtnaggngtannnnnnnnnnnnnnnnnnnnnnnnnnnnnagatnnnnnnnnnnnnnnnnnnnnnnnnnnnnnnnnnnnnnnnnnncaggagcacgcccatgcatgaggtgacgggttt

SEQ ID NO: 2449 - DNA, 481 bp, Homo sapiens
  misc_feature (54)..(70): n includes a, c, g, or t, or contains no nucleotide
  misc_feature (236)..(267): n includes a, c, g, or t, or contains no nucleotide
  misc_feature (355)..(378): n includes a, c, g, or t, or contains no nucleotide
  misc_feature (382)..(396): n includes a, c, g, or t, or contains no nucleotide
attgtgactgactctgcatttttaattcttgaaacttggctttccataacatgnnnnnnnnnnnnnnnnnacatatgacccagagagcaaggtggctgaactatagtctggaagccctcaggtaaagaggcacatctcaccactcattggttaaacaatgcatcatagcgagcacttttcctttccctggagaatgggatgtgaagcagtagaccgcagccacgccgatggttatnnnnnnnnnnnnnnnnnnnnnnnnnnnnnnnnattgagtttgcttggaatgctgacagcatcaggcaactctgaactgaacatttgctttgtcagaaaatatctttttttttactttgannnnnnnnnnnnnnnnnnnnnnnncaannnnnnnnnnnnnnntcaggagtcaaacaaatgtttagaaagcaaacatgacgtctctattgtacaacctcctttctcttggctgtttaaaggatgtact

SEQ ID NO: 2450 - DNA, 601 bp, Homo sapiens
ctgccacggcccttcggaaagtgctgtccctgaagcagcttctgtttccggcggaggaagacaatggggcggggcctcctcgagatggggatggggtcccagggggcgggcccctgagcccagcacggacccaggaaatccaggagaacctgctcagcttggaggagaccatgaagcagctggaggagttggaggaggaattttgccgcctgagacccctcctgtctcagcttggggggaactctgtcccccagcctggctgcacttgaggttcccgcccaggaaggccttttgcaagaaggagaggaatgggggagaggacgtgagggaccacccccacccacacagctgccgcagcatctcacaccccgagggcctgaggagagggagctgtgggccacgcctgggaggggcccagctggggttactgcccccgcatgagcctcggccatctctccctcctgccctctgcttgggggactcagggctccattctggagggcaccacggtgacccgggccatctcagtattgcctgtgggggccacccctccacccccacccccaagtgccttcgctctgtttttataccctgaattgga

SEQ ID NO: 2451 - DNA, 408 bp, Homo sapiens
atttgacctgctcaaacgtatcttgaagatggacagaaaagctgtggagacccacctgctcaggaaccctcaccttgtttcggactatagagtgctgatggcagagattggtgaggatttggataaatctgatgtgtcctcattaattttcctcatgaaggattacatgggccgaggcaagataagcaaggagaagatttcttgggaccttgtggttgagttggagaaactaaatctggttgccccagatcaactggatttattagaaaaatgcctaaagaacatccacagaatagacctgaagacaaaaatccagaagtacaagcagtctgttcaaggagcagggacaagttacaggaatgttctccaagcagcaatccaaaagagtctcaaggatccttcaaataa

SEQ ID NO: 2452 - DNA, 571 bp, Homo sapiens
  misc_feature (74)..(74): n includes a, c, g, or t, or contains no nucleotide
  misc_feature (78)..(78): n includes a, c, g, or t, or contains no nucleotide
  misc_feature (453)..(468): n includes a, c, g, or t, or contains no nucleotide
  misc_feature (540)..(540): n includes a, c, g, or t, or contains no nucleotide
  misc_feature (542)..(545): n includes a, c, g, or t, or contains no nucleotide
cttggtttcactagtagtaaacattattattttttttatatttgcaaaggaaacatatctaatccttcctatangaangaacagtattgctgtaattccttttcttttcttcctcatttcctctgccccttaaaagattgaagaaagagaaacttgtcaactcatatccacgttatctagcaaagtacataagaatctatcactaagtaatgtatccttcagaatgtgttggtttaccagtgacaccccatattcatcacaaaattaaagcaagaagtccatagtaatttatttgctaatagtggatttttaatgctcagagtttctgaggtcaaattttatcttttcacttacaagctctatgatcttaaataatttacttaatgtattttggtgtattttcctcaaattaatattggtgttcaagactatatctaattcctctgatcactnnnnnnnnnnnnnnnntattaaatgtaaggcacttttctatgaattttaaatataaaaataaatattgttctgattattactgaaaanannnnagccatttcaatgtcttgggaaacaa

SEQ ID NO: 2453 - DNA, 190 bp, Homo sapiens
  misc_feature (59)..(59): n includes a, c, g, or t, or contains no nucleotide
  misc_feature (119)..(143): n includes a, c, g, or t, or contains no nucleotide
tctccaaagtgactggatgctacagaagaactgggactgtcttctgcacactcgtgccncctggagttgtcagaacactgagcagtctcctagttctgcgtccgtctagccatggggtnnnnnnnnnnnnnnnnnnnnnnnnntattgggttggtattttaaactttcacttgggtgaaacttgttcatc

SEQ ID NO: 2454 - DNA, 511 bp, Homo sapiens
  misc_feature (52)..(52): n includes a, c, g, or t, or contains no nucleotide
  misc_feature (142)..(142): n includes a, c, g, or t, or contains no nucleotide
  misc_feature (155)..(155): n includes a, c, g, or t, or contains no nucleotide
  misc_feature (349)..(363): n includes a, c, g, or t, or contains no nucleotide
  misc_feature (455)..(455): n includes a, c, g, or t, or contains no nucleotide
acctaacagctggttcctaccagaccggagaggggagaagtcatgttgcccntaaacccctccccacctctgcaggacagacatgggagggaggacagggaaggccaggcttgctctgggacttttatgctcccagaggccntgccaaactgacnacctcccccgactgccactctggacctaatagctgttccttaggccccactccatgccacccccaccagctggaggacccagcctcacagtgtgtcctttgtgccagaccaagcggcccgtggggggtggggggcagggagtgtaccacacagggccattgtctcacctcccaaagggaccgcctgcccccagnnnnnnnnnnnnnnnccctgctgcaaccctgacagccgtctcccaggccgcttccccaacatccccgccccagcctccctcttaccccagaaaggtcaggtatgacntcccggggaggaatcccacctgcctgtataccccagacttgcctctggggcctgat

SEQ ID NO: 2455 - DNA, 493 bp, Homo sapiens
  misc_feature (80)..(80): n includes a, c, g, or t, or contains no nucleotide
  misc_feature (103)..(103): n includes a, c, g, or t, or contains no nucleotide
  misc_feature (123)..(123): n includes a, c, g, or t, or contains no nucleotide
  misc_feature (142)..(142): n includes a, c, g, or t, or contains no nucleotide
  misc_feature (164)..(164): n includes a, c, g, or t, or contains no nucleotide
  misc_feature (192)..(192): n includes a, c, g, or t, or contains no nucleotide
  misc_feature (210)..(210): n includes a, c, g, or t, or contains no nucleotide
  misc_feature (214)..(214): n includes a, c, g, or t, or contains no nucleotide
  misc_feature (255)..(255): n includes a, c, g, or t, or contains no nucleotide
  misc_feature (274)..(274): n includes a, c, g, or t, or contains no nucleotide
  misc_feature (293)..(293): n includes a, c, g, or t, or contains no nucleotide
  misc_feature (319)..(319): n includes a, c, g, or t, or contains no nucleotide
gtttatagtgctctgtaaatgttcctttcctttgtagtctctggcaagatgctttaggaagataaaagtttgaggagaancaaacaggaattctgaattaagncacagagttgaagtttatancccgtttcacatgcttttncaagaatgtcgcaattactaangaagcagataatggtgttttttagaaancctaattgaagtatattncaanccaaatactttaatgtataaaataaatattatacaatatancttgtatagcagtttctgncttcacatttgattttttncaaatttaatatttatattagagatnctatatatgtataaatatgtattttgtcaaatttgttacttaaatatatagagaccagttttctctggaagtttgtttaaatgacagaagcgtatatgaattcaagaaaatttaagctgcaaaaatgtatttgctataaaatgagaagtctcactgatagaggttctttattgc

SEQ ID NO: 2456 - DNA, 571 bp, Homo sapiens
gaagatcgactgaccaatcgccttacagagtctctgaacatttttgaaacaatcgtcaataaccgggttttcagcaatgtctccataattctgttcttaaacaagacagacttgcttgaggagaaggtgcaaattgtgagcatcaaagactatttcctagaatttgaaggggatccccactgcttaagagacgtccaaaaattcctggtggaatgtttccggaacaaacgccgggaccagcaacagaagcccttataccaccacttcaccactgctatcaacacggagaacatccgccttgttttccgcgacgtgaaggatactattctgcatgacaacctcaagcagcttatgctacagtgatgtacaaaagacttgctgttttaatatctttttgtgtttttgatgttttctgtttgttttgttttttaaaatagcagtttacaaccagaattagaacaatcttaattctacgtttaacttcttgaaaatcttagtactttttctgcggcctttggtttgtggctgaaagctgttgagtgactcatcgccaagatttgctgtaatgcag

SEQ ID NO: 2457 - DNA, 493 bp, Homo sapiens
  misc_feature (38)..(38): n includes a, c, g, or t, or contains no nucleotide
  misc_feature (45)..(45): n includes a, c, g, or t, or contains no nucleotide
  misc_feature (49)..(49): n includes a, c, g, or t, or contains no nucleotide
  misc_feature (55)..(55): n includes a, c, g, or t, or contains no nucleotide
  misc_feature (65)..(65): n includes a, c, g, or t, or contains no nucleotide
  misc_feature (91)..(91): n includes a, c, g, or t, or contains no nucleotide
  misc_feature (103)..(104): n includes a, c, g, or t, or contains no nucleotide
  misc_feature (343)..(372): n includes a, c, g, or t, or contains no nucleotide
atcactaaaggagacaggcatctgtacattgtcactgnacggtgnttgntgaaangttatatctnccgggtcggggtagtggactgctttnacaccagcactnnggacgtggtccagtgtatcaccttccccattgagttcaaccatcggcccctgctctctttccaacaggacaacatcctctgcgtgcacagccaccggcagagtgtggaaatcaatctgcagaaggtgaaggcaagcaagacgaccacctcagtgcctgtcttgcccaacagctgccccttggatgtgtcccatgctatatgctccattggagacagcaaggtgtttgtatgtgggggtnnnnnnnnnnnnnnnnnnnnnnnnnnnnnngactacaccatcaatccaaatgccttcttgctggaccaaaagacaggcaagtggaagaccctggctcctccaccagaggcactggactgtcctgcctgctgtctagccaagctaccttgca

SEQ ID NO: 2458 - DNA, 472 bp, Homo sapiens
  misc_feature (94)..(94): n includes a, c, g, or t, or contains no nucleotide
  misc_feature (101)..(101): n includes a, c, g, or t, or contains no nucleotide
  misc_feature (116)..(116): n includes a, c, g, or t, or contains no nucleotide
  misc_feature (120)..(120): n includes a, c, g, or t, or contains no nucleotide
  misc_feature (144)..(144): n includes a, c, g, or t, or contains no nucleotide
  misc_feature (167)..(167): n includes a, c, g, or t, or contains no nucleotide
  misc_feature (210)..(210): n includes a, c, g, or t, or contains no nucleotide
  misc_feature (231)..(257): n includes a, c, g, or t, or contains no nucleotide
  misc_feature (426)..(440): n includes a, c, g, or t, or contains no nucleotide
tccatgctgctcctgcgcaggaagaagccctacggggctatcagccatggcgtggtggaggtggaccccatgctgaccctggaggagcagcagntccgcgnaactgcagcggcacnggcntatgagaaccccacttaccgcttncctggaggaacgaccctgacccnggcccccttcaccccttcagccgagcccagacctcccctcttncctggagccccagaaccccannnnnnnnnnnnnnnnnnnnnnnnnnntcttgaagtgatcatttcacacccttttgtgagacggctggaaattcttatttcccctttccaattccaaaattccatccctaagaattcccagatagtcccagcagcctccccacgtggcacctcctcaccttaatttattttttaagtttatttatggctctttaannnnnnnnnnnnnnnggtcctagtgtctattccctggaattcaccct

SEQ ID NO: 2459 - DNA, 211 bp, Homo sapiens
  misc_feature (52)..(52): n includes a, c, g, or t, or contains no nucleotide
  misc_feature (56)..(56): n includes a, c, g, or t, or contains no nucleotide
  misc_feature (62)..(86): n includes a, c, g, or t, or contains no nucleotide
  misc_feature (166)..(166): n includes a, c, g, or t, or contains no nucleotide
  misc_feature (183)..(183): n includes a, c, g, or t, or contains no nucleotide
tacttagttgtgagatccatcccctggcttcattccctgaactggctttagnaacnctggcnnnnnnnnnnnnnnnnnnnnnnnnnactagagaactcaaggtaaaagcagcccaagaaaaacagaccaacagaaaagcaatgagagaaaggatgaaggttccctnctcgatgatccattaantggaagagtaacccaagaaaacatcatg

SEQ ID NO: 2460 - DNA, 193 bp, Homo sapiens
agtcttggttctccatctgtaattttttttaacagtttgctatagcttactgcttaactaattttaaataaggaaataagtatgttagatgcagtagacgatacaggttgcatgtggacactcagtcacattaacaacttgggaaaaaaatggcaatgttacggtgaattctcaggtgaacttttttcagtta

SEQ ID NO: 2461 - DNA, 273 bp, Homo sapiens
gatgtctcctaagtttccctgtctaaaacacatcagtgtaaattcaggcttcagcacgccgtccagatccccaggataagagaccacttagccttccctttggtctgttctgtgactctctccccaaacacaaagaagcgtgtatgtagtcaccattccagaacctctcttttctaagatgcacaacacttatcaaagatatgtttagtttagactttatacccttagctttcccataagagctccctttgtggggaacttgccctcttctgc

SEQ ID NO: 2462 - DNA, 473 bp, Homo sapiens
  misc_feature (26)..(26): n includes a, c, g, or t, or contains no nucleotide
  misc_feature (53)..(53): n includes a, c, g, or t, or contains no nucleotide
aagcataactgataaacgcgagtgcntattgtagtcttggcaagtgagccaangaacctaggagcagggccattcctactgaaggacgggccccctacggagatgaaatttgtttcctggtgagcacagaatcagaacaaagaacaatatcccaaagaggccctgtgtctaccaggagcttctttttccaaatgtaatggattatgtggaattgtagtgccatcggtttttacttagagcccttgacgtgcttggaccaatatttccttccttcttatgaaccaggtttttccttctgattttcccttttcaacattccttaccagtcaccaaagtttcctgttataatttcttttagcagacaagttataagtcagatttaattagcatcagagttgattttatattagtcagattttggatcatcacagagatctccacaactccttggcttaaacagctccaccggtaaa

SEQ ID NO: 2463 - DNA, 570 bp, Homo sapiens
  misc_feature (122)..(122): n includes a, c, g, or t, or contains no nucleotide
  misc_feature (128)..(128): n includes a, c, g, or t, or contains no nucleotide
  misc_feature (176)..(177): n includes a, c, g, or t, or contains no nucleotide
  misc_feature (289)..(289): n includes a, c, g, or t, or contains no nucleotide
  misc_feature (312)..(312): n includes a, c, g, or t, or contains no nucleotide
actcgggcaaatacgggctggttgtgaagaacaagtatggctcggagaccagcgacttcaccgtcagcgtgttcatcccagaggaggaggcgaggatggccgccttggagtccctgaaaggnggcaanaaggccaagtgaccggaggtgcgaggagagccagccggcctgtgtganntgggtgtgaatggtttgggttaaggatgagacgtcttcatgctttctcctccctattattttctggcttgaggggaaaataatgtcaggtctttcactcatataaaaaagcnccaactaatgacactttaattgnttttctttatctacaaaattatgtgttaagaaaataccattcatagcatgaagattaggaaacagttttaaggagaagacttgaatgaagttggagggacattgaatgatggtcagagggcagacgaatgtgtcgtggggcgagttgggatttgctgcagctgtgaagccatggccgtgtctcgtgtgttgttacagaggtgatgtgcttttcgacgggcgcctcgtggcttggaacctcctctgtatgaataaacag

SEQ ID NO: 2464 - DNA, 274 bp, Homo sapiens
ttcagttatttgcacaagttcagtgagaatctgctgtctttataatgggatatagtttaaaacattggttatattaccaaggctttgattgggatgttatatttgagaaaatacagagaatgatagattaacggagtgtctaatctatcgtgtcaaccccaaatttttacgtatgagatcctttagtccacccaatggctgacagtaacagcatctttaacacaactctttgttcaaatgtactatggtctcttttagagtcagactcctagac

SEQ ID NO: 2465 - DNA, 511 bp, Homo sapiens
gcaaggtccttccatagtgacgccccccaaggacatctggaatgtcactggtgcccaggtgtacttgagctgtgaggtcatcggaatcccgacacctgtcctcatctggaacaaggtaaaaaggggtcactatggagttcaaaggacagaactcctgcctggtgaccgggacaacctggccattcagacccggggtggcccagaaaagcatgaagtaactggctgggtgctggtatctcctctaagtaaggaagatgctggagaatatgagtgccatgcatccaattcccaaggacaggcttcagcatcagcaaaaattacagtggttgatgccttacatgaaatagccagtgaaaaaaggtgaaggtgccgagctataaacctccagaatattattagtctgcatggttaaaagtagtcatggataactacattaccctgttcttgcctaataagtttcttttaatccaatccactaacactttagttatattcactggttttacacaga

SEQ ID NO: 2466 - DNA, 214 bp, Homo sapiens
gcccctggacatgaagtggtcacgcttcatccacggctccttcccacccctcggcagtggctgtgcaatgttttaagttcacaagttcctgctcctccccacactgagctcctttgttcctccccctccagcctttgcctgggaactggtccttgtttgccgggcttctcggagggttcactgtacattcgttctcaggtggtcttgtggctgt

SEQ ID NO: 2467 - DNA, 313 bp, Homo sapiens
  misc_feature (209)..(223): n includes a, c, g, or t, or contains no nucleotide
gtctttgcatgtaagctctttgagaggaagggtgaagccttatttgttttttatgtcccctgccagggcctgtctctgactaggtgtcaccatacacattcttagattgaatctgaaccatgtggcagaagggataagcagcttacttagtaggctctgtctacccccttccttctttgtcttgcccctaggaaggtgaatctgccctnnnnnnnnnnnnnnnttcttataactctcctttgctctctggccactattaagtgggtttgccccatcacttagttctcaggcagagacatctttgggcctgtcc

SEQ ID NO: 2468 - DNA, 545 bp, Homo sapiens
actatttttactaatctttctgcagaaacagaaaggttttcttctttttgcttcaaaaacattcttacattttactttttcctggctcatctctttattcttttttttttttttaaagacagagtctcgctctgttgcccaggctggagtgcaatgacacagtcttggctcactgcaacttctgcctcttgggttcaagtgattctcctgcctcagcctcctgagtagctggattacaggcatgtgccacccacccaactaatttttgtgtttttaataaagacagggtttcaccatgttggccaggctggtctcaaactcctgacctcaagtaatccacctgcctcggcctcccaaagtgctgggattacagggatgagccaccgcgcccagcctcatctctttgttctaaagatggaaaaaccacccccaaattttctttttatactattaatgaatcaatcaattcatatctatttattaaatttctaccgcttttaggccaaaaaaatgtaagatcgttctctgcctcacatagcttacaa

SEQ ID NO: 2469 - DNA, 527 bp, Homo sapiens
  misc_feature (61)..(61): n includes a, c, g, or t, or contains no nucleotide
  misc_feature (71)..(71): n includes a, c, g, or t, or contains no nucleotide
  misc_feature (84)..(84): n includes a, c, g, or t, or contains no nucleotide
  misc_feature (118)..(122): n includes a, c, g, or t, or contains no nucleotide
  misc_feature (129)..(130): n includes a, c, g, or t, or contains no nucleotide
  misc_feature (139)..(200): n includes a, c, g, or t, or contains no nucleotide
  misc_feature (210)..(210): n includes a, c, g, or t, or contains no nucleotide
  misc_feature (230)..(230): n includes a, c, g, or t, or contains no nucleotide
  misc_feature (281)..(281): n includes a, c, g, or t, or contains no nucleotide
agtccatggccaggaagaacgagtggcccctggacaagatgtgtctgtctgtcgaggtgancaagaaaaancgagaggacatgnccgctcctccgcgagagggctcctacgtgtacgnnnnntcttcanngaaggggcnnnnnnnnnnnnnnnnnnnnnnnnnnnnnnnnnnnnnnnnnnnnnnnnnnnnnnnnnnnnnntgcctgtcancttcatcaaggccattcctntggaccgcatggagaccaagaacatctatgagtgtcccgtgtacaaaacangcatccgcggccccacctatgtctggacctttaacttgaagaccaaagagaaggcagcgaagtggatcctggcagccgtggcgctgctcctacaggtttagctcgctcctgcctcacagcccacactccctggggctggaccacaactcagcccttcacctgtgcacctgtgacttattctttacaggaactggtggtggtttttcgttctcttaaataatcaggtgctttgtaaccaagcacatc

SEQ ID NO: 2470 - DNA, 559 bp, Homo sapiens
  misc_feature (255)..(293): n includes a, c, g, or t, or contains no nucleotide
  misc_feature (404)..(418): n includes a, c, g, or t, or contains no nucleotide
cgaggagtccgacgaggacgactcttcgtcaggcgaggaggctgccggcaagaccaacccggggagggactccaggttgagcttcagcgacagcgagagtgacaacagcgccgactcctccctgcccagccgtgagcccccacccccccagaagccacccccgcccaacagcaaggtgtcaggccggaggagccccgagtcctgcagcaagcctgagaagatcctcaagaagggcacctacgacaaggcctacannnnnnnnnnnnnnnnnnnnnnnnnnnnnnnnnnnnnnntgcgggagcgcaacgtgctgcagcagattgtgaatctgatcgaggagactggccacttcaatgtcaccaacaccaccttcgacttcgacctcttctccctggacgagaccnnnnnnnnnnnnnnncagagctgcctggaggccgtggccacatgaccctgggccgcgtgccgggcccccaccgccggggtcctgggaggctgcagccaggcctcgcctgccctcctctcccgtctcgcctgcttcatttggatatcagagctatgg

SEQ ID NO: 2471 - DNA, 527 bp, Homo sapiens
  misc_feature (83)..(84): n includes a, c, g, or t, or contains no nucleotide
  misc_feature (199)..(199): n includes a, c, g, or t, or contains no nucleotide
  misc_feature (208)..(208): n includes a, c, g, or t, or contains no nucleotide
  misc_feature (212)..(214): n includes a, c, g, or t, or contains no nucleotide
  misc_feature (217)..(217): n includes a, c, g, or t, or contains no nucleotide
  misc_feature (219)..(220): n includes a, c, g, or t, or contains no nucleotide
  misc_feature (225)..(225): n includes a, c, g, or t, or contains no nucleotide
  misc_feature (228)..(228): n includes a, c, g, or t, or contains no nucleotide
  misc_feature (231)..(232): n includes a, c, g, or t, or contains no nucleotide
  misc_feature (236)..(236): n includes a, c, g, or t, or contains no nucleotide
  misc_feature (241)..(262): n includes a, c, g, or t, or contains no nucleotide
  misc_feature (264)..(264): n includes a, c, g, or t, or contains no nucleotide
  misc_feature (269)..(269): n includes a, c, g, or t, or contains no nucleotide
  misc_feature (285)..(285): n includes a, c, g, or t, or contains no nucleotide
  misc_feature (289)..(314): n includes a, c, g, or t, or contains no nucleotide
  misc_feature (348)..(348): n includes a, c, g, or t, or contains no nucleotide
  misc_feature (392)..(406): n includes a, c, g, or t, or contains no nucleotide
ccggatgctggagttcggcagccacctggacctggagcgcatgcaggcttccctcccgctggacaacatctcctaccgcaggnngtctgccatctgacctccaggcccggccctcaccactgcccacaagagcctctgccgggggtgggatgccaggacaccccctcccacactcaggacagagccaaccctggctccntggaccttntggnnnaangnnggggnttnaannactnggggnnnnnnnnnnnnnnnnnnnnnnanccagncctgggaagagctcgncccnnnnnnnnnnnnnnnnnnnnnnnnnntacttctggtggctctaggtccccggatccaccnacccttcccccactgactcttcaaggacgtgccctctttgctcnnnnnnnnnnnnnnnaggtggctggactgctgggcgggggacatctcggggtttcagggtgggcagggggttagtttggggaggggggggtgcgtttcttttgcatgactgtggcctgttgctcatgactttcttt

SEQ ID NO: 2472 - DNA, 435 bp, Homo sapiens
  misc_feature (34)..(61): n includes a, c, g, or t, or contains no nucleotide
  misc_feature (118)..(118): n includes a, c, g, or t, or contains no nucleotide
  misc_feature (138)..(231): n includes a, c, g, or t, or contains no nucleotide
  misc_feature (285)..(285): n includes a, c, g, or t, or contains no nucleotide
ccagagatacctggagcgacggctgctgaaagannnnnnnnnnnnnnnnnnnnnnnnnnnncccggaggcttgggggctccgccctgggctggcttccgtctcctccagtggaggganaggtggggcccctgctgggnnnnnnnnnnnnnnnnnnnnnnnnnnnnnnnnnnnnnnnnnnnnnnnnnnnnnnnnnnnnnnnnnnnnnnnnnnnnnnnnnnnnnnnnnnnnnnggagcgccagttgcccctcgctcacagaccacacacccagccctcctgggccancccagagggcccttcagaccccagctgtctgcgcgtctgactcttgtggcctcagcaggacaggccccgggcactgcctcacagccaaggctggactgggttggctgcagtgtggtgtttagtggataccacatcggaagtgattttcta

SEQ ID NO: 2473 - DNA, 154 bp, Homo sapiens
caaggtgtcatccaagaattcacttgagtcctatgccttcaacatgaaagcaactgttgaagatgagaaacttcaaggcaagattaacgatgaggacaaacagaagattctggacaagtgtaatgaaattatcaactggcttgataagaatcag

SEQ ID NO: 2474 - DNA, 298 bp, Homo sapiens
gggaggattcctcagggttcccttgaaagctttatttatttattttgttcatttatttattggagaggcagcattgcacagtgaaagaattctggatatctcaggagccccgaaattctagctctgactttgctgtttccagtggtatgaccttggagaagtcacttatcctcttggagcctcagtttcctcatctgcagaataatgactgacttgtctaattcatagggatgtgaggttctgctgaggaaatgggtatgaatgtgccttgaacacaaagctctgtcaataagtgata

SEQ ID NO: 2475 - DNA, 59 bp, Homo sapiens
ttttcattcccgttgttatggagggccacatctgccagagcctggagtctgcgaaggcc

SEQ ID NO: 2476 - DNA, 545 bp, Homo sapiens
  misc_feature (226)..(265): n includes a, c, g, or t, or contains no nucleotide
tttctggaggtctctgaacccagggaagacaagaaggaaagattttgttgttgtttgtttatttggtttccccagtagttagctttcttccctggattcctcacttttgaagagtgtgaggaaaacctatgtttggcgcttaagctttcagctcagcttaatgaagtgtttagcatagtacctctgctatttgctgttattttatctgctatgctattgaagtttnnnnnnnnnnnnnnnnnnnnnnnnnnnnnnnnnnnnnnnntaatcttacaaagtgtcttggaattgtaggtgactattatttttccaagaaatatcccttaagatattaactgagaaggctgggggtttaatgtggaaatgatgtttcaaaaggaatcctgtgatggaaatacaactggtatcttcacttttttaggaattgggaaatattttaatgtttcttggggaatatgttagagaattcccttactcttgattgtgggatactatttaattatttcactttagaaagctgagtgtttcacaccttatctatgtag

SEQ ID NO: 2477 - DNA, 485 bp, Homo sapiens
gttagcagtcaagtttctctgctttcactgctcgctcgctctctcctgcaatgattgatgatcactccgtggatagagaggcacactgtcagaggtgaccggagaactgagttgcaaaatatattaagatctggtagaggtaccagcttcctttccagctggagaggccccaacactggatggttctgtagggagcctagggagcctggtcatcaacttgcaatacctcacagagccagttcacatcccactctgagctcccacgagaaacactgcttctccaggcccggggttgttggggagagaggcagaggcagctggagcgccgttctctcctgctgggacaccgcttgggctttggtattgactgagtggctgacagttatcttccaaccccaactggcttgggggcaggacaagggctaggcttgatggtggccaggcttgcctgctccccacctgggatgcccctgctctggacctct

SEQ ID NO: 2478 - DNA, 500 bp, Homo sapiens
  misc_feature (27)..(41): n includes a, c, g, or t, or contains no nucleotide
  misc_feature (71)..(132): n includes a, c, g, or t, or contains no nucleotide
aagtccacggagtccctgcagaccaannnnnnnnnnnnnnnggagtaccgctccaaactcatcctcttccnnnnnnnnnnnnnnnnnnnnnnnnnnnnnnnnnnnnnnnnnnnnnnnnnnnnnnnnnnnnnncagctgaccggaccggtcatgcccgtccggaacgtctataagaaggagaaagctcgagtcatcactgaggaagagaagaatttcaaagccttcgctagtctccgtatggcccgtgccaacgcccggctcttcggcatacgggcaaaaagagccaaggaagccgcagaacaggatgttgaaaagaaaaaataaagccctcctggggacttggaatcagtcgggcagtcatgctgggtctccacgtggtgtgtttcgtgggaacaactgggcctgggatggggcttcactgctgtgacttcctcctgccaggggatttggggctttcttgaaagacagtccaagccctggataatgctttactttctgtg

SEQ ID NO: 2479 - DNA, 440 bp, Homo sapiens
  misc_feature (166)..(166): n includes a, c, g, or t, or contains no nucleotide
  misc_feature (173)..(173): n includes a, c, g, or t, or contains no nucleotide
tctgggtctccagagtttgccccgcctgtgcacacctcacattccagactctagccatctcggcaggatctcctggctccttgagtgcccaggtgccaccaagaggaagggccttgtgggatacaccttgcagaatagggatcggtgtgccccgctgcgaggggcnccccatnggggctgtggcccctccgcaggcaggacatcccaacccctggctgggactgaaccacccagagcggagcggctcccttttcagccttgtgagtcacctggcaggccccagctgggctggctgtccgtgtccctcagcctggctggtgattccttgcaggccagaaatgaagagtccctgtaggttttggttttgtttgttttattttgttctttcaccttttttcctcattaaaaaaaaaaagtccctgtggagtgtacttatttat

SEQ ID NO: 2480 - DNA, 599 bp, Homo sapiens
  misc_feature (93)..(107): n includes a, c, g, or t, or contains no nucleotide
  misc_feature (295)..(295): n includes a, c, g, or t, or contains no nucleotide
  misc_feature (299)..(308): n includes a, c, g, or t, or contains no nucleotide
  misc_feature (310)..(310): n includes a, c, g, or t, or contains no nucleotide
  misc_feature (312)..(313): n includes a, c, g, or t, or contains no nucleotide
  misc_feature (315)..(349): n includes a, c, g, or t, or contains no nucleotide
  misc_feature (480)..(574): n includes a, c, g, or t, or contains no nucleotide
ccccagctggaagtgccttgttgcctctgccctttgaagtcggaacaattcctagcacctgtcggaaggtcaaggccaaaggcaaattcaagnnnnnnnnnnnnnnnacccagggctgaggcctgccccatgaagaggctgagccccctgaaacccctgccccttgttggtacattccagaggcgcaggggcctgggggatatgaagctagggaagcccctgcttcgattccccactgcccttgtcctggatccaacaccaaataaaaagaaacaagtgaagtaaaaaaaaaaanaaannnnnnnnnntngnngnnnnnnnnnnnnnnnnnnnnnnnnnnnnnnnnnnnggtccacagcaagagcctgaggccatcagcagctcctccgtgcagcgaggcccagaattcccacctaaggacagacatggggcttcctatttagggactcccccagcatctccgatccaggggtggggagnnnnnnnnnnnnnnnnnnnnnnnnnnnnnnnnnnnnnnnnnnnnnnnnnnnnnnnnnnnnnnnnnnnnnnnnnnnnnnnnnnnnnnnnnnnnnnncatattggcagaactgccgagcact

SEQ ID NO: 2481 - DNA, 534 bp, Homo sapiens
  misc_feature (72)..(108): n includes a, c, g, or t, or contains no nucleotide
  misc_feature (154)..(154): n includes a, c, g, or t, or contains no nucleotide
tcgcaaactgatggtgtttgtgctgtagctgttggaggctttgacaggaatggactggatcacctgactccnnnnnnnnnnnnnnnnnnnnnnnnnnnnnnnnnnnnntttttaaaaaacagtgtggatgatgatatgcttttgtgagcaagcnaaaagcagaaacgtgaagccgtgatacaaattggtgaacaaaaaatgcccaaggcttctcatgtctttattctgaagagctttaatatatactctatgtagtttaataagcactgtacgtagaaggccttaggtgttgcatgtctatgcttgaggaacttttccaaatgtgtgtgtctgcatgtgtgtttgtacatagaagtcatagatgcagaagtggttctgctggtacgatttgattcctgttggaatgtttaaattacactaagtgtactactttatataatcaatgaaattgctagacatgttttagcaggacttttctaggaaagacttatgtataattgctttttaaaatgcagtgctttactttaaactaag

SEQ ID NO: 2482 - DNA, 379 bp, Homo sapiens
  misc_feature (91)..(153): n includes a, c, g, or t, or contains no nucleotide
  misc_feature (282)..(282): n includes a, c, g, or t, or contains no nucleotide
  misc_feature (284)..(293): n includes a, c, g, or t, or contains no nucleotide
  misc_feature (296)..(297): n includes a, c, g, or t, or contains no nucleotide
  misc_feature (299)..(300): n includes a, c, g, or t, or contains no nucleotide
  misc_feature (304)..(304): n includes a, c, g, or t, or contains no nucleotide
  misc_feature (306)..(306): n includes a, c, g, or t, or contains no nucleotide
  misc_feature (309)..(310): n includes a, c, g, or t, or contains no nucleotide
  misc_feature (312)..(312): n includes a, c, g, or t, or contains no nucleotide
tcatgactggctttgggaaaatcatgaaaaattaagtctatcttaaactctgcagctttcaagctcatctgttatgcatagctttgcactnnnnnnnnnnnnnnnnnnnnnnnnnnnnnnnnnnnnnnnnnnnnnnnnnnnnnnnnnnnnnnnactagaagcctagtgtgtgtgctttcttaatgtgtgtgccaatggtggatctttgctactgaatgtgtttgaacatgttttgagatttttttaaaataaattattatttgacaacaatccaaaaaaaanannnnnnnnnnaannannaaananaannanaagatgaaaaatagttctaaactatcaataatacaaagcaaatttctatcagccttgctaaagctag

SEQ ID NO: 2483 - DNA, 435 bp, Homo sapiens
  misc_feature (29)..(54): n includes a, c, g, or t, or contains no nucleotide
  misc_feature (169)..(184): n includes a, c, g, or t, or contains no nucleotide
  misc_feature (394)..(395): n includes a, c, g, or t, or contains no nucleotide
aaagctgctcctaggggtgtctcaaaggnnnnnnnnnnnnnnnnnnnnnnnnnngcagagggcagggagaatagaggttaagcctttgctcattctgaattaattgattactgctttttaaaagtgctttctttctctgggaaaaaaaacattccccagtgcctaaggnnnnnnnnnnnnnnnnctgagctgtgtctggtctgctgagtgtattttccacagagcaatcctcatcttctcagggggtggggatttggacaagactcttcctgaacacgcagcgtggtggggaagggtggccatggaggttttctgttccttctgttgtcactggtgaaagacgacttggtgcccaatttctaataaacacaatgctattagcgtcactccaaannagtgtctgattgttaaatgttaatgtactgcactctacag

SEQ ID NO: 2484 - DNA, 541 bp, Homo sapiens
  misc_feature (259)..(260): n includes a, c, g, or t, or contains no nucleotide
  misc_feature (317)..(331): n includes a, c, g, or t, or contains no nucleotide
  misc_feature (428)..(430): n includes a, c, g, or t, or contains no nucleotide
  misc_feature (449)..(466): n includes a, c, g, or t, or contains no nucleotide
cccaggaggctccagttctgggctgggagctgtgacctccccaacgctcacccctcaaccccaagtcctctgcttggggagttctccaggagctccggaccctgagtcaatgttgggaggaagggtacctggtgtccccagtcaagcccatgaagcccatgcggcctgctacatggggtggggtcgtagggaggctgtttgcctccacgtctaggaaggcctgtgagaggagcagtcaggacttccggacaacttagcnnggccctacttgggcccaagtttcagaatagtgttcccctatcaaggctgtgactagnnnnnnnnnnnnnnnattccctgtcccctgcccactaccttcaggccatttagagttgtaaatttacaaagatccacggtgggctccagctgccaagccacccaagggagtnnnggccctaggcctagccccnnnnnnnnnnnnnnnnnnccaagacactgcctaaggtgtgggagggactggctgagattgcagcccatggtaggagctggaccaactgtatat

SEQ ID NO: 2485 - DNA, 541 bp, Homo sapiens
  misc_feature (123)..(134): n includes a, c, g, or t, or contains no nucleotide
  misc_feature (202)..(202): n includes a, c, g, or t, or contains no nucleotide
  misc_feature (205)..(205): n includes a, c, g, or t, or contains no nucleotide
  misc_feature (211)..(211): n includes a, c, g, or t, or contains no nucleotide
  misc_feature (426)..(441): n includes a, c, g, or t, or contains no nucleotide
  misc_feature (470)..(470): n includes a, c, g, or t, or contains no nucleotide
  misc_feature (480)..(480): n includes a, c, g, or t, or contains no nucleotide
  misc_feature (513)..(513): n includes a, c, g, or t, or contains no nucleotide
tctggccagaggttaaagagcaggctgacatggctggccattaagctttataaaatcatgtgggctctgaaattgttcttttatgtgtctagcaagtatttaataaacccttgtatagtaaannnnnnnnnnnngggtgctggtagctccagaattttgtgaccactattgtgggtaaaatgtctctgcatcacttgttaangcnactggnctaacttcattcagtatgcttcattcaccgaactttgtgctcaaaatgcgtatataccattttatgttgtattcctccatttcacttgcaaaacagaagtaaataagagttcgggacccagggtaaaatggtagcttcatccaatatatcattcaaatgcatctgatttctaaaacatattacattttatgctgatcttcagttcataattcttnnnnnnnnnnnnnnnnttccaactgcaataaaatactgggtagantcaaatgggnaaggggttgggtggggcaatacccatgagttgntagtgataagctcctaaggatttttaac

SEQ ID NO: 2486 - DNA, 363 bp, Homo sapiens
  misc_feature (30)..(30): n includes a, c, g, or t, or contains no nucleotide
  misc_feature (34)..(36): n includes a, c, g, or t, or contains no nucleotide
  misc_feature (105)..(198): n includes a, c, g, or t, or contains no nucleotide
tggtatgatgccagcaccccatatgggggncccnnncccatgatgccaatgatgggccctcctcctcctgggatgatgccagtgggacctgctcctggaatgagnnnnnnnnnnnnnnnnnnnnnnnnnnnnnnnnnnnnnnnnnnnnnnnnnnnnnnnnnnnnnnnnnnnnnnnnnnnnnnnnnnnnnnnnnnnnnncggcccggaatgactcgaccagacagataaggatagaggggaggccttattgtatcggttttatattacctgttctgcttcaccaggagatcatgctgctgtgatactgagttttctaaacagcataaggaagacttgctcccctgtcctatgaaagagaatagt

SEQ ID NO: 2487 - DNA, 204 bp, Homo sapiens
atttgccagaggtcttgatcctgaaagaataattggtgccacagacagcagtggagaattgatgtttctcatgaaatggaaagattcagatgaggcagacttggtgctggcgaaagaggcaaatatgaagtgtcctcaaattgtaattgctttttatgaagagagactaacttggcattcttgtccagaagatgaagctcaata

SEQ ID NO: 2488 - DNA, 535 bp, Homo sapiens
  misc_feature (106)..(106): n includes a, c, g, or t, or contains no nucleotide
  misc_feature (108)..(108): n includes a, c, g, or t, or contains no nucleotide
  misc_feature (110)..(111): n includes a, c, g, or t, or contains no nucleotide
  misc_feature (113)..(113): n includes a, c, g, or t, or contains no nucleotide
  misc_feature (116)..(116): n includes a, c, g, or t, or contains no nucleotide
  misc_feature (119)..(143): n includes a, c, g, or t, or contains no nucleotide
  misc_feature (232)..(246): n includes a, c, g, or t, or contains no nucleotide
  misc_feature (417)..(438): n includes a, c, g, or t, or contains no nucleotide
  misc_feature (482)..(482): n includes a, c, g, or t, or contains no nucleotide
tctgccaccttccttcagggaggacccgccctctgcagactgggcttagcgtgagcaggcacttcccatgtacgtgccaagggtaagctggcctgctgagcccagngngnnanagnggnnnnnnnnnnnnnnnnnnnnnnnnnccatcagggccgccaagcaggtcaggggctgggggctgggggctgggctgctggctttgctttctctgggtcttcaattagaatgtggnnnnnnnnnnnnnnnttgtgtttaaatgctgtacttactacaagaaggatcttttttcaagctgtacatttataaaaacagatcatatactgtatatataaaaatcttgagatggtagaaacatgtatgaatgtactaagtagtattccactgtactcattcataaggtaggttttcttacaaaannnnnnnnnnnnnnnnnnnnnngtgctctgcttttttccaactacggagtgtcactgctttctagntcagtccctgcagactcttctcaactctttccctataggaaacttactccgcg

SEQ ID NO: 2489 - DNA, 410 bp, Homo sapiens
  misc_feature (88)..(89): n includes a, c, g, or t, or contains no nucleotide
  misc_feature (95)..(95): n includes a, c, g, or t, or contains no nucleotide
  misc_feature (153)..(153): n includes a, c, g, or t, or contains no nucleotide
  misc_feature (180)..(180): n includes a, c, g, or t, or contains no nucleotide
  misc_feature (184)..(184): n includes a, c, g, or t, or contains no nucleotide
  misc_feature (194)..(194): n includes a, c, g, or t, or contains no nucleotide
  misc_feature (221)..(221): n includes a, c, g, or t, or contains no nucleotide
  misc_feature (308)..(308): n includes a, c, g, or t, or contains no nucleotide
  misc_feature (375)..(383): n includes a, c, g, or t, or contains no nucleotide
ccttcctgaggtgtccttgggccacccccaagtgttgggccatctgccaagagacagcgacccaaagccgaaggacaggtggcctggnnagatcncgcccaggtctgggagccccaggctggcctcagactgtggttttttatgtggccaccngagggcgccccaagccagttcatctcngagnccaggcctgnccctgggagacagggtgaagggagtgntttttatgaacttaacttagagtctaaaagatttctactggatcacttgtcaagatgcgccctctctggggagaagggaacgtgacnggattccctcactgttgtatcttgaataaacgctgctgcttcatcctgaaaaaaaaaaaaaaaaaannnnnnnnnggtggggcctcttccatttccctgact

SEQ ID NO: 2490 - DNA, 345 bp, Homo sapiens
agcggaaaatcatcccattcctagtcttcttcctcaaaatctggtgaccaagatgagacaaaaggcttcctttcgcgatactagagcctctgtaaacttctcctgcccagcccccagctgagcatccccagatgggcagactcccgatgaagcctgcttattggatcctgacatcaggaatagctggcaacaagcccctgtgcccgtttgggactgaactgacttggcatatgtgctctggctttccattggcttccaaccctgcttggctttggatgccttcagggttcccgagacagacctctttcctctctctggcctgggagctctcacaccctgcacgat

SEQ ID NO: 2491 - DNA, 536 bp, Homo sapiens
  misc_feature (414)..(415): n includes a, c, g, or t, or contains no nucleotide
  misc_feature (427)..(428): n includes a, c, g, or t, or contains no nucleotide
  misc_feature (432)..(436): n includes a, c, g, or t, or contains no nucleotide
attttggtcatagcattcacttttgctattccaatctacaactggaagatacataaaagtgctttgcattgaatttgggataacttcaaaaatcccatggttgttgttagggatagtactaagcatttcagttccaggagaataaaagaaattcctatttgaaatgaattcctcatttggaggaaaaaaagcatgcattctagcacaacaagatgaaattatggaatacaaaagtggctccttcccatgtgcagtccctgtccccccccgccagtcctccacacccaaactgtttctgattggcttttagctttttgttgtttttttttttccttctaacacttgtatttggaggctcttctgtgattttgagaagtatactcttgagtgtttaataaagtttttttccaaaannaaaaaaaaaaannaaannnnnaggtggcgatttgcccccacacccaactccgagggcccacgctggggaaagcgggaagcgctcgctccctttcccccattagtgctctctctgcctggat

SEQ ID NO: 2492 - DNA, 132 bp, Homo sapiens
aatgtcaagaaattctgctgttacgacaaagaaacattttacgctagattaaaatatcctttcatcaatgggattttctagtttcctgccttcagagtatctaatcctttaatgatctggtggtctcctcgt

SEQ ID NO: 2493 - DNA, 429 bp, Homo sapiens
  misc_feature (62)..(62): n includes a, c, g, or t, or contains no nucleotide
  misc_feature (84)..(84): n includes a, c, g, or t, or contains no nucleotide
cccctatagccaccttttgggaatgttttaaattctccagttttttgttatatagggatcanccagctaagaaaagattttaantcaagttgaattgaggggattaatatgaaaacttatgacctcttcctttaggagggagttatctaaaagaaatgtctattaaggtgatatatttaaaaatatttttgggtgttcctggcagtttaaaaaaattggttggagaatttaggtttttattagtaccatagtaccatttatacaaattagaaaatgttatttaacagctgaattatctatacatatctttattaatcactattgttccagcagttttcaagtcaaattaataatcttattagggagaaaattcaattgtaaattgaatcagtataaacaaagttactaggtaacttcatattgctgaga

SEQ ID NO: 2494 - DNA, 240 bp, Homo sapiens
gttcttgtactgcattttgatcagttgagcttttaaaatattatttatagacaatagaagtatttctgaacatatcaaatataaatttttttaaagatctaactgtgaaaacatacatacctgtacatatttagatataagctgctatatgttgaatggacccttttgcttttctgatttttagttctgacatgtatatattgcttcagtagagccacaatatgtatctttgctgtaaag

SEQ ID NO: 2495 - DNA, 490 bp, Homo sapiens
tctgcatttccgtggtggcatccatgtgcagcttactggccattgcagtggataggtacgtcaccatcttctacgccctggcctaccaccacatcatgacggcgaggcgctcaggggccatcatcgccggcatctgggctttctgcacgggctgcggcattgtcttcatcctgtactcagaatccacctacgtcatcctgtgcctcatctccatgttcttcgctatgctgttcctcctggtgtctctgtacatacacatgttcctcctggcgcggactcacgtcaagcggatcgcggctctgcccggggccagctctgcgcggcagaggaccagcatgcagggcgcggtcaccgtcaccatgctgctgggcgtgtttaccgtgtgctgggccccgttcttccttcatctcactttaatgctttcttgccctcagaacctctactgctctcgcttcatgtctcacttcaatatgtacctcatactcatcat

SEQ ID NO: 2496 - DNA, 453 bp, Homo sapiens
  misc_feature (28)..(29): n includes a, c, g, or t, or contains no nucleotide
  misc_feature (85)..(85): n includes a, c, g, or t, or contains no nucleotide
  misc_feature (104)..(155): n includes a, c, g, or t, or contains no nucleotide
  misc_feature (187)..(204): n includes a, c, g, or t, or contains no nucleotide
  misc_feature (281)..(296): n includes a, c, g, or t, or contains no nucleotide
  misc_feature (335)..(335): n includes a, c, g, or t, or contains no nucleotide
  misc_feature (359)..(359): n includes a, c, g, or t, or contains no nucleotide
  misc_feature (361)..(362): n includes a, c, g, or t, or contains no nucleotide
agctccttaagtcaccagtcctgcattnnggtgcagagattccgttttaaaaattcgaagcatcgctttggttcgctctttgttngcgggcgcgggttctcgcnnnnnnnnnnnnnnnnnnnnnnnnnnnnnnnnnnnnnnnnnnnnnnnnnnnncttgacgcactcgctcgctccccggtcgctcnnnnnnnnnnnnnnnnnnttcttctgcttgagggacttcctgcgtttcaggatcatctcatagagcttgtccatgccctcggtgaggccctcgcnnnnnnnnnnnnnnnncggctggacgtgataggtggtggccgggataagctcgtncagcgccagctgcttctcaatctntnncaccggcagcgacttgggcaggtcctgcttgttggcgatgaccagcagcggcgtgccctggttctcggcgaacttggtcaccttgtgcagc

SEQ ID NO: 2497 - DNA, 589 bp, Homo sapiens
  misc_feature (192)..(207): n includes a, c, g, or t, or contains no nucleotide
  misc_feature (280)..(280): n includes a, c, g, or t, or contains no nucleotide
  misc_feature (385)..(403): n includes a, c, g, or t, or contains no nucleotide
  misc_feature (536)..(537): n includes a, c, g, or t, or contains no nucleotide
  misc_feature (539)..(550): n includes a, c, g, or t, or contains no nucleotide
accaactggttcagcgggcacctcaacttccagatcgagcaccacctcttccccaggatgccgagacacaactacagccgggtggccccgctggtcaagtcgctgtgtgccaagcacggcctcagctacgaagtgaagcccttcctcaccgcgctggtggacatcgtcaggtccctgaagaagtctggtgannnnnnnnnnnnnnnntacctccatcagtgaaggcaacacccaggcgggcagagaagggctcagggcaccagcaaccaagccagccccnggcgggatcgatacccccacccctccactggccagcctgggggtgccctgcctgccctcctggtactgttgtcttcccctcggccccctcacatgtgtattcagnnnnnnnnnnnnnnnnnnnctgggcctgatgggacaggggtagagggaaggtgagcatagcacattttcctagagcgagaattgggggaaagctgttatttttatattaaaatacattcagatgtaaaaaaaaaaaaaaaaaaaaaaaaaannannnnnnnnnnnngggaaatattggagggtcatccattccacattaaaagag

SEQ ID NO: 2498 - DNA, 373 bp, Homo sapiens
  misc_feature (105)..(128): n includes a, c, g, or t, or contains no nucleotide
cctgcaatgagtaggcctggctggtcactttgaagattcattctcagaaatgaacctgacccaggggatcaacctgagaaaaattgctgagcttatgccaggagnnnnnnnnnnnnnnnnnnnnnnnntgcacagaaaccggcatgtatgccctgagtagcgagtccatgtcactcagaaggactttgaggtagtccaaagtcctatctcatgccaaaggacagtgaggaaaaacatgtccatcaagaaactatggaattgagggcacatcctttgtgtgtatccctacaataaaactcagtgggacaagcaaaaaaaaaaaaaaaaaaaaaagttttggggagggatgatctgctagtgtataatcaataac

SEQ ID NO: 2499 - DNA, 489 bp, Homo sapiens
  misc_feature (401)..(462): n includes a, c, g, or t, or contains no nucleotide
cccagtctcattgcttagtagaataaatcctgcaccagcaacaacacttgtaaatttgtgaaaatgaattttatctttccttaaaaaagaaattttttaatccatcacacttttcttccctaccctttagtttttgataaatgataaaaatgagccagttatcaaagaagaactagttcttacttcaaaagaaaaataaacataaaaaataagttgctggttcctaacaggaaaaattttaataattgtactgagagaaactgcttacgtacacattgcagatcaaatatttggagttaaaatgttagtctacatagatgggtgattgtaactttattgccattaaaagatttcaaattgcattcatgcttctgtgtacacataatgaaaaatgggcaaannnnnnnnnnnnnnnnnnnnnnnnnnnnnnnnnnnnnnnnnnnnnnnnnnnnnnnnnnnnnngcgtccctaattgtacacagtttagtg

SEQ ID NO: 2500 - DNA, 439 bp, Homo sapiens
ttcccagagttgtgacagccaatcggatgctgaagcagatgcttttcaggtatcaaggttacattggtgcagccctagttttagggggagtagatgttactggacctcacctctacagcatctatcctcatggatcaactgataagttgccttatgtcaccatgggttctggctccttggcagcaatggctgtatttgaagataagtttaggccagacatggaggaggaggaagccaagaatctggtgagcgaagccatcgcagctggcatcttcaacgacctgggctccggaagcaacattgacctctgcgtcatcagcaagaacaagctggattttctccgcccatacacagtgcccaacaagaaggggaccaggcttggccggtacaggtgtgagaaagggactactgcagtcctcactgagaaaatcactcctct

SEQ ID NO: 2501 - DNA, 555 bp, Homo sapiens
  misc_feature (27)..(28): n includes a, c, g, or t, or contains no nucleotide
  misc_feature (72)..(72): n includes a, c, g, or t, or contains no nucleotide
  misc_feature (81)..(81): n includes a, c, g, or t, or contains no nucleotide
  misc_feature (87)..(87): n includes a, c, g, or t, or contains no nucleotide
  misc_feature (89)..(90): n includes a, c, g, or t, or contains no nucleotide
  misc_feature (111)..(111): n includes a, c, g, or t, or contains no nucleotide
  misc_feature (116)..(116): n includes a, c, g, or t, or contains no nucleotide
  misc_feature (206)..(206): n includes a, c, g, or t, or contains no nucleotide
  misc_feature (208)..(208): n includes a, c, g, or t, or contains no nucleotide
  misc_feature (211)..(211): n includes a, c, g, or t, or contains no nucleotide
  misc_feature (216)..(216): n includes a, c, g, or t, or contains no nucleotide
  misc_feature (222)..(222): n includes a, c, g, or t, or contains no nucleotide
  misc_feature (234)..(235): n includes a, c, g, or t, or contains no nucleotide
  misc_feature (240)..(240): n includes a, c, g, or t, or contains no nucleotide
  misc_feature (247)..(247): n includes a, c, g, or t, or contains no nucleotide
  misc_feature (249)..(249): n includes a, c, g, or t, or contains no nucleotide
  misc_feature (301)..(301): n includes a, c, g, or t, or contains no nucleotide
  misc_feature (333)..(333): n includes a, c, g, or t, or contains no nucleotide
  misc_feature (340)..(340): n includes a, c, g, or t, or contains no nucleotide
  misc_feature (351)..(351): n includes a, c, g, or t, or contains no nucleotide
  misc_feature (407)..(407): n includes a, c, g, or t, or contains no nucleotide
  misc_feature (410)..(410): n includes a, c, g, or t, or contains no nucleotide
  misc_feature (436)..(473): n includes a, c, g, or t, or contains no nucleotide
  misc_feature (506)..(526): n includes a, c, g, or t, or contains no nucleotide
cccgctgctctatgcctttgtaggggnntcaagttccgggagcggatgtggatgctgctcttgcgcctgggnctgccccanccagananngggctccagaggcagccatcntcttncccgccgggattcatcctggtctgagacctcagaggcctcctactcgggcttgtgaggccggaatccgggctcccctttcgcccacagtntnacntcccngcattncaggctcctccnnccctntgccggntntggctctccccaatatcctcgctcccgggactcactggcagccccagcaccnccaggtctcccgggaagccaccctcccagctntgaggantgcaccattgntgctccttagctgccaagccccatcctgccgcccgaggtggctgcctggagccccnacngcccttctcatttggaaactaaaacnnnnnnnnnnnnnnnnnnnnnnnnnnnnnnnnnnnnnntagagggtgctgccccatgaagccacagcccannnnnnnnnnnnnnnnnnnnntgtggccatggtccccaagacctctatat

SEQ ID NO: 2502 - DNA, 481 bp, Homo sapiens
  misc_feature (378)..(378): n includes a, c, g, or t, or contains no nucleotide
gtgcttcatggtggagctgtcatctggtccttggtattacaggatgtggttgatgaaggtttccaatatggtttcaggccaaaaccagggaagattctagcttcagcctcatgtcattccagtctgtcagcattagacatggtcactgttcaagtttcaagacatccattcttaactatagagaagagttactcccctggcgtcttaacctatggaaaacatgcacggataggatatatttgattgcctcctcttccctttcagtatatgtattattaatattattattattattattattattagttcatcagtttgctgttctctgcagtgagcagaatcaaatgggcaatatttgtcctgggagacctgtgccgnacccaggtccccgtgttaacgtgtgcctgcggttgtggttggcaccctcgggtggtagctcttctactgtaatgagacaagcctttcttctgtcactgcagaa

SEQ ID NO: 2503 - DNA, 559 bp, Homo sapiens
gaaccctgaagagcaggatgaaggctggctcatgggcgtgaaggagagcgactggaaccagcacaaggagctggagaagtgccgtggcgtcttccccgagaacttcactgagagggtcccatgacggcggggcccaggcagcctccgggcgtgtgaagaacacctcctcccgaaaaatgtgtggttcttttttttgttttgttttcgtttttcatcttttgaagagcaaagggaaatcaagaggagacccccaggcagaggggcgttctcccaaagtttaggtcgttttccaaagagccgcgtcccggcaagtccggcggaattcaccagtgttcctgaagctgctgtgtcctctagttgagtttctggcgcccctgcctgtgcccgcatgtgtgcctggccgcagggcggggctgggggctgccgagccaccatacttaactgaagcttcggccgcaccacccggggaagggtcctcttttcctggcagctgctgtgggtggggcccagacaccagcctagcctgctctgccccgcagacggtctgtgtgctgtttga

SEQ ID NO: 2504 - DNA, 127 bp, Homo sapiens
tttccttgcctatgagctggaacataacacatgcctatgatccagctttggtcatacccaaggggaaggtggagcaagaaatgaaaaggaacctgaatccctgaatgactgcatggatagaaccact

SEQ ID NO: 2505 - DNA, 533 bp, Homo sapiens
  misc_feature (69)..(69): n includes a, c, g, or t, or contains no nucleotide
cctcagtgctgtgtgatggccagtggcaccggctagcggtgatgaaaagcgggaatgtgctccggctgnaggtggacgcgcagagcaaccacaccgtgggccccttgctggcggctgcagctggtgccccagcccctctgtacctcgggggcctgcctgagcccatggccgtgcagccctggccccccgcctactgcggctgcatgaggaggctggcggtgaaccggtcccccgtcgccatgactcgctctgtggaggtccacggggcagtgggggccagtggctgcccagccgcctaggacacagccaaccccggcccctggtcaggcccctgcagctgcctcacaccgccccttgtgctcgcctcataggtgtctatttggactctaagctctacgggtgacagatcttgtttctgaagatggtttaagttatagcttcttaaacgaaagaataaaatactgcaaaatgtttttatatttggcccttccacccatttttaattgtgagagatttgtcaccaatcatcactg

SEQ ID NO: 2506 - DNA, 453 bp, Homo sapiens
  misc_feature (232)..(232): n includes a, c, g, or t, or contains no nucleotide
cccgttggagtgagagcctcttggaggtggttcagacccggcctatcctcatctccctgtggatcctcataggcagtgtcctgggagggttgctcctgcttgctctccttgtcttctgcctgtggaagcttggcttctttgcccataagaaaatccctgaggaagaaaaaagagaagagaagttggagcaatgaatgtagaataagggtctagaaagtcctccctggcagcnttcttcaagagacttgcataaaagcagaggtttgggggctcagatgggacaagaagccgcctctggactatctccccagaccagcagcctgacttgacttttgagtcctagggatgctgctggctagagatgaggctttacctcagacaagaagagctggcaccaaaactagccatgctcccaccctctgcttccctcctcctcgtgatcctggttccata

SEQ ID NO: 2507 - DNA, 538 bp, Homo sapiens
agttaatggggttgcctcccagcttcttataagactcacagtataactaaacatgatatatcagcttttgcctttcaatttatcaatctcttaaagagaatccaactttattacgattagtatatgatcaaacttccatatttgccttgggaataatggacaaagggaaatactcttaattcatgaataaaaactttgcagaaaattagacagtgtttaattttcgaaaacttccctctctagacagtagataccacctactgatggttacatatactagggaaattttaaaattaggaaatgctgatagctcatattataaatttctaaatcctaggaagaaacgcttggagtgcttctgaatatacagaagttccatttaagggcaagtttccccgtagatgtatcaaaatactaccaactgtaaattgagatttaattcccaaatgtattctacttgttctaaaacaatctgtccacaaatataaaactataagtaataaattgttattttcgcacaatgggaatctctaatgtg

SEQ ID NO: 2508 - DNA, 464 bp, Homo sapiens
  misc_feature (345)..(347): n includes a, c, g, or t, or contains no nucleotide
  misc_feature (349)..(353): n includes a, c, g, or t, or contains no nucleotide
  misc_feature (356)..(358): n includes a, c, g, or t, or contains no nucleotide
  misc_feature (360)..(363): n includes a, c, g, or t, or contains no nucleotide
  misc_feature (365)..(365): n includes a, c, g, or t, or contains no nucleotide
  misc_feature (368)..(369): n includes a, c, g, or t, or contains no nucleotide
  misc_feature (371)..(371): n includes a, c, g, or t, or contains no nucleotide
  misc_feature (373)..(378): n includes a, c, g, or t, or contains no nucleotide
  misc_feature (381)..(388): n includes a, c, g, or t, or contains no nucleotide
  misc_feature (391)..(392): n includes a, c, g, or t, or contains no nucleotide
  misc_feature (394)..(394): n includes a, c, g, or t, or contains no nucleotide
cctgtttcctttggatattcagttctctcaacctcaagattgagacggtggtgggtatgcttctccacttccatatgaccttcatgctgttctggaatatcacatgctacgaggtcatccttcacactacttgtaagccaagcaaatgatactgtagattgtactgcctttatctgcactgcttggaccctgtttattcccagggcctctgaactggttgctgtcacttggatttctagctttgggagcctgttccacctactcagctctgcattgagcagtatgggcacatgccctgtggacagttactggacgttaatgaactcagaggagaaaagcagtgannnannnnntcnnngnnnntnatnntncnnnnnngcnnnnnnnncanntngaagtggagaagcatacccaccaccgtctcaatcttgaggttgagagaactgaatatccaaagggaacag

SEQ ID NO: 2509 - DNA, 493 bp, Homo sapiens
aggtgcttgtggacaaggctccacaagcgttgagccttggaaaggtagacaagcgttgagccactaagcagaggaccttgggttcccaatacaaaaatacctactgctgagagggctgctgaccatttggtcaggattcctgttgcctttatatccaaaataaactcccctttcttgaggttgtctgagtcttgggtctatgccttgaaaaaagctgaattattggacagtctcacctcctgccatagggtcctgaatgtttcagaccacaaggggctccacacctttgctgtgtgttctggggcaacctactaatcctctctgcaagtcggtctccttatccccccaaatggaaattgtatttgccttctccactttgggaggctcccacttcttgggagggttacattttttaagtcttaatcatttgtgacatatgtatctatacatccgtatcttttaatgatccgtgtgtaccatctttgtgattatt

SEQ ID NO: 2510 - DNA, 524 bp, Homo sapiens
gatttctaattaatcaccgctggccattacacaggttttgttgtttggggtggggagggggcttttgttcccttttgacataatatagtcaatgcactaacaattatgtatattcaaacttgattattttaaattcgatcttcagctgtactgtaaatagggtactgcattgtagtctccatatctgtattacttttctgtaatatttaagagttgcttaaaagcatacaaaatgtactgttactaaaacagctaattatttctctctccccctttgacaggaaggggcttcagttgttcctccatggctagaaccataataaacaatgtacccgtaatttgtaacataaagtattgcaatatgttagtaacaatcttgcagccttcctttccaaagttcattttattttgatcagttcagtatattgcactaattattttaggtattttcattatatgaaagctaccatgtgtcagagatgatttaatctatttaagtgttggactgctaggagaacttgtac

SEQ ID NO: 2511 - DNA, 146 bp, Homo sapiens
  misc_feature (35)..(59): n includes a, c, g, or t, or contains no nucleotide
tgactttcccattcagtgcgtaccatcccagctcnnnnnnnnnnnnnnnnnnnnnnnnngcaggccagcataggggaggggctgggtttatagtgccctctggatttaagctcacccgaggatggatgagcacatggccctgggtc

SEQ ID NO: 2512 - DNA, 353 bp, Homo sapiens
  misc_feature (26)..(26): n includes a, c, g, or t, or contains no nucleotide
  misc_feature (39)..(54): n includes a, c, g, or t, or contains no nucleotide
  misc_feature (159)..(180): n includes a, c, g, or t, or contains no nucleotide
  misc_feature (291)..(316): n includes a, c, g, or t, or contains no nucleotide
tgtgaagggtttgggtctgagctgtntagtatgtcaaannnnnnnnnnnnnnnncccctcaccctctgatagatattcctttaatgcaccagacttcatgtttgataaatgattaatggttgaaattgtttctcttcttttgtgttttcccagttaatnnnnnnnnnnnnnnnnnnnnnngttttatactttcagctttttgtaacttaactataattacttaattttatttttttaaagcttgttgtggtctaatgagaagtatttttcagtgcataatgtttttctgannnnnnnnnnnnnnnnnnnnnnnnnngtttggttttgttgaacagaaaccaaaataaatttca

SEQ ID NO: 2513 - DNA, 566 bp, Homo sapiens
  misc_feature (230)..(230): n includes a, c, g, or t, or contains no nucleotide
  misc_feature (234)..(234): n includes a, c, g, or t, or contains no nucleotide
  misc_feature (237)..(246): n includes a, c, g, or t, or contains no nucleotide
  misc_feature (312)..(326): n includes a, c, g, or t, or contains no nucleotide
tgatgcattctcctgctgttgcttctcagtgctctctttccaatatagatgtggtcatgtttgacttgtacagaatgttaatcatacagagaatccttgatggaattatatatgtgtgttttacttttgaatgttacaaaaggaaataactttaaaactattctcaagagaaaatattcaaagcatgaaatatgttgctttttccagaatacaaacagtatactcatganaaanaannnnnnnnnnatttttgcatatttattgaactgtctaattgaatacagcttgctcttgtcacctcttcaagctttnnnnnnnnnnnnnnnaagcttctttgtggcttacactggaaattatgaaagcagtttttctcctaagacttttggtttctcgcattgcctctcagactaagcactaaaaagcaaagcaaaacagaactagttctgtcttaatgaaatatatcaacccaaaagtgtaatgaggaaaatgcttcattagtttcccctagcagacttttacttctcttacactgctacaccattactttcttgagacatttgtaagtc

SEQ ID NO: 2514 - DNA, 531 bp, Homo sapiens
ctttagctgcttgatcattaagccatccaacttcatgccagttcccttctttatagaagagtgaagggaaagacttcctgggtttgacttaaaccttgtccacctcttgatattttaggattgaggaataagtcattaatctaaggactgattacagtggctggagcttgggcacttgtcttatcactggtcactgagtctgaaagtcccagctgaattcttgcccttaagtgcttttgctgctatttttttgcccccagttccacaagatccaaccaagaattctgtatcctgggacagtcagattcttctaaatcaggccaggaaggaggggaaaagagtgagagaatggtattcccagatacttcttcctcctgccccttttcccagcagctctgagaccagatgttggctgctgtacttactccctgaggtagggaatgtgtggtgatcgagtggtctgtgttcctattgctggtggggtgatagggtgggctaaaaaccatgcactctggaatttgttgtattttc

SEQ ID NO: 2515 - DNA, 475 bp, Homo sapiens
  misc_feature (32)..(32): n includes a, c, g, or t, or contains no nucleotide
  misc_feature (64)..(64): n includes a, c, g, or t, or contains no nucleotide
  misc_feature (112)..(112): n includes a, c, g, or t, or contains no nucleotide
  misc_feature (132)..(132): n includes a, c, g, or t, or contains no nucleotide
  misc_feature (136)..(136): n includes a, c, g, or t, or contains no nucleotide
  misc_feature (138)..(140): n includes a, c, g, or t, or contains no nucleotide
  misc_feature (142)..(144): n includes a, c, g, or t, or contains no nucleotide
  misc_feature (147)..(147): n includes a, c, g, or t, or contains no nucleotide
  misc_feature (150)..(152): n includes a, c, g, or t, or contains no nucleotide
  misc_feature (154)..(157): n includes a, c, g, or t, or contains no nucleotide
  misc_feature (182)..(197): n includes a, c, g, or t, or contains no nucleotide
tgggatctgccaacacacgtccactcccaagnccactagcccactccccagttggcccttctgncccttaccccacacacagtccaactcttccacctctggggaagatggnagcaggtctttgggaagctncccncnnncnnnccnctnnncnnnncttaacactaagtgagagttggggnnnnnnnnnnnnnnnntttttggccccccgaggctaaccctgatccatagtgctacctgcacctctggattctggattcacagaccaagtccaagcccgttcttacgtcgccataaaggcccccgaacggcattctcggtacttctgtttgtttttgtacattttattagaaaggactgtaaaatagccacttagacactttacctcttcagtatgcaaatgtaaataaattgtaatataggaaatcttttgttttaatataagaatgagcctgtccaatttctgctgtacatt

SEQ ID NO: 2516 - DNA, 58 bp, Homo sapiens
tctcatacacctctgagattggtgtggagacgctgaccatgctgtgttgttacggaaa

SEQ ID NO: 2517 - DNA, 440 bp, Homo sapiens
  misc_feature (265)..(265): n includes a, c, g, or t, or contains no nucleotide
  misc_feature (267)..(321): n includes a, c, g, or t, or contains no nucleotide
  misc_feature (324)..(329): n includes a, c, g, or t, or contains no nucleotide
  misc_feature (331)..(335): n includes a, c, g, or t, or contains no nucleotide
  misc_feature (337)..(338): n includes a, c, g, or t, or contains no nucleotide
  misc_feature (340)..(342): n includes a, c, g, or t, or contains no nucleotide
  misc_feature (344)..(344): n includes a, c, g, or t, or contains no nucleotide
  misc_feature (346)..(346): n includes a, c, g, or t, or contains no nucleotide
  misc_feature (349)..(349): n includes a, c, g, or t, or contains no nucleotide
  misc_feature (352)..(354): n includes a, c, g, or t, or contains no nucleotide
  misc_feature (356)..(357): n includes a, c, g, or t, or contains no nucleotide
  misc_feature (359)..(359): n includes a, c, g, or t, or contains no nucleotide
  misc_feature (361)..(361): n includes a, c, g, or t, or contains no nucleotide
ggatgtctcttcagtttatgacacaatagcttcctgggcaacaaatctcaagtcctccatcagaaaggctaataaggccctctggctctctattgcattcattgtactgtttgcagctttgatgagcttcctcacaggccaattattccagaagtctgtggatgccgctcccacacagcaagaggactcatggacgtctctagaacatatcttgtggccatttaccagactccgacacaatgggccaccaccagtgtgacagcangnnnnnnnnnnnnnnnnnnnnnnnnnnnnnnnnnnnnnnnnnnnnnnnnnnnnnnntannnnnntnnnnntnngnnngnanagnatnnnannanancagaggttctcagaatgactgtaagatagcttacatttcctctttttgcctttatctccccaactaaaatacaatgggg

SEQ ID NO: 2518 - DNA, 90 bp, Homo sapiens
agtgaatgctctcaaaaacctgcaagttaaaggtgcacagatagaagccaaattctatgaggaagttcacgatcttgaaaggaagtatgc

SEQ ID NO: 2519 - DNA, 473 bp, Homo sapiens
  misc_feature (241)..(241): n includes a, c, g, or t, or contains no nucleotide
  misc_feature (341)..(341): n includes a, c, g, or t, or contains no nucleotide
  misc_feature (384)..(385): n includes a, c, g, or t, or contains no nucleotide
  misc_feature (417)..(417): n includes a, c, g, or t, or contains no nucleotide
  misc_feature (420)..(420): n includes a, c, g, or t, or contains no nucleotide
  misc_feature (427)..(427): n includes a, c, g, or t, or contains no nucleotide
  misc_feature (430)..(430): n includes a, c, g, or t, or contains no nucleotide
gcactttagtgattgcttttattacattagttaagatgtcttgagagaccatctcctatcttttatttcattcatatcctccgccctttttgtcctagagtgagagtttggaaggtgtccaaatttaatgtagacattatcttttggctctgaagaagcaaacatgactagagacgcaccttgctgcagtgtccagaagcggcctgtgcgttcccttcagtactgcagcgccacccagtgnaaggacactcttggctcgtttgggctcaaggcaccgcagcctgtcagccaacattgccttgcatttgtaccttattgatctttgcccatggaagtctcanagatctttcgttggttgtttctctgagctttgttactgaaatnngcctcgtggggagcatcagagaaggccaggangantggtgtnttnccctagactctgtaaccacctctctgtctttgtccttcctgag

SEQ ID NO: 2520 - DNA, 487 bp, Homo sapiens
  misc_feature (116)..(116): n includes a, c, g, or t, or contains no nucleotide
  misc_feature (190)..(191): n includes a, c, g, or t, or contains no nucleotide
atgtcaacagcaagggctgtgtggagtacgagcccaacttcagccaggaggtgcagaggggactccaagaccgtggccagaaccagacccagaggcccttcttcctgaacgtggtnccaggctgtgtcccaggagggggcctgtgtgtacgccgtctcggacctgaggaagagtggggaggccgcaggcnnactaagacactgctctgcccagagctgaagtctggccccaccatgagtcctgtgtccaggccggacatggctgggggaccaactactctggcaggatctggacccctggcaggggagtccagctgagagtggaagaggtggcggggaccagctgggcagatgagaggctgagcctcatccctaaccccctttcccagagcccctggtggtcctgaaccggcccctctatccctccgcaggcctcttgcctggggccactctcccaccctctcgatctgtatatcctccagtccaag

SEQ ID NO: 2521 - DNA, 569 bp, Homo sapiens
  misc_feature (31)..(67): n includes a, c, g, or t, or contains no nucleotide
  misc_feature (174)..(180): n includes a, c, g, or t, or contains no nucleotide
  misc_feature (199)..(210): n includes a, c, g, or t, or contains no nucleotide
  misc_feature (212)..(212): n includes a, c, g, or t, or contains no nucleotide
  misc_feature (293)..(438): n includes a, c, g, or t, or contains no nucleotide
cgagtggttggtctgaagtccttgcaagacnnnnnnnnnnnnnnnnnnnnnnnnnnnnnnnnnnnnnttaacacctgtcagagaaacgtgatatggggtaaggaggtgcttttttaaaatcgttcatagacttctgtaaaatgcaagataaattaaagttattataacagtgannnnnnnaaaaaaaaaaaaaaaaaannnnnnnnnnnnanaaatgtgcttggtgaaatcagcaagaaaccaaccatataaaacagtgtgtgccgggctctgactgagaaactgaacaatgnnnnnnnnnnnnnnnnnnnnnnnnnnnnnnnnnnnnnnnnnnnnnnnnnnnnnnnnnnnnnnnnnnnnnnnnnnnnnnnnnnnnnnnnnnnnnnnnnnnnnnnnnnnnnnnnnnnnnnnnnnnnnnnnnnnnnnnnnnnnnnnnnntagatttgaattcttttccgtatgtggggatggttgctactacctcaccgccaagtcctcccccaagctgttaccacatgaagggaatacaaggtgctaggtaccctccttcctccgtttggccactaaag

SEQ ID NO: 2522 - DNA, 487 bp, Homo sapiens
  misc_feature (275)..(275): n includes a, c, g, or t, or contains no nucleotide
aggcttcccggatttggcaggagctggaggctgaggaggagccggtgcctgaggggtctgggcccctgggtccctgggggccccaagactgggtgggccccctaccacgtggccctaccacaccagatgagggctgcctccggtactttgtcctgggcaccgtggcggctttggtggccctcgtgctcaacgtgttctatcctctggtatcccagagtcgctggagatgagctcgcctgcaggcagctgctgtgagctggcctacctgcctgccncaggccatgcctgcctttgttgtggggaacacctctgggctttgggcctcagcttatgcatctggtgggagagggtggggaggttgtggcccctgcaggggcagagtatcctagggtgtgtatccatctggctgtctgtccattcatcctgctgctctgacccttggcctcaggcttggccctgcccaagctacttcctgtacttaaaagtg

SEQ ID NO: 2523 - DNA, 185 bp, Homo sapiens
  misc_feature (75)..(91): n includes a, c, g, or t, or contains no nucleotide
cagaaaaagatttccacctgtcacgtatctgcctcttttacctgagcaatggtgtagttcttagacctaaggtcnnnnnnnnnnnnnnnnntaaagaaagatgttgctctaagtgctgtttgttagttatgaaatcagatttttctgcttgttcttaatgctgtggtcaaaccatagcacaaaat

SEQ ID NO: 2524 - DNA, 525 bp, Homo sapiens
  misc_feature (40)..(40): n includes a, c, g, or t, or contains no nucleotide
  misc_feature (230)..(231): n includes a, c, g, or t, or contains no nucleotide
  misc_feature (244)..(245): n includes a, c, g, or t, or contains no nucleotide
  misc_feature (252)..(252): n includes a, c, g, or t, or contains no nucleotide
  misc_feature (265)..(265): n includes a, c, g, or t, or contains no nucleotide
  misc_feature (272)..(272): n includes a, c, g, or t, or contains no nucleotide
tcctggactgccttgaatatcccctcccagtcaccttgtngcaagcccctgcccatctgggaaaataccccatcattcatgctactgccaacctggggagccagggctatgggagcagcttttttttcccccctagaaacgtttggaacaatctaaaactttaaagctcgaaaacaattgtaataatgctaaagaaaaagtcatccaatctaaccacatcaatattgtcnnattcctgtattcnnacccgtnccagaccttgttncacactnctcacatgtttagagttgcaatcgtaatgtacagatggttttataatctgatttgttttcctcttaacgttagaccacaaatagtgctcgctttctatgtagtttggtaattatcattttagaagactctaccagactgtgtattcattgaagtcagatgtggtaactgttaaattgctgtgtatctgatagctctttggcagtctatatgtttgtataatgaatgagagaataagtcatgttccttcaagat

SEQ ID NO: 2525 - DNA, 419 bp, Homo sapiens
  misc_feature (106)..(120): n includes a, c, g, or t, or contains no nucleotide
  misc_feature (155)..(155): n includes a, c, g, or t, or contains no nucleotide
  misc_feature (157)..(157): n includes a, c, g, or t, or contains no nucleotide
  misc_feature (224)..(224): n includes a, c, g, or t, or contains no nucleotide
  misc_feature (274)..(274): n includes a, c, g, or t, or contains no nucleotide
  misc_feature (283)..(287): n includes a, c, g, or t, or contains no nucleotide
  misc_feature (289)..(290): n includes a, c, g, or t, or contains no nucleotide
tttaacttgatcatgatcagctctgaggtgcaacttcttcacatactgtacatacctgtgaccactcttgggagtgctgcagtctttaatcatgctgtttaaactnnnnnnnnnnnnnnnctcttgtccaaataaaatttattaataagatctananagagagatatatacacttttgattgttttctagatgtctaccaataaatgcaatttgtgacctgtantaatgatttaaagtggggaaactagattaaaatatttgtcttttaactanaaaaaaaannnnnanngaatctgcctgtgtccctgggtttgggttttgctcttggcagcagcaggtgcctcttgggtgctcctcctgctcctgcctgcagccctaagagcaggtgggtgccgagtgtctggcacagcttggatgc

SEQ ID NO: 2526 - DNA, 592 bp, Homo sapiens
  misc_feature (26)..(40): n includes a, c, g, or t, or contains no nucleotide
  misc_feature (133)..(205): n includes a, c, g, or t, or contains no nucleotide
  misc_feature (233)..(247): n includes a, c, g, or t, or contains no nucleotide
  misc_feature (253)..(277): n includes a, c, g, or t, or contains no nucleotide
  misc_feature (387)..(453): n includes a, c, g, or t, or contains no nucleotide
  misc_feature (490)..(506): n includes a, c, g, or t, or contains no nucleotide
  misc_feature (515)..(536): n includes a, c, g, or t, or contains no nucleotide
ctaccctgctggattcatggatgtcnnnnnnnnnnnnnnnacgggagagaatttccgtctgatctatgacaccaagggtcgctttgctgtacatcgtattacacctgaggaggccaagtacaagttgtgcaannnnnnnnnnnnnnnnnnnnnnnnnnnnnnnnnnnnnnnnnnnnnnnnnnnnnnnnnnnnnnnnnnnnnnnnncccgatcccctcatcaaggtgaatgatnnnnnnnnnnnnnnnttggannnnnnnnnnnnnnnnnnnnnnnnnaagttcgacactggtaacctgtgtatggtgactggaggtgctaacctaggaagaattggtgtgatcaccaacagagagaggcaccctggatcttttgacgtggttcacgnnnnnnnnnnnnnnnnnnnnnnnnnnnnnnnnnnnnnnnnnnnnnnnnnnnnnnnnnnnnnnnnnnncaaaccatggatttctcttccccgaggaaagggtatnnnnnnnnnnnnnnnnnaagagagannnnnnnnnnnnnnnnnnnnnnagagcagtgggtgaaatgggtccctgggtgacatgtcagatctttgtacgtaatta

SEQ ID NO: 2527 - DNA, 514 bp, Homo sapiens
  misc_feature (95)..(147): n includes a, c, g, or t, or contains no nucleotide
  misc_feature (184)..(215): n includes a, c, g, or t, or contains no nucleotide
gtcttaatttgaaaaccttgctgttacaaattggacctttatacattttctgaaaacaatgaaaagagtatatttaaccttttctggctgtaaannnnnnnnnnnnnnnnnnnnnnnnnnnnnnnnnnnnnnnnnnnnnnnnnnnnnctgcttatgtacaattgttttcagtgtttctaagaannnnnnnnnnnnnnnnnnnnnnnnnnnnnnnnatcaaatgctattgcagacaaagccaataaaaagttggacttcttttggggataacaagttttggaagagaaatgcaggccatatgtgcgcatgaccgagattttgaaaaaagatgtacatagtgacatgtttggtgcatggtttttgaggagggcttttgtcaaaaaggaggtataacctttcccccacagacctgagagctgtgccttttctatgcaatattacagacgttacatcggaacccagatggctgtattcacatgtaggtttgggctgtaatctaaacaattggacagat

SEQ ID NO: 2528 - DNA, 452 bp, Homo sapiens
  misc_feature (112)..(126): n includes a, c, g, or t, or contains no nucleotide
  misc_feature (306)..(306): n includes a, c, g, or t, or contains no nucleotide
  misc_feature (308)..(314): n includes a, c, g, or t, or contains no nucleotide
  misc_feature (318)..(318): n includes a, c, g, or t, or contains no nucleotide
ttcacaacctctgtggtccgtaggagccactatgaggagggccctgggaagaatttgccattttcagtggaaaacaagtggtcgttactagctaagatgtgtttgtactttnnnnnnnnnnnnnnnacacccttccttgtagtaagacaccaactgcttaaaacataaggatgtttcagttcctccatttaacagatatgaagagcattttaagaggtgcagcctctggaagtggatcaaactagaactcatatgccatactagatatgtttgtcaataaacttatgacgtgaaaaaaaaaaaaanannnnnnnaaanagggaatgtaataattggccatttgcctactttattatttgggtaacattccagtattactctctgtgatttagcttatttaatggtgttaaactgaggttatattaaatttttgattcccaggtcaggatttt

SEQ ID NO: 2529 - DNA, 536 bp, Homo sapiens
  misc_feature (98)..(98): n includes a, c, g, or t, or contains no nucleotide
  misc_feature (116)..(116): n includes a, c, g, or t, or contains no nucleotide
  misc_feature (123)..(124): n includes a, c, g, or t, or contains no nucleotide
  misc_feature (129)..(130): n includes a, c, g, or t, or contains no nucleotide
  misc_feature (132)..(172): n includes a, c, g, or t, or contains no nucleotide
  misc_feature (185)..(185): n includes a, c, g, or t, or contains no nucleotide
  misc_feature (393)..(393): n includes a, c, g, or t, or contains no nucleotide
  misc_feature (401)..(401): n includes a, c, g, or t, or contains no nucleotide
  misc_feature (404)..(423): n includes a, c, g, or t, or contains no nucleotide
ggtcatcggggctcactgcctcctgcccttctctcctgtctgacccccacttagcccttctctccttgcagcctagcagtttatagttctgagatggnaaagttgaagggggcaangcaaganntctcnncnnnnnnnnnnnnnnnnnnnnnnnnnnnnnnnnnnnnnnnnnaggccttgtgctngggacaacctctctcttgccttacctcagagagggactatgccctgacccctcctttctgaaaatcagtgccctccctgttgctctaggaggctcctgctggcttggtagaagacagaattcgatctgcctgtccctttttcccctggggtttgacacacaggctcctctcagcatgaggtggagcagtgaccaggtggagcagtganccaggacnccnnnnnnnnnnnnnnnnnnnncagcctccccgcccgctcccaggcgccccatgtcctcacaggccaggacgccatggcaggatggagaggacttggtggatttttgtttcttgcctgacctcagtttcatgaaa

SEQ ID NO: 2530 - DNA, 129 bp, Homo sapiens
tggcataacctgtctcacctggacttaagcgtctggctctaattcacagtgctcttttctcctcactgtatccaggttccctcccagaggagccaccagttctcatgggtggcactcagtctctcttct

SEQ ID NO: 2531 - DNA, 480 bp, Homo sapiens
tgatacattcctagattccctacaggagtttccctgggtcagggagaagctgaagaaggcaagggaagaggccatgaccgacctgcctgcaggtgacagattgactgggatcccctcgcacatcctcaacagctccccatcagaccggcagattaaccagctggcccagaggctgggccctgagtgggagcccatggtgctgtctctgggactgtcccagacggatatctaccgctgtaaggccaaccacccccacaacgtgcagtcgcaggtggtggaggccttcatccgttggcggcagcgcttcgggaagcaggccaccttccagagcctgcacaacgggctgcgggctgtggaggtggacccctcgctgctcctgcacatgttggagtgatggtgcctccagcaaccgctggggagtgtgtccctgagtcatgtgggcttgaatcctgactttcactcagagcaggtggttttttg

SEQ ID NO: 2532 - DNA, 532 bp, Homo sapiens
  misc_feature (26)..(26): n includes a, c, g, or t, or contains no nucleotide
  misc_feature (37)..(37): n includes a, c, g, or t, or contains no nucleotide
  misc_feature (55)..(56): n includes a, c, g, or t, or contains no nucleotide
  misc_feature (86)..(86): n includes a, c, g, or t, or contains no nucleotide
  misc_feature (88)..(92): n includes a, c, g, or t, or contains no nucleotide
  misc_feature (94)..(97): n includes a, c, g, or t, or contains no nucleotide
  misc_feature (99)..(105): n includes a, c, g, or t, or contains no nucleotide
  misc_feature (107)..(108): n includes a, c, g, or t, or contains no nucleotide
  misc_feature (111)..(114): n includes a, c, g, or t, or contains no nucleotide
  misc_feature (117)..(118): n includes a, c, g, or t, or contains no nucleotide
  misc_feature (120)..(120): n includes a, c, g, or t, or contains no nucleotide
  misc_feature (122)..(122): n includes a, c, g, or t, or contains no nucleotide
  misc_feature (124)..(133): n includes a, c, g, or t, or contains no nucleotide
  misc_feature (135)..(144): n includes a, c, g, or t, or contains no nucleotide
  misc_feature (146)..(146): n includes a, c, g, or t, or contains no nucleotide
  misc_feature (148)..(238): n includes a, c, g, or t, or contains no nucleotide
  misc_feature (241)..(241): n includes a, c, g, or t, or contains no nucleotide
  misc_feature (245)..(245): n includes a, c, g, or t, or contains no nucleotide
  misc_feature (248)..(248): n includes a, c, g, or t, or contains no nucleotide
  misc_feature (250)..(260): n includes a, c, g, or t, or contains no nucleotide
  misc_feature (262)..(262): n includes a, c, g, or t, or contains no nucleotide
  misc_feature (264)..(283): n includes a, c, g, or t, or contains no nucleotide
gttcatctgtgtcttctgcaaactangtctcatgaangaattctggcgtgcagcnngggtagctgaagtttgggtctgggactggngnnnnncnnnnannnnnnntnngannnnagnncncntnnnnnnnnnncnnnnnnnnnncnannnnnnnnnnnnnnnnnnnnnnnnnnnnnnnnnnnnnnnnnnnnnnnnnnnnnnnnnnnnnnnnnnnnnnnnnnnnnnnnnnnnnnnnnnnttnttgntgntnnnnnnnnnnngnannnnnnnnnnnnnnnnnnnngttgtattgggtgatgtgtgcaaaactgcagaagctcactgcctataagaggaaataagagagaaagtggaggagagggacaaaaggagtaattatttggtatagatccacccatcccaacctttctctcctcagtccctgctcctcatgtttctggtttggtgagtcctttgtgccaccacccataatgctttgcattgctgcatcctgggaagggggtatatggtctcacaagttgttgtcattgtt

SEQ ID NO: 2533 - DNA, 159 bp, Homo sapiens
gttacattaggctttgctatatccccaggccaaatagcatgtgacacaggacagccatagtatagtgtgtcactcgtggttggtgtcctttcatgcttctgccctgtcaaaggtccctatttgaaatgtgttataatacaaacaaggaagcacattgtg

SEQ ID NO: 2534 - DNA, 524 bp, Homo sapiens
  misc_feature (128)..(144): n includes a, c, g, or t, or contains no nucleotide
  misc_feature (265)..(265): n includes a, c, g, or t, or contains no nucleotide
  misc_feature (286)..(286): n includes a, c, g, or t, or contains no nucleotide
  misc_feature (346)..(346): n includes a, c, g, or t, or contains no nucleotide
  misc_feature (354)..(354): n includes a, c, g, or t, or contains no nucleotide
  misc_feature (424)..(441): n includes a, c, g, or t, or contains no nucleotide
  misc_feature (485)..(499): n includes a, c, g, or t, or contains no nucleotide
ttggtcctgtggatggctggatcccgcctgaaacggacctgcagagcagcagcacccttccggtgtggaggctatgtagctggtgcgctgctcacggccattcactgcccatgctgagcgcctctcannnnnnnnnnnnnnnnnttttctgctgctaacacatttggccagttgttgcagttgctcatcatcttgggaaaggtgtttgtgacttttcagagcccagattcctgttgtctattaaaacttgaagggaggggtgaanagtgtttctctcttcttcccnaaatgaccttagctgtcctaggatagttagtaaaagactttttagcattttgacctaggncctttggntttcactaaaagtggggacctcagtatcccagattgtaattttgccaagtgttagatttgagtctctcannnnnnnnnnnnnnnnnngtggttactccttgcttcaaggtacttaccttatttcattgaannnnnnnnnnnnnnnaactcttgcttcctggcctagaacc

SEQ ID NO: 2535 - DNA, 529 bp, Homo sapiens
  misc_feature (97)..(113): n includes a, c, g, or t, or contains no nucleotide
  misc_feature (125)..(180): n includes a, c, g, or t, or contains no nucleotide
  misc_feature (310)..(312): n includes a, c, g, or t, or contains no nucleotide
  misc_feature (327)..(327): n includes a, c, g, or t, or contains no nucleotide
  misc_feature (329)..(331): n includes a, c, g, or t, or contains no nucleotide
  misc_feature (334)..(335): n includes a, c, g, or t, or contains no nucleotide
tctttttgcgactgcgttacatcatttaaagaaaatgctgtgtattgtaaacttaaattgtatatgataacttactgtcctttccatccgggcctannnnnnnnnnnnnnnnntgtctacaaccnnnnnnnnnnnnnnnnnnnnnnnnnnnnnnnnnnnnnnnnnnnnnnnnnnnnnnnnaatcgatcattgtaggggaaaatcatagaaatccatttcagatctttattgttcctcaccccattttcctccttgtgtatgtacttcccccacccccctttttttaagtaaaatgtaaattcaatctgcnnnaaaaaaaaaaaaaanannnaanntcttcagatgtatcgagctctgttttcttccccccgagtcctcccaatcttttgaaacattaaggccattttccttaaggatgtttttggctctcctactccccgtgagaaagatctttccatttccagaacttctccacactaaaagtgaaatatttttgtgaaatgcttttttagggcctgccaaactcagg

SEQ ID NO: 2536 - DNA, 566 bp, Homo sapiens
  misc_feature (26)..(43): n includes a, c, g, or t, or contains no nucleotide
  misc_feature (48)..(48): n includes a, c, g, or t, or contains no nucleotide
  misc_feature (231)..(245): n includes a, c, g, or t, or contains no nucleotide
  misc_feature (247)..(247): n includes a, c, g, or t, or contains no nucleotide
  misc_feature (333)..(361): n includes a, c, g, or t, or contains no nucleotide
  misc_feature (387)..(453): n includes a, c, g, or t, or contains no nucleotide
  misc_feature (456)..(456): n includes a, c, g, or t, or contains no nucleotide
tgcctagatccacgtgtggcctccgnnnnnnnnnnnnnnnnnngtttncggatgagggcatgtgcggctgaactgagaaggcaggcctccgtcttcccagcggttcctgtgcagatgctgctgaagagaggtgccggggaggggcagagaggaagtggtctgtctgttaccataagtctgattctctttaactgtgtgaccagcggaaacaggtgtgtgtgaactgggcannnnnnnnnnnnnnngncccctgttgaggtgggtgggcctgactgttgccccccagggtcctaaaacttggatggacttgtatagtgagagaggaggcctggnnnnnnnnnnnnnnnnnnnnnnnnnnnnnctctctaccccccaccttggtccctnnnnnnnnnnnnnnnnnnnnnnnnnnnnnnnnnnnnnnnnnnnnnnnnnnnnnnnnnnnnnnnnnnngangtgtccgacctacgttcctggccccctcgttcagagactgcccttctcacgggctctatgcctgcactgggaaggaaacaaatgtgtataaactgctgtcaataaatgac

SEQ ID NO: 2537 - DNA, 594 bp, Homo sapiens
  misc_feature (29)..(29): n includes a, c, g, or t, or contains no nucleotide
  misc_feature (438)..(467): n includes a, c, g, or t, or contains no nucleotide
  misc_feature (478)..(493): n includes a, c, g, or t, or contains no nucleotide
  misc_feature (539)..(539): n includes a, c, g, or t, or contains no nucleotide
  misc_feature (541)..(541): n includes a, c, g, or t, or contains no nucleotide
  misc_feature (552)..(555): n includes a, c, g, or t, or contains no nucleotide
ctgccttcttgttccagctaggcaatgcntttttttttttttttgaagcagttctctttataaagtgttattttgatagtttgtggattctaaaatatatatatatttatataaacaccatataagtcaaatatgtatttaacaaagcaatatgtattcattcactttcaagatttgttttggtgtcaaaataacatgaaaaggtagatggagttgcttctgttgaattagctctgccaccaatatgtatcttcatacacgtttggaaatgtttcctgcagcattaggtatgacttgttctgagtactgcttccggtgctaaaatgaacaaagaatttgtacttaatggcatggactctggagaatctatgcgaatcaacctttctaccttaatatctccccaaaaatgtatagtgccttgtttttatgtacagtttnnnnnnnnnnnnnnnnnnnnnnnnnnnnnnatgatggtttnnnnnnnnnnnnnnnnttttactctcaaatagtcaaaataaaaacatctcaatttctaatancngttgtaaacannnngtacacatgtcattttgtgatataggactcccaaataaa

SEQ ID NO: 2538 - DNA, 303 bp, Homo sapiens
tttctgtaagaagtgtggcaagcaccaaccccataaagtgacacagtacaagaagggcaaggattctctgtacgcccagggaaagcggcgttatgacaggaagcagagtggctatggtgggcaaactaagccgattttccggaaaaaggctaaaactacaaagaagattgtgctaaggcttgagtgcgttgagcccaactgcagatctaagagaatgctggctattaaaagatgcaagcattttgaactgggaggagataagaagagaaagggccaagtgatccagttctaagtgtcatcttt

SEQ ID NO: 2539 - DNA, 301 bp, Homo sapiens
cagagagaccctgcaagaccacggagggagccgacacttgaatgtagtaataggcagggggccctgccaccccatccagccagaccccagctgaaccatgcgtcaggggcctagaggtggagttcttagctatccttggctttctgtgccagcctggctctgcccctcccccatgggctgtgtcctaaggcccatttgagaagctgaggctagttccaaaaacctctcctgacccctgcctgttggcagcccactccccagccccagccccttccatggtactgtagcaggggaattccct

SEQ ID NO: 2540 - DNA, 559 bp, Homo sapiens
  misc_feature (217)..(217): n includes a, c, g, or t, or contains no nucleotide
  misc_feature (291)..(291): n includes a, c, g, or t, or contains no nucleotide
  misc_feature (293)..(300): n includes a, c, g, or t, or contains no nucleotide
  misc_feature (302)..(303): n includes a, c, g, or t, or contains no nucleotide
  misc_feature (306)..(307): n includes a, c, g, or t, or contains no nucleotide
  misc_feature (310)..(313): n includes a, c, g, or t, or contains no nucleotide
  misc_feature (315)..(315): n includes a, c, g, or t, or contains no nucleotide
  misc_feature (318)..(322): n includes a, c, g, or t, or contains no nucleotide
  misc_feature (324)..(324): n includes a, c, g, or t, or contains no nucleotide
  misc_feature (326)..(326): n includes a, c, g, or t, or contains no nucleotide
  misc_feature (329)..(329): n includes a, c, g, or t, or contains no nucleotide
  misc_feature (331)..(332): n includes a, c, g, or t, or contains no nucleotide
  misc_feature (335)..(335): n includes a, c, g, or t, or contains no nucleotide
  misc_feature (338)..(367): n includes a, c, g, or t, or contains no nucleotide
  misc_feature (369)..(371): n includes a, c, g, or t, or contains no nucleotide
  misc_feature (373)..(380): n includes a, c, g, or t, or contains no nucleotide
  misc_feature (384)..(416): n includes a, c, g, or t, or contains no nucleotide
accccagagttcaggggccgcctggccccacttgcttcttcccgtttcctccatgaccaccaggctgagctgcacatccgggacgtgcgaggccatgacgccagcatctacgtgtgcagagtggaggtgctgggccttggtgtcgggacagggaatgggactcggctggtggtggagaaagaacatcctcagctaggggctggtacagtcctcctcnttcgggctggattctatgctgtcagctttctctctgtggccgtgggcagcaccgtctattaccagggcaaatgncnnnnnnnnannggnncannnngncannnnncngntgngnnccnagnnnnnnnnnnnnnnnnnnnnnnnnnnnnnncnnntnnnnnnnncccnnnnnnnnnnnnnnnnnnnnnnnnnnnnnnnnnaatgggaaggatcagatatgactcctccttggcaactgccctttcctgccaggcccacacataccctcttctggctgttaggggagcttgggtccctgaacactgtcattcacccaataaattactatttgaccccagagtgg

SEQ ID NO: 2541 - DNA, 555 bp, Homo sapiens
  misc_feature (27)..(27): n includes a, c, g, or t, or contains no nucleotide
  misc_feature (90)..(90): n includes a, c, g, or t, or contains no nucleotide
  misc_feature (153)..(153): n includes a, c, g, or t, or contains no nucleotide
  misc_feature (218)..(218): n includes a, c, g, or t, or contains no nucleotide
  misc_feature (484)..(487): n includes a, c, g, or t, or contains no nucleotide
  misc_feature (491)..(491): n includes a, c, g, or t, or contains no nucleotide
  misc_feature (493)..(493): n includes a, c, g, or t, or contains no nucleotide
  misc_feature (497)..(500): n includes a, c, g, or t, or contains no nucleotide
  misc_feature (503)..(509): n includes a, c, g, or t, or contains no nucleotide
  misc_feature (511)..(514): n includes a, c, g, or t, or contains no nucleotide
  misc_feature (516)..(517): n includes a, c, g, or t, or contains no nucleotide
  misc_feature (519)..(524): n includes a, c, g, or t, or contains no nucleotide
  misc_feature (528)..(530): n includes a, c, g, or t, or contains no nucleotide
cttcttaggtgaatgggtactttctantttgtttctaaacgagcaattttgaggatgaaatgggaagatatcattgcttcctttttgcancctattgggtatgtacactctggccgaagggagtccttatgtttagtttcaaaatatattacnttcctggattctcttcttcactttttctgactttgggtccattttcttttcattgcctccttttnccaggcagctctattcttgcagagccatagcaggacatgttaaaattccaatagaaaacactaaaaggaaagtctgtggaatcactagtgactaaatactgggaacctattttctcaatcttcctccatgttgtgttctttgtattcttgagatgataatatattatgtatttgaattcctgaaaaatggaaaatgtttaagatatatgtatataaagtgtatgctgtattggtgcaataatggtaattaaaaatatgaaaaaagnnnnaaananaaannnnaannnnnnnannnnannannnnnnaaannnaattgaccaaatataagtggaccag

SEQ ID NO: 2542 - DNA, 148 bp, Homo sapiens
catggccctgatttccctggtttgagactcacttcctcatctccctgtcctctgagataatatgagtgagcacttaggtatcatatcagatgctcaaggctggcagctacccccttcttgagagtccaagaacctggagcagaaataa

SEQ ID NO: 2543 - DNA, 395 bp, Homo sapiens
acattctgatcctttggtaagccgatctgtcttgcaatatacatgtcccgacgatggaaggggaaagcgagctgaatcaccaaactcaggaacgataatatcatcgtggcttttctgcttatgaaacactccacccgataagatttgatccccttctgcaagcttgctgagatcaacacaacatttcgcaagcaggcatttgcattgcggggtagtacaactgtgtcctttcaagagtctatatgttttataggcctttcctgagcggtaagaacaggtcgccagtaagaacaaggcttcttctgagtgtacttctgcataaaggcgttctgcgggggaaaccgcatctcggtaggcatagtggtttagtgcttgccatatagcagcctggacgg

SEQ ID NO: 2544 - DNA, 592 bp, Homo sapiens
  misc_feature (174)..(174): n includes a, c, g, or t, or contains no nucleotide
  misc_feature (208)..(208): n includes a, c, g, or t, or contains no nucleotide
  misc_feature (233)..(233): n includes a, c, g, or t, or contains no nucleotide
  misc_feature (244)..(244): n includes a, c, g, or t, or contains no nucleotide
  misc_feature (268)..(268): n includes a, c, g, or t, or contains no nucleotide
  misc_feature (520)..(536): n includes a, c, g, or t, or contains no nucleotide
tgggcacttaagaaggcgaggcccaggtaaaggaccctgtcccttccattgcagacaaattggatctgtgtaccgactccctcctctaagaaaaggtgaggtgctgccacttcctgaggccaattttcccagcttcccattgccgcaccacaaacatcctctaaagccagacantcagccctttcctcaatcagtctctgaatcatgnccagggaagttcaagagtgggtttnccacaagtttnccatgttttttacacatacatttnccaaaataaaatgtgattcctttgaagaggaaaatgaataatacattgaattagaaacataaataaaatgaccagtaattgtgaaaattacagttcttttcaacctactttcatactgaagatgcagcaaaatgtgaatgggaaaagagatggcctgagaagagagatcaaatggaaaggagaggaaagaactcagtgctgcctattagtagttaattctgtcactcaccactacatcacttgagacaaatnnnnnnnnnnnnnnnnntccttctttcctggacttaactctaattctagagtctctgttactgcttgggctat

SEQ ID NO: 2545 - DNA, 539 bp, Homo sapiens
  misc_feature (433)..(448): n includes a, c, g, or t, or contains no nucleotide
ccactgtggaaatcttggttagggagtcaaagaaactgagcctggggcaaacgaggcttcccacactgccaggggagcctcactgtgaagtctaggctcagacaggcatcaacaaacctattcaccccaccatcatcctgatctaaccattccccagtcatcccaggaaaaccactcacagcctgacactgggctgactttcttgaagatcctcatccaattggtgtttttcagaagtgttccaatattatgaattctgtgttgtggagaaaagcaaccatgcatttactggtcaatgccttcttgtatatgtaattcaatacttttacttttaatatcctcaccttatctaatctttgaattttgtcatgtaatttattgcttcattaaggttactttttgttatacaaaataaaagctgatatccaaggcnnnnnnnnnnnnnnnnatggtgcatcttgatgattttttgtcctttgaagtatggatgatagaaaaatgtatcaggtttattcatctcatctttctgttacaggatg

SEQ ID NO: 2546 - DNA, 264 bp, Homo sapiens
  misc_feature (30)..(30): n includes a, c, g, or t, or contains no nucleotide
gagaaattcaaacatttctgcagaacagantaccaaatcaatagctaggaatcatgttcaatattgaattctgcccaggagcatgaactgatccatgaatgccttttccaggttaaaatttggtcactgatgcctataatcgtggaagtcagagggattcccctttttcatctcattttaataggaaaattccttatggttaacatctccctacaaactcctactacgtcgtctaaattgctgctctggaataaggtgatttct

SEQ ID NO: 2547 - DNA, 315 bp, Homo sapiens
  misc_feature (33)..(34): n includes a, c, g, or t, or contains no nucleotide
  misc_feature (72)..(73): n includes a, c, g, or t, or contains no nucleotide
  misc_feature (237)..(252): n includes a, c, g, or t, or contains no nucleotide
ctaaattatgcttgaactgggagcatgtaaaannccatggaaaatgagtctgaagttttggggtacaagatnntgtaccggcaaaacagacagagtaaaactcatattttggaaacaaacaatacatcagctgagcttctggttccatttgaagaagactacttaattgaaataagaacagtcagtgatggtggagatggaagcagcagtgaggaaattaggattccaaaaatgtcnnnnnnnnnnnnnnnnaggaattcaattcttagaacctagcacccattttctttccattgtcattgtgatttttcactg

SEQ ID NO: 2548 - DNA, 290 bp, Homo sapiens
  misc_feature (171)..(186): n includes a, c, g, or t, or contains no nucleotide
tctctctctctataccatctgagcacccattgctcaccatcagatcaacctctgattttacatcatgatgtaatcaccactggagcttcactgttactaaattattaatttcttgcctccagtgttctatctctgaggctgagcattataagaaaatgacctctgctcctnnnnnnnnnnnnnnnntgccaggggcttatttcagaacaacttccacttactttccactggctctcaaactctctaacttataagtgttgtgaacccccacccaggcagtatccatgaaa

SEQ ID NO: 2549 - DNA, 297 bp, Homo sapiens
  misc_feature (29)..(29): n includes a, c, g, or t, or contains no nucleotide
  misc_feature (95)..(129): n includes a, c, g, or t, or contains no nucleotide
tgtcccgctgcgtgttttcctcttgatcngggaactcctgcttctccttgcctcgaaatggaccccaactgctcctgctcgcctgttggctcctnnnnnnnnnnnnnnnnnnnnnnnnnnnnnnnnnnnaaatgcacctcctgcaagaagagctgctgctcctgctgccctgtgggctgtgccaagtgtgcccagggctgcatctgcaaagggacgtcagacaagtgcagctgctgtgcctgatgccaggacagctgtgctctcagatgtaaatagagcaacctatataaacctgga

SEQ ID NO: 2550 - DNA, 367 bp, Homo sapiens
aaggccacacatacgctttcataagcacagaaaacttctggaaggctttgcgaaaaagagccgactggcagcttgcgggaggcctttacccttcaacggactccagactcctgtactcttttttaaccataagcatgggttgcttttatgtattttttaaaattaatgttgttttaaacaactttgatttaaagatggtggggaaaagacctttggtcgttgtccctcaaacactcacaaaactataaggcgaaaaacaggaactcaaaccttggatactatgagggatccatggcctccagccccagcaggtgatattggtagaacaaagttccattttcttttccactggatccaccacagaatg

SEQ ID NO: 2551 - DNA, 566 bp, Homo sapiens
  misc_feature (26)..(26): n includes a, c, g, or t, or contains no nucleotide
  misc_feature (37)..(61): n includes a, c, g, or t, or contains no nucleotide
  misc_feature (153)..(153): n includes a, c, g, or t, or contains no nucleotide
  misc_feature (438)..(477): n includes a, c, g, or t, or contains no nucleotide
  misc_feature (527)..(528): n includes a, c, g, or t, or contains no nucleotide
gcttggacagccagtgccctcgtggnttcgggaagannnnnnnnnnnnnnnnnnnnnnnnntgtcccagcctcccataccagcaaaatgccccctgcttccctaagggtcaggtccagagcagggcccacaagggggattagagtggcctggnccctccccctctacctcagtagcccccaggcctgagatggctgagaagggaagggtatccttttcccacagttctgggacaaataaaggggcttcctttggtaccccacataatagtgctaggtacctttgacccatcatcttgggaggtggggaggaatgagagggtccaggcagggtgtaggggaatgtattagtccaatgagatttccctcttcatccgcagcagtgtatctattctatacctggctatgggagagaccccttgcatgggagggaccccttnnnnnnnnnnnnnnnnnnnnnnnnnnnnnnnnnnnnnnnncccggcctccctaatgtcattcacattgaatggggatgaggtcggacagnngctcatagagccgagtatgagccctagctgtgggctag

SEQ ID NO: 2552 - DNA, 510 bp, Homo sapiens
  misc_feature (101)..(101): n includes a, c, g, or t, or contains no nucleotide
  misc_feature (117)..(117): n includes a, c, g, or t, or contains no nucleotide
  misc_feature (154)..(154): n includes a, c, g, or t, or contains no nucleotide
  misc_feature (192)..(193): n includes a, c, g, or t, or contains no nucleotide
  misc_feature (226)..(226): n includes a, c, g, or t, or contains no nucleotide
  misc_feature (273)..(291): n includes a, c, g, or t, or contains no nucleotide
cttttaaacggactggtgaatgtgcaatgttagtaattagaagttttaccacatggaaaatttgtggttttaaactttctaaatcatggtgacttcattgnaaagccattagttgcnattctcttagggcagataaaatgcggctgtgttaggnaaaaacatgttacactgtaaggcagatgatcgtccccnntatgatgattgtcagaagacaggactaagtagncagagaatagctaagagataaattgggctggggaaacttgtcagaannnnnnnnnnnnnnnnnnnattttccaagaaaatgtgcagtattctctgctacttctgaatctgttttgtcttcctaatctatcacaattgccacccatcgggttttgggtgtgtgttttcatagcgtggttactttctataatgctgtacccagattctaagaacctggagaaggattagcagttcttagtaagtttactgtgtataggaacggtttgtatttcattacagctattc

SEQ ID NO: 2553 - DNA, 538 bp, Homo sapiens
  misc_feature (354)..(354): n includes a, c, g, or t, or contains no nucleotide
  misc_feature (374)..(374): n includes a, c, g, or t, or contains no nucleotide
ctagtaaatgggtttcctctggttggtggaagcacggttgagcaggtggaggacaggacccagctggccccagggccagccccagattgcatggtctgtgcccaacagggttgcattcctctgcagccgccgcctcctcatttcctccctgagcttgtttgtccaagccaccaagccatgtggtcccgctggcttcatcctcctctggattcctgcccccctcccatgaagggaggaagaggattcagggtcagcctaggggaccctggctccctccgataggcaggaaggaggagggatgcggaggagaggctgagccttccacgggcctcctgttaggggtgttggtggagnccaggttggggagggaagcntaaggaccctccacacctcccacagccagagtcagttgaggctgggacaaaggggaaggagagagggaaggaggaccgcctgaccttgcccagaaggagcttcctctaaactgccctgggaaggaagcctggtatgctggtgtggactggagctgtgtcaacct

SEQ ID NO: 2554 - DNA, 476 bp, Homo sapiens
  misc_feature (42)..(42): n includes a, c, g, or t, or contains no nucleotide
  misc_feature (46)..(46): n includes a, c, g, or t, or contains no nucleotide
  misc_feature (77)..(91): n includes a, c, g, or t, or contains no nucleotide
  misc_feature (179)..(179): n includes a, c, g, or t, or contains no nucleotide
  misc_feature (430)..(446): n includes a, c, g, or t, or contains no nucleotide
agtgtcgctgtttgcgggtctccgcgcgggaccggggcgcangggngtcgctgaggcgagggtgtcatgtcagacannnnnnnnnnnnnnnatggcgacgactttgatgatgtggaggaggatgaagggctagatgacttggagaatgccgaagaggaaggccaggagaatgtcgagantcctcccctctggggagcgaccgcaggccaaccagaagcgaatcaccacaccatacatgaccaagtacgagcgagcccgcgtgctgggcacccgagcgctccagattgcgatgtgtgcccctgtgatggtggagctggagggggagacagatcctctgctcattgccatgaaggaactcaaggcccgaaagatccccatcatcattcgccgttacctgccagatgggagctatgaagactggggggtggannnnnnnnnnnnnnnnnactgagctggagtcatcttcctgcccttgc

SEQ ID NO: 2555 - DNA, 421 bp, Homo sapiens
  misc_feature (27)..(47): n includes a, c, g, or t, or contains no nucleotide
  misc_feature (175)..(175): n includes a, c, g, or t, or contains no nucleotide
  misc_feature (351)..(387): n includes a, c, g, or t, or contains no nucleotide
ctatgatgccagctaactcagactccnnnnnnnnnnnnnnnnnnnnnagccccagcatgggccccattgcttgggcggctgctgtattttcatttactctggcccttggactatggaaacgtgggaggggcaggggagatgtggggaagtccaggactccaggaggtgaaaaggnaaaaaaaaaaaaaaatgtacctgattgctcccaattatgagaggattgggtgggcaggggaactcctaaaataatacatgaccacttcctcatttctggggaaggaaaggagactagagcagctggtgtgctcacccctccctagtcacctccattaaccacagactatgtagcgnnnnnnnnnnnnnnnnnnnnnnnnnnnnnnnnnnnnnactgtggatacagctggagggtcaggaactgtta

SEQ ID NO: 2556 - DNA, 539 bp, Homo sapiens
  misc_feature (117)..(117): n includes a, c, g, or t, or contains no nucleotide
  misc_feature (119)..(147): n includes a, c, g, or t, or contains no nucleotide
  misc_feature (443)..(448): n includes a, c, g, or t, or contains no nucleotide
  misc_feature (450)..(450): n includes a, c, g, or t, or contains no nucleotide
  misc_feature (474)..(477): n includes a, c, g, or t, or contains no nucleotide
  misc_feature (479)..(479): n includes a, c, g, or t, or contains no nucleotide
gctgctacccatctatgtatgtagtcattggggggaaaatgtagccacattttttatgggaagactttgtgttaaaagtgaacattttgaaggtttttaactggtgaaactagcctngnnnnnnnnnnnnnnnnnnnnnnnnnnnnntcgccccttttgaaggtgccattcttatgagccaaaagtttgtcatttaaaagttcattttgagggaataacatgtaatataatttgaaataaaggtatagtaaccttaaaaagaacattataactgattgttgtgaatggggtgaatttgttaaaatgagtaactttgataaagtttttcatgcacaggcaaaatgtattcactagatttctacgtagtgatctgcttttactttgtaatttgtagttctcaaaagacttttttttaaaaaaataaagtccatacttacacttannnnnnanaaaaaaaaaaaaaaaaaaaaaaannnnangttaatacctagtggtattgtatgttgtgtgttcagatgtctttactgtatctgtatacc

SEQ ID NO: 2557 - DNA, 559 bp, Homo sapiens
  misc_feature (61)..(61): n includes a, c, g, or t, or contains no nucleotide
cagcagagtgctttaccaattgaagtaaaatgtggcaggctggagttattgaagcagagtnggcagtcttcagtttgcagagtaggggtctgtcttttaaactctgagtgcaaacttcagagttcttgccttggctgcagtttttttccttcaagaatgcagtactaacatttatttgagtggagttactgaacagtaacatagctgtgatttttggtatttgaaacactggttttaaatattttgacttgttgagggtatgttttatatagcaagacattatatagcagtaaaaaatggtgttttatcttctatataattcctgtttttattattaacaaaacagtcctaaatagcagccctcaattgtgaaaaaatttactttaaactacattaggttgtgaatgcaggttttatcagaactatgtttttgttcagtttatctgttcatatggataaatattggttgggatgacttggtgtctaatgtgtagtgctacacacctaacttatggggccaaaatagcatgtcctaatgcttgctgctgatttaaacaca

SEQ ID NO: 2558 - DNA, 497 bp, Homo sapiens
  misc_feature (424)..(449): n includes a, c, g, or t, or contains no nucleotide
  misc_feature (451)..(451): n includes a, c, g, or t, or contains no nucleotide
  misc_feature (455)..(455): n includes a, c, g, or t, or contains no nucleotide
  misc_feature (458)..(459): n includes a, c, g, or t, or contains no nucleotide
  misc_feature (463)..(463): n includes a, c, g, or t, or contains no nucleotide
ctacagcagctacctggccaaggctgaccagaagagaggcaagaagcagacagcccgggaaatgaagaagaagattctggctgagagacgcaagccgctcaacatcgatcaccttggtgaagacaaactgagggacaaggccaaggagctctgggagaccctgcaccagctggagattgacaagttcgagtttggggagaagctgaaacgccagaaatatgacatcaccacgctcaggagccgcattgaccaggcccagaagcacagcaagaaggctgggaccccagccaagggcaaagtcggcgggcgctggaagtagagaggccagaaaggcccctcgaggcagagaccctccgccctcttgcacaccagggccgctcgtgggactccacatcctccagcccccacaatcctgtcaggggcnnnnnnnnnnnnnnnnnnnnnnnnnngnccanccnngggncgtcccccgcgtctgtgtccttgctgccttcatc

SEQ ID NO: 2559 - DNA, 295 bp, Homo sapiens
caactggctgtacctggccaagctgtcgtcggtggggagcatctcagaggaggagacgtgcgagaaactcaagggcctgatccagaggcaggtgcagatgtgcaagcggaacctgggaagtcatggactcggtgcgccgcggtgcccagctggccattgaggagtgccagtaccagttccggaaccggcgctggaactgctccacactcgactccttgcccgtcttcggcaaggtgggtgacgcaagggactcgggaggcggccttcgtgtaacgccatctctttcggcaggtgt

SEQ ID NO: 2560 - DNA, 388 bp, Homo sapiens
  misc_feature (90)..(90): n includes a, c, g, or t, or contains no nucleotide
  misc_feature (101)..(101): n includes a, c, g, or t, or contains no nucleotide
  misc_feature (110)..(110): n includes a, c, g, or t, or contains no nucleotide
  misc_feature (128)..(128): n includes a, c, g, or t, or contains no nucleotide
  misc_feature (172)..(172): n includes a, c, g, or t, or contains no nucleotide
  misc_feature (231)..(231): n includes a, c, g, or t, or contains no nucleotide
aagtcttctccacatggccatcgagcccatcttggctgacggggctatcctggacaaaggtcgtgccatgttcttagtggccaagtgccnaggtggcttcnagcagcttncctacgatcagccgaagnaaagcagaagctctggaggctgccatcgagaacctcaatgaagnccaagaactattttgcaaaggttgactgcaaagagcgcatcagggacgtcgtttacttnccaggccagactctaccataccctggggaagacccaggagaggaaccggtgtgcgatgctcttccggcagctgcatcaggagctgccctctcatggggtacccttgataaaccatctctagagaggacatccctgctgggctgctgtgcagagtata

SEQ ID NO: 2561 - DNA, 253 bp, Homo sapiens
tgtgaagcctttatctatgggagattaaaaccagagagaaagaagatttattatgaaccgcaatatgggaggaacaaagacaaccactgggatcagctggtgtcagtccctacttaggaaatactcagcaactgttagctgggaagaatgtattcggcaccttcccctgaggacctttctgaggagtaaaaagactactggcctctgtgccatggatgattcttttcccatcaccagaaatgatagcgtgcag

SEQ ID NO: 2562 - DNA, 59 bp, Homo sapiens
tggtaaaagctctacgcaaagctaggctaggcatggtttccacattcgagcaatatcaa

SEQ ID NO: 2563 - DNA, 219 bp, Homo sapiens
  misc_feature (86)..(90): n includes a, c, g, or t, or contains no nucleotide
  misc_feature (92)..(93): n includes a, c, g, or t, or contains no nucleotide
  misc_feature (146)..(146): n includes a, c, g, or t, or contains no nucleotide
  misc_feature (177)..(177): n includes a, c, g, or t, or contains no nucleotide
gaaacaaacagttctgagaccgttcttccaccactgattaagagtggggtggcaggtattagggataatattcatttagccttctnnnnntnntgggcagacttggtgaccttgccagctccagcagccttcttgtccactgcttngatgacacccaccgcaactgtctgtctcatntcacgaacagcaaagcgacccaaaggtggatagtctgagaag

SEQ ID NO: 2564 - DNA, 447 bp, Homo sapiens
  misc_feature (89)..(120): n includes a, c, g, or t, or contains no nucleotide
  misc_feature (223)..(237): n includes a, c, g, or t, or contains no nucleotide
  misc_feature (339)..(339): n includes a, c, g, or t, or contains no nucleotide
  misc_feature (357)..(405): n includes a, c, g, or t, or contains no nucleotide
gccttggccattgaaacggaggctgagctccagagggtccagaaggtccgagagctggaactggtctatgcccgggcccagctggagcnnnnnnnnnnnnnnnnnnnnnnnnnnnnnnnngtggaggtgaagaagttcaagcagatgacagaggccataggccccagcaccatcagggaccttgctgtggctgggcctgagatgcaggtaaaactgctccagnnnnnnnnnnnnnnntcaaccctcatcaccgatggctccactcccatcaacctcttcaacacagcctttgggctgctggggatggggcccgagggtcagcccctgggcagaagggtngccagtgggcccagcccnnnnnnnnnnnnnnnnnnnnnnnnnnnnnnnnnnnnnnnnnnnnnnnnngacaaccacgtggtgcctgtactgcgctaactcctgattaat

SEQ ID NO: 2565 - DNA, 451 bp, Homo sapiens
cggacagactgtgaagcacgttcacgtccatgttcttcccaggaaggctggagactttcacaggaatgacagcatctatgaggagctccagaaacatgacaaggaggactttcctgcctcttggagatcagaggaggaaatggcagcagaagccgcagctctgcgggtctactttcagtgacacagatgtttttcagatcctgaattccagcaaaagagctattgccaaccagtttgaagaccgcccccccgcctctccccaagaggaactgaatcagcatgaaaatgcagtttcttcatctcaccatcctgtattcttcaaccagtgatcccccacctcggtcactccaactcccttaaaatacctagacctaaacggctcagacaggcagatttgaggtttccccctgtctccttattcggcagccttatgattaaacttccttctctg

SEQ ID NO: 2566 - DNA, 517 bp, Homo sapiens
aaagccagtaaccatgagtatgaggaaatctctttctgttgctggcttacagtttctctgtgtgctttgtggttgctgtcatatttgctctagaagaaaaaaaaaaaaggaggggaaatgcattttccccagagataaaggctgccattttgggggtctgtacttatggcctgaaaatatttgtgatccataactctacacagcctttactcatactattaggcacactttccccttagagccccctaagtttttcccagacgaatctttataatttcctttccaaagataccaaataaacttcagtgttttcatctaattctcttaaagttgatatcttaatattttgtgttgatcattatttccattcttaatgtgaaaaaaagtaattatttatacttattataaaaagtatttgaaatttgcacatttaattgtccctaatagaaagccacctattctttgttggatttcttcaagtttttctaaataaatgtaacttttcacaagagtcaac

SEQ ID NO: 2567 - DNA, 122 bp, Homo sapiens
  misc_feature (34)..(34): n includes a, c, g, or t, or contains no nucleotide
tactctctcggggtgaagtcatcagggtttctgntccaaataggcttggtcttgtttagttcttcctgatcaatgtatttctctttgatcttcttagttttcttcttcttatccttaccgct

SEQ ID NO: 2568 - DNA, 563 bp, Homo sapiens
  misc_feature (146)..(146): n includes a, c, g, or t, or contains no nucleotide
  misc_feature (148)..(153): n includes a, c, g, or t, or contains no nucleotide
  misc_feature (155)..(156): n includes a, c, g, or t, or contains no nucleotide
  misc_feature (371)..(385): n includes a, c, g, or t, or contains no nucleotide
  misc_feature (460)..(460): n includes a, c, g, or t, or contains no nucleotide
catacaaataacacgagaagatttgttatatatggagttagtataaagtgcacataaatttgtagactgaaaagtgtagattctcttacccagtcctcataatttttttttcagtttcttctgaaaaccagatggagagattttcngnnnnnnanncttaataactgttattggtctttgaggttcttttatttaattaaatatatacatttttgtaactaagtttaattaaagaattataagacagtataatggtgagtaaattggcatatagattcttacatattttgttatatagcatttctctaattttatcaagtattaagaggactgaaaaacctcaaggccattgatgtaaagctactgcatgnnnnnnnnnnnnnnnagagggatgatctagggatgactggaagaaggtgtgtacaaagactgcagggtttccattccagctccagctttngaagtttgattccagaaaaactcaaaatttagcgtatttctggtgtgtttcataaaatcagactatcaaagagaagaaaccccagtgggtcatgtggttacca

SEQ ID NO: 2569 - DNA, 550 bp, Homo sapiens
agtttgctggatttcctgaagagcgatgaaggtggcaaagtgctgcttccaaagctcattgacttttctgctcagattgcagagggaatggcatacatcgagcggaagaactacattcaccgggacctgcgagcagctaatgttctggtctccgagtcactaatgtgcaaaattgcagattttggccttgctagagtaattgaagataatgagtacacagcaagggaaggtgctaagttccctattaagtggacggctccagaagcaatcaactttggatgtttcactattaagtctgatgtgtggtcctttggaatcctcctatacgaaattgtcacctatgggaaaattccctacccagggagaactaatgccgacgtgatgaccgccctgtcccagggctacaggatgccccgtgtggagaactgcccagatgagctctatgacattatgaaaatgtgctggaaagaaaaggcagaagagagaccaacgtttgactacttacagagcgtcctggatgatttctacacagccacggaagggcaatacc

SEQ ID NO: 2570 - DNA, 193 bp, Homo sapiens
  misc_feature (69)..(115): n includes a, c, g, or t, or contains no nucleotide
ctggttgtggactatgccacctgctccagctctgcctggtggggcagcagcgtgaaaaccagtatgatnnnnnnnnnnnnnnnnnnnnnnnnnnnnnnnnnnnnnnnnnnnnnnngcgggccactgaactgtcaggcgtctgacggccggtggcaggtgcacggcatcgtcagcttcgggtctcgcctcggct

SEQ ID NO: 2571 - DNA, 171 bp, Homo sapiens
tttaatcccgttatggactctgtctccaggagaggggtctatccacccctgctcattggtggatgttaaaccaatattcctttcaactgctgcctgctagggaaaaactactcctcattatcatcattattattgctctccactgtatcccctctacctggcatgtgcttg

SEQ ID NO: 2572 - DNA, 314 bp, Homo sapiens
  misc_feature (140)..(164): n includes a, c, g, or t, or contains no nucleotide
  misc_feature (210)..(210): n includes a, c, g, or t, or contains no nucleotide
  misc_feature (228)..(228): n includes a, c, g, or t, or contains no nucleotide
gctcgagtcttctttcttgatcttcttctcctggatcttctccgtgcacatcttataggcttcagactgctggtacgcccgcagctccttcatgtactgctgcttctctctctcggcctcatccaggtaccgctgctttnnnnnnnnnnnnnnnnnnnnnnnnncggcgcccagcatcttggtgatctcgggaaagggcagatccgggtngcgcgtgcggatctgctngcgccgctcgttcaggaagcgcacgtagcccgtgaccggtgccttgggcccattcggcagaatcttcttccgcttcttgcccttgg

SEQ ID NO: 2573 - DNA, 505 bp, Homo sapiens
aatgcctaagttttgacagcaggaagaaaacaattttttaaaaattctcattacatagacgcacaagaatatgtcacataaagaaaatgtgtttagaatactggttttctatttacgcatgatattttcctaagtaaaattgccaagtggacttggaagtccagaaaggaaaataatttaaattaatgctggtgatcttaacaatattttgtaaaatgatgcttcccccttctccatggtctagtcaattttgtacaattaggtatctgactttacaagtttgttatcctttctaatttttactgaactgaaagcacaaagaagactacacagaaaatctggaaacagttgcaggtgttgggaggaagatgaaatcgagctgtcttttaacttttgtatgtgttttatcagaatttgctggactatgctggcaaggactttgtttacgatcaaattgtactagtgtctgcagggtttgtcagtactcgtcaaagccaagtccaat

SEQ ID NO: 2574 - DNA, 510 bp, Homo sapiens
  misc_feature (33)..(34): n includes a, c, g, or t, or contains no nucleotide
  misc_feature (36)..(36): n includes a, c, g, or t, or contains no nucleotide
cctaggatacacagcctgcaggtccccaggacnngnatgacacccgcctcactgtggcagtgtattgcctgttaattgctgctaattctaattctgatgatgactcctactccattgtttaccccaaagcatcagctaggctggagtgatttgttacaaatgagcaaaagatgagtccttgcttccctcagaaataaaaggagctcagctgcagcgttgcattgggcttcttggcctcccaactcttcccactcccagaatccagaagtaagctctgcatgttccccttcctgggaggaaaccaattgtcagaaggatgtatgatgaccccctcccctcccatccttcacctcctaagcagtcctggcttttcctcatcactcccctctacagtgcctggtagacaagtgctacattgaagaacacaaacctcttgttaagacttgtcctgtagcttgatattacagatgtgctattagtgcaataaggtgaaggctgtctgcccagaga

SEQ ID NO: 2575 - DNA, 412 bp, Homo sapiens
  misc_feature (354)..(368): n includes a, c, g, or t, or contains no nucleotide
  misc_feature (370)..(370): n includes a, c, g, or t, or contains no nucleotide
cgtttcttcccacgtctgtttctgctaatatttaaaataaactttccttcttccctcctatacccacctgtaaggtgaaatctgctcttcttccaaatatataaaaaaggaattgccctccaggtaatccctttcctttttcccgtctatataagggaatgtcttccttcctatctatctgcaaaatggaaatctagacctccttcttcatccataagtggactgtgccagtacaatacatgcctcagcccccaagcctagaaggacctctagtctccttcctgtgtggaatcttccccactccatccctcccaagttgcctgtattgataatgtactcactcatgctgtactnnnnnnnnnnnnnnngnacacccttggtgggtgggcctgtggtgatggtttgcatcctt

SEQ ID NO: 2576 - DNA, 315 bp, Homo sapiens
  misc_feature (72)..(76): n includes a, c, g, or t, or contains no nucleotide
  misc_feature (159)..(159): n includes a, c, g, or t, or contains no nucleotide
  misc_feature (208)..(208): n includes a, c, g, or t, or contains no nucleotide
  misc_feature (286)..(290): n includes a, c, g, or t, or contains no nucleotide
tccagtgcccaccaggaggatctgcgcacggtgcacagcccaccagagcactacagccttttattgagtggnnnnnggcaagtgctgggctgtggtcgtgccctgacagcatcttccccaggcagcggctctgtggaggaggccatactcccctagttngccactggggccaccaccctgaccaccactgtgcccctcattgttactnccttgtgagataaaaactgattaaacctttgtggctgtggttggctgaaaaaaaaaaaaaaaaaaaaaaaaaaaaaannnnncaccctcaatgatgatgatgaatga

SEQ ID NO: 2577 - DNA, 569 bp, Homo sapiens
  misc_feature (26)..(26): n includes a, c, g, or t, or contains no nucleotide
  misc_feature (29)..(29): n includes a, c, g, or t, or contains no nucleotide
  misc_feature (64)..(64): n includes a, c, g, or t, or contains no nucleotide
cagctctgccagttttagaatgaaanttncacatgaatatatttttaaatttacttgttgggtntttgaactgattatgggcagtttgactgtccttaattaagcctaacagacaagtggaccaaagttaagctgtttcctgttgtgctgaactgttgtccgttgaaacacattgattcccctccccctacttattgccacagaggagggatcttttccataactgaaggggagttttgagaagtatatttctggaaacttaaatggattatattcttattatatagttgggtacgaatgtatctattttcattgtggtaaaagttcttccttttctctttcccaggtcatgttcttcctcaaattttttccatattgtaaaatcaaacttaaatcattagaatacaagtttatgtattctaatgcatgttagaaaattgaataatataggaaacacaaggctgcatgatgaaaagtgcattgttactgtgcagttaaattttggcttctggctttctttagtttgaacaaacgttcttgtctaccccagtagtcacagatgccatctt

SEQ ID NO: 2578 - DNA, 474 bp, Homo sapiens
  misc_feature (195)..(205): n includes a, c, g, or t, or contains no nucleotide
  misc_feature (207)..(213): n includes a, c, g, or t, or contains no nucleotide
  misc_feature (221)..(225): n includes a, c, g, or t, or contains no nucleotide
acagaacaaccgagggacaaaggagattggatgactgggaagcgctggcccggaacagcccctgcaactgtggggcctgcacacagcccttccacagttggcactgcaggtgcaggccaaccctttaaagaataaacaaggaagtcagctctttcactttttacaagttggcaaaaacagacttccggggaattnnnnnnnnnnncnnnnnnngtagagcnnnnngggtttaataaaactggttaaaaattgagtctttccctgaagtaagtgctctttccagatgaaaactactcttttggttttgtttgaaagtaagaaagggaggggaaactttgctcttttaataattatgttcagcctatgatgaagtatttgattattagacagcaatgtcactaataagttttaagttgtccaaagttaattgtaaacatcatcagtacagtactcttagttacagtaaagcaattg

SEQ ID NO: 2579 - DNA, 555 bp, Homo sapiens
  misc_feature (98)..(112): n includes a, c, g, or t, or contains no nucleotide
  misc_feature (341)..(341): n includes a, c, g, or t, or contains no nucleotide
  misc_feature (391)..(391): n includes a, c, g, or t, or contains no nucleotide
  misc_feature (508)..(508): n includes a, c, g, or t, or contains no nucleotide
tcagttttgccaggtggctttttattgggctggcagttgctgggctgatttatcttcgatacaaatgcccagatatgcatcgtcctttcaaggtgccnnnnnnnnnnnnnnntttgttttccttcacatgcctcttcatggttgccctttccctctattcggacccatttagtacagggattggcttcgtcatcactctgactggagtccctgcgtattatctctttattatatgggacaagaaacccaggtggtttagaataatgtcagagaaaataaccagaacattacaaataatactggaagttgtaccagaagaagataagttatgaactaatggncttgagatcttggcaatctgcccaaggggagacacaaaatagggattttnacttcattttctgaaagtctagagaattacaactttggtgataaacaaaaggagtcagttatttttattcatatattttagcatattcgaactaatttctaagaaatttagttatanctctatgtagttatagaaagtgaatatgcagttattctatgagtcgc

SEQ ID NO: 2580 - DNA, 553 bp, Homo sapiens
  misc_feature (50)..(68): n includes a, c, g, or t, or contains no nucleotide
tgactctggctcaggctccagggacttgtggggtgggaggggcttcccgnnnnnnnnnnnnnnnnnnnggtgtcagagcccataggcatcactcttcagcacctggtctgttcgctgcagggcatggtggacagtaatgctgagttctgtctcacactgatcaggctcagggccagagaggcaacaagagagcaagacccagggaatgggcccagggcaggaccctattcccttggggtcaagtgaaagggtagggggatagtcctgatcaagtgtgataaatttttatagacatatataaatatatatatattatatatatatttctaagtgtaactgtccttcctctgtgccaggaaacgggagggggctgatcctctgatcctcactccactgtcatgtttgaaagaggtattggtgttctggagtgggggtcaacccctccccagtctctgtgctaagttcacttgggaggatggcagtaggagccagggctggccatgggtcccctacccttccccgtaggatataccctggagaatggcaaaatgat

SEQ ID NO: 2581 - DNA, 331 bp, Homo sapiens
ttgcacttatgatttcatgtgcggggatcatctgccgtgcctggatcctgaaatagaggctaaattactcaggaagaacaccctctaaatgggaaagtattctgtactcttagatggattctccactcagttgcaacttggacttgtcctcagcagctggtaatcttgctctgcttgacaacatctgagtgcagccgtttgagaagaaaacatctattctctccaaaaatgcacccaactagctctatgtttacaaatggacataggactcaaagtttcagagaccattgcaatgaatccccaataattgcagaactaaactcatttataa

SEQ ID NO: 2582 - DNA, 581 bp, Homo sapiens
  misc_feature (99)..(99): n includes a, c, g, or t, or contains no nucleotide
  misc_feature (182)..(182): n includes a, c, g, or t, or contains no nucleotide
  misc_feature (184)..(185): n includes a, c, g, or t, or contains no nucleotide
  misc_feature (188)..(190): n includes a, c, g, or t, or contains no nucleotide
  misc_feature (192)..(192): n includes a, c, g, or t, or contains no nucleotide
  misc_feature (194)..(194): n includes a, c, g, or t, or contains no nucleotide
  misc_feature (196)..(197): n includes a, c, g, or t, or contains no nucleotide
  misc_feature (199)..(207): n includes a, c, g, or t, or contains no nucleotide
  misc_feature (215)..(215): n includes a, c, g, or t, or contains no nucleotide
  misc_feature (220)..(221): n includes a, c, g, or t, or contains no nucleotide
cagagaagcctgtctgtacttcattcaaaaagccaaaatagagagtatacagtcctagagaattcctctatttgttcagatctcatagatgacccccanggtattgtcttttgacatccagcagtccaaggtattgagacatattactggaagtaagaaatattactataattgagaactanannttnnnanantnnannnnnnnnncttttaanattgnncttttatcttaaaagggtggtagttttccctaaaatacttattatgtaagggtcattagacaaatgtcttgaagtagacatggaatttatgaatggttctttatcatttctcttccccctttttggcatcctggcttgcctccagttttaggtcctttagtttgcttctgtaagcaacgggaacacctgctgagggggctctttccctcatgtatacttcaagtaagatcaagaatcttttgtgaaattatagaaatttactatgtaaatgcttgatggaattttttcctgctagtgtagcttctgaaaggtgctttctccatttatttaaaactacccatgcaattaaaaggtacaatg

SEQ ID NO: 2583 - DNA, 525 bp, Homo sapiens
  misc_feature (87)..(184): n includes a, c, g, or t, or contains no nucleotide
  misc_feature (301)..(303): n includes a, c, g, or t, or contains no nucleotide
  misc_feature (305)..(315): n includes a, c, g, or t, or contains no nucleotide
tgattggactgagaatttggccacaaccaaattgatgctggctggaaccagaggccagaaagcctggccttgtccccatgtgggagnnnnnnnnnnnnnnnnnnnnnnnnnnnnnnnnnnnnnnnnnnnnnnnnnnnnnnnnnnnnnnnnnnnnnnnnnnnnnnnnnnnnnnnnnnnnnnnnnnagtatatcagagatatttttggaaaggagttggtctatgcaatgtcagtttggaatcttcttgaaagtttaatgtttttattaggagatttaaagaaaataaaggtctacaatatcnnnannnnnnnnnnntttcctgtttaccgcacaaactgaccacatggcatgtctatcaggatggagggtgtccatgttctcctctgtctttagggaggtgataaggagatgggcggaggggtgtttttttctttgactcccctcctttctaacagaatgttgccaccactgcttgagtgggctgtgtttgttcctctgtcccagcttctgttgtagaaaataaca

SEQ ID NO: 2584 - DNA, 204 bp, Homo sapiens
  misc_feature (126)..(145): n includes a, c, g, or t, or contains no nucleotide
aatggctcccgcaaagaagggtggcgagaagaaaaagggccgttctgccatcaacgaagtggtaacccgagaatacaccatcaacattcacaagcgcatccatggagtgggcttcaagaagcgtgnnnnnnnnnnnnnnnnnnnnattcggaaatttgccatgaaggagatgggaactccagatgtgcgcattgacaccaggct

SEQ ID NO: 2585 - DNA, 539 bp, Homo sapiens
  misc_feature (220)..(220): n includes a, c, g, or t, or contains no nucleotide
  misc_feature (223)..(223): n includes a, c, g, or t, or contains no nucleotide
  misc_feature (225)..(225): n includes a, c, g, or t, or contains no nucleotide
  misc_feature (227)..(227): n includes a, c, g, or t, or contains no nucleotide
  misc_feature (229)..(237): n includes a, c, g, or t, or contains no nucleotide
  misc_feature (285)..(319): n includes a, c, g, or t, or contains no nucleotide
tcttggtcttgatgccaagtttgggaaaggagctaagaagacatcccactaggaagagagagactacctccacatcaagaatatttaagttattatctcaaacagtgacatctcttgggaaaatggacttaataggaatatgggactgagttccagtcttttttaataaaataaaatcaagcaaaatcacatattctaaaaaatgcacttggattttaanaanananannnnnnnnntttgttcttcatgccctggagcagtctatggtaaataaaagagggagnnnnnnnnnnnnnnnnnnnnnnnnnnnnnnnnnnngctcctctcacgggtgtggttagcatggttgagtgggcgattcctccaagaacctgaggattatagggaggaactctgtgagatcgcagaattgtgctaatggcttctgttccgatgggtgaggcttgtcccgttagagctggtcccattagaggacgggtggctgtccattagagccagagaatgtaaaagtcacttcctctcctaaagctcctgtggg

SEQ ID NO: 2586 - DNA, 478 bp, Homo sapiens
  misc_feature (296)..(329): n includes a, c, g, or t, or contains no nucleotide
catgaatacaggatcacagtttgtgatggaaggagtgaagaacctggttttgaaacagcaaaatctacctgttactcgtattttggacaatcttatggagatgaagtcaaaccccgaaactgatgactatagatattttgatcccaaaatgctgcggggcaatgacagctcagttcccagaaataaaaatccattccaagaggccattgtttttgtggtgggaggaggcaactacattgaatatcagaatcttgttgactacataaaggggaaacaaggcaaacacattttatatnnnnnnnnnnnnnnnnnnnnnnnnnnnnnnnnnntaaaacagttgtcacaacttggacaaaagtaacacagaagaaccttactatgataatctacttggaatgtggataaatgtaaaaagaagaaaagttagaagagcaatatgtttccttctctgtaacagtgtcctaacagtgaaaatcag

SEQ ID NO: 2587 - DNA, 42 bp, Homo sapiens
ctaatcccacttgaagcagccctgagaaacatcgcccattct

SEQ ID NO: 2588 - DNA, 601 bp, Homo sapiens
tttgtgccttcttgcattcagctgagccaagaagacagcttttccgctgaagcttaaacaggcattaacgcttctttagatctgaagttgcaggttaagcttgtctggtcaacattccagtgtggaaaaataatttaaacaatcttattctcttaattcttttggcaacaaaaactattagtaatagctatttgggaccagacaaaatcagctttcatctataattcattggggataatgggagatttagataatgtatccagatttaaacctaccagtttgtcctaccccttaagcgtttaaaataaaatatgcaacaaaatggatgacttagtggagatggaagcccattaattgggttccccattaaatcgtttacatacaagaacacagtttttatactaaggatttgtgtttaaagtcttgtaaagttcatgtctttcacccagatatatcaaatgttagaagaccagtgtgacttcattagataacgtttagtgtatttagaatgtgtaaatttgtgctttgaactgtagtttaataaatgtaaaattgcatcatagtatttgttgacctaatgtaacccttgtatgattgcaat

SEQ ID NO: 2589 - DNA, 399 bp, Homo sapiens
  misc_feature (41)..(41): n includes a, c, g, or t, or contains no nucleotide
  misc_feature (82)..(82): n includes a, c, g, or t, or contains no nucleotide
  misc_feature (124)..(124): n includes a, c, g, or t, or contains no nucleotide
  misc_feature (211)..(211): n includes a, c, g, or t, or contains no nucleotide
  misc_feature (244)..(244): n includes a, c, g, or t, or contains no nucleotide
  misc_feature (260)..(260): n includes a, c, g, or t, or contains no nucleotide
tgctcatgtgttcctgggtgcagtgtctgtgttgggggctngccccaccctgggccagggtgcatggagggcatggccccancggggaggaaggtgggcctagggctggctccagggtgtgganagcctgggagtggtctccgtcctggggccccaggaggttcccgcaaggagcgactggggcaggtgctggaggaggtcagtggacaanatggggagatgtggaaaccccaaaagccccttntcaggcagccctgccnccaagaccgacagatggctaagggggccgcagacctggctcccccagctcctgtgtggagaaagggcaacagctgtcccggatggttattctctcctttcctcaaacacatttggaactcaagtaaatccgatgcatgt

SEQ ID NO: 2590 - DNA, 565 bp, Homo sapiens
  misc_feature (27)..(53): n includes a, c, g, or t, or contains no nucleotide
  misc_feature (487)..(487): n includes a, c, g, or t, or contains no nucleotide
  misc_feature (499)..(502): n includes a, c, g, or t, or contains no nucleotide
  misc_feature (504)..(505): n includes a, c, g, or t, or contains no nucleotide
cacatctgcccattctgtggttagtcnnnnnnnnnnnnnnnnnnnnnnnnnnncatctataggaaacatttttgtgattacggaatactttagttgattgctgaaaatattgaaaggtcttcattttacagtgatgagtacatatgcatgtttcggggacttggcccttctgatgaggggccctcggtactctggataacgaagcttgtgcagagtggtaaccatgcttacacactaaactataatataaaggaaatgaagccatgttaatctgagagcagtgtcgccatagttgtgttgtttacaatactctataaatgggttcctgttgccctgtaattaaactgctgcccgtagaggcctttcagttccttttctgtccttccccttcttaacacaagctcaaattttctaacttgtttttattttgaagacttttaaaatggacattttcaatacataaaaataaacagtgctttataaaaanaaaaaaaaaaannnnanncggccgcaattttggtagtatatggccacccgggatttgggacggtacctgagggctaca

SEQ ID NO: 2591 - DNA, 443 bp, Homo sapiens
  misc_feature (35)..(58): n includes a, c, g, or t, or contains no nucleotide
  misc_feature (72)..(72): n includes a, c, g, or t, or contains no nucleotide
  misc_feature (78)..(80): n includes a, c, g, or t, or contains no nucleotide
  misc_feature (82)..(83): n includes a, c, g, or t, or contains no nucleotide
  misc_feature (85)..(85): n includes a, c, g, or t, or contains no nucleotide
  misc_feature (147)..(147): n includes a, c, g, or t, or contains no nucleotide
  misc_feature (218)..(218): n includes a, c, g, or t, or contains no nucleotide
  misc_feature (224)..(224): n includes a, c, g, or t, or contains no nucleotide
gatgcttttgtaggtacctggaaacttgtctccannnnnnnnnnnnnnnnnnnnnnnnaagaagtaggagtnggcttnnncnncnaggaaagtggctggcatggccaaacctaacatgatcatcagtgtgaatggggatgtgatcanccattaaatctgaaagtacctttaaaaatactgagatttccttcatactgggccaggaatttgacgaagtncactgncagatgacaggaaagtcaagagcaccataaccttagatgggggtgtcctggtacatgtgcagaaatgggatggaaaatcaaccaccataaagagaaaacgagaggatgataaactggtggtggaatgcgtcatgaaaggcgtcacttccacgagagtttatgagagagcataagccaagggacgttgacctggactgaagttcgcattgaactctacaa

SEQ ID NO: 2592 - DNA, 581 bp, Homo sapiens
  misc_feature (30)..(54): n includes a, c, g, or t, or contains no nucleotide
  misc_feature (182)..(182): n includes a, c, g, or t, or contains no nucleotide
  misc_feature (190)..(190): n includes a, c, g, or t, or contains no nucleotide
  misc_feature (193)..(193): n includes a, c, g, or t, or contains no nucleotide
  misc_feature (200)..(200): n includes a, c, g, or t, or contains no nucleotide
  misc_feature (207)..(208): n includes a, c, g, or t, or contains no nucleotide
  misc_feature (211)..(212): n includes a, c, g, or t, or contains no nucleotide
  misc_feature (214)..(214): n includes a, c, g, or t, or contains no nucleotide
  misc_feature (216)..(216): n includes a, c, g, or t, or contains no nucleotide
  misc_feature (220)..(220): n includes a, c, g, or t, or contains no nucleotide
  misc_feature (222)..(222): n includes a, c, g, or t, or contains no nucleotide
  misc_feature (224)..(224): n includes a, c, g, or t, or contains no nucleotide
  misc_feature (235)..(235): n includes a, c, g, or t, or contains no nucleotide
  misc_feature (238)..(239): n includes a, c, g, or t, or contains no nucleotide
  misc_feature (248)..(252): n includes a, c, g, or t, or contains no nucleotide
  misc_feature (254)..(254): n includes a, c, g, or t, or contains no nucleotide
  misc_feature (256)..(258): n includes a, c, g, or t, or contains no nucleotide
  misc_feature (268)..(268): n includes a, c, g, or t, or contains no nucleotide
  misc_feature (275)..(276): n includes a, c, g, or t, or contains no nucleotide
ctcctcaagtacagcgccaaagactacttnnnnnnnnnnnnnnnnnnnnnnnnntgcatcgacatgctcaacgccaagctggctgtccaaaagtatgaggagctgttcccagctttctctgattcccgggaatgcaagttgatgaaaaaattgctagaggcccacgaggagcagaatgtggnacagctanacngagtcgntgaaggnntannantncatntncnggctggaccantgnntcaccaccnnnnngntnnncgcatcaagnagaccanncagggcgatgaggaggacctgcgctaagccccacccagccccccagtgcccgtcttcctgtcccatctgctcagagagagccaagctctaaagcacatgtagccgctgagacctgctgtttctgctgggggcaggctcctcttcccccagccccgggagcctcccccagcttcctgcagccccgacctctcaggttagaccctgggccctggagcttaggggattctccccaccccagccccacacctgctccttccctaatgctttgaggttttcttggttggaagctgcagctggcccaagaa

SEQ ID NO: 2593 - DNA, 527 bp, Homo sapiens
  misc_feature (104)..(104): n includes a, c, g, or t, or contains no nucleotide
  misc_feature (149)..(149): n includes a, c, g, or t, or contains no nucleotide
  misc_feature (433)..(433): n includes a, c, g, or t, or contains no nucleotide
ggaacagttagttctcatctagaatgaaagttccatatatgcattggtgaatatatatgtatacacatacttacatacttatatgggtatctgtatagataatntgtattagagtattatatagcttcttagtagggtctcaagtaagnttcattttttttatctgggctatatacagtcctcaaataaataatgtcttgattttatttcagcaggaataattttatttattttgcctatttataattaaagtatttttctttagtttgaaaatgtgtattaaagttacatttttgagttacaagagtcttataactacttgaatttttagttaaaatgtcttaatgtaggttgtagtcactttagatggaaaattacctcacatctgttttcttcagtattacttaagattgtttatttagtggtagagagntttttttttcagcctagaggcagctattttaccatctggtatttatggtctaatttgtatttaaacatatgcacacatataaaagttgatactg

SEQ ID NO: 2594 - DNA, 550 bp, Homo sapiens
  misc_feature (94)..(150): n includes a, c, g, or t, or contains no nucleotide
  misc_feature (153)..(274): n includes a, c, g, or t, or contains no nucleotide
  misc_feature (345)..(364): n includes a, c, g, or t, or contains no nucleotide
  misc_feature (409)..(433): n includes a, c, g, or t, or contains no nucleotide
ctatactttgtgagttcacctgtctttatactcaaaagtgtcccttaatagtgtccttccctgaaataaatacctaagggagtgtaacagtctnnnnnnnnnnnnnnnnnnnnnnnnnnnnnnnnnnnnnnnnnnnnnnnnnnnnnnnnngtnnnnnnnnnnnnnnnnnnnnnnnnnnnnnnnnnnnnnnnnnnnnnnnnnnnnnnnnnnnnnnnnnnnnnnnnnnnnnnnnnnnnnnnnnnnnnnnnnnnnnnnnnnnnnnnnnnnnnnnnnnatgtagtatgtttgatgtggattacctatacttatgttcgttttgatacatttttagcttctcattataannnnnnnnnnnnnnnnnnnnattcttcatagatagtatatataaaagtacattttaatagaaagnnnnnnnnnnnnnnnnnnnnnnnnntataaggtggctccatagctttatttgtaagtaggctggataaatggtgcttaaatggtaatgtactccacttcttcctattggaagattaacattatttaccaagaaggacttaag

SEQ ID NO: 2595 - DNA, 583 bp, Homo sapiens
  misc_feature (41)..(41): n includes a, c, g, or t, or contains no nucleotide
  misc_feature (53)..(53): n includes a, c, g, or t, or contains no nucleotide
  misc_feature (67)..(68): n includes a, c, g, or t, or contains no nucleotide
  misc_feature (444)..(458): n includes a, c, g, or t, or contains no nucleotide
caggagctctagttaatggagagctcccagcacactcggangcttgtgctttngtctccacgcaaanngataaataaaagcattggtggccttagctttgtgcgatagttattgagggaggacgtgcaattggccactgtgtggtctcagagtggtttgtcctgtctaggcatgtactaaacatgtcttatcccgggtctaaaatgaggcaaagttaggtcacagaatctagtccaaaaattagaaggctctatggggaatctgagacccagagagacactgagcccagtgtcactcacccaaagcatgggccctttccaactatggctttgaattagtcatgctcagatctcaaacacgaggtccacgctggggaggaatgcagccaaacgaaatgtctgaaacttgaatttagcccaacggtctccagttttgagacctccnnnnnnnnnnnnnnnatctacctatattctgcttctcagtggcctccttctgtcccgtctgacttcatccctctgtagctgctgccagtcccttactttctcaagaacctgccatggctccccatttctcctagaaagct

SEQ ID NO: 2596 - DNA, 517 bp, Homo sapiens
gaggcgccattgtgtcggctttgagccagactgggtctctctttaagccccggaaagcctatctgccccaggagttgctgggaaaggaaggatttgatgccctggatccctttattcccatcctggtttccaactatacccaaaggaatttgaaagttgtattcagtattatttggaaaacaattggcttcaacatgagaaagctcctacagaagaagggaaaaaagagctgctgttcctaagtaacgcgaacccctcgctgctggagcggcactgtgcctacctctaagccaagatcacagcatgtgaggaagacagtggacatctgctttatgctggacccagtaagatgaggaagtcgggatgacacaggaagaggagccaggcccttgtacctatgggattggacaggactgcagttggctctggacctgcattaaaatgggtttcactgtgaatgcgtgacaataagatattcccttgttcctaaaactttatatcagtttattggatgtgg

SEQ ID NO: 2597 - DNA, 593 bp, Homo sapiens
ccactgcacgactgtccccgtgggagcctccgtcaacatcacctgctccaccagcgggggcctgcgtgggatctacctgaggcagctcgggccacagccccaagacatcatttactacgaggacggggtggtgcccactacggacagacggttccggggccgcatcgacttctcagggtcccaggacaacctgactatcaccatgcaccgcctgcagctgtcggacactggcacctacacctgccaggccatcacggaggtcaatgtctacggctccggcaccctggtcctggtgacagaggaacagtcccaaggatggcacagatgctcggacgccccaccaagggcctctgccctccctgccccaccgacaggctccgccctccctgacccgcagacagcctctgccctccctgacccgccagcagcctctgccctccctgcggccctggcggtgatctccttcctcctcgggctgggcctgggggtggcgtgtgtgctggcgaggacacagataaagaaactgtgctcgtggcgggataagaattcggcggcatgtgtggtgtacgaggacatgtcgcacagccgctgca

SEQ ID NO: 2598 - DNA, 375 bp, Homo sapiens
cactagagcagagtacgagtctgaggcggagggagtaatggcaggacaagcgtttagaaagtttcttccactctttgaccgagtattggttgaaaggagtgctgctgaaactgtaaccaaaggaggcattatgcttccagaaaaatctcaaggaaaagtattgcaagcaacagtagtcgctgttggatcgggttctaaaggaaagggtggagagattcaaccagttagcgtgaaagttggagataaagttcttctcccagaatatggaggcaccaaagtagttctagatgacaaggattatttcctatttagagatggtgacattcttggaaagtacgtagactgaaataagtcactattgaaatggcatcaaca

SEQ ID NO: 2599 - DNA, 549 bp, Homo sapiens
  misc_feature (261)..(276): n includes a, c, g, or t, or contains no nucleotide
agatccaacctcatggggaccaagtttacagtttatgaccgtggcatctgccccatgaagggccggggtttggtaggagcggcccacacccggcaggagctggctgccatctcctatgaaacaaacgtacttggatttaaaggtcctaggaaaatgtctgtgatcattcctggaatgacactgaatcataagcagatcccctatcagccacaaaacaaccatgacagtttgctctcaaggtggcagaacagaactatggannnnnnnnnnnnnnnncacaacaaggcccccgtctggaacagtgacactcagtcctatgtcctcaacttccgtggccgggtcactcaggcgtctgtgaagaacttccagctagtccacaaaaatgaccctgattatatagtcatgcagtttggacgtgtggcagatgacgtgttcacactggattacaactacccactttgtgcagtacaagcctttgccatctccctttctagctttgacagtaagctggcgtgtgaatgagagaacagtcaggcagggagcccttct

SEQ ID NO: 2600 - DNA, 484 bp, Homo sapiens
  misc_feature (34)..(34): n includes a, c, g, or t, or contains no nucleotide
  misc_feature (37)..(37): n includes a, c, g, or t, or contains no nucleotide
  misc_feature (39)..(39): n includes a, c, g, or t, or contains no nucleotide
  misc_feature (43)..(44): n includes a, c, g, or t, or contains no nucleotide
  misc_feature (47)..(72): n includes a, c, g, or t, or contains no nucleotide
  misc_feature (94)..(96): n includes a, c, g, or t, or contains no nucleotide
  misc_feature (98)..(100): n includes a, c, g, or t, or contains no nucleotide
  misc_feature (103)..(104): n includes a, c, g, or t, or contains no nucleotide
  misc_feature (110)..(334): n includes a, c, g, or t, or contains no nucleotide
ctcaccagtccatagttttagagtaccgcaaacnccnanagtnntannnnnnnnnnnnnnnnnnnnnnnnnnaggtagaaaagattatataagnnnannnaanntatatnnnnnnnnnnnnnnnnnnnnnnnnnnnnnnnnnnnnnnnnnnnnnnnnnnnnnnnnnnnnnnnnnnnnnnnnnnnnnnnnnnnnnnnnnnnnnnnnnnnnnnnnnnnnnnnnnnnnnnnnnnnnnnnnnnnnnnnnnnnnnnnnnnnnnnnnnnnnnnnnnnnnnnnnnnnnnnnnnnnnnnnnnnnnnnnnnnnnnnnnnnnnnnnnnnnnnnnnnnnnnnnnngtataagtgtacctttgtgctctccaaacctcaatcccctcaaattttgatggtcaacttatcaagaggtgatcagagccaagggtgaggaatcatcaaataataatttgtttacagaaggaaatatctccaggcagtccatctgcttca

SEQ ID NO: 2601 - DNA, 457 bp, Homo sapiens
  misc_feature (35)..(36): n includes a, c, g, or t, or contains no nucleotide
  misc_feature (38)..(39): n includes a, c, g, or t, or contains no nucleotide
  misc_feature (144)..(161): n includes a, c, g, or t, or contains no nucleotide
  misc_feature (165)..(165): n includes a, c, g, or t, or contains no nucleotide
  misc_feature (173)..(174): n includes a, c, g, or t, or contains no nucleotide
  misc_feature (181)..(181): n includes a, c, g, or t, or contains no nucleotide
  misc_feature (188)..(188): n includes a, c, g, or t, or contains no nucleotide
  misc_feature (196)..(197): n includes a, c, g, or t, or contains no nucleotide
  misc_feature (300)..(314): n includes a, c, g, or t, or contains no nucleotide
  misc_feature (322)..(322): n includes a, c, g, or t, or contains no nucleotide
  misc_feature (360)..(362): n includes a, c, g, or t, or contains no nucleotide
tcaaaactgttatgcctaaatggtgaatatgcaannannatcattttctgtctgttttaatcatgtatctggaatagggtcgggaagggtttgtgctattccccacttactggacagcctgtataacctcaagttctgatggtnnnnnnnnnnnnnnnnnnattncccacaanncctctanaagcttnaaccgaanntactttaaatcgtgtgccttcctgtgaaagcctggccttcaaaccaatgaacagcaaagcataaccttgaatctatactcaaattttgcaatgaggcagtggnnnnnnnnnnnnnnntctaaccntctttgaatcattggaaagaataaagaatgaaacaaannnaaggttaattggatctgattttgtgaagctgcataaagcaagattactctataatacaaaaatccaaccaactcaattattgagcacgtacaatg

SEQ ID NO: 2602 - DNA, 589 bp, Homo sapiens
  misc_feature (407)..(422): n includes a, c, g, or t, or contains no nucleotide
cctgagccccttcagctttgaggggggtgatactccaggctgtttggggtgggagccaaaaagagttgagaggccagggcccttggtggaaaggggcaccagccttggtctgagatagtcacaacccaggtgacgatgccctctcagccaacactgccaacctgaccctgtcatcccgattgacagcgccacttcaggtggctgggtgactaaagggcttgtcttggtggggtctcccacccctccaagacccattctgcacagtccctccagggtttgggcaggagatggccaatcatgcgcccacctctccagtgctgcctgcagtcagctcggcctccccgacctgcagccccagactctgctctcccagcactgactcactcctgcctgggaggggaatgcannnnnnnnnnnnnnnngtcctggtattgggaggtttctgggaagggcagaggataaatgtggccctgcctgctcccaggtatacctaggaccacctggccagatccgctcccagacggccttggactgcttgcatttccccggagaaaaaggggttaataaatgggccatcctttcctgaaaa

SEQ ID NO: 2603 - DNA, 542 bp, Homo sapiens
  misc_feature (122)..(122): n includes a, c, g, or t, or contains no nucleotide
  misc_feature (184)..(184): n includes a, c, g, or t, or contains no nucleotide
  misc_feature (300)..(301): n includes a, c, g, or t, or contains no nucleotide
  misc_feature (316)..(317): n includes a, c, g, or t, or contains no nucleotide
  misc_feature (319)..(337): n includes a, c, g, or t, or contains no nucleotide
  misc_feature (343)..(376): n includes a, c, g, or t, or contains no nucleotide
  misc_feature (459)..(499): n includes a, c, g, or t, or contains no nucleotide
gcaccttctgattttacttaagcagctaccattccatggacttgcctcccagagcagcacaatgcccgtctgagccccacgtggcaggagcctctgggacggggcacacacaggcccagccntctgtgctgtctcctcctctgtgcgcctcagactcggggtgagggaggcgggcagcctctcngccagccttcccgtccttcagttcaacgacatctttggagtgtttttgttttctcttccaagggccgtcccgttgtgttaggaagggtgagtggctggttccagggtgggccggtnnccagctccggggtgnngnnnnnnnnnnnnnnnnnnnccctgnnnnnnnnnnnnnnnnnnnnnnnnnnnnnnnnnntgtttacatttgttttattgtacataggtttgtaaacattattgcctgagatatttgtatataacttgggctttgtagctttnnnnnnnnnnnnnnnnnnnnnnnnnnnnnnnnnnnnnnnnngtgtcctcctctgggcagctgtataggatcatcatgtggttac

SEQ ID NO: 2604 - DNA, 484 bp, Homo sapiens
  misc_feature (100)..(101): n includes a, c, g, or t, or contains no nucleotide
  misc_feature (103)..(103): n includes a, c, g, or t, or contains no nucleotide
  misc_feature (111)..(111): n includes a, c, g, or t, or contains no nucleotide
  misc_feature (118)..(118): n includes a, c, g, or t, or contains no nucleotide
  misc_feature (130)..(130): n includes a, c, g, or t, or contains no nucleotide
  misc_feature (135)..(136): n includes a, c, g, or t, or contains no nucleotide
  misc_feature (147)..(148): n includes a, c, g, or t, or contains no nucleotide
  misc_feature (153)..(153): n includes a, c, g, or t, or contains no nucleotide
  misc_feature (162)..(162): n includes a, c, g, or t, or contains no nucleotide
  misc_feature (191)..(191): n includes a, c, g, or t, or contains no nucleotide
  misc_feature (220)..(222): n includes a, c, g, or t, or contains no nucleotide
  misc_feature (298)..(298): n includes a, c, g, or t, or contains no nucleotide
  misc_feature (331)..(332): n includes a, c, g, or t, or contains no nucleotide
  misc_feature (377)..(393): n includes a, c, g, or t, or contains no nucleotide
acaagaggtggatcactgggaagacgaagcccagctcccagtcccagacctcaaggatcttgctgtcctccatgccatccgcttccaagacgggttaaanngncctttctngctttcnaaatatgctatnggagnnccacagttgannggacnagtagtttncctgcaggagcctaccctgaaatctcttnctcagcttaacatggaaatgaggatcccnnnccagccccagaaccctctggggaagaatgttgggggccgtcttcctgtggttgtatgcactgatgagaaatcaggngtttctgctccaaacgaccattttatcttcgtnntctgcaacttcttcaattccagagtttctgagaacagacccaaannnnnnnnnnnnnnnnngaacacctggctaccattttgttttctcctgcccttgttggtgcatggttctaagcgtgcccctccagcgcctatcatacgcctgacacag

SEQ ID NO: 2605 - DNA, 606 bp, Homo sapiens
  misc_feature (28)..(347): n includes a, c, g, or t, or contains no nucleotide
gagtgctctgtaggagctgtagactggnnnnnnnnnnnnnnnnnnnnnnnnnnnnnnnnnnnnnnnnnnnnnnnnnnnnnnnnnnnnnnnnnnnnnnnnnnnnnnnnnnnnnnnnnnnnnnnnnnnnnnnnnnnnnnnnnnnnnnnnnnnnnnnnnnnnnnnnnnnnnnnnnnnnnnnnnnnnnnnnnnnnnnnnnnnnnnnnnnnnnnnnnnnnnnnnnnnnnnnnnnnnnnnnnnnnnnnnnnnnnnnnnnnnnnnnnnnnnnnnnnnnnnnnnnnnnnnnnnnnnnnnnnnnnnnnnnnnnnnnnnnnnnnnnnnnnnnnnnnnnnnnnnnnnnnnnnnnnnnnggactaggagataatgtgtatgtaggtttatgtgatgggatatcaccctgaagagttgtgtcttttgtggccagtgacaaatccaggaaatgaatgttgctgatagggataaatcttgaggctgagggcgggtggtacagatgtgtatgggaaaccccaacccctatatattgtaaatagatgggctgggctaaacattgttgccgtttcatacttctaccaactcagcttttacacaataaagctctactgtctctgg

SEQ ID NO: 2606 - DNA, 559 bp, Homo sapiens
  misc_feature (28)..(28): n includes a, c, g, or t, or contains no nucleotide
  misc_feature (42)..(42): n includes a, c, g, or t, or contains no nucleotide
  misc_feature (49)..(49): n includes a, c, g, or t, or contains no nucleotide
  misc_feature (62)..(76): n includes a, c, g, or t, or contains no nucleotide
  misc_feature (82)..(82): n includes a, c, g, or t, or contains no nucleotide
  misc_feature (99)..(99): n includes a, c, g, or t, or contains no nucleotide
  misc_feature (103)..(103): n includes a, c, g, or t, or contains no nucleotide
  misc_feature (164)..(221): n includes a, c, g, or t, or contains no nucleotide
  misc_feature (378)..(378): n includes a, c, g, or t, or contains no nucleotide
  misc_feature (393)..(393): n includes a, c, g, or t, or contains no nucleotide
  misc_feature (423)..(423): n includes a, c, g, or t, or contains no nucleotide
  misc_feature (428)..(428): n includes a, c, g, or t, or contains no nucleotide
  misc_feature (449)..(449): n includes a, c, g, or t, or contains no nucleotide
  misc_feature (470)..(470): n includes a, c, g, or t, or contains no nucleotide
  misc_feature (495)..(511): n includes a, c, g, or t, or contains no nucleotide
gaggagctgcctgacttcatggcacctnctgtagagccaccngcctcanccctggagctgannnnnnnnnnnnnnntagagntggcagagaggggtggncagncacagctccagccagcagctcccacactgctcccagtcctgggcacagtggaagctatggnnnnnnnnnnnnnnnnnnnnnnnnnnnnnnnnnnnnnnnnnnnnnnnnnnnnnnnnnntcattcagcagagcagcagccctgctgctgaagggcctgctgctactgctgctggggctgtttgcctgcctgcaggaggtgctggagagcaagaaaaggagcctgtgagcaggggttccagcaggtcctcctgctcccagaggcgacctcctcctcnaggcatggaggtttnccctcagctgggcatctgggccatttgccnctaangtgctgcccaggatggcctcntcttgacaggcggacaggggntgagggggccagggggcatctccannnnnnnnnnnnnnnnncagcagctgcaccccagaatctgtatgcctgcacctgcccaaggattt

SEQ ID NO: 2607 - DNA, 596 bp, Homo sapiens
  misc_feature (47)..(48): n includes a, c, g, or t, or contains no nucleotide
  misc_feature (50)..(51): n includes a, c, g, or t, or contains no nucleotide
  misc_feature (62)..(62): n includes a, c, g, or t, or contains no nucleotide
  misc_feature (66)..(66): n includes a, c, g, or t, or contains no nucleotide
  misc_feature (68)..(68): n includes a, c, g, or t, or contains no nucleotide
ctctgtccttgttaataaagtgctgctgtgtttgactctgaacatannannaaaaaaaaaanaaananttttttatgaaagactttcctcctttacaagaaagaaatggggtgctgcctttctgtttagtaaaagcagaatttgcagtggcatctaaagagatcttttttaaataaaaattatgtattgtggcataatcctttttttgagctctacagagaacagtcttttggtaatagtggcaggtatttattccttctgaatatataccccattataggaataactgttacttatttaggattccatcattgaaaattttgacccaaggcacagcagtgaaatttatagttctcaatttagttgtcattattgacaggcattggtattattagtcattgctaagcaactaaaacttcatcagttcaaataagttttaattgtcaaatgaagtataaacacatgaactttctagaaatatttcctcttttggataggtctttaaccagttcatatatatactttgtcaaatatatggatgtgtatgtgtacatttataagaaccagtatggatacatccattcactgtggtacat

SEQ ID NO: 2608 - DNA, 404 bp, Homo sapiens
  misc_feature (42)..(42): n includes a, c, g, or t, or contains no nucleotide
  misc_feature (51)..(51): n includes a, c, g, or t, or contains no nucleotide
  misc_feature (54)..(55): n includes a, c, g, or t, or contains no nucleotide
  misc_feature (58)..(58): n includes a, c, g, or t, or contains no nucleotide
  misc_feature (66)..(66): n includes a, c, g, or t, or contains no nucleotide
  misc_feature (75)..(75): n includes a, c, g, or t, or contains no nucleotide
  misc_feature (85)..(85): n includes a, c, g, or t, or contains no nucleotide
tcaactcaaggtacgcccactgcaaggcctccctcccaccgnggcccctgnccnngcnacctggcntctctgcanccagggtganaaggggtcctcgtctgccccccaatgctccagggccagtcctaaggagctgagggtctgaggacgcagggagggtggaggtgtcctgaggctgatggacagtgaccgccactggcccccaacatgaccacacgtgggtgctgaactcggggcgccgtgcccaccggcatggtcctcccgagctccgacagcattacctcacccggccccatctgttgccccggtccagccctgatggcgcgcgcctggtctgtctgattcccctagccgccaccccacgtttctgtaccgggtctctgcagtgttaaacggacgtgtaa

SEQ ID NO: 2609 - DNA, 407 bp, Homo sapiens
  misc_feature (73)..(73): n includes a, c, g, or t, or contains no nucleotide
  misc_feature (133)..(133): n includes a, c, g, or t, or contains no nucleotide
  misc_feature (221)..(221): n includes a, c, g, or t, or contains no nucleotide
  misc_feature (283)..(284): n includes a, c, g, or t, or contains no nucleotide
agattcctggaagtggctcagatcacattacgggagtttttcaatgccattatcgcaggcaaagatgttgatncttcctggaagaaggccatatacaaggtcatctgcaagctggatagtgaagtccctgagnttttcaaatccccgaactgcctacaagagctgcttcatgagtagaaatttcaacaactctttttgaatgtatgaagagtagcagtccnctttggatgtccaagttatatgtgtctagattttgatttcatatatatgtgtatgggaggcnnggatatgttatgaaatcagctggtaattcctcctcatcacgtttctctcattttcttttgttttccattgcaaggggatggttgttttctttctgcctttagtttgcttttgcccaaggccct

SEQ ID NO: 2610 - DNA, 100 bp, Homo sapiens
ccccctgtctgaccgctccaaagtccccccggcttgctatgatgcctgacaactaaatatccttatccaaatcaataaagagagaatcctccctccagaa

SEQ ID NO: 2611 - DNA, 468 bp, Homo sapiens
  misc_feature (183)..(240): n includes a, c, g, or t, or contains no nucleotide
  misc_feature (399)..(399): n includes a, c, g, or t, or contains no nucleotide
  misc_feature (443)..(443): n includes a, c, g, or t, or contains no nucleotide
ttcaactgcagctgggatggctgtgataaaaagtttgctcgttcggatgagctgtcacgccaccgcagaactcacacaggggagaagaagtttgtgtgcccggtgtgtgaccgacgtttcatgcgcagtgaccacctgacgaagcatgcccggcgccacatgacgaccaagaagatcccaggnnnnnnnnnnnnnnnnnnnnnnnnnnnnnnnnnnnnnnnnnnnnnnnnnnnnnnnnnnccactggtgagcatgccagcctctgcctgaaaggtccattaggacatcactcatgggatttttaaaaagcctctttccaggaatggaactgatggattcctctcccactgcctcacccaaaaaaaacggtcttggcggcctaggggaagatcggggagnctggttttgatgaaagtatgttaacttttcttttccacttgggnaccctgttcagtatcttttgtagtt

SEQ ID NO: 2612 - DNA, 439 bp, Homo sapiens
ctccccagtacttggctgttgagaggagtttggatcttgacataagtaaaaccaatgtgaatggaggagccattgctttgggtcacccactgggaggatctggatcaagaattactgcacacctggttcacgaattaaggcgtcgaggtggaaaatatgccgttggatcagcttgcattggaggtggccaaggtattgctgtcatcattcagagcacagcctgaagagaccagtgagctcactgtgacccatccttactctacttggccaggccacagtaaaacaagtgaccttcagagcagctgccacaactggccatgccctgccattgaaacagtgattaagtttgatcaagccatggtgacacaaaaatgcattgatcatgaataggagcccatgctagaagtacattctctcagatttgaaccagtgaaatatg

SEQ ID NO: 2613 - DNA, 470 bp, Homo sapiens
  misc_feature (205)..(205): n includes a, c, g, or t, or contains no nucleotide
  misc_feature (287)..(290): n includes a, c, g, or t, or contains no nucleotide
  misc_feature (293)..(293): n includes a, c, g, or t, or contains no nucleotide
  misc_feature (300)..(309): n includes a, c, g, or t, or contains no nucleotide
  misc_feature (350)..(350): n includes a, c, g, or t, or contains no nucleotide
  misc_feature (354)..(355): n includes a, c, g, or t, or contains no nucleotide
  misc_feature (382)..(382): n includes a, c, g, or t, or contains no nucleotide
  misc_feature (384)..(384): n includes a, c, g, or t, or contains no nucleotide
  misc_feature (386)..(386): n includes a, c, g, or t, or contains no nucleotide
tgccagattatcagacctcttcatgttaaaagaccatctcctgtaaaactgacctagtggacaagctgaatttgaaatagactgtgaagtaagctgtaacttgtcattttaattttgtttaacacggttactgacttagatgatgtattaaataccaagataaagaaaaatgcacctaaaatctaattagaattctctgggtcancaagtcaaggtggtattgatctgtgttaatctgagtaacttattgcctagcctataaataaattccaaaatatccaattcannnnttnttgaaannnnnnnnnntttgttttctttccattacacaattagactcctacagtttnaaannaaactttaaaccactatcttgcactgntnanttttttctacctttgtaaatagaaacatttctgcataaaagtcatacatatgaagcaagggctgaatcataatcacaaggctta

SEQ ID NO: 2614 - DNA, 424 bp, Homo sapiens
  misc_feature (45)..(45): n includes a, c, g, or t, or contains no nucleotide
  misc_feature (186)..(186): n includes a, c, g, or t, or contains no nucleotide
  misc_feature (301)..(315): n includes a, c, g, or t, or contains no nucleotide
  misc_feature (324)..(359): n includes a, c, g, or t, or contains no nucleotide
cttccaggagcacgagggccttgcggcacaggactgtgccctgtnctgtcccctgcaccccggctcagctgagctggggaacactgctgtcgtgtgaagtcacagtggccttgttggtgcccacagggctgtgtggatggaggaagctgtccctgcccagtgcatcccccaggtcatcacggggangcaggaggcaggccctgccctgccctctcctcacaggtctgttgcagggactccagaaaccattctgggagccgtggatgggggcggagctggggtttggtgcagtttccagggnnnnnnnnnnnnnnncctgaatannnnnnnnnnnnnnnnnnnnnnnnnnnnnnnnnnnnggccacctggggctcaggtacacagtggggtctctcggaagccaccgtgtggttctttcacaggc

SEQ ID NO: 2615 - DNA, 242 bp, Homo sapiens
  misc_feature (41)..(41): n includes a, c, g, or t, or contains no nucleotide
ttaaggcccagcagcctgttgataagctaccctgtctcacncatgtgctggtgtggaaacggggcccagccagcacgcctcaaggtagatggaatccccactggtcagagaaaaagctatgcggacactccagcttggcctgggtcacagcactgactcctcacccgctagtctggctgttaagaggagaaagtgcactgccttccagcccaggaggaggacagcattttgtatttgttcca

SEQ ID NO: 2616 - DNA, 199 bp, Homo sapiens
  misc_feature (89)..(89): n includes a, c, g, or t, or contains no nucleotide
cggcggcccaggtacgaagctgcaactctgcgcgcagtgggcgagatctcatcagccccaggctgcaggtgaggcttcaggggatgctngggccccactgcccctccgctgccttgccctccatccttcctctgttccttctggccgggcaccacagcactggggctcacctcttggttgatcctcttgtactgggaga

SEQ ID NO: 2617 - DNA, 478 bp, Homo sapiens
  misc_feature (26)..(75): n includes a, c, g, or t, or contains no nucleotide
  misc_feature (124)..(124): n includes a, c, g, or t, or contains no nucleotide
  misc_feature (136)..(136): n includes a, c, g, or t, or contains no nucleotide
  misc_feature (181)..(181): n includes a, c, g, or t, or contains no nucleotide
  misc_feature (223)..(223): n includes a, c, g, or t, or contains no nucleotide
cattcaaagctgagctgtccaagctnnnnnnnnnnnnnnnnnnnnnnnnnnnnnnnnnnnnnnnnnnnnnnnnnnttgcgggtggcaccttctcatctccggtgaagctgaaggggcctgtgtnccctgaaagggnccagcacatcactggttttctaggagggactcttaagttttctancctgggctgacgttgccttgtccggaggggcttgcagggtgnctgaagccctggggcagagaacagagggtccagggccctcctggctcccaacagcttctcagttcccacttcctgctgagctcttctggactcaggatcgcagatccggggcacaaagagggtggggaacatgggggctatgctggggaaagcagccatgctccccccgacctccagccgagcatccttcatgagcctgcagaactgctttcctatgtttacccaggggacctcctttcagatgaactgggaaga

SEQ ID NO: 2618 - DNA, 453 bp, Homo sapiens
ttggcttctgattatttgcagctgcgatggatgtttacaggaacccagccagagtttgcctccctgcacttcatcccggagcgcacctgcttcccccacttcaccttcggagaggacacttcaaactgcggacacacgcaaaagcgactcccagctccgtttgatgtgagttgagccttcaggccagctgggtttagcccgaggctggtcttagatgcagcgactgtttcaggggtgactcagaagaaaaagaagctgaggaagctgttggggggctgagggtgggattctcgctccttcatttcaggttactcgttcttcagcaagttggcaaaacagacatcatgctggtgagtgccacgttactcccctggctggaaatgcttttctgaaagtatgagtgttgtgcctacttaattctgataaacctgtctaagcaatacttaggaggct

SEQ ID NO: 2619 - DNA, 141 bp, Homo sapiens
tctggatcaagatcccatgcacagactacattggcagctgtacctttgaacacttctgtgatgtgcttgacatgttaattcctactggggagccctgcccagagcccctgcgtacctatgggcttccttgccactgtccct

SEQ ID NO: 2620 - DNA, 260 bp, Homo sapiens
  misc_feature (84)..(98): n includes a, c, g, or t, or contains no nucleotide
ctgcagttggttgctttttgattgcttatttaatagagttgttaagatattttacatcttctcctgttagctgttcagcttttnnnnnnnnnnnnnnnacactacacagtgctgaagtccagctggtacacaccggggtgacaccttggctgcatctgttctcaacagtcagacacttcttctaattggttgatgctgggctgtactggttgctaaatattgcacatcattttaaaactatttgagatgcacttttgtac

SEQ ID NO: 2621 - DNA, 497 bp, Homo sapiens
  misc_feature (54)..(54): n includes a, c, g, or t, or contains no nucleotide
  misc_feature (101)..(101): n includes a, c, g, or t, or contains no nucleotide
  misc_feature (439)..(454): n includes a, c, g, or t, or contains no nucleotide
gtgcctacttcatgatcatgaattccagttaatttataaagaggcgatttttgntgtgccattcacactggtctttttcacattgttttgagcttattgcnagtatatgttttgggatttttctgtaaaatgggtgtaattttcctaatacaggtatgtaacaacaaaagaagttgcctgcatgccggtccaaattgttctgtataaagatgctcttaaaagacacaagagttatcctagaaccttaattcttttttatttgaaattttaagtcaagtcctttataaagaccatagcagtggaaaacagtgtactttttaaaaaattgctgaatataaaatctttgaaaattttctttatgtgtgaagacacaaagtatgggggaagacagcaatcaaaactaactttttgtagatagccatttcatttctttaaactnnnnnnnnnnnnnnnngtattctacaaaagagaatggttttaggctccagtgttatact

SEQ ID NO: 2622 - DNA, 147 bp, Homo sapiens
gtggacctgtacgtgccgcggaaatgctccgctagcaatcgcatcatcggtgccaaggaccacgcatccatccagatgaacgtggccgaggttgacaaggtcacaggcaggtttaatggccagtttaaaacttatgctatctgcggg

SEQ ID NO: 2623 - DNA, 312 bp, Homo sapiens
  misc_feature (34)..(34): n includes a, c, g, or t, or contains no nucleotide
  misc_feature (52)..(52): n includes a, c, g, or t, or contains no nucleotide
gcgcgtctacgacctcgggctgcgacgactgcgncagcggcggcgcctgcgncgggagcgggtgcgcgcgcagccctgctgccgcccgacggcctacgaggacgaggtgtccttcctggacgcgcacagccgctaccacacggtgcacgagctgtcggcgcgcgagtgcgcctgcgtgtgaccctacctcactcggccggcgcggcggccactccccccgcctcgacggcaccactggccggccccgcgaaagactgcgcgtgcgtagagcacgccggcgcggccccgggactctcgcgataactgtactga

SEQ ID NO: 2624 - DNA, 509 bp, Homo sapiens
  misc_feature (28)..(69): n includes a, c, g, or t, or contains no nucleotide
  misc_feature (129)..(204): n includes a, c, g, or t, or contains no nucleotide
  misc_feature (292)..(324): n includes a, c, g, or t, or contains no nucleotide
  misc_feature (408)..(422): n includes a, c, g, or t, or contains no nucleotide
atcatctatgccttccgcaaccaggagnnnnnnnnnnnnnnnnnnnnnnnnnnnnnnnnnnnnnnnnnntccaaagtgccctttcgttccaggtctcccagcgaggtctgaagggctcgccccgtgtcnnnnnnnnnnnnnnnnnnnnnnnnnnnnnnnnnnnnnnnnnnnnnnnnnnnnnnnnnnnnnnnnnnnnnnnnnnnnggtgtgagtctgactttggaaagaaaaagggactaaagagaaatgtaacaaacttacaaggacaaagaggcttgttggcactttacannnnnnnnnnnnnnnnnnnnnnnnnnnnnnnnnaatatttgtatcttctggaggtgttcaggatgtggagcttcctgttctgtgaaaaaccaagaaaaagatatggttgtatactcnnnnnnnnnnnnnnntttgtcaaacgaagacattccaatactgcttaattatagcactttatttttagctgctgaactgccaaaacagtgttgccattttca

SEQ ID NO: 2625 - DNA, 558 bp, Homo sapiens
gcccacgcaggagagcgcagtcacgcctgggacccccgaccccacttgtgctggaaggtgggggtgccacaccaggaccacagtcctgcagccttgcccacacatcccagacagtggccttggcattgtgtgtgtgcctgcccaggaggggggcccaggtgcataaatgggggtcagggagggaaaggaggagggagagagatggagaggaggggagagagaaagagaggtggggagaggggagagagatatgaggagagagagacagaggaggcagaaagggagagaaacagaggagacagagagggagagagagacagagggagagagagacagaggggaagagaggcagagagggaaagaggcagagaaggaaagagacaggcagagaaggagagaggcagagagggagagaggcagagagggagagaggcagagagacagagagggagagagggacagagagagatagagcaggaggtcggggcactctgagtcccagttcccagtgcagctgtaggtcgtcatcacctaaccacacgtgcaataaagtcctcg

SEQ ID NO: 2626 - DNA, 553 bp, Homo sapiens
tggagcacccagtgaagctactgtttgctcctaacttgctcttggacaggaaccagggaaaatgtgtagagggcatggtggagatcttcgacatgctgctggctacatcatctcggttccgcatgatgaatctgcagggagaggagtttgtgtgcctcaaatctattattttgcttaattctggagtgtacacatttctgtccagcaccctgaagtctctggaagagaaggaccatatccaccgagtcctggacaagatcacagacactttgatccacctgatggccaaggcaggcctgaccctgcagcagcagcaccagcggctggcccagctcctcctcatcctctcccacatcaggcacatgagtaacaaaggcatggagcatctgtacagcatgaagtgcaagaacgtggtgcccctctatgacctgctgctggagatgctggacgcccaccgcctacatgcgcccactagccgtggaggggcatccgtggaggagacggaccaaagccacttggccactgcgggctctacttcatcgcattccttgca

SEQ ID NO: 2627 - DNA, 476 bp, Homo sapiens
  misc_feature (261)..(296): n includes a, c, g, or t, or contains no nucleotide
tgtttgctggtggtctccgtgaccccctcctcacctgctggttgggggcttccttggccctcttggaaaggaggggctcgtgtggccccaggccagtgtctgtcaggatggtccccccgaggcgctctgggcaggcatcctggtgtcctgagaggctcttgcaggaatgatacgtggcagtgcctgcagcgaggtctgggaacaccctgggtgaggcctgggggtttccgaaaatggaggcattcctttccaaatctggannnnnnnnnnnnnnnnnnnnnnnnnnnnnnnnnnnnaaaacaatagcatttgtcttgagtgaggaagtgaagcccgctgtgttcatagcaggagagggctcccagacacaggcccgtcctcggaagagccttgagagtgcagctcggacccaccggcggcccccgtagcaggtggtgtgggtgctcgggagtggaggtgacgtcagcagcgctctc

SEQ ID NO: 2628 - DNA, 377 bp, Homo sapiens
  misc_feature (278)..(308): n includes a, c, g, or t, or contains no nucleotide
gtggcagccatctccttctcggcatcatggccgccctcagaccccttgtgaagcccaagatcgtcaaaaagagaaccaagaagttcatccggcaccagtcagaccgatatgtcaaaattaagcgtaactggcggaaacccagaggcattgacaacagggttcgtagaagattcaagggccagatcttgatgcccaacattggttatggaagcaacaaaaaaacaaagcacatgctgcccagtggcttccggaagttcctggtccacaacgtcaaggannnnnnnnnnnnnnnnnnnnnnnnnnnnnnntactgtgccgagatcgctcacaatgtttcctccaagaaccgcaaagccatcgtggaaagagctgcccaa

SEQ ID NO: 2629 - DNA, 432 bp, Homo sapiens
  misc_feature (103)..(103): n includes a, c, g, or t, or contains no nucleotide
taaccaggggaagcagaagtatacacttccgctgtaccacgcaatgatgggtggcagtgaggtggcccagaccctcgccaaggagacttttgcatccaccgcntcccagctccacagcaatgttgtcaactatgtccagcagatcgtggcacccaagggcagttagaggctcgtgtgcatggcccctgcctcttcaggctctccaggctttcagaataattgtttgttcccaaattcctgttccctgatcaacttcctggagtttatatcccctcaggataatctattctctagcttaggtatctgtgactcttgggcctctgctctggtgggaacttacttctctatagcccactgagccccgagacagagaacctgcccacagctctccccgctacaggctgcaggcactgcagggcagcgggtattctc

SEQ ID NO: 2630 - DNA, 580 bp, Homo sapiens
  misc_feature (67)..(89): n includes a, c, g, or t, or contains no nucleotide
  misc_feature (93)..(93): n includes a, c, g, or t, or contains no nucleotide
  misc_feature (97)..(99): n includes a, c, g, or t, or contains no nucleotide
  misc_feature (103)..(103): n includes a, c, g, or t, or contains no nucleotide
  misc_feature (105)..(105): n includes a, c, g, or t, or contains no nucleotide
  misc_feature (107)..(107): n includes a, c, g, or t, or contains no nucleotide
  misc_feature (112)..(112): n includes a, c, g, or t, or contains no nucleotide
  misc_feature (118)..(119): n includes a, c, g, or t, or contains no nucleotide
  misc_feature (121)..(124): n includes a, c, g, or t, or contains no nucleotide
  misc_feature (126)..(126): n includes a, c, g, or t, or contains no nucleotide
  misc_feature (132)..(132): n includes a, c, g, or t, or contains no nucleotide
  misc_feature (137)..(137): n includes a, c, g, or t, or contains no nucleotide
  misc_feature (141)..(142): n includes a, c, g, or t, or contains no nucleotide
  misc_feature (150)..(150): n includes a, c, g, or t, or contains no nucleotide
  misc_feature (153)..(154): n includes a, c, g, or t, or contains no nucleotide
  misc_feature (156)..(158): n includes a, c, g, or t, or contains no nucleotide
  misc_feature (162)..(163): n includes a, c, g, or t, or contains no nucleotide
  misc_feature (168)..(168): n includes a, c, g, or t, or contains no nucleotide
  misc_feature (171)..(173): n includes a, c, g, or t, or contains no nucleotide
  misc_feature (175)..(175): n includes a, c, g, or t, or contains no nucleotide
  misc_feature (179)..(179): n includes a, c, g, or t, or contains no nucleotide
  misc_feature (184)..(186): n includes a, c, g, or t, or contains no nucleotide
  misc_feature (194)..(197): n includes a, c, g, or t, or contains no nucleotide
  misc_feature (202)..(202): n includes a, c, g, or t, or contains no nucleotide
  misc_feature (205)..(205): n includes a, c, g, or t, or contains no nucleotide
  misc_feature (207)..(213): n includes a, c, g, or t, or contains no nucleotide
  misc_feature (223)..(223): n includes a, c, g, or t, or contains no nucleotide
  misc_feature (228)..(228): n includes a, c, g, or t, or contains no nucleotide
  misc_feature (236)..(240): n includes a, c, g, or t, or contains no nucleotide
  misc_feature (248)..(250): n includes a, c, g, or t, or contains no nucleotide
  misc_feature (263)..(263): n includes a, c, g, or t, or contains no nucleotide
  misc_feature (265)..(269): n includes a, c, g, or t, or contains no nucleotide
  misc_feature (271)..(271): n includes a, c, g, or t, or contains no nucleotide
  misc_feature (275)..(278): n includes a, c, g, or t, or contains no nucleotide
  misc_feature (280)..(283): n includes a, c, g, or t, or contains no nucleotide
  misc_feature (288)..(302): n includes a, c, g, or t, or contains no nucleotide
  misc_feature (305)..(308): n includes a, c, g, or t, or contains no nucleotide
  misc_feature (310)..(321): n includes a, c, g, or t, or contains no nucleotide
  misc_feature (324)..(324): n includes a, c, g, or t, or contains no nucleotide
  misc_feature (327)..(330): n includes a, c, g, or t, or contains no nucleotide
  misc_feature (335)..(349): n includes a, c, g, or t, or contains no nucleotide
  misc_feature (351)..(351): n includes a, c, g, or t, or contains no nucleotide
  misc_feature (361)..(385): n includes a, c, g, or t, or contains no nucleotide
  misc_feature (387)..(389): n includes a, c, g, or t, or contains no nucleotide
  misc_feature (395)..(395): n includes a, c, g, or t, or contains no nucleotide
  misc_feature (508)..(520): n includes a, c, g, or t, or contains no nucleotide
gatcttgacacttcagtaaaccttgcttggacatcaggtaccaactgcactcgttttggcattgcannnnnnnnnnnnnnnnnnnnnnntgcntccnnnattncngnaaaangtcaannannnncnctagcnttaantggnnagtaggcntanncnnngacnnctgangcnnncnggtntgaannncttacacnnnnctgcntcngnnnnnnngtagatgggnaagangcattaannnnnctggaggnnnccacaaggttggncnnnnncncccnnnngnnnnggagnnnnnnnnnnnnnnnaannnnannnnnnnnnnnnggnatnnnnatcannnnnnnnnnnnnnnantatatttccnnnnnnnnnnnnnnnnnnnnnnnnntnnncccccnagaagatgatcaaaacaaaggatgatctcaacaagagctgtattttaagtatttagacagttctttgttagctggtttctagttggttatctagttaccaatgctgcagtccnnnnnnnnnnnnncctatacattatttaaatgtatttaactgttaaatgcgctacccaccaataatgaaatag

SEQ ID NO: 2631 - DNA, 535 bp, Homo sapiens
tgtgctacacggaggatgaagctaaggagctggctgcggaggtggaggttcaagacggccccaatgaagatggggagatgttcatgcggccagggaagctgttcgactatttcccaaaaccataccccaacagtgaggctgctcgagctgccaacaacggagcattgccccctgacctcagctacatcgtgcgagctaggcatggtggtgaggactacgtcttctccctgctcacgggctactgcgagccacccaccggggtgtcactgcgggaaggtctctacttcaacccctactttcctggccaggccattgccatggcccctcccatctacacagatgtcttagagtttgacgatggcaccccagctaccatgtcccagatagccaaggatgtgtgcaccttcctgcgctgggcatctgagccagagcacgaccatcgaaaacgcatggggctcaagatgttgatgatgatggctctgctggtgcccctggtctacaccataaagcggcacaagtggtcagtcctgaagag

SEQ ID NO: 2632 - DNA, 235 bp, Homo sapiens
  misc_feature (108)..(108): n includes a, c, g, or t, or contains no nucleotide
  misc_feature (210)..(210): n includes a, c, g, or t, or contains no nucleotide
gactcctccaaaatggactatgccctgttggccacttcaaacccagcagcccttccccatccccactcagccctgcacagggggtgccaggaagtcaacaccaggggnaagagtgggcatgagcaggctgagccagggaccctcctactaccctggaaacctgggtgagcctggagtcgtggaggggccccagactcctcagaacatggnacttttccgtctctgctgagcgagc

SEQ ID NO: 2633 - DNA, 456 bp, Homo sapiens
  misc_feature (77)..(96): n includes a, c, g, or t, or contains no nucleotide
  misc_feature (105)..(108): n includes a, c, g, or t, or contains no nucleotide
  misc_feature (201)..(259): n includes a, c, g, or t, or contains no nucleotide
  misc_feature (375)..(391): n includes a, c, g, or t, or contains no nucleotide
  misc_feature (410)..(424): n includes a, c, g, or t, or contains no nucleotide
tgctgtgatccctggcggctcgtctaccccactgatccccaagtctgtgtgtgagacggtgctgatggacttcgatnnnnnnnnnnnnnnnnnnnngacaggccnnnnggcacagctgcggtgatcgtcatggaccgctcgacggacatcgtgaaagccatcgcccgcctcattgagttctataagcacgagagctgtggnnnnnnnnnnnnnnnnnnnnnnnnnnnnnnnnnnnnnnnnnnnnnnnnnnnnnnnnnnngtgaggggggatgcccggccggccgagatcgactccctgtgggagatcagcaagcagatagaaggccatacgatttgtgctctgggtgacggggccgcctggcctgtgcagggtcnnnnnnnnnnnnnnnnnccggagctcgaggagcggnnnnnnnnnnnnnnncagcagcatcaggcccggcaggctgcctctta

SEQ ID NO: 2634 - DNA, 395 bp, Homo sapiens
  misc_feature (43)..(86): n includes a, c, g, or t, or contains no nucleotide
  misc_feature (205)..(222): n includes a, c, g, or t, or contains no nucleotide
  misc_feature (333)..(333): n includes a, c, g, or t, or contains no nucleotide
  misc_feature (360)..(360): n includes a, c, g, or t, or contains no nucleotide
  misc_feature (367)..(367): n includes a, c, g, or t, or contains no nucleotide
accgatgattccatttgtgtgctgggaataagcaaaagaaacnnnnnnnnnnnnnnnnnnnnnnnnnnnnnnnnnnnnnnnnnnnnattttgagcacaggattcccaaagaacagtggtggctcaagctacggcccctcatgaaaatcctggccaagtacaaggccagctatgacgtgtcggactcaggccagctggaacatgtnnnnnnnnnnnnnnnnnnacccagtcccgcctgcatgtgcctgcagccaccgtggactgtctgtttttgtaacacttaagttattttatcagcactttatgcacgtattattgacattaatacctaatnggcgagtgcccatctgccccaccagcnccagtgngtgctgtctgtggagtgtgtctcatgct

SEQ ID NO: 2635 - DNA, 433 bp, Homo sapiens
  misc_feature (27)..(27): n includes a, c, g, or t, or contains no nucleotide
ctctttgactggtggcatcctcagtancccattctccctgagagcgtagttactgcttcccatcccttgggggcagcctcgagtgtagtccattagtaatcagattccagtttggacagggtggctggattgtatatctcgttagtaatgtacatgctcttcaggttctagggctcctgttaggggagggagaaatgttgaatcaagagggaaaacaactactatgatttataaacatattttaatgtaaaaatttgcatttaaaaggagtggccctgttttctgtgttaaaaccccatttggtgctattgagtttgttctttattcttttatcccagtgaaaattgttgatcttgctgtagggaaaaattaaactctttgaatctccaaacaaggaagtttcagcattcccttatggatcagaggaacctta

SEQ ID NO: 2636 - DNA, 537 bp, Homo sapiens
  misc_feature (69)..(69): n includes a, c, g, or t, or contains no nucleotide
  misc_feature (71)..(73): n includes a, c, g, or t, or contains no nucleotide
  misc_feature (84)..(86): n includes a, c, g, or t, or contains no nucleotide
  misc_feature (90)..(128): n includes a, c, g, or t, or contains no nucleotide
  misc_feature (203)..(203): n includes a, c, g, or t, or contains no nucleotide
  misc_feature (234)..(234): n includes a, c, g, or t, or contains no nucleotide
  misc_feature (240)..(240): n includes a, c, g, or t, or contains no nucleotide
  misc_feature (249)..(249): n includes a, c, g, or t, or contains no nucleotide
  misc_feature (253)..(253): n includes a, c, g, or t, or contains no nucleotide
  misc_feature (255)..(293): n includes a, c, g, or t, or contains no nucleotide
  misc_feature (463)..(503): n includes a, c, g, or t, or contains no nucleotide
tacctgaaaaggtacctaggtctaggcccttcttccctttcccttcctctcccctaccccagaactttngnnnccctttccctnnnctcnnnnnnnnnnnnnnnnnnnnnnnnnnnnnnnnnnnnnnncctagcatccatgacctgttggatgttacctccaatcagtttcctgtcctacctgcctctttggcttggacctanatggccatgctctggctctacccttgggaancctgancccggtgtntggncnnnnnnnnnnnnnnnnnnnnnnnnnnnnnnnnnnnnnnnactatgcactttcccggggagagaaccagtatgagaagtgggggcagggcacacattcatctttgtaggaaggtctggcctggggtcgggtgaaggagggcccaggtcagttctggggtcccagtgacctgctttgccattctcctggtgccgctgctgctccctgtttnnnnnnnnnnnnnnnnnnnnnnnnnnnnnnnnnnnnnnnnngccaatgtgtctgtctttggtaactgagtgaacc

SEQ ID NO: 2637 - DNA, 402 bp, Homo sapiens
  misc_feature (189)..(272): n includes a, c, g, or t, or contains no nucleotide
gttggactttgaacgcctttgaaatggctttgctaaaatgctcccgccacaaagttgtaggaaatgggaagaggagtcaactagaggcaagggagttgagagagctgcaactgtaaagggcaagaacaggcagaggtaaaaagatgatggaaggtgtggtgactaagggccacggttattgggtgaaannnnnnnnnnnnnnnnnnnnnnnnnnnnnnnnnnnnnnnnnnnnnnnnnnnnnnnnnnnnnnnnnnnnnnnnnnnnnnnnnnnntcacccaaattacgtttccacgagattatttatatatagttggtctatctctgcagtccttgaaggtgaagttgtgtgttactaggctgtgttttgggatgtcagcagtggcctgaagtgagttgtgcaa

SEQ ID NO: 2638 - DNA, 344 bp, Homo sapiens
  misc_feature (250)..(250): n includes a, c, g, or t, or contains no nucleotide
cttggttccctaaccctaattgatgagaggctcgctgcttgatggtgtgtacaaactcacctgaatgggacttttttagacagatcttcatgacctgttcccaccccagttcatcatcatctcttttacaccaaaaggtctgcagggtgtggtaactgtttcttttgtgccattttggggtggagaaggtggatgtgatgaagccaataattcaggacttattccttcttgtgttgtgttttttttttgncccttgcaccagagtatgaaatagcttccaggagctccagctataagcttggaagtgtctgtgtgattgtaatcacatggtgacaacactcaga

SEQ ID NO: 2639 - DNA, 467 bp, Homo sapiens
ttaaatgctttgaagactgatacactcaaccatctatattcatgagctctcaatttcatggcaggccatagttctacttatctgagaagcaaatccctgtggagactataccactattttttctgagattaatgtactcttggagcccgctactgtcgttattgatcacatctgtgtgaagccaaagccccgtggttgcccatgagaagtgtccttgttcattttcacccaaatgaagtgtgaacgtgatgttttcggatgcaaactcagctcagggattcattttgtgtcttagttttatatgcatccttatttttaatacacctgcttcacgtccctatgttgggaagtccatatttgtctgcttttcttgcagcatcatttccttacaatactgtccggtggacaaaatgacaattgatatgtttttctgatataattactttagctgcactaacagtacaatg

SEQ ID NO: 2640 - DNA, 461 bp, Homo sapiens
  misc_feature (100)..(100): n includes a, c, g, or t, or contains no nucleotide
  misc_feature (147)..(147): n includes a, c, g, or t, or contains no nucleotide
  misc_feature (155)..(155): n includes a, c, g, or t, or contains no nucleotide
  misc_feature (297)..(312): n includes a, c, g, or t, or contains no nucleotide
tggcactggctccaaacccagcaagcccctctccgcgcccccgctcagagctctggccactacggcagaggactggagaacatccgtggctgtacatgcnttggaatctgttacttggggagaaacaggtgtccttgtcgatggctnccacgagnatcagggctctgaggaggagttatgcacagagtcgataaagaatggaagtcttttggtagttcaggtgtggctgcatccatatgcacagtggtggtgacatccccagagtcagagacaggcgtgaggggtcttatccgcaannnnnnnnnnnnnnnngatctttgaccccaggagctcatacaaacaagagcctcgacagcttccatgtctgtctgctccaagatgctgcaagtagacctttcgctgtcatgccgcttcctctccaggatggactcacatatgtccatgatgtcaactgcgcgcgc

SEQ ID NO: 2641 - DNA, 573 bp, Homo sapiens
cacccagctggtcctgtggatgggatcctctccacccacctctagccatcccttggggaagggtggggagaaatataggatagacactggacatggcccattggagcacctgggccccactggacaacactgattcctggacaggtggctgcgcccccagcttctctctccctgtcacacactggaccccactggctgagaatctgggggtgaggaggacaagaaggagaggaaaatgtttccttgtgcctgctcctgtacttgtcctcagcttgggcttcttcctcctccatcacctgaaacactggacctgggggtagccccgccccagccctcagtcaccccccacttcccacctgcagtcttgtagctagaacttctctaagcctatacgtttctgtggagtaaatattgggattggggggaaagagggagcaacggcccatagccttggggttggacatctctagtgtagctgccacattgatttttctataatcacttgggtttgtacatttttggggggagagacacagatttttacactaatatatggacctagcttgaggcaat

SEQ ID NO: 2642 - DNA, 379 bp, Homo sapiens
catctggaacagctgctcttggtcacccatcttgacttgtcacacaatcgcctccgaaccctgccacctgcactggctgccctgcgctgccttgaggtgctgcaggccagtgataatgcaatagagtccctggacggcgtcaccaacctaccccggctgcaggagctgctactgtgcaacaaccgcctccagcagcctgcagtgctccagcctcttgcctcctgccccaggctggtcctcctcaacctgcagggtaacccgctgtgccaagcggtgggcatcttggagcaactggctgaactgctgccttcagttagcagcgtcctcacctaagaggccctgccccctacccttgccctttaacttattgggactgaat

SEQ ID NO: 2643 - DNA, 277 bp, Homo sapiens
gagtgagcgacttgaccccggcttagccctcggccccggggagcgggaacgccttcgggaaacacaggccattaacagcagcctgtccacgctggggctggttatcatggccctgagcaacaaggagtcccacgtgccttaccggaacagcaaactgacctacctgctgcagaactctctgggtggtagtgctaagatgctcatgtttgtgaacatttctccactggaagagaacgtctccgagtccctcaactctctacgctttgcctccaaggtg

SEQ ID NO: 2644 - DNA, 541 bp, Homo sapiens
  misc_feature (362)..(377): n includes a, c, g, or t, or contains no nucleotide
  misc_feature (444)..(500): n includes a, c, g, or t, or contains no nucleotide
tctaggtgcttcaggagctgtggcttaaggtgcagacatggccaagtccaagaaccacaccacacacaaccagtcccgaaaatggcacagaaatgtcatcaagaaacccctatcacaaagatacaaatctcttaagggggtggaccccaagttcctggggaacatgtgctttaccaagaagcacaagaagaagggcctaaagaagatgcaggccgacagtgccaaggccgtgagtacatgtgccaaggctatcgaggccctcgtaaagcccaaagaggttaagcccaagatcccaaagggtgtcagctgtgagctcaattgacttgcctacattgcctaccccaaattttggacgtgtgctnnnnnnnnnnnnnnnnaagggctcaggctgtgccagccaaaggccaaggcccaggaccaaaccaaggcccaggtccaaatcannnnnnnnnnnnnnnnnnnnnnnnnnnnnnnnnnnnnnnnnnnnnnnnnnnnnnnnncccctacaaaggcttcagggtagagatctctgtctgccaat

SEQ ID NO: 2645 - DNA, 406 bp, Homo sapiens
  misc_feature (35)..(35): n includes a, c, g, or t, or contains no nucleotide
  misc_feature (57)..(57): n includes a, c, g, or t, or contains no nucleotide
  misc_feature (68)..(68): n includes a, c, g, or t, or contains no nucleotide
  misc_feature (79)..(79): n includes a, c, g, or t, or contains no nucleotide
  misc_feature (97)..(97): n includes a, c, g, or t, or contains no nucleotide
  misc_feature (197)..(220): n includes a, c, g, or t, or contains no nucleotide
attttgtggcctactgctcggggcaggggggctgnagccaggatgtgcaatagaagncaggggttgtncccctctgccnagatctgtggggagctgncccaggccacccgtgcacctgtcctgcttcctgcagtccccactccctgcctcctttgagggactgggggacttggggtagggggacagacgggaaaggnnnnnnnnnnnnnnnnnnnnnnnngaagaagcgatcgccacactgccactctgctgcccagccaccaggatttctgcctggagccctttgccctgtccctgctgcctgaggtggcgtagagcagaggagaagaatttgctccaggccaggagcacaaatcgttgttcaatgaatttctctccaactcgaccttggtaaacggaaatgttg

SEQ ID NO: 2646 - DNA, 563 bp, Homo sapiens
  misc_feature (43)..(66): n includes a, c, g, or t, or contains no nucleotide
  misc_feature (97)..(135): n includes a, c, g, or t, or contains no nucleotide
  misc_feature (195)..(256): n includes a, c, g, or t, or contains no nucleotide
  misc_feature (520)..(538): n includes a, c, g, or t, or contains no nucleotide
tgctgtgtgctatcggataaaatctctaagagctacattacannnnnnnnnnnnnnnnnnnnnnnnagtaacagggcccaatgtaaaggctgttgcnnnnnnnnnnnnnnnnnnnnnnnnnnnnnnnnnnnnnnncaggaaagaaattttataattcaccacttaattggttagaatctctaactgagcaccttnnnnnnnnnnnnnnnnnnnnnnnnnnnnnnnnnnnnnnnnnnnnnnnnnnnnnnnnnnnnnnctcttttattcattcacggctacagtgtaagctccagtccctttggattttattccaaaccttgctgtaatataaaaggaagtttacaagacatgatattgctgcttttacaaaaggacattctatttattttcgcagtaattctcatgtccccataagcagagctgtcacagtgtgcactaccttagattgttttattgtcgtcattgttatttttttccattttgagctaatgtgttttatttgtgaatagtcttttacatnnnnnnnnnnnnnnnnnnngcaccaaagaacctgtaaaagttat

SEQ ID NO: 2647 - DNA, 450 bp, Homo sapiens
  misc_feature (109)..(110): n includes a, c, g, or t, or contains no nucleotide
  misc_feature (127)..(127): n includes a, c, g, or t, or contains no nucleotide
  misc_feature (180)..(214): n includes a, c, g, or t, or contains no nucleotide
tgactatgaccagcaggtgtttgaaaggcatgtgcagacccattttgatcagaatgttctaaattttgactagttactttttattatgagttaatatagtttagcagtnnaaaaaaaaaaaaaaaanccacacctaaaatagaccactgaggagaccatagagcggatgctttcatgcannnnnnnnnnnnnnnnnnnnnnnnnnnnnnnnnnnagtttggtgttactaggatcagggtcagtctttggcttatcaataaattttaatctctgttaatcttacctgctttaaaaaaaagttcttgtgtgttcgtatctttatttattccctagtttgcagaactgtctgaataaaggatacaaggattatttcaatgttactgcactgaaaaacgtgtatgtattagtgtgctagattatttagcagaatattcacaagtttctgttgac

SEQ ID NO: 2648 - DNA, 593 bp, Homo sapiens
  misc_feature (28)..(28): n includes a, c, g, or t, or contains no nucleotide
  misc_feature (30)..(30): n includes a, c, g, or t, or contains no nucleotide
  misc_feature (49)..(128): n includes a, c, g, or t, or contains no nucleotide
  misc_feature (130)..(130): n includes a, c, g, or t, or contains no nucleotide
  misc_feature (132)..(132): n includes a, c, g, or t, or contains no nucleotide
  misc_feature (135)..(138): n includes a, c, g, or t, or contains no nucleotide
  misc_feature (141)..(144): n includes a, c, g, or t, or contains no nucleotide
  misc_feature (146)..(147): n includes a, c, g, or t, or contains no nucleotide
  misc_feature (149)..(150): n includes a, c, g, or t, or contains no nucleotide
  misc_feature (153)..(153): n includes a, c, g, or t, or contains no nucleotide
  misc_feature (171)..(191): n includes a, c, g, or t, or contains no nucleotide
  misc_feature (420)..(422): n includes a, c, g, or t, or contains no nucleotide
  misc_feature (424)..(425): n includes a, c, g, or t, or contains no nucleotide
  misc_feature (484)..(519): n includes a, c, g, or t, or contains no nucleotide
cttggagggttggtcctcttgcctcctngnaaaaacaaaaacaaaaaannnnnnnnnnnnnnnnnnnnnnnnnnnnnnnnnnnnnnnnnnnnnnnnnnnnnnnnnnnnnnnnnnnnnnnnnnnnnnnntngnttnnnnccnnnngnngnnggngcctggagcaggccttgnnnnnnnnnnnnnnnnnnnnngttctggtgaggccttgctcccaaccccacacgctcctccctctgaggctgtaggactcgcagtcaggggcagctgaccatggaagattgagagcccaaggtttaaacttctctgaagggaggtggggatgagaagaggggtttttttgtactttgtacaaagaccacacatttgtgtaaacagtgttttggaataaaatatttttttcataaaaaaaaaaaaaaaaannntnnttggggcgttggtggcctccctgggtgatgggaacccctgggagctggttgttctgttnnnnnnnnnnnnnnnnnnnnnnnnnnnnnnnnnnnntcttaaattttaactctgcccgctttgctgtggttttcagggtgctggccacccctggaatactgtcaatgctt

SEQ ID NO: 2649 - DNA, 365 bp, Homo sapiens
  misc_feature (249)..(249): n includes a, c, g, or t, or contains no nucleotide
agaagtagcttatcctagacttggaaataagatttttttcaccactaacttccatgcttcagagatgacattcaaagccagattcccaagtgcctgatcatacctcccagtctcaggaagatatttgcttaccccttagaccaagaatcttaagatcttccccagctatgaagcctatcttggaatgggaaaccatgaaatttgtcttttaaaagaaagggaagaaatagccttacagcccctgttccntccaagtgcacatttagccttaaaatcctgggagtcgggagacaccgtggagtccttacatccacagtgtctgctggtcgtggtcagaaggcagtaatgcaagagtccttttgtga

SEQ ID NO: 2650 - DNA, 479 bp, Homo sapiens
  misc_feature (139)..(156): n includes a, c, g, or t, or contains no nucleotide
  misc_feature (209)..(237): n includes a, c, g, or t, or contains no nucleotide
  misc_feature (410)..(454): n includes a, c, g, or t, or contains no nucleotide
gtcttctctcagaaaacctttgttgttcattgtttggccaatgaatcttcaaaaacttgcacaaacagaaaagttggaaaaggataatacagactgcactaaatgttttcctctgttttacaaactgcttggcagcccnnnnnnnnnnnnnnnnnnttgtttggtattaaaatttgtgttcacgggatgcaccaaagtgtgtaccccgnnnnnnnnnnnnnnnnnnnnnnnnnnnnntttttagttcttattccggagcctcaaacaagcattataccttctgtgattatgatttcctctcctataattatttctgtagcactccacactgatctttggaaacttgccccttatttaaaaaaaaaaaagaaaaaaaagagtttgttactctattgtatgttacaaaagannnnnnnnnnnnnnnnnnnnnnnnnnnnnnnnnnnnnnnnnnnnnatgccttgtattatatggcactgcc

SEQ ID NO: 2651 - DNA, 399 bp, Homo sapiens
  misc_feature (67)..(81): n includes a, c, g, or t, or contains no nucleotide
  misc_feature (329)..(348): n includes a, c, g, or t, or contains no nucleotide
agtgtttgctgaggacattgctcctctgactcccatctcactttgtccatcgcagccttttgttggnnnnnnnnnnnnnnngtcagcccatgatgtctgttcacacgagatgcttttttaatagaattgaccaatgttttgctgccactgattaaagtattatttatactaattgttgcttgtagttttgatgtaattcattgatctatatttaaaataataaaaggtgtagcaaaatctccctcctgtttggtgccttaacagaagcattcatcctttgttaagtcttctaaaagctaacatttaacataaacaagttattattttcnnnnnnnnnnnnnnnnnnnntttttggggggtgcctaaagtgtgaaggttaaaccatgtaaggcttagcaa

SEQ ID NO: 2652 - DNA, 233 bp, Homo sapiens
  misc_feature (91)..(174): n includes a, c, g, or t, or contains no nucleotide
ccatggccctctcagtttgggccaaaagggatggaggctttacggccacttcccgttcggaataactgaaatcccccagcgatggggtaannnnnnnnnnnnnnnnnnnnnnnnnnnnnnnnnnnnnnnnnnnnnnnnnnnnnnnnnnnnnnnnnnnnnnnnnnnnnnnnnnnngttccgggagaattggccattggtaaaaagacttcatagggtcactggaatgctttgtg

SEQ ID NO: 2653 - DNA, 265 bp, Homo sapiens
  misc_feature (177)..(177): n includes a, c, g, or t, or contains no nucleotide
tgatgaccattctgtctggatctactgacataagatggcctgtagcaatgaggctgtgcattccattgctttttggcttgaaaagcagcacagatgcaggaggaaaagtgattggcgcatagactgtcgccaccagggccatgtcagcagtcaggaatctctgcaatttatgtttgnccgctgcagtgtgctgagagaataaaggtgaggctcggaagcgcctgaatccacagtgaaatatgagctcttccttggctttcacagg

SEQ ID NO: 2654 - DNA, 482 bp, Homo sapiens
  misc_feature (59)..(59): n includes a, c, g, or t, or contains no nucleotide
  misc_feature (63)..(64): n includes a, c, g, or t, or contains no nucleotide
  misc_feature (68)..(68): n includes a, c, g, or t, or contains no nucleotide
ccaggcccgtaagttcgcaggcaggggtgggtgtgggacggggctgcttctctacacancctnnacgntggccttcaccttcacccctgcatcgtcggtgaccctgggaccctccaggcagcgtggcctgtggcaccgtgagggttgggacccaccgaggcgcagaggcggcccgaatgcagccctggttcaggcccggaggagggtttgcgggtagttgcacggacaattcggcggggtgctgcctgttgctgccattagcccaggaggaggtcgtgggacggggagggtgggatggacggcggacaggcagtccccacgctgctgggtggcgccgggcttggtggggtcttccactgtgtgcccttctcgccgaggccggtcccccgggtgtggggtgccctgctgcggactcctccgcgagccccatcgtcgcgcctgtggacgcctaggcaagagcggccctctgcagccaagagaaa

SEQ ID NO: 2655 - DNA, 501 bp, Homo sapiens
  misc_feature (81)..(81): n includes a, c, g, or t, or contains no nucleotide
  misc_feature (84)..(85): n includes a, c, g, or t, or contains no nucleotide
  misc_feature (87)..(87): n includes a, c, g, or t, or contains no nucleotide
  misc_feature (90)..(91): n includes a, c, g, or t, or contains no nucleotide
  misc_feature (93)..(93): n includes a, c, g, or t, or contains no nucleotide
  misc_feature (96)..(162): n includes a, c, g, or t, or contains no nucleotide
  misc_feature (420)..(476): n includes a, c, g, or t, or contains no nucleotide
gtctgctgtgacaaaattgcctccaatcaaagtgacccagaagaagcagtataaggagacaatgatgggacagacttctcnggnntnccnntnggnnnnnnnnnnnnnnnnnnnnnnnnnnnnnnnnnnnnnnnnnnnnnnnnnnnnnnnnnnnnnnnnnnntgccgctgatccactctcagatgaggctcgaccccgtcctctttaaagaccaggtctctattttgaggaagaaataccgagacattgagcgactttgaggaatccggctgagtgggggaggggaagcaagaagggatgggggtcaagctgctctctcttcccagtgcagatccactcatcagcagagccagattgtgccaactatccaaaaacttagatgagcagaatgacaaaaaaaaaaaggccaatgagaactcnnnnnnnnnnnnnnnnnnnnnnnnnnnnnnnnnnnnnnnnnnnnnnnnnnnnnnnnntgtcccaagactaggttgtgtacag

SEQ ID NO: 2656 - DNA, 281 bp, Homo sapiens
tagctgccactgtcccagagcagaggactgtgaccctggatgttgacgtgaacaaccgcacagaccggctggagtggtgcagctgttattaccatggcaacttttctctgaatgcagcctttgagatcaagctgcactggatggcggtgaccgcagcagtactcttcgagatggtccaaggttggcatcggaaaccacctcctgtggcttcttgttagtcccagttttggaggggccttttgcactgcccagttacctgtatggtggctcctggtagcatc

SEQ ID NO: 2657 - DNA, 498 bp, Homo sapiens
acagcctggaggagaccaaaggccgctactgcatgcagctgtcccagatccagggactgattggcagtgtggaggagcagctggcccagctacgctgtgagatggagcagcagagccaggagtaccagatcttgctggatgtgaagacgcggctggagcaggagattgccacctaccgccgcctgctggagggcgaggatgcccacctttcctcccagcaagcatctggccaatcctattcttcccgcgaggtcttcacctcctcctcgtcctcttcgagccgtcagacccggcccatcctcaaggagcagagctcatccagcttcagccagggccagagctcctagaactgagctgcctctaccacagcctcctgcccaccagctggcctcacctcctgaaggcccgggtcaggaccctgctctcctggcgcagttcccagctatctcccctgctcctctgctggtggtgggctaataaagctgactttctggttga

SEQ ID NO: 2658 - DNA, 363 bp, Homo sapiens
aaccagtggtgatggcacttctcaaatactggccaaagactcacagtccaaaagaagtaatgttcttaaacgaattagaagagattttagatgtcattgaaccatcagaatttgtgaagatcatggaacccctcttccggcagttggccaaatgtgtctccagcccacacttccaggtggcagagcgagctctctattactggaataatgaatacatcatgagtttaatcagtgacaacgcagcgaagattctgcccatcatgtttccttccttgtaccgcaactcaaagacccattggaacaagacaatacatggcttgatatacaacgccctgaagctcttcatggagatgaaccaaaagc

SEQ ID NO: 2659 - DNA, 386 bp, Homo sapiens
  misc_feature (115)..(130): n includes a, c, g, or t, or contains no nucleotide
gggaaacacaaactctttagaacataacagaatatatctaagggtattctatgtgctaatataaaatatttttaacacttgagaacagggatctgggggatctccacgtttgatnnnnnnnnnnnnnnnntctgaaggagtatcttacttgggtgattccttgtttttagactataaaaagaaactgggataggagttagacaatttaaaaggggtgtatgagggcctgaaatatgtgacaaatgaatgtgagtaccccttctgtgaacactgaaagctattctcttgaattgatcttaagtgtctccttgctctggtaaaagatagatttgtagctcacttgatgatggtgctggtgaattgctctgctctgtctgagattttta

SEQ ID NO: 2660 - DNA, 462 bp, Homo sapiens
  misc_feature (116)..(116): n includes a, c, g, or t, or contains no nucleotide
  misc_feature (118)..(118): n includes a, c, g, or t, or contains no nucleotide
cgctggtttatcctcacagacaactgcctctactactttgagtacaccacggacaaggagccccgaggaatcatccccctggagaatctgagcatccgagaggtggacgacccccngnaaaccgaactgctttgaactttacatccccaacaacaaggggcagctcatcaaagcctgcaaaactgaggcggacggccgagtggtggagggaaaccacatggtgtaccggatctcggcccccacgcaggaggagaaggacgagtggatcaagtccatccaggcggctgtgagtgtggaccccttctatgagatgctggcagcgagaaagaagcggatttcagtcaagaagaagcaggagcagccctgaccccctgcccccaactccattatttattacggagctgccccgcctgggtggccggacccctgggccttggggctgtggatcctggttccctgttt

SEQ ID NO: 2661 - DNA, 445 bp, Homo sapiens
cagagcacggcagcagaagcggattcggtagggttttaaacgcctctgcagaaaactcctgtccaggattccttttgcctcaagtggtatgtttaaaagagacaacgctttgttacaaggttcttggaaacaaagttgtattgtcattggtgcctctatcacatggttcttgagaaaaaacaaaccaacctgtgtgaattttagaatacggaacagacctatgctctaagcaaaattaggttttcaaaaatgtgagaacagtacaaagtggcagaaccacattttgttccctcttcaagggtgtcttgtatgtgccgcttgaagatttgtgagtttttcaacagttttattttaaaaactggatggcttatgattgtaaagcattttatcacattttctgaaaacaattgttcttggtttgcttatgtagagtcctgccttattg

SEQ ID NO: 2662 - DNA, 496 bp, Homo sapiens
  misc_feature (46)..(46): n includes a, c, g, or t, or contains no nucleotide
  misc_feature (54)..(70): n includes a, c, g, or t, or contains no nucleotide
  misc_feature (85)..(85): n includes a, c, g, or t, or contains no nucleotide
  misc_feature (89)..(90): n includes a, c, g, or t, or contains no nucleotide
  misc_feature (93)..(93): n includes a, c, g, or t, or contains no nucleotide
  misc_feature (97)..(97): n includes a, c, g, or t, or contains no nucleotide
  misc_feature (99)..(99): n includes a, c, g, or t, or contains no nucleotide
  misc_feature (101)..(102): n includes a, c, g, or t, or contains no nucleotide
  misc_feature (105)..(105): n includes a, c, g, or t, or contains no nucleotide
  misc_feature (107)..(107): n includes a, c, g, or t, or contains no nucleotide
  misc_feature (138)..(138): n includes a, c, g, or t, or contains no nucleotide
  misc_feature (140)..(143): n includes a, c, g, or t, or contains no nucleotide
  misc_feature (154)..(192): n includes a, c, g, or t, or contains no nucleotide
  misc_feature (327)..(345): n includes a, c, g, or t, or contains no nucleotide
  misc_feature (411)..(440): n includes a, c, g, or t, or contains no nucleotide
  misc_feature (453)..(467): n includes a, c, g, or t, or contains no nucleotide
tccctcgtggtcatcgtctgcgggggcagcaacatcagcctggccnagctgcgnnnnnnnnnnnnnnnnntgggcatgacaaatnggtnnccnaagngngnncgnancccttaccgatctgtgctctcctagcccaanannnnccctggagggnnnnnnnnnnnnnnnnnnnnnnnnnnnnnnnnnnnnnnntgagcacctgtggcctgggtgcaggttaacttcttgttatcaggagcccactatgcagaggccaaaggtcggcagccagcgaggctatgaattggacctttttggtatctgtgtgactgctctgtgcccatcctnnnnnnnnnnnnnnnnnnnacaagtgcccacaagtaacacaccaggtacccagagcagggtggacaggagagacctgaatcacannnnnnnnnnnnnnnnnnnnnnnnnnnnnncgcccctgaactnnnnnnnnnnnnnnntcaacagggccaccaaccagggttgagga

SEQ ID NO: 2663 - DNA, 399 bp, Homo sapiens
  misc_feature (189)..(237): n includes a, c, g, or t, or contains no nucleotide
  misc_feature (324)..(324): n includes a, c, g, or t, or contains no nucleotide
tcatgctattgtgatattttagcactttggtagcttttacactgaatttctaagaaaattgtaaaatagtcttcttttatactgtaaaaaaagatataccaaaaagtcttataataggaatttaactttaaaaacccacttattgataccttaccatctaaaatgtgtgatttttatagtctcgttttnnnnnnnnnnnnnnnnnnnnnnnnnnnnnnnnnnnnnnnnnnnnnnnnnaagagtgtccactattgattgtattatgctgctcactgatccttctgcatatttaaaataaaatgtcctaaagggttagtagacaanatgttagtcttttgtatattaggccaagtgcaattgacttcccttttttaatgtttcatgaccacccattgattg

SEQ ID NO: 2664 - DNA, 487 bp, Homo sapiens
tgggaagctcattgcccgatgaacttttgtttgctgacgactcctcagaaggctcagaagtcctgatgtgaggagaggtgcggggagacattccaaaaatcaagccaattcttctgctgtaggagaatccaattgtacctgatgtttttggtatttgtcttccttaccaagtgaactccatggccccaaagcaccagatgaatgttgttaaggaagctgtcattaaaaatacataatatatatttatttaaagagaaaaaatatgtgtatatcatgaaaaagacaaggatattttaataaaacattacttatttcatttcacttatcttgcatatcttaaaattaagcttcagctgctccttgatattaacctttgtacagagttgaagttgttttttcaacttcttttctttttcattactattaaatgtaaaaatatttgtaaaatgaaatgccatatttgacttggcttctggtcttgatgtat

SEQ ID NO: 2665 - DNA, 491 bp, Homo sapiens
  misc_feature (52)..(67): n includes a, c, g, or t, or contains no nucleotide
  misc_feature (315)..(334): n includes a, c, g, or t, or contains no nucleotide
  misc_feature (462)..(462): n includes a, c, g, or t, or contains no nucleotide
aacatcctgaatacggagaggttattcagcttcaaggtgaccaaagaaaaannnnnnnnnnnnnnnntcttggaggttggcattgtaaaggaggaacagcttaaggttcatggattctaaaatgaacctaaatacgtggagaatttcttgaatagttttgttctctaaacccggtttggctgccttgtgaaatgattccctgcagtaaacggacttttcatttatttaatcattcaaacttccattcacatctgcatgattacagaaaacatggggtatgtagactagtaacacataagaaaattgcagtaagannnnnnnnnnnnnnnnnnnngtctttacatgtttccaatggaaaatgttttgagtgtttattgttcagtttattacgtttcacttgattaaattttttttgttgttgtattaaaccatgtacgttgcagcttaacaataaaaaaaaantctatgaatctttgtgagcaattatgctc

SEQ ID NO: 2666 - DNA, 306 bp, Homo sapiens
  misc_feature (185)..(199): n includes a, c, g, or t, or contains no nucleotide
aaatttacaccatcccgagcaggcagactcccctgtgaggtgggggccctttcccttcccgaccagagtgtgagctggactgggcagttcaagccgggccgggtatcgtaagggcaagcaatgctggtttggttacccaagggatgctcgaatcgatttaccacataacggtgttgaattgaacnnnnnnnnnnnnnnntcacatgacaggtacgggaggctaggaaatcatggatgggagttgcaggccaggtctgtggtccctttgaagtctctgggaaagaatccttccttggctcttttaag

SEQ ID NO: 2667 - DNA, 557 bp, Homo sapiens
  misc_feature (81)..(81): n includes a, c, g, or t, or contains no nucleotide
  misc_feature (143)..(143): n includes a, c, g, or t, or contains no nucleotide
  misc_feature (176)..(176): n includes a, c, g, or t, or contains no nucleotide
  misc_feature (202)..(202): n includes a, c, g, or t, or contains no nucleotide
  misc_feature (277)..(277): n includes a, c, g, or t, or contains no nucleotide
  misc_feature (280)..(280): n includes a, c, g, or t, or contains no nucleotide
  misc_feature (282)..(303): n includes a, c, g, or t, or contains no nucleotide
  misc_feature (316)..(316): n includes a, c, g, or t, or contains no nucleotide
  misc_feature (328)..(329): n includes a, c, g, or t, or contains no nucleotide
  misc_feature (513)..(513): n includes a, c, g, or t, or contains no nucleotide
actcgttgacattggggaaactttgcaatgccccgaagacttaactcccgatgaggttgtggaactagaaaatcaagctgnactgaccaacctgaagcagaagtacctgactgtgatttcaaaccccaggtggttactggagncccatacctaggaaaggaggcaaggatgtattnccaggtagacatcccagagcacctgnatccctttggggcatgaagtgtgacaagtgtgggctcctgaaaggaatgttccagagaaaccagctaaatcatgncancnnnnnnnnnnnnnnnnnnnnnncagacctgtatanattaggttaaanntgaatttccactgctttggagagtcccacccactaagcactgtgcatgtaaacaggttcctttgctcagatgaaggaagtagggggtggggctttccttgtgtgatgcctccttaggcacacaggcaatgtctcaagtactttgaccttagggtagaaggcaaagctgccagtaaatgtctcancattgctgctaattttggtcctgctagtttctggattgtacaaa

SEQ ID NO: 2668 - DNA, 427 bp, Homo sapiens
cctggagtggtgtgtctaagggactggctgagagtctgcagccagactacagtgaacgactctgcctcgtcagtgagattcccccaaaaggaggggcccttggggaggggcctggggcctccccatgcaaccagcatagcccctactgggcccccccatgttacaccctaaagcctgaaacctgaaccccaatcctctgacagaagaaccccagggtcctgtagccctaagtggtactaactttccttcattcaacccacctgcgtctcatactcacctcaccccactgtggctgatttggaattttgtgcccccatgtaagcaccccttcatttggcattccccacttgagaattacccttttgccccgaacatgtttttcttctccctcagtctggcccttccttttcgcaggattcttcctccc

SEQ ID NO: 2669 - DNA, 462 bp, Homo sapiens
  misc_feature (32)..(32): n includes a, c, g, or t, or contains no nucleotide
  misc_feature (144)..(144): n includes a, c, g, or t, or contains no nucleotide
  misc_feature (279)..(279): n includes a, c, g, or t, or contains no nucleotide
  misc_feature (281)..(281): n includes a, c, g, or t, or contains no nucleotide
  misc_feature (283)..(283): n includes a, c, g, or t, or contains no nucleotide
caagagtctggctctcccttctctgtgacccnggcatgactgggcgcctggagcagtttcactctgtgaggagtgagggaaccctggggctcaccctctcagaggaagggcacagagaggaagggaagaattggggggcagccnggagtgagtggcagcctccctgcttccttctgcattcccaagccggcagctactgcccagggcccgcagtgttggctgctgcctgccacagcctctgtgactgcagtggagcggcgaattccctgtggcctgccncncnttcggcatcagaggatggagtggtcgaggctagtggagtcccagggaccgctggctgctctgcctgagcatcagggagggggcaggaaagaccaagctgggtttgcacatctgtctgcaggctgtctctccaggcacggggtgtcaggagggagagacagcctgggtatgggcaagaaa

SEQ ID NO: 2670 - DNA, 397 bp, Homo sapiens
  misc_feature (196)..(210): n includes a, c, g, or t, or contains no nucleotide
  misc_feature (298)..(312): n includes a, c, g, or t, or contains no nucleotide
tgggagcccataacctctcgcggcgggagcccacccggcaggtgttcgccgtgcagcgcatcttcgaaaacggctacgaccccgtaaacttgctcaacgacatcgtgattctccagctcaacgggtcggccaccatcaacgccaacgtgcaggtggcccagctgccggctcagggacgccgcctgggcaacggggnnnnnnnnnnnnnnntgggctggggccttctgggcaggaaccgtgggatcgccagcgtcctgcaggagctcaacgtgacggtggtgacgtccctctgccgtcnnnnnnnnnnnnnnnctctcgtgaggggccggcaggccggcgtctgtttcggggactccggcagccccttggtctgcaacgggctaatccacggaattgc

SEQ ID NO: 2671 - DNA, 265 bp, Homo sapiens
ccaggtcaccctttgctgtgaggctgtcctgtacattgtgggatgttcagcactgtcccttgcctcaatgccagtaacgcgtcttcctgagtggtgccaaacaaaaaggttctcaggtgttgccaaatatgtcctggggtataaaactttcctcgcctgacaaccactggtctgtagggatttttggctacacacaaaccagtatcgctcatagatcagcaaaccggggcctactagagtctgaacagctgtaatctatgaattc

SEQ ID NO: 2672 - DNA, 524 bp, Homo sapiens
  misc_feature (135)..(135): n includes a, c, g, or t, or contains no nucleotide
  misc_feature (157)..(157): n includes a, c, g, or t, or contains no nucleotide
  misc_feature (171)..(171): n includes a, c, g, or t, or contains no nucleotide
  misc_feature (212)..(212): n includes a, c, g, or t, or contains no nucleotide
  misc_feature (221)..(221): n includes a, c, g, or t, or contains no nucleotide
  misc_feature (224)..(225): n includes a, c, g, or t, or contains no nucleotide
  misc_feature (235)..(235): n includes a, c, g, or t, or contains no nucleotide
  misc_feature (242)..(243): n includes a, c, g, or t, or contains no nucleotide
  misc_feature (264)..(265): n includes a, c, g, or t, or contains no nucleotide
  misc_feature (292)..(292): n includes a, c, g, or t, or contains no nucleotide
  misc_feature (344)..(358): n includes a, c, g, or t, or contains no nucleotide
gaaagaatgtttcacccttgcatccttcttggagaagctacagcctgtgctcagttgagtggttcacactcagactttggctttatggttttccttcctccttgtctttgccctgaccttgatcaacaggggtgnaaaagaaccaccctgaggtttnccatgcctctcccnattttagtggtagcattttgtgtctttactccacccttcanccctagttnccnnaccaaggttncacacannccagatgtaactgtttttcanngctgagttgtatggattaacttcagtnccactgtaaatacacctgggatggggtggggttggggttgtttagggagaannnnnnnnnnnnnnnttgtgaactgaatgtatttttatgcaattttgagtggcctttcaaccctaagatgaatggttttgttttactggttgttgttatatagttttgagtattctgtgtttgaaagtttgggaataataatattcacttctatatgatgcctgtaaacacaacagtattt

SEQ ID NO: 2673 - DNA, 429 bp, Homo sapiens
  misc_feature (99)..(114): n includes a, c, g, or t, or contains no nucleotide
gtccggccagtctctttctcagactgggagaagctggatgccgaggaggtggcccggggccagggcacggggaagcccagggagaagctggtggatccnnnnnnnnnnnnnnnnctcctgggccactgagcccagccccagccccggcccccagcagggaagggatgagtgttgggaggggaagggctgggtccgtctgagtgggactttgcacctctgctgatcccggccggccctggcttggaggcttggctgctcttccagcgtctctcctccctcctggggaaggtcgcccttgcgcgcaaggttttagctttcagcaactgaggtaaccttagggacaggtggaggtgtgggccgatctaaccccttacccatctctctactgctggactgtggagggtcaccaggttgggaacatgctggaaa

SEQ ID NO: 2674 - DNA, 583 bp, Homo sapiens
  misc_feature (38)..(38): n includes a, c, g, or t, or contains no nucleotide
  misc_feature (54)..(54): n includes a, c, g, or t, or contains no nucleotide
  misc_feature (64)..(64): n includes a, c, g, or t, or contains no nucleotide
  misc_feature (80)..(80): n includes a, c, g, or t, or contains no nucleotide
  misc_feature (84)..(84): n includes a, c, g, or t, or contains no nucleotide
  misc_feature (86)..(88): n includes a, c, g, or t, or contains no nucleotide
  misc_feature (90)..(95): n includes a, c, g, or t, or contains no nucleotide
  misc_feature (97)..(98): n includes a, c, g, or t, or contains no nucleotide
  misc_feature (100)..(100): n includes a, c, g, or t, or contains no nucleotide
  misc_feature (103)..(105): n includes a, c, g, or t, or contains no nucleotide
  misc_feature (107)..(110): n includes a, c, g, or t, or contains no nucleotide
  misc_feature (120)..(120): n includes a, c, g, or t, or contains no nucleotide
  misc_feature (122)..(136): n includes a, c, g, or t, or contains no nucleotide
  misc_feature (141)..(141): n includes a, c, g, or t, or contains no nucleotide
  misc_feature (150)..(160): n includes a, c, g, or t, or contains no nucleotide
  misc_feature (231)..(231): n includes a, c, g, or t, or contains no nucleotide
  misc_feature (281)..(281): n includes a, c, g, or t, or contains no nucleotide
  misc_feature (508)..(508): n includes a, c, g, or t, or contains no nucleotide
tctggctgccctaccacgtggtgaacctggctgaggcnggccgcgcgctggccngccaggccgncgggttagggctcgtngggnannngnnnnnncnngnccnnnannnnctcatcgcantnnnnnnnnnnnnnnncagcntgaaccccnnnnnnnnnnncgtgcgccggcggcggcctgctgcgctcggcgggcgtgggcttcgtcgccaagctgctggagggcacgggntccgaggcgtccagcacgcgccgcgggggcagcctgggccagaccgctanggagcggccccgccgctctggagcccggcccttccgagagcctcactgcctccagccctctcaagttaaacgaactgaactaggcctggtggaaggaggcgcactttcctcctggcagaatgctagctctgagccagttcagtacctggaggaggagcaggggcgtggagggcgtggagggcgtgggagcgtgggaggcgggagtggagtggaagaagagggagagntggagcaaagtgagggccgagtgagagcgtgctccagcctggctcccacaggcagctttaaccattaaaactgaa

SEQ ID NO: 2675 - DNA, 511 bp, Homo sapiens
tcttcgcccagcagatctgcgagggcatggcctatctgcacgcgcacgactacatccaccgagacctagccgcgcgcaacgtgctgctggacaacgacaggctggtcaagatcggggactttggcctagccaaggccgtgcccgaaggccacgagtactaccgcgtgcgcgaggatggggacagccccgtgttctggtatgccccagagtgcctgaaggagtataagttctactatgcgtcagatgtctggtccttcggggtgaccctgtatgagctgctgacgcactgtgactccagccagagcccccccacgaaattccttgagctcataggcattgctcagggtcagatgacagttctgagactcactgagttgctggaacgaggggagaggctgccacggcccgacaaatgtccctgtgaggtctatcatctcatgaagaactgctgggagacagaggcgtcctttcgcccaaccttcgagaacctcatacccattctgaagacagt

SEQ ID NO: 2676 - DNA, 423 bp, Homo sapiens
  misc_feature (33)..(33): n includes a, c, g, or t, or contains no nucleotide
  misc_feature (41)..(69): n includes a, c, g, or t, or contains no nucleotide
  misc_feature (244)..(262): n includes a, c, g, or t, or contains no nucleotide
  misc_feature (389)..(389): n includes a, c, g, or t, or contains no nucleotide
  misc_feature (392)..(392): n includes a, c, g, or t, or contains no nucleotide
  misc_feature (398)..(398): n includes a, c, g, or t, or contains no nucleotide
aaaactagcaatctgcaggtagggcagttcatncatctggnnnnnnnnnnnnnnnnnnnnnnnnnnnnngagccagagcaggtgggtgaggtagttgagtggagacaggtctgtcaggtggttctcagaaatatccacatagcgcagatggatgtaggagcgcagcaagtagatgtctgtcaggtccctctctttaacctccagcttgacataagcatgagccagcccattgcctgtcttacannnnnnnnnnnnnnnnnnncttcatcatgtcctccgtgaggggggtgggcagccattcctcaagggaactcttccccctcttttcttgtagtcctcccccctcctctgtctccttcttcggcctcttctttctcaagaatcatccnggncttggntcaagagtcttccttagatcaactt

SEQ ID NO: 2677 - DNA, 442 bp, Homo sapiens
  misc_feature (78)..(78): n includes a, c, g, or t, or contains no nucleotide
  misc_feature (95)..(95): n includes a, c, g, or t, or contains no nucleotide
ttctctgccaagcagatgtcaagagtgggaatggtcaggctggggtacagcctgctctcggtgtgggcctatgatctnggctctcgcctcttccnggagaagatacaaatccacaagaaacaaagaggacacggctggttttcattgtgaaagatagctacacctcacaaggaaatggactgcctctcttgagcacttccctggagctaccacgtatctagctaatatgtatgtgtcagtagtaggctccaaggattgacaaatatatttatgatctattcagctgcttttactgtgtggattatgccaacagcttgaatggattctaacagactcttttgtttttaaaagtctgccttgtttatggtggaaaattactgaaactattttactgtgaaacagtgtgaactattataatgcaaatactttttaacttagaggc

SEQ ID NO: 2678 - DNA, 446 bp, Homo sapiens
  misc_feature (51)..(53): n includes a, c, g, or t, or contains no nucleotide
  misc_feature (55)..(56): n includes a, c, g, or t, or contains no nucleotide
  misc_feature (145)..(145): n includes a, c, g, or t, or contains no nucleotide
  misc_feature (147)..(148): n includes a, c, g, or t, or contains no nucleotide
  misc_feature (153)..(153): n includes a, c, g, or t, or contains no nucleotide
  misc_feature (155)..(155): n includes a, c, g, or t, or contains no nucleotide
  misc_feature (160)..(160): n includes a, c, g, or t, or contains no nucleotide
agctggcatctgaccttggcactcgaactgacctcaagctcagctacctgnnngnnggccgtgatgcacctggaccacagtgaccccatcactcgggaccacatgggctccgttatggcccaggtgcgccaaaagctttttcagntnntgcangntgagncacacaactcacttggcaaagcagctcggcgtctcagcctcatgctgcatggcctcgtgacccccagcctcccttagctgctaagcctgccttgcccaggggtgggatggcactgaaggccagcagacaggcctaggctggggcagggtcacggctggcctttacctgctcaggcccccatctctggggtgtttgggggtcagggagcagggagcactggccgtggtctacagcgtgtggtagtcagaaggtttagctgggcccagggcaggtattgcgcctgctt

SEQ ID NO: 2679 - DNA, 517 bp, Homo sapiens
ggtgcctcaggaaggaagtgaccatggattgtaaaaccccttccaacccaactgggatggaaaggagatacgggattccccagggtgaagcgctggatatttaccagataattgaactcaccaaaggctccttggaaaaacgaagccagcctggaccatagcactgcctggaggctctgtatttgctcccgtggagcttcatcggggtggtgcaggctcccaaactcaggctttcagctgtgctttttgcaaaagggcttgctaaggccagccatttttcagtagcaggacctgccaagaagattccttctaactgaaggtgcagttgaattcagtgggttcagaaccaagatgccaacatcggtgtggactacaggacaaggggcattgttgcttgttgggtaaaaatgaagcagaagccccaaagttcacattaactcaggcatttcatttattttttccttttcttcttggctggttctttgttctgtcccccatgctctgatgcagtgcccta

SEQ ID NO: 2680 - DNA, 489 bp, Homo sapiens
  misc_feature (82)..(82): n includes a, c, g, or t, or contains no nucleotide
  misc_feature (102)..(102): n includes a, c, g, or t, or contains no nucleotide
  misc_feature (115)..(115): n includes a, c, g, or t, or contains no nucleotide
  misc_feature (337)..(369): n includes a, c, g, or t, or contains no nucleotide
aaggaacaggcgtttctgacgagcgggacgcagttctcggacgccgaggggctggcgctcccgcaggacggcctctattacntctactgtctcgtcggctancggggccgggcgncccctggcggcggggacccccagggccgctcggtcacgctgcgcagctctctgtaccgggcggggggcgcctacgggccgggcactcccgagctgctgctcgagggcgccgagacggtgactccagtgctggacccggccaggagacaagggtacgggcctctctggtacacgagcgtggggttcggcggcctggtgcagctccggaggggcgagagggtgnnnnnnnnnnnnnnnnnnnnnnnnnnnnnnnnncttcgcgagagggaagaccttctttggggccgtgatggtggggtgagggaatatgagtgcgtggtgcgagtgcgtgaatattgggggcccggacgcccaggaccccatggcagtgggaaa

SEQ ID NO: 2681 - DNA, 495 bp, Homo sapiens
  misc_feature (103)..(103): n includes a, c, g, or t, or contains no nucleotide
  misc_feature (109)..(187): n includes a, c, g, or t, or contains no nucleotide
  misc_feature (189)..(189): n includes a, c, g, or t, or contains no nucleotide
  misc_feature (196)..(196): n includes a, c, g, or t, or contains no nucleotide
  misc_feature (198)..(198): n includes a, c, g, or t, or contains no nucleotide
  misc_feature (200)..(200): n includes a, c, g, or t, or contains no nucleotide
  misc_feature (202)..(202): n includes a, c, g, or t, or contains no nucleotide
  misc_feature (204)..(204): n includes a, c, g, or t, or contains no nucleotide
  misc_feature (208)..(209): n includes a, c, g, or t, or contains no nucleotide
  misc_feature (211)..(219): n includes a, c, g, or t, or contains no nucleotide
  misc_feature (222)..(223): n includes a, c, g, or t, or contains no nucleotide
  misc_feature (226)..(228): n includes a, c, g, or t, or contains no nucleotide
  misc_feature (230)..(230): n includes a, c, g, or t, or contains no nucleotide
  misc_feature (233)..(237): n includes a, c, g, or t, or contains no nucleotide
  misc_feature (287)..(303): n includes a, c, g, or t, or contains no nucleotide
  misc_feature (426)..(442): n includes a, c, g, or t, or contains no nucleotide
gacatcttcctgcttattagagcatccctagcaacaaggctaaaccttcatgacagtgctggcaggtgggcttgccctagcatgtggggcaggtttgttgttnttttannnnnnnnnnnnnnnnnnnnnnnnnnnnnnnnnnnnnnnnnnnnnnnnnnnnnnnnnnnnnnnnnnnnnnnnnnnnnnngntttttantngngntnaaanntnnnnnnnnnaannttnnntnttnnnnntatttttaagtataaagttcagtgaggtaggccagcttttatgacgcacnnnnnnnnnnnnnnnnntttaatcctaccctaaatgaagcatatgcctctatttttcctgtccccagtgctgggcttcgtcacataccaacatttctgggcctttaccaacagcattttagctcagaaggctcgcttacnnnnnnnnnnnnnnnnngtttggttttgaaatacctgtaatttgacctaatcttgggataaactgttagg

SEQ ID NO: 2682 - DNA, 492 bp, Homo sapiens
  misc_feature (138)..(140): n includes a, c, g, or t, or contains no nucleotide
  misc_feature (143)..(145): n includes a, c, g, or t, or contains no nucleotide
  misc_feature (147)..(157): n includes a, c, g, or t, or contains no nucleotide
  misc_feature (159)..(160): n includes a, c, g, or t, or contains no nucleotide
  misc_feature (162)..(164): n includes a, c, g, or t, or contains no nucleotide
  misc_feature (182)..(182): n includes a, c, g, or t, or contains no nucleotide
  misc_feature (339)..(339): n includes a, c, g, or t, or contains no nucleotide
  misc_feature (358)..(358): n includes a, c, g, or t, or contains no nucleotide
gcaactactctttagcatctgttgctcccaactctgctttgcaattatatgactcaagcattctggctccgttaactattactgctgttactcccaagtaaattccctctaaaaaataaaaatttttaaagctgtaannnaannncnnnnnnnnnnnannannncaattccatcagagttangcattgtttcctctgtacatctttgctctgcttccattgctaattccctagtaaagtgttgtatattcaaagttccaaagaaacagaatatccaagacatcaccaatcatccaaaacacagtgtaggaggccacagttaagagaagcaagaccattngctctttttataggctcgngaacaacaggatgctttggtcctgtatcaggcaggacgctttttggggtagatcctactggccaccctaactattcgggtaggatcctactgttcaccctaggctatggggcacatgttcagagtcccatgtta

SEQ ID NO: 2683 - DNA, 537 bp, Homo sapiens
  misc_feature (64)..(105): n includes a, c, g, or t, or contains no nucleotide
caacctacggatgactcgtgctttgacccctacacagtttcccattatgccgttggagatgagnnnnnnnnnnnnnnnnnnnnnnnnnnnnnnnnnnnnnnnnnntgcttaggctttggaagtggtcatttcagatgtgattcatctagatggtgccatgacaatggtgtgaactacaagattggagagaagtgggaccgtcagggagaaaatggccagatgatgagctgcacatgtcttgggaacggaaaaggagaattcaagtgtgaccctcatgaggcaacgtgttacgatgatgggaagacataccacgtaggagaacagtggcagaaggaatatctcggtgccatttgctcctgcacatgctttggaggccagcggggctggcgctgtgacaactgccgcagacctgggggtgaacccagtcccgaaggcactactggccagtcctacaaccagtattctcagagataccatcagagaacaaacactaatgttaattgcccaattgagtgcttcatgcctttagatgtacag

SEQ ID NO: 2684 - DNA, 475 bp, Homo sapiens
  misc_feature (123)..(123): n includes a, c, g, or t, or contains no nucleotide
  misc_feature (177)..(191): n includes a, c, g, or t, or contains no nucleotide
cacccttagagtgcagaagctggggggagaggctgcttcgaagggcaggactggggataatcagaacctgcctgtcacctcagggcatcactgaacaaacatttcctgatgggaactcctgcngcagagcccaggctggggaagtgaactacccagggcagcccctttgtggcccannnnnnnnnnnnnnnttctctctgtaccatgagctcctccaggagattatttaagtgtattgtatcattggttttctgtgattgtcataacattgtttttgttattgttggtgctgttgttatttattattgtaatttcagtttgcctctactggagaatctcagcaggggtttcagcctgactgtctccctttctctaccagactctacctctgaatgtgctgggaacctcttggagcctgtcaggaactcctcactgtttaaatatttatttattgtgacaaatggagctggtttcc

SEQ ID NO: 2685 - DNA, 526 bp, Homo sapiens
  misc_feature (26)..(26): n includes a, c, g, or t, or contains no nucleotide
  misc_feature (46)..(46): n includes a, c, g, or t, or contains no nucleotide
  misc_feature (52)..(52): n includes a, c, g, or t, or contains no nucleotide
  misc_feature (57)..(57): n includes a, c, g, or t, or contains no nucleotide
  misc_feature (62)..(63): n includes a, c, g, or t, or contains no nucleotide
  misc_feature (68)..(72): n includes a, c, g, or t, or contains no nucleotide
  misc_feature (74)..(76): n includes a, c, g, or t, or contains no nucleotide
  misc_feature (78)..(79): n includes a, c, g, or t, or contains no nucleotide
  misc_feature (82)..(88): n includes a, c, g, or t, or contains no nucleotide
  misc_feature (91)..(92): n includes a, c, g, or t, or contains no nucleotide
  misc_feature (102)..(102): n includes a, c, g, or t, or contains no nucleotide
  misc_feature (113)..(113): n includes a, c, g, or t, or contains no nucleotide
  misc_feature (118)..(118): n includes a, c, g, or t, or contains no nucleotide
  misc_feature (129)..(129): n includes a, c, g, or t, or contains no nucleotide
  misc_feature (131)..(131): n includes a, c, g, or t, or contains no nucleotide
  misc_feature (133)..(134): n includes a, c, g, or t, or contains no nucleotide
  misc_feature (140)..(140): n includes a, c, g, or t, or contains no nucleotide
  misc_feature (157)..(157): n includes a, c, g, or t, or contains no nucleotide
  misc_feature (163)..(163): n includes a, c, g, or t, or contains no nucleotide
  misc_feature (174)..(174): n includes a, c, g, or t, or contains no nucleotide
  misc_feature (194)..(194): n includes a, c, g, or t, or contains no nucleotide
  misc_feature (401)..(402): n includes a, c, g, or t, or contains no nucleotide
  misc_feature (428)..(429): n includes a, c, g, or t, or contains no nucleotide
tggttctgtggatttcttccgctctnggtcctcctacagagcaggntttggnaaccnagagnntgaannnnngnnngnnaannnnnnnttnnaccagcttantctccagggtnactgngagctgcgggnananntggaanactttaatggtaaccgnactttngcccactatgngaccttccgcctcctcggtnaggtagaccactaccagctggcactgggcaagttctcagagggcactgcaggggattccctgagcctccacagtgggaggccctttaccacctatgacgctgaccacgattcaagcaacagcaactgtgcagtgattgtccacggtgcctggtggtatgcatcctgttaccgatcaaatctcaatggtcgctatgcagtgtctgagnntgccgcccacaaatatggcattgacnnggcctcaggccgtggtgtgggccacccctaccgcagggttcggatgatgcttcgatagggcactctggcagccagtgcccttatctctcctgtacag

SEQ ID NO: 2686 - DNA, 535 bp, Homo sapiens
  misc_feature (26)..(26): n includes a, c, g, or t, or contains no nucleotide
  misc_feature (67)..(83): n includes a, c, g, or t, or contains no nucleotide
  misc_feature (85)..(85): n includes a, c, g, or t, or contains no nucleotide
  misc_feature (115)..(115): n includes a, c, g, or t, or contains no nucleotide
  misc_feature (176)..(192): n includes a, c, g, or t, or contains no nucleotide
  misc_feature (272)..(272): n includes a, c, g, or t, or contains no nucleotide
aacctcggccccagtgatggctgatntcactcccactgtctcgtagaattacactccttcctggggnnnnnnnnnnnnnnnnncnttgtccttggggagtacagggaagtacctncagtgaccctgcccccatgaccttggccaggcaggatgattccagagcccgtactgtgggnnnnnnnnnnnnnnnnngcccagccccatccgcaagccaggctgggcctgggcataacttcgctgggctctcccaagaccatcagcagtgcatccanccccctggggcctgggctgctgctggttcttcatcagtcccttggtctctagcctcggccagggctgctctgctctccgccctcctttgtgtatcaagtgtcgctcacagccccattcactggggagcctttcggatctatttggtctttctcatgtcccccactggtctgtaccccagggagcgggtgcttgtactgtgtgaatccagtgttcacattcacacttaatgacttccttggcaccaatcatgtatttcaccgtt

SEQ ID NO: 2687 - DNA, 276 bp, Homo sapiens
ttcccagacgaaagcaatgttgggttggggaagacagtgcagccacccagcctttaccagcagcgtacggcagacgaaggcagtcgaggtgtggaggtgatcacgaagatacatgtgtttgactgtttaatttgaaagtttacattttttatgctttgtgttggtgtgtaatttttgtactcttggtggctagtttttgtcaaatcttttttggaatattgcttaaatgttttgattttatgatagtgaagcttgtattcagtgttttgccaatta

SEQ ID NO: 2688 - DNA, 454 bp, Homo sapiens
  misc_feature (301)..(303): n includes a, c, g, or t, or contains no nucleotide
  misc_feature (306)..(306): n includes a, c, g, or t, or contains no nucleotide
  misc_feature (322)..(329): n includes a, c, g, or t, or contains no nucleotide
  misc_feature (331)..(331): n includes a, c, g, or t, or contains no nucleotide
  misc_feature (334)..(395): n includes a, c, g, or t, or contains no nucleotide
atctcagaagattgggccgcctctcctccatcttctggcaaggacagaggcgaggggacagcccagcgccatcctgaggatcgggtgggggtggagtgggggcttccaggtggcccttcccggcacacattccatttgttgagccccagtcctgccccccaccccaccctccctacccctccccagtctctggggtcaggaagaaaccttattttaggttgtgttttgtttttgtataggagccccaggcagggctagtaacagtttttaaataaaaggcaacaggtcatgttcaatttcnnnaanaaaaaaaaaaaaaaannnnnnnnanaannnnnnnnnnnnnnnnnnnnnnnnnnnnnnnnnnnnnnnnnnnnnnnnnnnnnnnnnnnnnnaaccaaattaaacaatcccacaaagaattctgacatcaatgtgttttcctcagtcaggt

SEQ ID NO: 2689 - DNA, 131 bp, Homo sapiens
tgcattgctattggttgaatctgcatatatgaagagctgattacatatactactaaatttcttgcctacaagtgctatcaattactgagatataattgtggatttccaattatgcttgtggatctatttct

SEQ ID NO: 2690 - DNA, 448 bp, Homo sapiens
  misc_feature (26)..(40): n includes a, c, g, or t, or contains no nucleotide
gcgtggcttgctgaacccaggctcannnnnnnnnnnnnnnccccagctttgagaagggggaaggcccctggtaagttattgatgcccccatatttcagctactgctctctttccaaggccttgcatggaaaggcctagccattgtctgaggcagcaatctttggcatctacaggtggcagcagcctttcaccagggctccatctgtgaagagtctcagccatgactttgagctgagcttgggagaagtaaagcaactgttaaggccagcccttgcccctcagacctgccatgaaaggaatgagccctagactgactcctgcagcacccccgggacaggctgggaccagctgtttgtctccaggtgtcagagtccctcctcctcctccaacctctccaacctactttgtttggaaataccgagctacacttcaaaatgtattcaaggga

SEQ ID NO: 2691 - DNA, 589 bp, Homo sapiens
  misc_feature (198)..(215): n includes a, c, g, or t, or contains no nucleotide
  misc_feature (254)..(268): n includes a, c, g, or t, or contains no nucleotide
  misc_feature (380)..(395): n includes a, c, g, or t, or contains no nucleotide
  misc_feature (424)..(441): n includes a, c, g, or t, or contains no nucleotide
  misc_feature (490)..(490): n includes a, c, g, or t, or contains no nucleotide
  misc_feature (494)..(494): n includes a, c, g, or t, or contains no nucleotide
  misc_feature (496)..(497): n includes a, c, g, or t, or contains no nucleotide
  misc_feature (499)..(505): n includes a, c, g, or t, or contains no nucleotide
  misc_feature (507)..(508): n includes a, c, g, or t, or contains no nucleotide
ctgatttgttgctccctatccagcctagacaccagtaactcttgtgttcaccaggacccagacccttggcaagggataggctcgttggtgacattgtgaatttcagatttgttttatccactttttttgctatttatttaaatggtcgatcaacttcccacaaactgaggaatgaattccacgagcctgttctgaaannnnnnnnnnnnnnnnnncacgtgctcgtcctttaatggagttcaccagcacacttnnnnnnnnnnnnnnnttgctttcgtctttttttgtgcgtaataaagtcaactgaccaagtgaccatgaaaaggggctgtctggggctcctgttttttagctgctgttcttcagctccgaccatgttnnnnnnnnnnnnnnnnaattggttttaattgaggcagaaactgannnnnnnnnnnnnnnnnntttagaaacaagacacacttttgtattaaaattgcttgcagtaacaaanaaanannannnnnnnannttcttttcaactattaccttatctataaatgttaccctggggtataatcatgttgtaggtacttaaatgcattccgcaaat

SEQ ID NO: 2692 - DNA, 444 bp, Homo sapiens
  misc_feature (38)..(52): n includes a, c, g, or t, or contains no nucleotide
  misc_feature (56)..(56): n includes a, c, g, or t, or contains no nucleotide
  misc_feature (101)..(101): n includes a, c, g, or t, or contains no nucleotide
  misc_feature (103)..(103): n includes a, c, g, or t, or contains no nucleotide
  misc_feature (111)..(111): n includes a, c, g, or t, or contains no nucleotide
  misc_feature (121)..(121): n includes a, c, g, or t, or contains no nucleotide
  misc_feature (123)..(123): n includes a, c, g, or t, or contains no nucleotide
  misc_feature (127)..(128): n includes a, c, g, or t, or contains no nucleotide
  misc_feature (133)..(133): n includes a, c, g, or t, or contains no nucleotide
  misc_feature (135)..(135): n includes a, c, g, or t, or contains no nucleotide
  misc_feature (142)..(156): n includes a, c, g, or t, or contains no nucleotide
  misc_feature (168)..(168): n includes a, c, g, or t, or contains no nucleotide
  misc_feature (174)..(174): n includes a, c, g, or t, or contains no nucleotide
  misc_feature (182)..(182): n includes a, c, g, or t, or contains no nucleotide
  misc_feature (218)..(218): n includes a, c, g, or t, or contains no nucleotide
  misc_feature (244)..(244): n includes a, c, g, or t, or contains no nucleotide
  misc_feature (246)..(246): n includes a, c, g, or t, or contains no nucleotide
  misc_feature (266)..(266): n includes a, c, g, or t, or contains no nucleotide
  misc_feature (271)..(272): n includes a, c, g, or t, or contains no nucleotide
  misc_feature (322)..(322): n includes a, c, g, or t, or contains no nucleotide
  misc_feature (340)..(340): n includes a, c, g, or t, or contains no nucleotide
  misc_feature (347)..(347): n includes a, c, g, or t, or contains no nucleotide
  misc_feature (354)..(354): n includes a, c, g, or t, or contains no nucleotide
  misc_feature (387)..(388): n includes a, c, g, or t, or contains no nucleotide
  misc_feature (397)..(397): n includes a, c, g, or t, or contains no nucleotide
  misc_feature (405)..(405): n includes a, c, g, or t, or contains no nucleotide
  misc_feature (419)..(419): n includes a, c, g, or t, or contains no nucleotide
tagccctcatcaaactggacgtccaccacttctaaatnnnnnnnnnnnnnnngganagggtagaccagactggtttggggaggtggcccagcatttgggtnanagaacagnagggactatngntttnnttggncnagagggnnnnnnnnnnnnnnngaaagtactggntcctgngaacccantcaaattccctgttggtcctgaaacttggggaagantcatgattgtcattggggaccctatngntgaaagaggtcccatcaaanccaannatttggctcccattcatgctgaggctccagagttcatggaaatgagtgtngagcaggaaattctggtnactggtntcaggtnggtcgatcttctagctccctatgacaagggtgnnaaattgggntttggggnggggctggagttgnaaatctttccttgatcatggagtta

SEQ ID NO: 2693 - DNA, 617 bp, Homo sapiens
  misc_feature (189)..(249): n includes a, c, g, or t, or contains no nucleotide
  misc_feature (386)..(403): n includes a, c, g, or t, or contains no nucleotide
  misc_feature (527)..(545): n includes a, c, g, or t, or contains no nucleotide
gtgttccggaagcagcacccctacacgttcccgggtggcagtggcactgtctttgcccgaaacacccgccgggcagcagaggtctggatggatgaatacaaaaatttctattatgcagcagtgccttctgctagaaacgttccttatggaaatattcagagcagattggagcttaggaagaaactcagnnnnnnnnnnnnnnnnnnnnnnnnnnnnnnnnnnnnnnnnnnnnnnnnnnnnnnnnnnnnncaggatatagcttttggggccttgcagcagggaactaactgcctcgacactttgggacactttgctgatggtgtggttggagtttatgaatgtcacaatgctgggggaaaccaggaatgggccttgacgaaggagannnnnnnnnnnnnnnnnnatttgtgccttactgtggtggaccgggcaccgggctctcttataaagctgcagggctgccgagaaaatgacagcagacagaaatgggaacagatcgagggcaactccaagctgaggcacgtggnnnnnnnnnnnnnnnnnnncagtcgcacggccaagagcgggggcctaagcgtggaggtgtgtggcccggccctttcgcagcagtggaagtt

SEQ ID NO: 2694 - DNA, 506 bp, Homo sapiens
  misc_feature (283)..(299): n includes a, c, g, or t, or contains no nucleotide
ttccggctgcccttgctgctgggtggagtggagagggagacttctttttgttggttttaatttaaaaacacaaaggcctaaagaaatacgtatcttataatttttttaatttttgagacgttcatttaatgaattgtgcacgaatgaattctatatatataaaatatacatatatagctctatatttggggaggggcactgtctcttttttctctcatttttaaaatgaagtgttgttgcctttgtatgtggttcaaccatccagctcccagctggctaaacnnnnnnnnnnnnnnnnnaagatgggaaaagagtggggttggcaggagatggaaaacggaggtgccgccccagcatggggggcaggtcccccagtccaccctgcccctccccctgtggagaagacgcttagttgggggtgtgggtttgggctccattctggattcggcggttccgggggaggggtgggtctgtgccgattactctgtcttgtacgtttgttctgc

SEQ ID NO: 2695 - DNA, 278 bp, Homo sapiens
tccagggctgtgtttacagtaaaaaaagcaggcagtcccttttagtttttcctttttaaatttttttgagattcttcatttcaggatttaaaactatagcagtccatcttaaggaaagtgtaactgccatggccacaagtctgctagttgcacttgaatgctctatcagggttgtttattaccctttctacgttctggactccttgccgagactgtttaacttgaagattaaagaaactattgcaaatgccagtgcatcagaacctaagagtggtcaa

SEQ ID NO: 2696 - DNA, 328 bp, Homo sapiens
ctctcagaacatactgattgggaggtgcgtgttcagcagaacctgcacacaggacagcgggaaaaatcgatgagcgccacctctttaaaaactcacttacgtttgtcctttttcactttgaaaagttggaaggatctgctgaggcccagtgcatatgcaatgtatagtgtctattatcacattaatctcaaagagattcgaatgacggtaagtgttctcatgaagcaggaggcccttgtcgtgggatggcatttggtctcaggcagcaccacactgggtgcgtctccagtcatctgtaagagcttgctccagattctgatgcatacgg

SEQ ID NO: 2697 - DNA, 462 bp, Homo sapiens
  misc_feature (28)..(28): n includes a, c, g, or t, or contains no nucleotide
  misc_feature (31)..(33): n includes a, c, g, or t, or contains no nucleotide
  misc_feature (51)..(51): n includes a, c, g, or t, or contains no nucleotide
  misc_feature (81)..(81): n includes a, c, g, or t, or contains no nucleotide
  misc_feature (192)..(193): n includes a, c, g, or t, or contains no nucleotide
  misc_feature (232)..(238): n includes a, c, g, or t, or contains no nucleotide
  misc_feature (240)..(243): n includes a, c, g, or t, or contains no nucleotide
  misc_feature (245)..(249): n includes a, c, g, or t, or contains no nucleotide
  misc_feature (251)..(265): n includes a, c, g, or t, or contains no nucleotide
  misc_feature (268)..(268): n includes a, c, g, or t, or contains no nucleotide
  misc_feature (271)..(271): n includes a, c, g, or t, or contains no nucleotide
  misc_feature (274)..(274): n includes a, c, g, or t, or contains no nucleotide
  misc_feature (276)..(284): n includes a, c, g, or t, or contains no nucleotide
  misc_feature (286)..(300): n includes a, c, g, or t, or contains no nucleotide
  misc_feature (303)..(309): n includes a, c, g, or t, or contains no nucleotide
  misc_feature (311)..(321): n includes a, c, g, or t, or contains no nucleotide
  misc_feature (324)..(330): n includes a, c, g, or t, or contains no nucleotide
  misc_feature (412)..(413): n includes a, c, g, or t, or contains no nucleotide
ggtgaccctcggctgctgcagggatctncannnactgcagccatgggggcncacctggtccggcgctacctgggcgatgcntcggtggagcccgaccccctgcagatgccaaccttcccgccagactacggcttccccgaacgcaaggagcgcgagatggtggccacacagcaggagatgatggacgcgcanntgaggctccagctgcgggactactgcgcccaccacctcnnnnnnntnnnnannnnnannnnnnnnnnnnnnnccnaanttncnnnnnnnnnannnnnnnnnnnnnnngannnnnnntnnnnnnnnnnnccnnnnnnntgtgatgcgcatgaaggagtttgagcgggagcggaggctgctccagcggaagaagcggcgggagaagaaggcggcagagttnnccaaaggccagggacccggggaagtggaccccaaggtggccctgtaggg

SEQ ID NO: 2698 - DNA, 370 bp, Homo sapiens
  misc_feature (26)..(26): n includes a, c, g, or t, or contains no nucleotide
  misc_feature (56)..(56): n includes a, c, g, or t, or contains no nucleotide
  misc_feature (85)..(111): n includes a, c, g, or t, or contains no nucleotide
  misc_feature (125)..(125): n includes a, c, g, or t, or contains no nucleotide
  misc_feature (142)..(142): n includes a, c, g, or t, or contains no nucleotide
  misc_feature (170)..(170): n includes a, c, g, or t, or contains no nucleotide
  misc_feature (228)..(228): n includes a, c, g, or t, or contains no nucleotide
  misc_feature (300)..(316): n includes a, c, g, or t, or contains no nucleotide
catgtgtccctgtgtccaggcaagangctctcttcctgactcacatggtattttanatggaagtgtcttgtcctaactaacaagnnnnnnnnnnnnnnnnnnnnnnnnnnnaatggacgaaatgnaacctcagagaaacaantacaggaccactcacccaagtgtaagtnactggggcaggacacctcagctgtgggtatgaaagtactgttctgttcacaaggtttngtttgagttttatgtttttcttttaaacatttctctggttcgatgggttgactgtctacagccactgttaannnnnnnnnnnnnnnnnagagaaagtcaagtgacatttgtatcttcttcagcattcgcagaccttctatag

SEQ ID NO: 2699 - DNA, 302 bp, Homo sapiens
  misc_feature (37)..(38): n includes a, c, g, or t, or contains no nucleotide
ggctttgctcactcatgtggatagcatggatttgatnncaaaaggtgaccttatagaaatagagagatgtgagcctgtgaggtccaagctagaggaagtccaaagaaaacttggatttgctctttctgacatctcggtggttagcaattattcctctgagtgggagctggaccctgtaaaggatgttctaattctttctgctctgagacgaatgctatgggctgcagatgacttcttagaggatttgccttttgagcaaatagggaatctaagggaggaaattatcaactgtgcacaaggaa

SEQ ID NO: 2700 - DNA, 569 bp, Homo sapiens
  misc_feature (35)..(75): n includes a, c, g, or t, or contains no nucleotide
  misc_feature (97)..(97): n includes a, c, g, or t, or contains no nucleotide
  misc_feature (105)..(105): n includes a, c, g, or t, or contains no nucleotide
  misc_feature (144)..(144): n includes a, c, g, or t, or contains no nucleotide
  misc_feature (151)..(152): n includes a, c, g, or t, or contains no nucleotide
  misc_feature (155)..(155): n includes a, c, g, or t, or contains no nucleotide
  misc_feature (163)..(163): n includes a, c, g, or t, or contains no nucleotide
  misc_feature (166)..(166): n includes a, c, g, or t, or contains no nucleotide
  misc_feature (181)..(309): n includes a, c, g, or t, or contains no nucleotide
cctgcacttcaaggatgacaagaccaaagaagcannnnnnnnnnnnnnnnnnnnnnnnnnnnnnnnnnnnnnnnnccgtgtggacgtggaccagctnggagaagntgcttccgcagctgctcctggacttctagggatctcagncgtggcnnagnccaccccnagnggagcccctggtccnnnnnnnnnnnnnnnnnnnnnnnnnnnnnnnnnnnnnnnnnnnnnnnnnnnnnnnnnnnnnnnnnnnnnnnnnnnnnnnnnnnnnnnnnnnnnnnnnnnnnnnnnnnnnnnnnnnnnnnnnnnnnnnnnactgcgggccttggaagtgtccagtggggacactggtgtgggaaggggcagcacctggggagtccctgcctctcctccctgggacaatagtgtgcatgccacccggggtcctacaggcaggtgctgggaaaggcctggccagcaggtagcctgtgtgtttgacaaacagcagctggcagcgctgcctcctgcccacattcctgccacccgacatcaaagctggcgtgtgacctttccagccatgcgatattccccttgga

SEQ ID NO: 2701 - DNA, 397 bp, Homo sapiens
tagatgtaaaccctgtgactatagtacgttgcttcttgttcttcacaattcatgacttaagtaccaaaatgcataccagttattatatattgccaagaattaaatgataaacttagagactgattagactgaaaatgcctaatcgatatatatattcttgtgcctagtactttaccacaaatacagtgtaatatcatcagtccaaaactgcattacttttgtaaaaacactggttaatttgtataagatattatagagctttttatgctttagaagttaaacaatatctttgggggggaactaatttattttcatcacttgaaatgtggtagctcttacaaagtttattgatttgatttttttaaaaatcaaaagccaattgaacaacaggatatat

SEQ ID NO: 2702 - DNA, 317 bp, Homo sapiens
acttcacgggcaaggccaagtgggatgcctggaatgagctgaaagggacttccaaggaagatgccatgaaagcttacatcaacaaagtagaagagctaaagaaaaaatacgggatatgagagactggatttggttactgtgccatgtgtttatcctaaactgagacaatgccttgtttttttctaataccgtggatggtgggaattcgggaaaataaccagttaaaccagctactcaaggctgctcaccatacggctctaacagattaggggctaaaacgattactgactttccttgagtagtttttatctgaaatc

SEQ ID NO: 2703 - DNA, 559 bp, Homo sapiens
tgaagaggcttctcctgttttatatattatgtgaagaatttagatcttatattggtttgcacaagttccctggagaaaaaaattgctctgtgtatatctcttggaaaataagacaatagtatttctcctttgcaatagcagttataacagatgtgaaaatatacttgactctaatatgattatacaaaagagcatggatgcatttcaaatgttagatattgctactataatcaaatgatttcatattgatctttttatcatgatcctacctatcaagcactaaaaagttgaaccattatactttatatctgtaatgatactgattatgaaatgtcccctgaaactcattgcagcagataacttttttgagtcattgacttcattttatatttaaaaaattatggaatatcatctgtcattatattctaattaaaattgtgcataatgctttggaaaaatgggtcttttataggaaaaaaactgggataactgatttctatggctttcaaagctaaaatatataatatactaaaccaactctaatattgcttcttgtgtt

SEQ ID NO: 2704 - DNA, 270 bp, Homo sapiens
  misc_feature (32)..(32): n includes a, c, g, or t, or contains no nucleotide
  misc_feature (51)..(51): n includes a, c, g, or t, or contains no nucleotide
  misc_feature (57)..(58): n includes a, c, g, or t, or contains no nucleotide
tctaaagttagttgcctttgcctgtaaaacangtgatttgcaaattattanttttcnnttttttttaacaaatggaagtaaatttgtttcacgtaaatcttaattttcaacctttctggataccttaattgtaactgtcagtttgcactggtcggtatatggaaacacattgctctaccctgctacttagttgattttaaagtgaatttacagtgatgagaaatttgtgaaaaatatattgtatttcttttgatgtttcaaaaggttgcc

SEQ ID NO: 2705 - DNA, 385 bp, Homo sapiens
  misc_feature (265)..(267): n includes a, c, g, or t, or contains no nucleotide
  misc_feature (269)..(269): n includes a, c, g, or t, or contains no nucleotide
  misc_feature (279)..(283): n includes a, c, g, or t, or contains no nucleotide
  misc_feature (290)..(292): n includes a, c, g, or t, or contains no nucleotide
  misc_feature (295)..(295): n includes a, c, g, or t, or contains no nucleotide
  misc_feature (299)..(302): n includes a, c, g, or t, or contains no nucleotide
  misc_feature (304)..(304): n includes a, c, g, or t, or contains no nucleotide
  misc_feature (306)..(306): n includes a, c, g, or t, or contains no nucleotide
  misc_feature (308)..(309): n includes a, c, g, or t, or contains no nucleotide
  misc_feature (311)..(311): n includes a, c, g, or t, or contains no nucleotide
  misc_feature (313)..(316): n includes a, c, g, or t, or contains no nucleotide
catagtttgcttaccaggtggagacaagattcaagacatagcagaagagtggaagacaaatattttccacttaaatgaggctgtttttgacgttctctgccaaggatttagagctttcgttgaactaacataaaaggagtgcgagtcttagtagagatgttccgtgtgtgccgcccgtgctctgaactgcgtttccacctgctgtggtgcttgtgcagcctggcagttcattgtcatctttaataaactaaggaaataaaattcnnncnttcgtcaaannnnnaaaaaannnaanaaannnnangngnncnannnnaaagcaggtatatctgaacattgagaaggtttctgtgttataatgtaaagcaaactggaccacacacat

SEQ ID NO: 2706 - DNA, 396 bp, Homo sapiens
  misc_feature (31)..(32): n includes a, c, g, or t, or contains no nucleotide
  misc_feature (79)..(79): n includes a, c, g, or t, or contains no nucleotide
  misc_feature (82)..(82): n includes a, c, g, or t, or contains no nucleotide
  misc_feature (110)..(110): n includes a, c, g, or t, or contains no nucleotide
  misc_feature (121)..(122): n includes a, c, g, or t, or contains no nucleotide
  misc_feature (128)..(128): n includes a, c, g, or t, or contains no nucleotide
  misc_feature (131)..(132): n includes a, c, g, or t, or contains no nucleotide
  misc_feature (134)..(152): n includes a, c, g, or t, or contains no nucleotide
  misc_feature (186)..(186): n includes a, c, g, or t, or contains no nucleotide
  misc_feature (253)..(253): n includes a, c, g, or t, or contains no nucleotide
tttagaaagcatttgcccatctgcctttctnncccccagcccccacccgctttgaatgtagagacccgtgggcactttnccntttgtggtggggggtgcggaggaggtancccccaccccnngcacanccnncnnnnnnnnnnnnnnnnnnnctgctgttcgggtgatgacctcgttgccaagctncctcctgtccccttgttctgggggcaggcgctgtgcttctgtgaggtggtttagcttttgctttcgnaagtggccagctgcggccaccaggtctcagcacaagagcgcttcctttgcacagaatgagcttcgagctttgttcagactaaatgaatgtatctgggaggggtcgggggcacgagttgattccaagcacatgcctttgctgag

SEQ ID NO: 2707 - DNA, 538 bp, Homo sapiens
  misc_feature (26)..(26): n includes a, c, g, or t, or contains no nucleotide
  misc_feature (29)..(29): n includes a, c, g, or t, or contains no nucleotide
  misc_feature (31)..(31): n includes a, c, g, or t, or contains no nucleotide
  misc_feature (42)..(42): n includes a, c, g, or t, or contains no nucleotide
  misc_feature (45)..(45): n includes a, c, g, or t, or contains no nucleotide
  misc_feature (245)..(262): n includes a, c, g, or t, or contains no nucleotide
  misc_feature (311)..(328): n includes a, c, g, or t, or contains no nucleotide
  misc_feature (345)..(345): n includes a, c, g, or t, or contains no nucleotide
  misc_feature (436)..(450): n includes a, c, g, or t, or contains no nucleotide
agatgacacagctaattctgaaacanatngnatcaaggcagnaangtctcatcctgaacatttcttctgggatagccctgtttccttggcctctctactccatgtactcagcttccaaggcgtttgtgtgcgcattttccaaggccctgcaagaggaatataaagcaaaagaagtcatcatccaggtgctgaccccatatgctgtctcgactgcaatgacaaagtatctaaatacaaatgtgatnnnnnnnnnnnnnnnnnngtttgtcaaagagtcattgaattatgtcacaattggaggtgaaacctgnnnnnnnnnnnnnnnnnnaatcttggcgggctttntgagcctgatcccggcctgggccttctacagcggtgccttccaaaggctgctcctgacacactatgtggcatacctgaagctcaacaccannnnnnnnnnnnnnngcggtgaggagtccagcacaaccttttcctcaccagtcccatgctggctgaagaggaccagaggagcagaccagcacttcaacctagt

SEQ ID NO: 2708 - DNA, 557 bp, Homo sapiens
ttggtaaatcatgcttattgctacagtttacagacaagaggtttcagccagtgcatgaccttactattggtgtagagttcggtgctcgaatgataactattgatgggaaacagataaaacttcagatatgggatacggcagggcaagaatcctttcgttccatcacaaggtcgtattacagaggtgcagcaggagctttactagtttacgatattacacggagagatacattcaaccacttgacaacctggttagaagatgcccgccagcattccaattccaacatggtcattatgcttattggaaataaaagtgatttagaatctagaagagaagtaaaaaaagaagaaggtgaagcttttgcacgagaacatggactcatgttcatggaaacgtctgctaagactgcttccaatgtagaagaggcatttattaatacagcaaaagaaatttatgaaaaaattcaagaaggagtgtttgacattaataatgaggcaaatggcattaaaattggccctcagcatgctgctaccaatgcaacacatgcaggcaatcag

SEQ ID NO: 2709 - DNA, 241 bp, Homo sapiens
  misc_feature (71)..(71): n includes a, c, g, or t, or contains no nucleotide
  misc_feature (75)..(75): n includes a, c, g, or t, or contains no nucleotide
  misc_feature (131)..(131): n includes a, c, g, or t, or contains no nucleotide
aaagtcagtgacatgcccatgcgagtacctgaggaaggtgagtgagtgcagacagatggggcctggtgccnttgnagcagttcccgggtctcagctgccacacatctcatagccggtgatgctgggggaancttacgcagtcacagtactggcttcttcctctttttctttccatacaagtggcttagggatggggtagagtagttgacttatttggatgaaaaccactatcttctgtcag

SEQ ID NO: 2710 - DNA, 278 bp, Homo sapiens
actgctcctcaaaagctaacggttgcacctccaagtggctgggtctgttcttactcttggagggaattctgagaagacagcacagaattgtaaaccttcccttttgacccttttggattttatcaggtgtaaacaaaaagctgaacagttacttcaaagatatgtgtgtatattcagttttttattgttaagctgatattttaaagatttctgagctagcaggcatgtgggaaggaaggctctgtcttcaactctttgaccctccatgtgtaccatag

SEQ ID NO: 2711 - DNA, 287 bp, Homo sapiens
cctggactcatttgagaagacttgagaaatgtcttaatactcacactgctgcatgtagctcttgcttatttactggtctgggaaacaggatgtgtttcctttttttaaaagccaattgacagattacacctaaatactcctccttttgtatcattcagccttttgttttagtttggtaagttttaagaaatttcagcagcaaagttgttattcagtgggcacgatggactccaaatgcctcaagttatgtatacctgtcccagatgtaaacttcattgtcctttgtt

SEQ ID NO: 2712 - DNA, 469 bp, Homo sapiens
  misc_feature (86)..(100): n includes a, c, g, or t, or contains no nucleotide
  misc_feature (105)..(116): n includes a, c, g, or t, or contains no nucleotide
  misc_feature (118)..(122): n includes a, c, g, or t, or contains no nucleotide
  misc_feature (125)..(125): n includes a, c, g, or t, or contains no nucleotide
  misc_feature (127)..(127): n includes a, c, g, or t, or contains no nucleotide
  misc_feature (129)..(130): n includes a, c, g, or t, or contains no nucleotide
  misc_feature (133)..(136): n includes a, c, g, or t, or contains no nucleotide
  misc_feature (138)..(139): n includes a, c, g, or t, or contains no nucleotide
  misc_feature (142)..(143): n includes a, c, g, or t, or contains no nucleotide
  misc_feature (145)..(150): n includes a, c, g, or t, or contains no nucleotide
  misc_feature (164)..(164): n includes a, c, g, or t, or contains no nucleotide
gatcctttcattatcagaacagcagcttatgaactgcttcattttccaaaagtgtttcccaaaaatcagaaacctaaacacccaannnnnnnnnnnnnnnccatnnnnnnnnnnnntnnnnnatntnannaannnnanntanntnnnnnnaaatacaacttttntgacctcaagagtcctttgcactactatgggaatgccaccatgtctttgatgaataagaacgcgtatcacaatgtgactgcagagcagctctttttgaaggacattatagaaaaaaacctcgtaatcaacttgactcaagattgactctacagactcagaagatgatgctaacagtgttagttttatttttgtactgcaatttttagtttaaaatatgttggatgcactcgtcaaataattatgtatactgtctgttgctgcctggtgattcataaccaccagcttaatttctgtgaatactgta

SEQ ID NO: 2713 - DNA, 610 bp, Homo sapiens
  misc_feature (59)..(60): n includes a, c, g, or t, or contains no nucleotide
  misc_feature (85)..(85): n includes a, c, g, or t, or contains no nucleotide
  misc_feature (93)..(93): n includes a, c, g, or t, or contains no nucleotide
  misc_feature (120)..(120): n includes a, c, g, or t, or contains no nucleotide
  misc_feature (280)..(280): n includes a, c, g, or t, or contains no nucleotide
gcttaaccctggaaaatgaatccctctatctctaaagaaaatctctgtgaaacccctanngtggaggcggaattgctctcccagnccttgcantgcagaggggcccatgaaagaggacangctacccctttacaaatagaatttgagcatcagtgaggttaaactaaggccctcttgaatctctgaatttgagatacaaacatgttcctgggatcactgatgactttttatactttgtaaagacaattgttggagagcccctcacacagccctggcctcngctcaactagcagatacagggatgaggcagacctgactctcttaaggaggctgagagcccaaactgctgtcccaaacatgcacttccttgcttaaggtatggtacaagcaatgcctgcccattggagagaaaaaacttaagtagataaggaaataagaaccactcataattcttcaccttaggaataatctcctgttaatatggtgtacattcttcctgattattttctacacatacatgtaaaatatgtctttcttttttaaatagggttgtactatgctgttatgagtggctttaatgaataaacatttgtagcatcctctttaatgg

SEQ ID NO: 2714 - DNA, 588 bp, Homo sapiens
  misc_feature (48)..(48): n includes a, c, g, or t, or contains no nucleotide
  misc_feature (54)..(54): n includes a, c, g, or t, or contains no nucleotide
  misc_feature (146)..(146): n includes a, c, g, or t, or contains no nucleotide
  misc_feature (156)..(156): n includes a, c, g, or t, or contains no nucleotide
  misc_feature (166)..(166): n includes a, c, g, or t, or contains no nucleotide
  misc_feature (172)..(172): n includes a, c, g, or t, or contains no nucleotide
  misc_feature (201)..(201): n includes a, c, g, or t, or contains no nucleotide
  misc_feature (211)..(211): n includes a, c, g, or t, or contains no nucleotide
  misc_feature (223)..(223): n includes a, c, g, or t, or contains no nucleotide
  misc_feature (389)..(409): n includes a, c, g, or t, or contains no nucleotide
  misc_feature (447)..(447): n includes a, c, g, or t, or contains no nucleotide
  misc_feature (500)..(500): n includes a, c, g, or t, or contains no nucleotide
  misc_feature (551)..(551): n includes a, c, g, or t, or contains no nucleotide
ttgtctcgggtctgaccaggagatggaggatgtgtccttggcagagcnaagggngagacagaggtttctggatgccatgacaggctgtcggggtccaggtggcactcatgggccccctgccccatgtgaatgctgctggcacctgntggggggttncccagggatngacccntgggcatggcttctgggctgcttagtccnagggggagcnaacttgtggccnaaatccatgagttcagaggaaaaggggaaggcactgaaacgtcaccagagagacagctgttgagaccgctcagaaaccctctgtctgtcacactctgccctggctgctgtgtggtcagggcaccatgagggtgtacagatgtgctgtgtcctcagagcctcgcagnnnnnnnnnnnnnnnnnnnnngcccctgcccagcagcctcaaggacaggcctttgtccntcacggttgtggacaggaggtcgcaccactggcctgcgagagcctctggtggncccgtggcttcccccagttatctgctaaggaaaactgtgctcttcgaaggncagagccaagaagtcagccctgacttttgtaaaattt

SEQ ID NO: 2715 - DNA, 424 bp, Homo sapiens
gacacgaacccaccaggaggaacaaacaactccgatgcgctgccttaagagctgtaacaccgcgaggtctcgagcttcactcctgagccagcaagaccacaaacccaccagaaggaagaaactcaggaaaacagccgaacatcagaaggaataaactctggacacaccacctttaagaactgtgacactcgctgcgagcgtctgtggcttcattcttgaagtcagtgagaccaagaacccaccaattctggacacaattgcactctagcctgggcaacaagagtgaaactcatctcgaaaaaaaaaagagtctggaagggccttctgagttgtaatattatgaacttaaattttgaggtcctgaagttttgttgcagtgtgaatgataagagtagtctttttttgatatcatctgtagaagacc

SEQ ID NO: 2716 - DNA, 523 bp, Homo sapiens
  misc_feature (77)..(77): n includes a, c, g, or t, or contains no nucleotide
  misc_feature (84)..(85): n includes a, c, g, or t, or contains no nucleotide
  misc_feature (93)..(107): n includes a, c, g, or t, or contains no nucleotide
  misc_feature (212)..(212): n includes a, c, g, or t, or contains no nucleotide
  misc_feature (344)..(359): n includes a, c, g, or t, or contains no nucleotide
  misc_feature (433)..(491): n includes a, c, g, or t, or contains no nucleotide
cccaggtctgtctcttgccttttcttggggcatataagctactgagtggaacatggagctgatcaagaggccgtaanggtcatnnctgtttcnnnnnnnnnnnnnnnggggtgcttcttgccagtattctaagacatttgagtaattgctgtttgcacttactgcatggtcagaccacgtcactacatttctatgcaaggggacagcaaggncagcgtggtggtcatggctcttagctaacctattcaaagaccttttcctgttgattaatctattttcatatttataaaggagtcttaatgttctgccccataagactttcaaccttgtggttgggagtgggnnnnnnnnnnnnnnnnctagggcctgcttctatgtatttatcaacatgtgatacattcaattggttaaatggtttatacagggactgatnnnnnnnnnnnnnnnnnnnnnnnnnnnnnnnnnnnnnnnnnnnnnnnnnnnnnnnnnnnataagaaataaccaaagatgaagctggtcaaa

SEQ ID NO: 2717 - DNA, 141 bp, Homo sapiens
gataattcagtccttgcctttgaagggtatgtcacaaggagctgacagtgcttctacacatttcatctaatttaatattcctggcatacctttaaggtaaattggtcaggaactattaattccatgtgatacattaggaag

SEQ ID NO: 2718 - DNA, 392 bp, Homo sapiens
gaagcaacctccctggggtcccagtcctatgaggatatgagaggaatcctgtatgcagccccccagctccactccattcggggccagcctggacccaatcatgaggaagatgcagactcttatgagaacatggataatcccgatgggccagacccagcctggggaggagggggccgcatgggcacctggagcaccaggtgatcctcaggtggccagcctggatctcctcaagtccccaagattcacacctgactctgaaatctgaagacctcgagcagatgatgccaacctctggagcaatgttgcttaggatgtgtgcatgtgtgtaagtgtgtgtgtgtgtgtgtgtgtgtgtgtgtgtgtatacatgccagtgacacttccagtcccct

SEQ ID NO: 2719 - DNA, 601 bp, Homo sapiens
tcggtgctcttccacacggtgcgctttggcgcgctctcttgctggctgggcgagatgagcaccgagcacaggggacccgtgcaggtgacccaggtagaggaagatatggtgatggtgttgatggatggctctgtgaagctggtgaccccggaggggtccccagtccggggacttcgcacacctgagatccccatgaccgaagcggtggaggccgtggctatggttggaggtcagcttcaggccttctggaagcatggagtgcaggtgtgggctctaggctcggatcagctgctacaggagctgagagaccctaccctcactttccgtctgcttggctcccccaggctggagtgcagtggcacgatctcgcctcactgcaacctcctcctcccaggttcaagcaattctcctgcctcagcctcccgagtagctgggattacaggcctgtagtggtggagacacgcccagtggatgatcctactgctcccagcaacctctacatccaggaatgagtccctaggggggtgtcaggaactagtccttgcaccccctcccccatagacacactagtggtcatggcatgtcctcatctcccaataaa

SEQ ID NO: 2720 - DNA, 150 bp, Homo sapiens
gttgattaagccaaccaagtgtagatgtagcattgttccacacatttaaaacatttgaaggacctaaattcgtagcaaattctgtggcagttttaaaaagttaagctgctatagtaagttactgggcattctcaatacttgaatatggaa

SEQ ID NO: 2721 - DNA, 391 bp, Homo sapiens
atactcaagcacatcttgacccagaggagctactacccactctacccgccccaagaagacatggccattgactatgagtcgttctatgtttacgcacagctgcctgtcaccccagatgtcctcatcatcccgtcagagctgaggtacttcgtgaaggatgtcctcggctgtgtctgtgtgaaccctgggcgccttaccaaagggcaggtgggaggcaccttcgcccgactctaccttaggaggccggcagcggacggggcagagaggcagagcccatgcattgctgtgcaggtcgtcaggatctgaggcttctgtcctctgctgttctctgctgtgtgggcccttaaagtcttagccaagagccaagacatagccctgtgacaaggtgaac

SEQ ID NO: 2722 - DNA, 547 bp, Homo sapiens
  misc_feature (138)..(152): n includes a, c, g, or t, or contains no nucleotide
  misc_feature (322)..(322): n includes a, c, g, or t, or contains no nucleotide
ttgccgcccagaagagccgacagaggcagacacagaaggccgacaccctgcacctggagagcgaagacctggagaaacagaacgcggctctacgcaaggagatcaagcagctcacagaggaactgaagtacttcacgnnnnnnnnnnnnnnncacgagcccctgtgctcggtgctggccgccagcacgccctcgccccccgaggtggtgtacagcgcccacgcattccaccaacctcatgtcagctccccgcgcttccagccctgagcttccgatgcggggagagcagagcctcgggaggggcacacagactgtggcagagntgcgcccatcccgcagaggcccctgtccacctggagacccggagacagaggcctggacaaggagtgaacacgggaactgtcacgactggaagggcgtgaggcctcccagcagtgccgcagcgtttcgaggggcgtgtgctggaccccaccactgtgggttgcaggcccaatgcagaagagtattaagaaagatgctcaagtcccatggcacagagcaaggcgggc

SEQ ID NO: 2723 - DNA, 522 bp, Homo sapiens
  misc_feature (85)..(85): n includes a, c, g, or t, or contains no nucleotide
  misc_feature (98)..(99): n includes a, c, g, or t, or contains no nucleotide
  misc_feature (114)..(114): n includes a, c, g, or t, or contains no nucleotide
  misc_feature (117)..(117): n includes a, c, g, or t, or contains no nucleotide
  misc_feature (120)..(120): n includes a, c, g, or t, or contains no nucleotide
  misc_feature (130)..(130): n includes a, c, g, or t, or contains no nucleotide
  misc_feature (137)..(137): n includes a, c, g, or t, or contains no nucleotide
  misc_feature (141)..(141): n includes a, c, g, or t, or contains no nucleotide
  misc_feature (145)..(145): n includes a, c, g, or t, or contains no nucleotide
  misc_feature (148)..(149): n includes a, c, g, or t, or contains no nucleotide
  misc_feature (153)..(153): n includes a, c, g, or t, or contains no nucleotide
  misc_feature (160)..(160): n includes a, c, g, or t, or contains no nucleotide
  misc_feature (163)..(163): n includes a, c, g, or t, or contains no nucleotide
  misc_feature (168)..(169): n includes a, c, g, or t, or contains no nucleotide
  misc_feature (174)..(174): n includes a, c, g, or t, or contains no nucleotide
  misc_feature (178)..(179): n includes a, c, g, or t, or contains no nucleotide
  misc_feature (187)..(187): n includes a, c, g, or t, or contains no nucleotide
  misc_feature (195)..(195): n includes a, c, g, or t, or contains no nucleotide
  misc_feature (202)..(202): n includes a, c, g, or t, or contains no nucleotide
  misc_feature (218)..(218): n includes a, c, g, or t, or contains no nucleotide
  misc_feature (229)..(229): n includes a, c, g, or t, or contains no nucleotide
  misc_feature (236)..(236): n includes a, c, g, or t, or contains no nucleotide
  misc_feature (239)..(240): n includes a, c, g, or t, or contains no nucleotide
  misc_feature (246)..(246): n includes a, c, g, or t, or contains no nucleotide
  misc_feature (249)..(249): n includes a, c, g, or t, or contains no nucleotide
  misc_feature (252)..(252): n includes a, c, g, or t, or contains no nucleotide
  misc_feature (261)..(261): n includes a, c, g, or t, or contains no nucleotide
  misc_feature (282)..(282): n includes a, c, g, or t, or contains no nucleotide
gagttgtcatttttactgccaattttttggatgaagatgtttttataaacctttcaaaatggtctgcaaacagagcaggaattgncacaattaactcnnaataatgctgtgtgnttnctncaagaagctncccttangtgnaggnccnngatncttaagnatnggccnngattnctgnncccgttgnaaggcatncctgggnaaagaaaacaagcatncccagcgggcnatctcanccnnacgacnttnctncctggagtncctcacacggtcactgacaanctacagtcagttttaggaactagagtgccgtatcatcagacttaccctgtcctgccccaccttccctgctaacatcgaggtgtgtgcagttaccttctgagcttggaacaagcagactggaattttcctctgctacctcttgtgtataaaatcttgtttataaaatttcaaaaggaagtagatacactagggaagaaccttaattctaaatttggttcatgtgtggcaaagttcttagct

SEQ ID NO: 2724 - DNA, 409 bp, Homo sapiens
  misc_feature (35)..(65): n includes a, c, g, or t, or contains no nucleotide
  misc_feature (121)..(121): n includes a, c, g, or t, or contains no nucleotide
  misc_feature (185)..(217): n includes a, c, g, or t, or contains no nucleotide
gctttccacctgttctatcctggtcacccccttcnnnnnnnnnnnnnnnnnnnnnnnnnnnnnnncagctcttggaaagacaattgcacggaatattatttctgatttctcatgagtcctnggattccttggagatctgtagtcgtcatctctgcatcttctatgatgaactttttgaaagttannnnnnnnnnnnnnnnnnnnnnnnnnnnnnnnnaaagatctcattctgttttctccgtcttggatgttgttgcctgccgcatcattgaatcatcagcagtagccaagctgagaagaccacgtttggttgcatgttccctgtagtggccgtctggtgctttcttttgtgcaacaagtatttcttgagtgcctattaggtgctgggaattcgacagtgcacaaaaac

SEQ ID NO: 2725 - DNA, 613 bp, Homo sapiens
  misc_feature (40)..(57): n includes a, c, g, or t, or contains no nucleotide
tcatcgtgggcaagatgcgcgccgtggccctgcgcgctgnnnnnnnnnnnnnnnnnngctcggagaagaaaatcaccaggctggtgctgatggtcgtggtcgtctttgtgctctgctggatgcctttctacgtggtgcagctgctgaacctcgtcgtgaccagccttgatgccaccgtcaaccacgtgtcccttatcctcagctatgccaacagctgcgccaaccctattctctatggcttcctctccgacaacttccgccgatccttccagcgggttctctgcctgcgctgctgcctcctggaaggtgctggaggtgctgaggaggagcccctggactactatgccactgctctcaagagcaaaggtggggcagggtgcatgtgccccccactcccctgccagcaggaagccctgcaaccagaacccggccgcaagcgcatccccctcaccaggaccaccaccttctgaggagcccttcccctacccaccctgcgtggccacctcccaaggggtgggcaccattcctacagccccgaagactgcatctcctgaatgctcacctaagctccaccacctgttccttccagcagcccatgtacctgccggagagt

SEQ ID NO: 2726 - DNA, 240 bp, Homo sapiens
  misc_feature (57)..(71): n includes a, c, g, or t, or contains no nucleotide
agcctcaggtcttgggggcactatagccactaaacgaggtgtgaaaggctcaagagnnnnnnnnnnnnnnnattatccccagaaagtgaaggaaaagagacctttagggatgttgctggtcaagtcttgatttgaccggagtcaaatcaatcttcaagcaatcttggaatcctcaactgcagtaagcatttcaaaatgcaaacaaactgcttaacaactgacaagacaccagcccatatg

SEQ ID NO: 2727 - DNA, 437 bp, Homo sapiens
  misc_feature (30)..(30): n includes a, c, g, or t, or contains no nucleotide
  misc_feature (46)..(46): n includes a, c, g, or t, or contains no nucleotide
  misc_feature (49)..(49): n includes a, c, g, or t, or contains no nucleotide
ggactgacaagactggggtcaagtcagagngctctacctgagaagnacnggcaaggctgaggtggctaagggggaccatggggaggtggcactagggatcaaagaagatggttagaaccagcagaagccagagggtgggaggggccatgctgtgtgagaccaggggaccagagggatgggagagtcaagggaaggacaatcccaggaagtcctaagaagtggggcagatggcagggctgaggatgggctctgcatcccccaaagccatcccttccctacttccccaaatgaagggacggctgtgggaccaggtctgtggaaagtggtgcatggtcagaatgggtgcagtttgaggggcctgtgtggaggcctcagggagatgttggactgtgcctggatccttactcctgcattgttctttgccagagacctattta

SEQ ID NO: 2728 - DNA, 585 bp, Homo sapiens
  misc_feature (38)..(40): n includes a, c, g, or t, or contains no nucleotide
cagcggctacaggaagatgagatgcgccgggctgctgnnnaggagaggcggagggaaaaggccgaggagttagcagccagacaaagagttagagaaaagatcgagagggacaaagcagagagagccaagaagtatggtggcagtgtgggctctcagccacccccagtggcaccagagccaggtcctgttccctcttctcccagccaggagcctcccaccaagcgggagtatgaccagtgtcgcatacaggtcaggctgccagatgggacctcactgacccagacgttccgggcccgggaacagctggcagctgtgaggctctatgtggagctccaccgtggggaggaactaggtgggggccaggaccctgtgcaattgctcagtggcttccccagacgggccttctcagaagctgacatggagcggcctctgcaggagctgggactcgtgccttctgctgttctcattgtggccaagaaatgtcccagctgagggcctttgtcccattgtccctctgtgaccccttcatctttgataaagcactgacatctccttcctaataaatagaccctgagttctgtaaaa

SEQ ID NO: 2729 - DNA, 504 bp, Homo sapiens
  misc_feature (296)..(296): n includes a, c, g, or t, or contains no nucleotide
  misc_feature (349)..(413): n includes a, c, g, or t, or contains no nucleotide
  misc_feature (417)..(418): n includes a, c, g, or t, or contains no nucleotide
  misc_feature (421)..(421): n includes a, c, g, or t, or contains no nucleotide
  misc_feature (424)..(424): n includes a, c, g, or t, or contains no nucleotide
  misc_feature (441)..(441): n includes a, c, g, or t, or contains no nucleotide
  misc_feature (461)..(461): n includes a, c, g, or t, or contains no nucleotide
  misc_feature (466)..(466): n includes a, c, g, or t, or contains no nucleotide
caaagctgttattacggtgacagagaaaagatgtgactatgtcatcaaggaggggaaatttgagctgagttccacaatataaataggagttcagaagtctagaaaaattgggagaggagaagggaaacattccagccaaataaacattagatacagagacacggtcttctgaaagttccaggtactgtgggtaggtgaggaacaggtgggggttggtgctgtccgcggccctgaattgacactggacacagagaccgtgagttttctccaaaccctgatgctgaagacccctcagncccctaccacatccaaccttatagtttcttactgcttttctttctcagcttcnnnnnnnnnnnnnnnnnnnnnnnnnnnnnnnnnnnnnnnnnnnnnnnnnnnnnnnnnnnnnnnnngggnncanggntgctgtccagattcttnggtcctatggagtgttcccntactntaaactctccttattttcctagggatgtggcttcccca

SEQ ID NO: 2730 - DNA, 157 bp, Homo sapiens
gagcagtttgccctgggttccctccttccacctgcgttcctcctctagctcccatggcagccctttggtgcagaatgggctgcacttctagaccaaaactgcaaaggaacttcatctaactctgtcctccctccccacagcttacagaccattgtgg

SEQ ID NO: 2731 - DNA, 423 bp, Homo sapiens
  misc_feature (73)..(87): n includes a, c, g, or t, or contains no nucleotide
gccacttttgaagtcttccctcagatttccattgtgtggcctggtgggtcagggggagtctttgcaccaaagnnnnnnnnnnnnnnnccccttgcccatcagccatttgccatcaccccaaacaactcagcttcggggccggtgaggggaggggcctcccccagcacagatgaggagcagctggggtaggctgtctgtgccatggccccccactcccccttcccttggagggagaggtggcaggaatacttcacctttcctctccctcaggggcaggtggtggaggggcgcccagggtcgtctttgtgtatgggggaaggcgctgggtgcctgcagcgcctcccttgtctcagatggtgtgtccagcactcgattgttgtaaactgttgttttgtatgagcgaaattgtctttactaaacaga

SEQ ID NO: 2732 - DNA, 209 bp, Homo sapiens
  misc_feature (134)..(149): n includes a, c, g, or t, or contains no nucleotide
ggcagctcttcctggcagcgctagcccagggtgtgctggagcaccacacctacggcgccctgctcttcccactgctgtccctgggcctctacccctgctggctgcttttctggaatgtgctcttctggaagtgnnnnnnnnnnnnnnnngctgggacagagactccccaaggaccccattctgcctccttctggggaaataaatgagtg

SEQ ID NO: 2733 - DNA, 302 bp, Homo sapiens
  misc_feature (80)..(80): n includes a, c, g, or t, or contains no nucleotide
  misc_feature (82)..(82): n includes a, c, g, or t, or contains no nucleotide
  misc_feature (85)..(85): n includes a, c, g, or t, or contains no nucleotide
  misc_feature (255)..(258): n includes a, c, g, or t, or contains no nucleotide
gtaatgtgaatcagtgcctgaggacctttgctgtgtccttggtacagaaccatccacttgacctaactacctcccctggncncgntctcgctcttctcttctttgttaagccaacaactatcaccctctcctactcttcttctccctgccccctggagggcactgtgtttggttgtgcaaatgtatttactatgcgtgtttccagcagttggcattaaagtgcctttttctaataaaatcagtttattatgacannnnaaaaaaaaaaaaaaaaaaaaaagcagccgctgaattctagacct

SEQ ID NO: 2734 - DNA, 455 bp, Homo sapiens
  misc_feature (161)..(175): n includes a, c, g, or t, or contains no nucleotide
gggtctgcgcttggtctttctgtgcttggatttgcatatttattgcattgctggtagagacccccaggcctgtccaccctgccaagactcctcaggcagcgtgtgggtcccgcactctgcccccatttccccgatgtcccctgcgggcgcgggcagccacnnnnnnnnnnnnnnngcggccccctctcggccaggcattggctcagcccgctgagtggggggtcgtgggccagtccccgaggagctgggcccctgcacaggcacacagggcccggccacacccagcggccccccgcacagccacccgtggggtgctgcccttatgcccggcgccgggcaccaactccatgtttggtgtttgtctgtgtttgtttttcaagaaatgattcaaattgctgcttggattttgaaatttactgtaactgtcagtgtacacgtctggaccccgtttcatt

SEQ ID NO: 2735 - DNA, 356 bp, Homo sapiens
  misc_feature (208)..(250): n includes a, c, g, or t, or contains no nucleotide
cgctgctattctcttggtagccctccaggtccgggcaggcccactccaggcaagaggtgatgaggctccaggccaggagcagcgtgggccagaagaccaggacatatctatttcctttgcatgggataaaagctctgctcttcaggtttcaggctcaacaaggggcatggtctgctcttgcagattagtattctgccggcgaacagannnnnnnnnnnnnnnnnnnnnnnnnnnnnnnnnnnnnnnnnnntactgctgcacgcgtgtcgattaacattctgctgtccaagagaatgtcatgctgggaacgccatcatcggtggtgttagcttcacatgcttctgcagctgagcttg

SEQ ID NO: 2736 - DNA, 554 bp, Homo sapiens
  misc_feature (86)..(86): n includes a, c, g, or t, or contains no nucleotide
  misc_feature (287)..(304): n includes a, c, g, or t, or contains no nucleotide
  misc_feature (316)..(346): n includes a, c, g, or t, or contains no nucleotide
  misc_feature (409)..(427): n includes a, c, g, or t, or contains no nucleotide
ctgggcacaggcaagagccctcggcagtctctcttcttctacccgtcctacccagacgaggtccgtggggtttttgctgtgcggantggaaagtacaaggctcacttcttcacccagggctctgcccacagtgataccactgcagaccctgcctgccacgcctccagctctctgactgctcatgagcccccgctgctctatgacctgtccaaggaccctggtgagaactacaacctgctggggggtgtggccggggccaccccagaggtgctgcaagccctgaaacnnnnnnnnnnnnnnnnnncccagttagacnnnnnnnnnnnnnnnnnnnnnnnnnnnnnnncccggggcgaggaccccgccctgcagatctgctgtcatcctggctgcaccccccgcccagctnnnnnnnnnnnnnnnnnnncccatgcctgagggcccctcggctggcctgggcatgtgatggctcctcactgggagcctgtgggggaggctcaggtgtctggagggggtttgtgcctgataacgtaataacaccagtggagacttgc

SEQ ID NO: 2737 - DNA, 569 bp, Homo sapiens
gagtggcctgaagagtcctctgaatgaaccttctggcctcccacagactcaaatgctcagaccagctcttccgaaaaccaggccttatctccaagaccagagatagtggggagacttcttggcttggtgaggaaaagcggacatcagctggtcaaacaaactctctgaacccctccctccatcgttttcttcactgtcctccaagccagcgggaatggcagctgccacgccgccctaaaagcacactcatcccctcacttgccgcgtcgccctcccaggctctcaacaggggagagtgtggtgtttcctgcaggccaggccagctgcctccgcgtgatcaaagccacactctgggctccagagtggggatgacatgcactcagctcttggctccactgggatgggaggagaggacaagggaaatgtcaggggcggggagggtgacagtggccgcccaaggccacgagcttgttctttgttctttgtcacagggactgaaaacctctcctcatgttctgctttcgattcgttaagagagcaacattttacccacacacagataaagtttt

SEQ ID NO: 2738 - DNA, 73 bp, Homo sapiens
cctgggtctgggaagtagctctgatgagaatggggtcccagatggctcaggctgtgacctccctgggcaccac

SEQ ID NO: 2739 - DNA, 466 bp, Homo sapiens
  misc_feature (27)..(41): n includes a, c, g, or t, or contains no nucleotide
  misc_feature (224)..(262): n includes a, c, g, or t, or contains no nucleotide
ctggaaaccacaaggcatttgatgctnnnnnnnnnnnnnnngattgggctgcttcttcagttcctaataccagaccaagcctcctgatgcctttctgcactgcaactgtgtgattgaaaaatgagatgttcatccaagcagtcaagccacagaaacccagcatgtccctgtcacaatctcatgggcaccttgatcatgtcttaaccttcccttaaccttggggnnnnnnnnnnnnnnnnnnnnnnnnnnnnnnnnnnnnnnnaaggtgacagctcatctccagcacagcacaggcgtgtgcacacagaggtgttccttgcagccccctccctctcaggtgtcctgagatgctgctcctgggagccccctcagaaaactgcctcacctgagacaagtgcctgctggacagaggtgtgattccaggcctggtgtcacatgacaccagcatgcattgcaggattattag

SEQ ID NO: 2740 - DNA, 237 bp, Homo sapiens
  misc_feature (144)..(145): n includes a, c, g, or t, or contains no nucleotide
  misc_feature (148)..(148): n includes a, c, g, or t, or contains no nucleotide
  misc_feature (155)..(155): n includes a, c, g, or t, or contains no nucleotide
acagagtgttcgattctgccctatttatgtttctactcgggaacaaacgttggttgtgtgtgtgtgtgttttcttgtgttggttttttaaagaaatgggaagaagaaaaaaaaattctccgcccctttcctcgatctcgctccnnccnttcggtnctttcgaccggtcccccctcccttttttgttctgttttgttttgttttgctacgagtccacattcctgtttgtaatccttgg

SEQ ID NO: 2741 - DNA, 535 bp, Homo sapiens
  misc_feature (134)..(148): n includes a, c, g, or t, or contains no nucleotide
  misc_feature (244)..(244): n includes a, c, g, or t, or contains no nucleotide
  misc_feature (251)..(280): n includes a, c, g, or t, or contains no nucleotide
  misc_feature (372)..(388): n includes a, c, g, or t, or contains no nucleotide
  misc_feature (402)..(402): n includes a, c, g, or t, or contains no nucleotide
tcggttggaggcatttcccataagactgagccctctcatgggggttttgagtttgtagtgctgagcctgcatctgtgcctcccagccccctgcactgagggagcaagttgcccacatgcccgccagccagggcnnnnnnnnnnnnnnntgctcagtgccaggctggtagctgggcctgtttgggtccctggaggctgtggctgctgtcatggcacctcactccctcagctcttgccagcttctntgacacnnnnnnnnnnnnnnnnnnnnnnnnnnnnnncccttgggtgccccacacagggctctccatgatgggaaccagtggttagtggcttcaaaggcccagctgacaccctccacagcctaaggggnnnnnnnnnnnnnnnnnccctgtattccccntcccagggcagcccctgcccagcacaaaaccccaggaccctggctctgcacgcctggggcagggacttttgagtttaggatctgtattttctaagtccccagttctcctggctctcctttctgaaataaagga

SEQ ID NO: 2742 - DNA, 228 bp, Homo sapiens
caagaaggcctccttccagaagctgaatggcatctccaaaggggcagactcagaattgtccactgtaccttctgtcacaaagacccaagcttcctccagcttccaggatagcagtcagccagctggaaaagccgaagggatcagggagccaaaggtgactgggaagctaaagcaacgatcacctaaattacagtcctccaagaaagttgctttcctcaggcagaatgc

SEQ ID NO: 2743 - DNA, 359 bp, Homo sapiens
  misc_feature (60)..(102): n includes a, c, g, or t, or contains no nucleotide
gttctagctttgaacaaaagtgctaaacatttccttgaatatattcttcctctttttgtnnnnnnnnnnnnnnnnnnnnnnnnnnnnnnnnnnnnnnnnnnnttgtttcttttccatctattcaagtgtgtttctaattctaaaatgctgatcttctctggagtctatggtaggcaattatggtcactggaatagtttgtcttgttttaaaatattattggtgcatgtacaacagcatccaacatatctgtcttgttcctagatatatagctctgattttaggccttttgtgcataccattacaatatggtggggtaagacattctacagtagcctgtgctgaactgatctcttaaata

SEQ ID NO: 2744 - DNA, 224 bp, Homo sapiens
  misc_feature (134)..(134): n includes a, c, g, or t, or contains no nucleotide
ggggacctcccttgggagatcaatcccctgtcctcctgctctttgctctgtgagaacgatccacctatgacctcaggtcctcagactgaccagcccaagaaacatctcacgaatttcaaatctgatctgctcancttagcgactgaagattaatgctgcctgatcacctcagaagccccctggaccatcacagatgcccaacttcaggtgactctcaagtggag

SEQ ID NO: 2745 - DNA, 517 bp, Homo sapiens
ctagaccaaaaagtcgggttgagtgactggtggcagggccacagatagagacagcggggagggtggctgaccctggcggccctggactgagcgtctggaggagtcgtggaggctctttcccttctttctcctctgagagctcgttcttcaggctcttccagcttgtcatgtcgagtgcctggccactgctcagggttggaggctcagtccctttgccctgtctgttccagctctggagctaactcagggatccctgatcagggttacataggtttggtaaaatgagtgctggaaattaactttctcccagtagtcttaggtcatgctcagtgaacttaaactttatccagatatggttttccttcagcctttctattccctttctagccagtgaaagacccgctgccctttgacctcagcccctccaagcccccaagtttaaaacgccaccccctgccaccagaaaaaacagaaaaaaaaaaaaaaaaaaaacttaaaacacccatctgggtctggg

SEQ ID NO: 2746 - DNA, 195 bp, Homo sapiens
  misc_feature (103)..(104): n includes a, c, g, or t, or contains no nucleotide
  misc_feature (109)..(109): n includes a, c, g, or t, or contains no nucleotide
agagcccaggcgtccgcggcgacttgccgtctctccattccactgcctgttgcagagtttttctgtaactaagggggttgaggttattgtagacgttagattnngggcnccgccagggattttgcagcgcttcagtgtacgtgttagagaatattggaaaagcgtctgtgagccccgtgctgtattttgtaataa

SEQ ID NO: 2747 - DNA, 334 bp, Homo sapiens
  misc_feature (184)..(184): n includes a, c, g, or t, or contains no nucleotide
tagaaaacgcgaccttggccgcacctaaagcagccagccgtgagtgcagaccccttggccagcgtggcgcagtggccctgagcagtagtggcatgtgtgtagatcaagtcggatctagtccagctcggttcattagcgatccatgtaatctgacgtcatcttgtctcgaagtctctttttttgncccaggccttgaagaatacactgtgacttaagaagccttaccacgcagtaactaaagctttaggatgactgtattcgaggagtgccgtgtgttgcatgcagctacccgtaggaagacttcgcgcatatcactaataaacctgaagtcgtg

SEQ ID NO: 2748 - DNA, 439 bp, Homo sapiens
  misc_feature (58)..(69): n includes a, c, g, or t, or contains no nucleotide
  misc_feature (71)..(71): n includes a, c, g, or t, or contains no nucleotide
  misc_feature (73)..(74): n includes a, c, g, or t, or contains no nucleotide
  misc_feature (76)..(77): n includes a, c, g, or t, or contains no nucleotide
  misc_feature (79)..(80): n includes a, c, g, or t, or contains no nucleotide
  misc_feature (82)..(88): n includes a, c, g, or t, or contains no nucleotide
  misc_feature (90)..(90): n includes a, c, g, or t, or contains no nucleotide
  misc_feature (92)..(92): n includes a, c, g, or t, or contains no nucleotide
  misc_feature (105)..(112): n includes a, c, g, or t, or contains no nucleotide
  misc_feature (121)..(121): n includes a, c, g, or t, or contains no nucleotide
  misc_feature (125)..(125): n includes a, c, g, or t, or contains no nucleotide
  misc_feature (139)..(139): n includes a, c, g, or t, or contains no nucleotide
  misc_feature (142)..(142): n includes a, c, g, or t, or contains no nucleotide
  misc_feature (159)..(163): n includes a, c, g, or t, or contains no nucleotide
  misc_feature (166)..(166): n includes a, c, g, or t, or contains no nucleotide
  misc_feature (168)..(168): n includes a, c, g, or t, or contains no nucleotide
  misc_feature (170)..(170): n includes a, c, g, or t, or contains no nucleotide
  misc_feature (172)..(173): n includes a, c, g, or t, or contains no nucleotide
  misc_feature (176)..(200): n includes a, c, g, or t, or contains no nucleotide
  misc_feature (238)..(253): n includes a, c, g, or t, or contains no nucleotide
tgcagctgggccaggagactgacaagcttaaaaccagaaatcgagaatccatttctcnnnnnnnnnnnntngnngnngnngnnnnnnncntncctgaccctggannnnnnnnagtcctgtntccnttatgtcctgcttnganatgcctatcgggaggtnnnnnggncntncnnccnnnnnnnnnnnnnnnnnnnnnnnnnctgaagagccctttggaccttcctaaacccttgccatnnnnnnnnnnnnnnnnactttcgcagggggtgggaatggggtggggtcactaaggagagagggtcaggagccagagttgatgagcagatctgtggaagaacaatccagggctgagaaatcgtagagcagtgaggcaggctgggagcatggaggacagcttatggaaaaagttagggcgtggggccacatgtgtgaattttac

SEQ ID NO: 2749 - DNA, 341 bp, Homo sapiens
  misc_feature (44)..(44): n includes a, c, g, or t, or contains no nucleotide
  misc_feature (143)..(159): n includes a, c, g, or t, or contains no nucleotide
  misc_feature (162)..(162): n includes a, c, g, or t, or contains no nucleotide
  misc_feature (167)..(167): n includes a, c, g, or t, or contains no nucleotide
ctttatcgaacgtggtctgattttgaggtttagcaatagctagnctatatatggtaggtgccgctacagtttttatttagcatggggattgcagagtgaccagcacactggactccgaggtggttcagacaagacagaggggnnnnnnnnnnnnnnnnnctncccgnccaggagcttcttcgttcctgcgcatatagactgtacgttatgaagaatacccaggaagactttgtgactgtcacttgctgctttttctgcgcttcagtaacaagtgttggcaaacgagactttctcctggcccctgcctgctggagatcagcatgcctgtcctttcagtctga

SEQ ID NO: 2750 - DNA, 561 bp, Homo sapiens
  misc_feature (28)..(49): n includes a, c, g, or t, or contains no nucleotide
  misc_feature (158)..(158): n includes a, c, g, or t, or contains no nucleotide
  misc_feature (168)..(168): n includes a, c, g, or t, or contains no nucleotide
  misc_feature (183)..(183): n includes a, c, g, or t, or contains no nucleotide
  misc_feature (215)..(215): n includes a, c, g, or t, or contains no nucleotide
  misc_feature (224)..(224): n includes a, c, g, or t, or contains no nucleotide
  misc_feature (262)..(262): n includes a, c, g, or t, or contains no nucleotide
  misc_feature (290)..(290): n includes a, c, g, or t, or contains no nucleotide
  misc_feature (342)..(342): n includes a, c, g, or t, or contains no nucleotide
  misc_feature (352)..(352): n includes a, c, g, or t, or contains no nucleotide
  misc_feature (370)..(370): n includes a, c, g, or t, or contains no nucleotide
  misc_feature (421)..(421): n includes a, c, g, or t, or contains no nucleotide
tcctgggctgctggtgctacctgcggcnnnnnnnnnnnnnnnnnnnnnnggacgaggagagcatcgtgggggatggggagaccaaggaacccttcctgctggtgcagtattcggccaagggaccgtgcgtggagagaaaggccaagctgatgactccnaacggcccgnaagtccacggctganccaggatgcaaggctcctggtcctgtttgcanccggccaanaggcgctgggaggggcaaaaccatacggatgcgctgcntgtctgagaggaagggctgacacttgcntggcatggcctctgcgggcttcgtcatcgcatgcactgatgcccggggaccntggctgtccntgggcttcccctcggccnccaggtgaggctgcccattgcaggcactgggcaggcctgaccttgctgggnctcatggccctgtagcgcttttgttacttgaatgtctagctgagcctgtttttgatggagctactactgtaatgcgtgaactaacaaacctgtgaactgtaaataggcccctggaagcacgtgcttaagcccttttgctg

SEQ ID NO: 2751 - DNA, 547 bp, Homo sapiens
actgacactggactcgtaccaggccccgggccccggggatggaggcaccgccagccttgtgggcagcaacatgttccccaatcattaccgcgaggcggcctttgggggcggcctcctatccccggggcctgaagccacgtagccccgcgatgccagaggaggggcactgggtggggagggaggtggaggagccgtgcaatcccaaccaggatgtctagcacccccatccccttggcccttcctcatgcttctgaagtggacatattcagccttggcgagaagctccgttgcacgggtttccccttgagcccattttacagatgaggaaactgagtccggagaggaaaagggacatggctcccgtgcactagcttgttacagctgcctctgtccccacatgtgggggcaccttctccagtaggattcggaaaagattgtacatatgggaggagggggcagattcctggccctccctccccagacttgacttgaaggtggggggtaggttggttgttcagagtcttcccaataaagatgagtttttgag

SEQ ID NO: 2752 - DNA, 415 bp, Homo sapiens
  misc_feature (37)..(51): n includes a, c, g, or t, or contains no nucleotide
  misc_feature (170)..(190): n includes a, c, g, or t, or contains no nucleotide
  misc_feature (195)..(215): n includes a, c, g, or t, or contains no nucleotide
  misc_feature (348)..(363): n includes a, c, g, or t, or contains no nucleotide
  misc_feature (365)..(365): n includes a, c, g, or t, or contains no nucleotide
  misc_feature (367)..(373): n includes a, c, g, or t, or contains no nucleotide
ttctgagtgttcagtcaagttatctgtactgaccagnnnnnnnnnnnnnnnttttgctttctatttattacttgaacattactttaaagtgacttataattggagactgacaaatttgtgttttcttcaaacagatgaaaactttattctcaaacatgacagagcgttcnnnnnnnnnnnnnnnnnnnnngggannnnnnnnnnnnnnnnnnnnnttttcataaagagtgttacaccgtgcgctccaaagtaccacaaagcctgctccacacctggatggggtgcatgtagtctttggactggttatttctggttttgaagtaatcgaacaaattgaaaatctgaagnnnnnnnnnnnnnnnnancnnnnnnngatgtgcgagttattgactgtggagtacttgccacaaaatca

SEQ ID NO: 2753 - DNA, 375 bp, Homo sapiens
  misc_feature (140)..(140): n includes a, c, g, or t, or contains no nucleotide
  misc_feature (350)..(350): n includes a, c, g, or t, or contains no nucleotide
accgtcctaggtcagcccaaggctgccccctcggtcactctgttcccgccctcctctgaggagcttcaagccaacaaggccacactggtgtgtctcataagtgacttctacccgggagccgtgacagtggcctggaaggnagatagcagccccgtcaaggcgggagtggagaccaccacaccctccaaacaaagcaacaacaagtacgcggccagcagctatctgagcctgacgcctgagcagtggaagtcccacagaagctacagctgccaggtcacgcatgaagggagcaccgtggagaagacagtggcccctacagaatgttcataggttctcaaccctcacccccnaccacgggagactagagctgcagga

SEQ ID NO: 2754 - DNA, 392 bp, Homo sapiens
  misc_feature (138)..(139): n includes a, c, g, or t, or contains no nucleotide
  misc_feature (145)..(168): n includes a, c, g, or t, or contains no nucleotide
  misc_feature (176)..(204): n includes a, c, g, or t, or contains no nucleotide
  misc_feature (304)..(318): n includes a, c, g, or t, or contains no nucleotide
tgcgaggaccctgtggcagctttgatgtgcgcaagacagctgacgactgagccctgcttctgctggggctgtgtacagagtgcaaatgtttatttaaaataaagttctatttatcccttgtgaaaaaaaaaaaaaaannaaaaannnnnnnnnnnnnnnnnnnnnnnngctggagnnnnnnnnnnnnnnnnnnnnnnnnnnnnnggagctgcggcgggccctgggccgcatggtggagcggagcctgcgcagcgagctggctgcacttccccccagcgtacaggaggagcacgggcagctgctnnnnnnnnnnnnnnngctgctgcgaggaccctgtggcagctttgatgtgcgcaagacagctgacgactgagccctgcttctgctggggc

SEQ ID NO: 2755 - DNA, 368 bp, Homo sapiens
gatctgcctcttgctgccattctttctctcctctgcttctctgtatttttcttctgttatccctgggggtgctcaggttcacttgattgtctgtatttctgtgtggttgtagcaaggactcagcctcatgtagcacgaataggggtgtggttcatggcgtgttgacccagcagagcactccctcccactaacttgttctgcatgtgtagagtctccccattttttttaacgcaaccctttcccctttttcctaccccacagctctgttccatgtaagttgccaacagtttcactgaacagtggggtatgtgatggttttggcatgacatcttcagtatgagggggacagtttgacttcactttgaggg

SEQ ID NO: 2756 - DNA, 395 bp, Homo sapiens
  misc_feature (82)..(82): n includes a, c, g, or t, or contains no nucleotide
  misc_feature (161)..(161): n includes a, c, g, or t, or contains no nucleotide
  misc_feature (164)..(164): n includes a, c, g, or t, or contains no nucleotide
  misc_feature (184)..(209): n includes a, c, g, or t, or contains no nucleotide
  misc_feature (255)..(255): n includes a, c, g, or t, or contains no nucleotide
  misc_feature (281)..(284): n includes a, c, g, or t, or contains no nucleotide
  misc_feature (359)..(359): n includes a, c, g, or t, or contains no nucleotide
cctattcaagttcatgtcacgctgggtaatgaggatttgactgtgaagatgagtgaccgaggaggtggcgttcctttgaggnaaattgacagacttttcaactacatgtattcaactgcaccaagacctcgtgttgagacctcccgcgcagtgcctctggnctnggttttggttatggattgcnnnnnnnnnnnnnnnnnnnnnnnnnnttccaaggagacctgaagctgtattccctagagggttacgggacanatgcagttatctacattaaggctctnnnnacagactcaatagaaagactcccagtgtataacaaagctgcctggaagcattacaacaccaaccacgaggctgangactggtgcgtccccagcagagaacccaaagacatg

SEQ ID NO: 2757 - DNA, 350 bp, Homo sapiens
  misc_feature (115)..(115): n includes a, c, g, or t, or contains no nucleotide
ggcaggaccatcactcccttcgagtccccatggcccgggccatgtccatccctacatcacccacacggatcagcttccacagcatcaagcagacggccgctgtgtgacccctcgntcgcccacctgcacagctcccctgtcctcctccaccttcttcctctgggttctctgtgctgggcaggctctcgtggggcaggagatgggaggggagagaccagctctccagcctggcaggaaagagggggtgcggcagccaagggggactgcaagggacagggatgagtgggggccaccaggctcagcgcaagaggaagcagagggaattcacaggaccccctgagaagagccag

SEQ ID NO: 2758 - DNA, 459 bp, Homo sapiens
  misc_feature (26)..(26): n includes a, c, g, or t, or contains no nucleotide
  misc_feature (243)..(257): n includes a, c, g, or t, or contains no nucleotide
ttaaccctttgctgatcctcaggggnccactcccccaacacccctgtacttgggtgagggatgttggacagagcctgttttcatgtactgcaggtgggggtgtgctgacatgtttgctcttggttgatggagaaggtacagaggccagggagtgaaaatggttgacagaagagggaagagttaggtgtctcatagtcactcatagtggggtggtcaggggtaatggcatctccccactttagnnnnnnnnnnnnnnnttttgacacctctcaagttcagagctctgatgtggaaagacaggaggtgtggggaaggagggggatttcgtgtgtttgcatgagtgtgcgcttcaggccttgggagttggcaagagggagggaaggaaggagagcaaaatcttcggaaggtgtttcttgtacctgagggatcctgccctgaatctccatagtctccactgtg

SEQ ID NO: 2759 - DNA, 527 bp, Homo sapiens
  misc_feature (41)..(65): n includes a, c, g, or t, or contains no nucleotide
  misc_feature (124)..(197): n includes a, c, g, or t, or contains no nucleotide
  misc_feature (199)..(199): n includes a, c, g, or t, or contains no nucleotide
  misc_feature (201)..(203): n includes a, c, g, or t, or contains no nucleotide
  misc_feature (281)..(356): n includes a, c, g, or t, or contains no nucleotide
  misc_feature (374)..(471): n includes a, c, g, or t, or contains no nucleotide
ctgatccgagctggatccagagttgcatacagaccaatttnnnnnnnnnnnnnnnnnnnnnnnnnggctagtaggactggagagggctctacggtatttaatggggcccagaatggtgtgtctnnnnnnnnnnnnnnnnnnnnnnnnnnnnnnnnnnnnnnnnnnnnnnnnnnnnnnnnnnnnnnnnnnnnnnnnnntntnnnggtgcaggtgctgcaacagtaggagtggctggttctggtgctggtattggaacagtctttggcagccttatcattggnnnnnnnnnnnnnnnnnnnnnnnnnnnnnnnnnnnnnnnnnnnnnnnnnnnnnnnnnnnnnnnnnnnnnnnnnnnntgggtctcttttgtttgnnnnnnnnnnnnnnnnnnnnnnnnnnnnnnnnnnnnnnnnnnnnnnnnnnnnnnnnnnnnnnnnnnnnnnnnnnnnnnnnnnnnnnnnnnnnnnnnnngactccgaaaactgtagtattggtgtcatgggaatgtacgttatttccaaagtcat

SEQ ID NO: 2760 - DNA, 341 bp, Homo sapiens
  misc_feature (160)..(160): n includes a, c, g, or t, or contains no nucleotide
  misc_feature (191)..(191): n includes a, c, g, or t, or contains no nucleotide
  misc_feature (195)..(195): n includes a, c, g, or t, or contains no nucleotide
  misc_feature (197)..(197): n includes a, c, g, or t, or contains no nucleotide
  misc_feature (200)..(200): n includes a, c, g, or t, or contains no nucleotide
  misc_feature (202)..(268): n includes a, c, g, or t, or contains no nucleotide
  misc_feature (272)..(272): n includes a, c, g, or t, or contains no nucleotide
  misc_feature (274)..(274): n includes a, c, g, or t, or contains no nucleotide
agagtagcaaggaccccgctgagcagcagggcaagggtgtggcccttaaatctgtcacagccttcttcaagtggctccgtgaagcagaggaggagtctgaccacaactgagggctggtggggccggggacctggagccccatggacacacagatggcccngctagccgcctggactgcaggggggcggcancagncngcngnnnnnnnnnnnnnnnnnnnnnnnnnnnnnnnnnnnnnnnnnnnnnnnnnnnnnnnnnnnnnnnnnnngggntngcctgggcccccctccaggatgccgccaggtgtccctctcctccccctggggcacagagatatatta

SEQ ID NO: 2761 - DNA, 583 bp, Homo sapiens
gaggtcagaaccagagatcgcagacctcccggaccagctcgtgccccaaatgaaatgccatctcgagcccctacagctctacgggaggcctcccggaacgaaagtggaagaggggccagcctcatcccactgccagctgaccctcagttcctcaaacacagtgagtgaggacggacctcaggctgtctcttcgggtcacacccagtgtgaaaagacggcagatacagcaccagggcagacactcgctcccaggggtggctcccccatatcccaggcctctaggccccgtagatgcaagtttcccctgctgccacgcaggcgaggggagcctttgatgctgccacctcccttagagctggggtaccgggtcactgctgaagacctggactgggagaaggaggcggcattccagtgcatcaacagtgcactgcaggttgaggaccaggccatctcggactgcagaccctcacggccttcccacactttgtcctcacttgcaacaggggcttctggtctgcctgccgtttctaaagcacccagtatggatgcacagcaggagacacacaagtcccaagactgcctg

SEQ ID NO: 2762 - DNA, 573 bp, Homo sapiens
tggattatcacagatctacatctgtctccagaaaccagcagatattcctgcgggacatagaacaggtgccacagcagccgacatacgtccaggccctctttgactttgatccccaggaggatggagagctgggcttccgccggggagattttatccatgtcatggataactcagaccccaactggtggaaaggagcttgccacgggcagaccggcatgtttccccgcaattatgtcacccccgtgaaccggaacgtctaagagtcaagaagcaattatttaaagaaagtgaaaaatgtaaaacacatacaaaagaattaaacccacaagctgcctctgacagcagcctgtgagggagtgcagaacacctggccgggtcaccctgtgaccctctcactttggttggaactttagggggtgggagggggcgttggatttaaaaatgccaaaacttacctataaattaagaagagtttttattacaaattttcactgctgctcctctttcccctcctttgtcttttttttcatccttttttctcttctgtccatcagtgcatgacgtttaaggcca

SEQ ID NO: 2763 - DNA, 428 bp, Homo sapiens
tgctgctgcatttatcccaagaaaaacagctttaatctccagaagaaaaccaaaataccatgggatttatgctgtattgacatcttgccctaaacgtacaacatcatagtaatttgtcatgggcaacatgaccagagagaagatttttgtcatgattttaaatacactgacacgctactgttggttaaatttaaacatgttttacctgcagaaattctctcacaaataacctgcaataacttgaaatgcatacccttttgaacacttccttttctcatgtataaattaaaatgtttgctgcattttgcaaaatgtcaattctctaaaaatgtgtccgtatatttctgtacctgcagtgtagtaaaggtttagacgaaaccccataattatagtggcatactgtcacttaggtttcaagcagcaaaata

SEQ ID NO: 2764 - DNA, 558 bp, Homo sapiens
  misc_feature (72)..(72): n includes a, c, g, or t, or contains no nucleotide
  misc_feature (292)..(309): n includes a, c, g, or t, or contains no nucleotide
  misc_feature (362)..(398): n includes a, c, g, or t, or contains no nucleotide
  misc_feature (401)..(401): n includes a, c, g, or t, or contains no nucleotide
cccagccagagaacagtaagaggagctgctctcctatctgcactcacccaggccttcacccagactttaccncggaggcggctgagtgcagctacagctaggtccgcgtccctcactcttttcatcttctgcacgttcttcgtgaaactggaaggatcccgggtctcagctagaacacggtggaagagaactttcctaggaaacggttcatgtgtcacttttcaggatgtggaaacactgagccatacaccctccattgcttggtgctggggttgtgtggcctccactgggnnnnnnnnnnnnnnnnnntggggccaggggagcccaggctgccctgcactcctgcctcccagcccacagcnnnnnnnnnnnnnnnnnnnnnnnnnnnnnnnnnnnnnaancctcccagccactcgggcttgtaactgtctgagccccggatccggtggggtgaaagcagccagctcatcccagtgactcacaggacacagccatccagcggcatctttccttgtcgaatgatactgtaatgaccttccaaagtgaagagtagcacat

SEQ ID NO: 2765 - DNA, 376 bp, Homo sapiens
ttttatgtatctcttgggacaacttttaaaagctatttttaccaagtattttgtaaatgctaattttttaggactctactagttggcatacgaaaatatataaggatggacattttatcgtctcatagtcatgctttttggaaatttacatcatcctcaagtaaaataaatatcagttaaatattggaagctgtgtgtaagattgattcagcattccatgcacttgctttaaaatttagtcctgtgcatactgtggtgtttttactgtgcatatttgaatttttcatgcagtttttctagagcaataatcagtggtgcttttgtacctaggttttatgtgattttaatgaaacatggatagttgtggccacctgct

SEQ ID NO: 2766 - DNA, 192 bp, Homo sapiens
  misc_feature (93)..(93): n includes a, c, g, or t, or contains no nucleotide
gcacacgagaacatgcctctcgcaaaggatctccttcatccctctccagaagaggagaagaggaaacacaagaagaaacgcctggtgcagagnccccaattcctacttcatggatgtgaaatgcccaggatgctataaaatcaccacggtctttagccatgcacaaacggtagttttgtgtgttggctgctc

SEQ ID NO: 2767 - DNA, 497 bp, Homo sapiens
  misc_feature (109)..(125): n includes a, c, g, or t, or contains no nucleotide
  misc_feature (196)..(196): n includes a, c, g, or t, or contains no nucleotide
  misc_feature (216)..(228): n includes a, c, g, or t, or contains no nucleotide
  misc_feature (230)..(244): n includes a, c, g, or t, or contains no nucleotide
  misc_feature (246)..(246): n includes a, c, g, or t, or contains no nucleotide
  misc_feature (248)..(248): n includes a, c, g, or t, or contains no nucleotide
  misc_feature (266)..(266): n includes a, c, g, or t, or contains no nucleotide
  misc_feature (277)..(278): n includes a, c, g, or t, or contains no nucleotide
  misc_feature (302)..(302): n includes a, c, g, or t, or contains no nucleotide
  misc_feature (312)..(312): n includes a, c, g, or t, or contains no nucleotide
tctccttttgatgaaaactgtcactttagcatgtaatccattacagaatcccatgcagtgattccaggatttgaaattgtatgatgtgttacataagaatttatttgcnnnnnnnnnnnnnnnnnaaagagagagacatatcacgctgctgtcatgattttgtgtcaagatgatccaataaagttgtaaaacaggnaaaaaaaaaaaaaaaaaaannnnnnnnnnnnnannnnnnnnnnnnnnncngncgctgcaggactggagcntctgcacctcnnctcacgggcccttgggagggggcntcggtcccangcaccatccaggcctggggctcgggcagtcacaggccagggagtcccccaccccgtggtggcctcggtccccagcatctccacccaaggccgtgcaggggagcaggtgcctgctttccctccccttccccaggacccccggggcaggggcagatccagaattgagaaccgcggaagagcagccac

SEQ ID NO: 2768 - DNA, 597 bp, Homo sapiens
  misc_feature (171)..(171): n includes a, c, g, or t, or contains no nucleotide
  misc_feature (200)..(200): n includes a, c, g, or t, or contains no nucleotide
  misc_feature (219)..(307): n includes a, c, g, or t, or contains no nucleotide
aatgtgtgagtctttggaaaacccattccagcctttcttcaaatgctcttattttcagtatatgaagtgtgtatttgaaatattcatatttctgttatttcttgttttcaagctctgaattattgcagttttctgtcctgcatgctttcaacagtgtgcttttacagtggncagtttagcacagcgaatgtccctgcccnacactccatatggtcctgnnnnnnnnnnnnnnnnnnnnnnnnnnnnnnnnnnnnnnnnnnnnnnnnnnnnnnnnnnnnnnnnnnnnnnnnnnnnnnnnnnnnnnnnnctccctctgaggccaacttaggccaacctacataggactccatctttagcgagacaccagagacacctagtgatgaccacgggtctgcttttctctctgatcctaggggacttgttgacatgggagtgtctgtttccacatggaaggatgtctgtttatctctcatctctgaatagatgtatgacaactctagtgtccatggtttaaaatgttgctttgaggattttccatcctgtataagaagaatggctttcttcagattataatcgttattaaagctgtatgtacac

SEQ ID NO: 2769 - DNA, 484 bp, Homo sapiens
  misc_feature (53)..(53): n includes a, c, g, or t, or contains no nucleotide
  misc_feature (83)..(83): n includes a, c, g, or t, or contains no nucleotide
  misc_feature (112)..(128): n includes a, c, g, or t, or contains no nucleotide
  misc_feature (184)..(185): n includes a, c, g, or t, or contains no nucleotide
  misc_feature (188)..(188): n includes a, c, g, or t, or contains no nucleotide
  misc_feature (205)..(206): n includes a, c, g, or t, or contains no nucleotide
  misc_feature (210)..(210): n includes a, c, g, or t, or contains no nucleotide
ggcgacatgcaacttttccagaccttctggtttctctaccataagggccaccnaccctcggagccctgtggcacgccctgccngtctggctactctttgtgcccagctctcnnnnnnnnnnnnnnnnncctgctctgtgccgccacctgatgccagatgggagcctcccagaggcccagagccnntgnccaaggccactgttttnnctanggccccagggcccacatttgggaaagttcttgatgtaggaaagggtgaaaaagcccaaatgctgctgtggttcaaccaggcaagatcatccggtgaaagaaccagtccctgggccccaaggatgccggggaaacaggaccttctcctttcctggagctggtttagctggatatgggagggggtttggctgcctgtgcccaggagctagactgccttgaggctgctgtcctttcacagccatggagtagaggcctaagttgacactgccctgggc

SEQ ID NO: 2770 - DNA, 102 bp, Homo sapiens
agaagttcagtggtcccattgttaactcagcctcaaatctcaactgtcaggccctacaaagaaaatggagagcctcttctggtggatgctttgctccctctg

SEQ ID NO: 2771 - DNA, 265 bp, Homo sapiens
  misc_feature (109)..(109): n includes a, c, g, or t, or contains no nucleotide
  misc_feature (129)..(129): n includes a, c, g, or t, or contains no nucleotide
  misc_feature (132)..(132): n includes a, c, g, or t, or contains no nucleotide
  misc_feature (160)..(199): n includes a, c, g, or t, or contains no nucleotide
  misc_feature (232)..(232): n includes a, c, g, or t, or contains no nucleotide
caaagagcctgttttggacccaacagactgcggtcccatggggcggaggctgaaaggagcccgtcgcctgaagctgagcccccttcgaagcctccggaaggggccaggnctgctgagcccccccagtgnctnccctgttcctacccctgctgtcagccgnnnnnnnnnnnnnnnnnnnnnnnnnnnnnnnnnnnnnnnncgttttgcaccatctggccacattgagggcttnacagcagaaattggagctagtgggtcatactgc

SEQ ID NO: 2772 - DNA, 434 bp, Homo sapiens
taaacatgtcacaatacagtaagtaaagtggttttgtttgtttctttgagatggagtcttgctctgtcacccaggctggagtgcggtggcgcaatctcggctcactgcatcctctgcctcccgggttcaagcaattctcctgcctcagcttcccaagtagctgggattacaggcacgtgccaccacgcccagctaatttttgtatttttagtagagatggggtttcaccatattggtcacgtcacgttggtcttgaactcctgaccttgtgatccaccccgccttggcctcccaaagtgctgggattacaggtgtgagccaccgtgcccggccaagtaaaatgttttttaaaatggttatgtgcattattcataaaaaataatggtgtccagtctttttaaacttgtaaagacacatcttattgaataaagaga

SEQ ID NO: 2773 - DNA, 188 bp, Homo sapiens
gttgctggtggatttcttgttcctgttacataactaaaagtgaggccatttgtggtttttaaaaaccttatgaattaaaaatgctacaggtgaacaaacagaagcttatgtttagagatattgatgacttaacagtacaattggaagtaatacggatgagcaagaattagttctgcagcttttcaaaa

SEQ ID NO: 2774 - DNA, 514 bp, Homo sapiens
  misc_feature (32)..(46): n includes a, c, g, or t, or contains no nucleotide
  misc_feature (88)..(120): n includes a, c, g, or t, or contains no nucleotide
  misc_feature (240)..(240): n includes a, c, g, or t, or contains no nucleotide
  misc_feature (474)..(488): n includes a, c, g, or t, or contains no nucleotide
gaactctggggttcccacattctccttccctnnnnnnnnnnnnnnnaacagacactttttgcttccttaaagtaggatcaaatctagnnnnnnnnnnnnnnnnnnnnnnnnnnnnnnnnntagcctggaagctcggcatttggtttcactaagggccatgtggttccctgcagcctcatgcctggccccttgacacatccaaagcaaagggagtcctgccccctccccccacttcctttnctaccctgcctgtgcacagtgggtgggttggtgtgtctggacactgaggacttcctccccctttgcctgtccttccctcggccctgtgtgcctcagggcagatatagcaagctctttcgaccatagttgatggtaggacattttagactttgtttctcagctctgtacaaacacaaatacacacccccacaaaactaaaatcaaagtttcactacataacactgggccttactnnnnnnnnnnnnnnntagcatttctgttctgtgctgtgcta

SEQ ID NO: 2775 - DNA, 523 bp, Homo sapiens
tagccattgacctggctggagatgagaccatcccaggaagcagcctcttgcctggacatgtccaggcctaccaggaggctgtgaagagcggcattcaccgtactgtccacgccggggaggtgggctcggccgaagtagtaaaagaggctgtggacatactcaagacagagcggctgggacacggctaccacaccctggaagaccaggccctttataacaggctgcggcaggaaaacatgcacttcgagatctgcccctggtccagctacctcactggtgcctggaagccggacacggagcatgcagtcattcggctcaaaaatgaccaggctaactactcgctcaacacagatgacccgctcatcttcaagtccaccctggacactgattaccagatgaccaaacgggacatgggctttactgaagaggagtttaaaaggctgaacatcaatgcggccaaatctagtttcctcccagaagatgaaaagagggagcttctcgacctgctctataaagcctatgg

SEQ ID NO: 2776 - DNA, 488 bp, Homo sapiens
  misc_feature (66)..(66): n includes a, c, g, or t, or contains no nucleotide
  misc_feature (123)..(123): n includes a, c, g, or t, or contains no nucleotide
  misc_feature (412)..(412): n includes a, c, g, or t, or contains no nucleotide
aactgggtagcaggtggctgacttctttaagcacctttctaaataccagcagaagaggctcccgcntctgttagcatgatcagtactattgtgacattaaaacaacaacaataagatcttccntatctggagggtacagaggtgaatggctttggttttcatttctcttcttcactgccttttctcggtgtggtatttgacaagattttagctcaaagcctcaccatgaattgattttttttgtttgtgtgtgtgtttgttttgggacaattttagatacctgagtgcactttttcagttagtcctaacttttaaaagaaggaaaaccaagagacatatctggtgtacgtgttgcagtatgaactctggttgcaatccctccccctcccacactgccccccatttgagtacnccgcacaagtcaaacgctaggaagtttgaataaaaccaatttttctaacttgttgctcatttgttgtaactcaata

SEQ ID NO: 2777 - DNA, 475 bp, Homo sapiens
  misc_feature (61)..(61): n includes a, c, g, or t, or contains no nucleotide
  misc_feature (67)..(67): n includes a, c, g, or t, or contains no nucleotide
  misc_feature (71)..(71): n includes a, c, g, or t, or contains no nucleotide
  misc_feature (77)..(77): n includes a, c, g, or t, or contains no nucleotide
  misc_feature (128)..(128): n includes a, c, g, or t, or contains no nucleotide
  misc_feature (135)..(135): n includes a, c, g, or t, or contains no nucleotide
  misc_feature (137)..(138): n includes a, c, g, or t, or contains no nucleotide
  misc_feature (140)..(140): n includes a, c, g, or t, or contains no nucleotide
  misc_feature (179)..(180): n includes a, c, g, or t, or contains no nucleotide
  misc_feature (182)..(182): n includes a, c, g, or t, or contains no nucleotide
tcactcagccgcagacaagtaatcactaacccgttttattctattcctatctgtggatgtntaaatngctngggggncagccctggataggtttttatgggaattctttacaataaacatagcttgtnacttgananntncaaatccattcatcctgattgggcatgaaatccatggtnnanaggacaagtggaaagtgagagggaaggtttgctagacaccttcgcttgttatcttgtcaagatagaaaagatagtatcatttcacccttgccagtaaaaacctttccatccacccattctcagcagactccagtattggcacagtcactcactgccattctcacactataacaagaaaagaaatgaagtgcataagtctcctgggaaaagaaccttaaccccttctcgtgccatgactggtgatttcatgactcataagcccctccgtaggcatcattcaagatcaatggccc

SEQ ID NO: 2778 - DNA, 134 bp, Homo sapiens
  misc_feature (41)..(41): n includes a, c, g, or t, or contains no nucleotide
  misc_feature (50)..(50): n includes a, c, g, or t, or contains no nucleotide
  misc_feature (70)..(70): n includes a, c, g, or t, or contains no nucleotide
  misc_feature (79)..(79): n includes a, c, g, or t, or contains no nucleotide
  misc_feature (89)..(90): n includes a, c, g, or t, or contains no nucleotide
  misc_feature (94)..(109): n includes a, c, g, or t, or contains no nucleotide
cccagtacagacatatccacaaggtcgtaaatgcatgctangaaaaatangggctggatcttatcactgnccctgtctnccccttgttnntctnnnnnnnnnnnnnnnngtgcccctttccatacagggatttt

SEQ ID NO: 2779 - DNA, 64 bp, Homo sapiens
tgggacggcctcctctcctactttgggacgcccacgtggcagaccgtgaccatctttgtggcgg

SEQ ID NO: 2780 - DNA, 438 bp, Homo sapiens
  misc_feature (76)..(230): n includes a, c, g, or t, or contains no nucleotide
catggcaggttagctcagaagacgtgcgatgggacacatttcccctaggccgaatgccaggtcagaccgaggaccnnnnnnnnnnnnnnnnnnnnnnnnnnnnnnnnnnnnnnnnnnnnnnnnnnnnnnnnnnnnnnnnnnnnnnnnnnnnnnnnnnnnnnnnnnnnnnnnnnnnnnnnnnnnnnnnnnnnnnnnnnnnnnnnnnnnnnnnnnnnnnnnnnnnnnnnnnnttcgagggccttctctggagccaggggcagctgcatgggctcaaaactggcctgcagctcttctgatggccatccctggtgcaagtgttcatccagccgtgccagggcaacagcccaccccctagtacaactgatgctccctgagacaacctgggagacagcctggatcagccacatcaactcagttgtccaccacaggggaattttg

SEQ ID NO: 2781 - DNA, 439 bp, Homo sapiens
tggtggactttatcttgctgggcatactttctctctaggagggagccttgtgagatccttcacaggcagtgcatgtgaagcatgctttgctgctatgaaaatgagcatcagagagtgtacatcatgttattttattattattatttgcttttcatgtagaactcagcagttgacatccaaatctagccagagcccttcactgccatgatagctggggcttcaccagtctgtctactgtggtgatctgtagacttctggttgtatttctatatttattttcagtatactgtgtgggatacttagtggtatgtctctttaagttttgattaatgtttcttaaatggaattatttgaatgtcacaaattgatcaagatattaaaatgtcggatttatctttccccatatccaagtaccaatgctgttgtaaacaacgtgtat

SEQ ID NO: 2782 - DNA, 462 bp, Homo sapiens
  misc_feature (100)..(100): n includes a, c, g, or t, or contains no nucleotide
  misc_feature (117)..(117): n includes a, c, g, or t, or contains no nucleotide
  misc_feature (174)..(174): n includes a, c, g, or t, or contains no nucleotide
gtgatatatgccatccgaaaccttaccgaagacaacagccaaaaccaagatttgattgcaaagatggaggaacaggggctggcagatgcatccctacttnaaaaaagtgggttttgnaagttgaaaagaaaggcgaaaagctgatcctgaaatctactagagacacccctaagnccatgaatgaactacatccaaatacctgaatttttggaatctgtttcatggatttttcatcttctaccgtatgtgaaattgcaagtgtttgaagatttataagtacaaatttgggaacatacaaatcttttaggtagtagagtttaacgtgtataagctaaaagtgaaagtaactgagtgttctcttgtttctttgcattaatgtaactgtgtggtttgcctttgtccccctggatagaacgtgcatttaaagaatatattgtacttactgtgacagcagataataaa

SEQ ID NO: 2783 - DNA, 416 bp, Homo sapiens
  misc_feature (26)..(44): n includes a, c, g, or t, or contains no nucleotide
gatactaactgctctcagagaaagtnnnnnnnnnnnnnnnnnnnaacccatgtttgcaatcaaagatgataaaatagattcttatttttcccccacccccgaaaatgttcaataatgtcccatgtaaaacctgctacaaatggcagcttatacatagcaatggtaaaatcatcatctggatttaggaattgctcttgtcatacccccaagtttctaagatttaagattctccttactactatcctacgtttaaatatctttgaaagtttgtattaaatgtgaattttaagaaataatatttatatttctgtaaatgtaaactgtgaagatagttataaactgaagcagatacctggaaccacctaaagaacttccatttatggaggatttttttgccccttgtgtttggaattata

SEQ ID NO: 2784 - DNA, 601 bp, Homo sapiens
cgtgcccagagcaagcgaattgtgggccagattatcccagccattgccaccactacagcagctgtggcaggcctgttgggcctggagctgtataaggtggtgagtgggccacggcctcgtagtgcctttcgccacagctacctacatctggctgaaaactacctcatccgctatatgccttttgccccagccatccagacgttccatcacctgaagtggacctcttgggaccgtctgaaggtaccagctgggcagcctgagaggaccctggagtcgctgctggctcatcttcaggagcagcacgggttgagggtgaggatcctgctgcacggctcagccctgctctatgcggccggatggtcacctgaaaagcaggcccagcacctgcccctcagggtgacagaactggttcagcagctgacaggccaggcacctgctcctgggcagcgggtgttggtgctagagctgagctgtgagggtgacgacgaggacactgccttcccacctctgcactatgagctgtgacaaggcagccaccctgtcacctagctcaatggagccccggatcccaagccctgcattgtaagcccacagtaggcac

SEQ ID NO: 2785 - DNA, 475 bp, Homo sapiens
  misc_feature (97)..(111): n includes a, c, g, or t, or contains no nucleotide
gccccctggcactgtgaagctctaggcctgctactgcctggggacacggacttctgctgctgccacctgcgccagccctaccttccaccacagatgnnnnnnnnnnnnnnnttggtcacactccttggcttctcccaccgcaagcaacgctgcctgcctctgccgctcctccacatcttgccgctgcccagcagagctggcttctgggtccacctgagcactggacggtgctcccagggcgttggagcaggcggaggggtgtgtggccaggtactaggaggcaccaggaaatcccgcggggtggcccatgcagaccaggcgcacgtggctcatggggcagaattgccaaggacagctcacgacagtgccaccttctcaccattccagccaaggagagatgtgacgttggaactgctctggcacttctgtcaagcctcccccgccccaattgccttgagatctctgctctttgtca

SEQ ID NO: 2786 - DNA, 553 bp, Homo sapiens
  misc_feature (55)..(70): n includes a, c, g, or t, or contains no nucleotide
  misc_feature (231)..(231): n includes a, c, g, or t, or contains no nucleotide
  misc_feature (236)..(236): n includes a, c, g, or t, or contains no nucleotide
  misc_feature (326)..(326): n includes a, c, g, or t, or contains no nucleotide
  misc_feature (380)..(380): n includes a, c, g, or t, or contains no nucleotide
  misc_feature (391)..(407): n includes a, c, g, or t, or contains no nucleotide
  misc_feature (412)..(412): n includes a, c, g, or t, or contains no nucleotide
tgcccttgagctgtggctctggcaggaaggaggggcagcccatccctcttctccnnnnnnnnnnnnnnnnggaatgggatgcaacttaagacttctgcctgagaagcctcctccctgctgcctccagggggcaccaaggcacaagcctgtgcagtaggggcgggatgggggtgtggaagagcaggtccaggctcctagcacaactggcctggggccttggcacctctgtangcccntgcctgtgcctgtccgctggcctggggggcctgggcttatctgggccttctcactcagggactctcttgacgctgacttgcccccgcagnggtggccagtgctgcctctgctccaagctgcccctgcgctgggaggggtggggncggtgccattnnnnnnnnnnnnnnnnnccctngccagtggcctcatccccagcaggcctcccgtgcctctgccagcaaggaggggccggccagctctgcttgcacagggggccccatgtggggtcagcgcacgctcatgtcactgagttccagccgcttttagagtaaagtcg

SEQ ID NO: 2787 - DNA, 490 bp, Homo sapiens
cagttctgttcttgtgtatgacttgtaaccttaatttactgtgtaaagatggttacattatttccttagctttgtttgttggagacaaatagagaatgcttgttaagtatgtcaaaacaatcttatcttgtgaatttttgttaatgtattatacgagctatatttttcatttgcccagaaagacagcttgtataacgcttttggaagtttctgctctgtaatgtctttagagctgacagtctgttaggtttgtttttttcttcatgctaaagtgtcagttggtggttttgtgaactggtcaaaaattcacaggtcttaaatgttttgggggaaatttatattggacactgctctttgtctagcaaataaaagatgttaatatattcctgttactggcatgtgcacgactatgttattagaagccactttatcattttcctgctttaaatagaaatgtctatttatgaattctgcttgtagttttttcaca

SEQ ID NO: 2788 - DNA, 266 bp, Homo sapiens
tgtttccgaaagcttgccaaaaaaggaaagaagaagaaaagagattagttatatcaaaagcctgaagtggaatgactgaaagatgggactcctcctttatttcagcatggagggtttaaatggaggatctccttttcctgtgacaaaacatctttcacaacttaccttgttaagacaattttaaaaaagatcttttcacaacttaccttgttaagacaaaatttattttccaggctatttaatacgtactttagctggaattattc

SEQ ID NO: 2789 - DNA, 558 bp, Homo sapiens
  misc_feature (69)..(69): n includes a, c, g, or t, or contains no nucleotide
  misc_feature (202)..(221): n includes a, c, g, or t, or contains no nucleotide
tcttacccattattaggaaggtaaggactacacatgtcattgaattgtaggtttcctttttttttcttnacttttaaattttaacttttaaaatctatttcatttcttagttatgcatctcataatcagactccatgctttttaaagacagagataatatcttctctattctattctacttcctccatttcaccatttatannnnnnnnnnnnnnnnnnnngattcatgccttcctgcctcttggctatggccctccccatctactctttaaactttaatctataacttttcatcagttttgttccctatctagaaaacattttcttctgtttgctaatctttgtccctcacaatttttgaaatccatctcatcactgaaatactttcttcttcaagtacttttttatttttcttcaacttctcttgatttgacctcagtgctttgaattcactggtgctacaatatgtaactgtggttaattgccttgtaaattttgcgtgtctgtatacttttataccaacttattgtaggctctttgaggtcaggtatgtatttc

SEQ ID NO: 2790 - DNA, 527 bp, Homo sapiens
  misc_feature (488)..(502): n includes a, c, g, or t, or contains no nucleotide
ccattccgtatgtaaaagattttgtttttctatataaaaagagctgactgacatatctttaaatactttgtactaactttatcacacttactgtgtcatagaatatcatacagtttatacgctcatagttctcttgtgaacacttcaaacatcgctaagcatttgatctggccatgtatatggtagctgtgttttaatttgagaatcttgagggtagagccacaaatttcaattcttacatttccatttgcaaagtgactagagaaaaagaaatcagcttaaatgaggtattaagtaatgtttagagtcgtaggtattaactagaatataaatccttagaaattgtctttataccttcaaaaattatactatgcatttatcatagaaatgtgattacaaagaagtctgactaccatgtctttaaacatatggcatctctcaacttttcttccttatggggctacatttgttcatttccagcagtagcnnnnnnnnnnnnnnncatggtagacttgtctctaaataaa

SEQ ID NO: 2791 - DNA, 447 bp, Homo sapiens
  misc_feature (188)..(193): n includes a, c, g, or t, or contains no nucleotide
  misc_feature (195)..(196): n includes a, c, g, or t, or contains no nucleotide
  misc_feature (198)..(203): n includes a, c, g, or t, or contains no nucleotide
cttaccgctggctgtctgctgaaattgaggatgtgaagccggccaagaccgtcaacatttagtgcctcctgagcagctcttggttttggcgtcttttgggtcggcccatgtggtttgagcacccagccaggcggtctctttagaggatcctgtacacagttccactattaaaacatttcaggttgaannnnnnannannnnnntccttgatttacaaaatgagaaatgtagtcacttagaacttgagcatgatttttgttaaacatatttaataatgatatatatactatttattctctgaaatgccagagagtttgaattttcctatgacaaaccacttctagcatacgttctagaagacaaggaccctttttaatgtcaaagtattgtaaagaccccaagtgatatgtgattgttttttaatttccattaaatgagagagcatac

SEQ ID NO: 2792 - DNA, 488 bp, Homo sapiens
  misc_feature (69)..(69): n includes a, c, g, or t, or contains no nucleotide
ctctctgtagtttgctgggtagtggagggggtaagctaaatcatagtttctgacaataactgggaaggnttttttcttaaaataacaatggaattggtataattgggattgaaaactaaaacttggaactaagatagagaagatggagtgtatgtagaagggctgttaaaaatgtaaaacttggttgcattatttgtggaggctcaaacttgtgaaggttaataccataatttttccatttgttctgcattttgattctgaaaagaaagctggctttgcccatttcttattaaaaaaacttgttgtaaatccagttgtctaatgggatctatatgaagttagccatgtctgtatgcccttctcccacaaaatactgtataactagtgtgcttgtagtagttaactccaccatctttgtaagctaatgaaattgtgagtcacccatttatatcttaatttttaatcatgtcagttcttgaatgggtatc

SEQ ID NO: 2793 - DNA, 391 bp, Homo sapiens
  misc_feature (99)..(99): n includes a, c, g, or t, or contains no nucleotide
  misc_feature (101)..(101): n includes a, c, g, or t, or contains no nucleotide
  misc_feature (141)..(156): n includes a, c, g, or t, or contains no nucleotide
  misc_feature (267)..(267): n includes a, c, g, or t, or contains no nucleotide
  misc_feature (271)..(271): n includes a, c, g, or t, or contains no nucleotide
  misc_feature (276)..(276): n includes a, c, g, or t, or contains no nucleotide
  misc_feature (285)..(285): n includes a, c, g, or t, or contains no nucleotide
  misc_feature (321)..(335): n includes a, c, g, or t, or contains no nucleotide
tggacagaggcctccggtcagcctcactctgactgcaaccccctctcactggacagcatcacctggacacagagcctcacctagtctgtgtcccatggncnacaactttgctttggacagtgacaccaagaatactcaccnnnnnnnnnnnnnnnnccacaggcagccacctggacacaaacatctctccagagtcagcctccacacagactccacagcagaactcccagggaggcactggggcatggcttcagagcaccaggcagngctncgcgntgcctagcncccgctcagccagggcagcctgcagcggagcttggnnnnnnnnnnnnnnnatctcttggcctcgggaaatgtagctggagtcatcatttagcagagcacggtgtcc

SEQ ID NO: 2794 - DNA, 439 bp, Homo sapiens
  misc_feature (45)..(46): n includes a, c, g, or t, or contains no nucleotide
  misc_feature (101)..(101): n includes a, c, g, or t, or contains no nucleotide
  misc_feature (201)..(201): n includes a, c, g, or t, or contains no nucleotide
  misc_feature (204)..(206): n includes a, c, g, or t, or contains no nucleotide
  misc_feature (212)..(212): n includes a, c, g, or t, or contains no nucleotide
  misc_feature (219)..(219): n includes a, c, g, or t, or contains no nucleotide
  misc_feature (234)..(234): n includes a, c, g, or t, or contains no nucleotide
  misc_feature (259)..(259): n includes a, c, g, or t, or contains no nucleotide
  misc_feature (274)..(274): n includes a, c, g, or t, or contains no nucleotide
  misc_feature (288)..(288): n includes a, c, g, or t, or contains no nucleotide
  misc_feature (390)..(405): n includes a, c, g, or t, or contains no nucleotide
tcggatctagccatggctggcagaggtttctagggtgggccccannccgtggcgtgaactgaggatgacccggggcagctggcaggagagagccttggccntgacctggcacagaaagggcagcttcagtctctgcagtgtccattatctgctgttccttcgagggttccaggctgtgtgtggggcccaagcatgccccanccnnncccctncctgggncccaggcagcacctnggagcccacagagtctgtgtgtagnccaggaagccccgcntcaggtagccaccnccggggcactggctgctctgtcttggtcctgttaaccctccacctcctctcttggactccctccccaccccaaccactctttctttctcctttaacccaatnnnnnnnnnnnnnnnncatcgttttctttgctgtgccaaagcaggtcaga

SEQ ID NO: 2795 - DNA, 581 bp, Homo sapiens
  misc_feature (59)..(59): n includes a, c, g, or t, or contains no nucleotide
  misc_feature (70)..(70): n includes a, c, g, or t, or contains no nucleotide
  misc_feature (75)..(112): n includes a, c, g, or t, or contains no nucleotide
  misc_feature (119)..(119): n includes a, c, g, or t, or contains no nucleotide
  misc_feature (130)..(130): n includes a, c, g, or t, or contains no nucleotide
  misc_feature (141)..(141): n includes a, c, g, or t, or contains no nucleotide
  misc_feature (193)..(193): n includes a, c, g, or t, or contains no nucleotide
  misc_feature (200)..(200): n includes a, c, g, or t, or contains no nucleotide
  misc_feature (202)..(202): n includes a, c, g, or t, or contains no nucleotide
  misc_feature (204)..(480): n includes a, c, g, or t, or contains no nucleotide
acaagggtctatgtcatcatcccttttgcttatggtagtgggctaacataacagccccntttctcaagcnagagnnnnnnnnnnnnnnnnnnnnnnnnnnnnnnnnnnnnnncttagcnagctggagctnaagccaaaccntgttctgtcccactggccagccatctttgctcacatggaaattcaaatgccnttcaaangncnnnnnnnnnnnnnnnnnnnnnnnnnnnnnnnnnnnnnnnnnnnnnnnnnnnnnnnnnnnnnnnnnnnnnnnnnnnnnnnnnnnnnnnnnnnnnnnnnnnnnnnnnnnnnnnnnnnnnnnnnnnnnnnnnnnnnnnnnnnnnnnnnnnnnnnnnnnnnnnnnnnnnnnnnnnnnnnnnnnnnnnnnnnnnnnnnnnnnnnnnnnnnnnnnnnnnnnnnnnnnnnnnnnnnnnnnnnnnnnnnnnnnnnnnnnnnnnnnnnnnnnnnnnnnnnnnnnnnatctctggtgggggcaagtgtctggaaggcctgaggggcacttcagatgagaatggagaggtagggagccaggtgcagcaggatccctcaaatcaataaag

SEQ ID NO: 2796 - DNA, 463 bp, Homo sapiens
gcgacatcctggacagggagtactatagtgttcaacagcatcgccacgctcgcctacctgtgaagtggatggcgctggagagcctgcagacctatagatttaccaccaagtctgatgtgtggtcatttggtgtgctgctgtgggaactgctgacacggggtgccccaccataccgccacattgacccttttgaccttacccacttcctggcccagggtcggcgcctgccccagcctgagtattgccctgattctctgtaccaagtgatgcagcaatgctgggaggcagacccagcagtgcgacccaccttcagagtactagtgggggaggtggagcagatagtgtctgcactgcttggggaccattatgtgcagctgccagcaacctacatgaacttgggccccagcacctcgcatgagatgaatgtgcgtccagaacagccgcagttctcacccatgccagg

SEQ ID NO: 2797 - DNA, 175 bp, Homo sapiens
caacgtgtttcctaaaagtagagagaggtaagagacggtagcacctgcggggcggcttgcacgccgagtgcctgtgacgcgccggcttgacttaactgcttccctgaagtaccgtgaggttcctgatgtgcgggcggtagacggtaggcttatgcggcacgctttcgtttccacc

SEQ ID NO: 2798 - DNA, 442 bp, Homo sapiens
caaagcagtgtttgtcctaatttatatattgtttttctagttcattttgtgtttccaacttttcatgtaaaattttaattatttttgaatgtgtggatgtgagactgaggtgccttttggtactgaaattctttttccatgtacctgaagtgttacttttgtgatataggaaatccttgtatatatactttattggtccctaggcttcctattttgttaccttgctttctctatggcatccaccattttgattgttctacttttatgatatgttttcataagtggttaagcaagtattctcgttacttttgctcttaaatccctattcattacagcaatgttggtggtcaaagaaaatgataaacaacttgaatgttcaatggtcctgaaatacataacaacattttagtacattgtaaagtagaatcctctgttcataatg

SEQ ID NO: 2799 - DNA, 521 bp, Homo sapiens
  misc_feature (99)..(99): n includes a, c, g, or t, or contains no nucleotide
  misc_feature (107)..(402): n includes a, c, g, or t, or contains no nucleotide
gttaacccatttttgagccaagcttcaaccctcagccttgaaaaacaagtctttaatttaatttttgttttttgcctaaatccaaagaaaaagggctgncgggccannnnnnnnnnnnnnnnnnnnnnnnnnnnnnnnnnnnnnnnnnnnnnnnnnnnnnnnnnnnnnnnnnnnnnnnnnnnnnnnnnnnnnnnnnnnnnnnnnnnnnnnnnnnnnnnnnnnnnnnnnnnnnnnnnnnnnnnnnnnnnnnnnnnnnnnnnnnnnnnnnnnnnnnnnnnnnnnnnnnnnnnnnnnnnnnnnnnnnnnnnnnnnnnnnnnnnnnnnnnnnnnnnnnnnnnnnnnnnnnnnnnnnnnnnnnnnnnnnnnnnnnnnnnnnnnnnnnnnnnnnnnnnnnnnnnnnnnggctgtccatgtattcacacacccctcaaaaaaagcctttagttcctactttagccactggtttctcagaatccaaagatcacatattctagtgtaacactgcaagaagtcttgagaaa

SEQ ID NO: 2800 - DNA, 559 bp, Homo sapiens
  misc_feature (66)..(66): n includes a, c, g, or t, or contains no nucleotide
  misc_feature (113)..(113): n includes a, c, g, or t, or contains no nucleotide
  misc_feature (147)..(147): n includes a, c, g, or t, or contains no nucleotide
  misc_feature (172)..(172): n includes a, c, g, or t, or contains no nucleotide
  misc_feature (191)..(191): n includes a, c, g, or t, or contains no nucleotide
  misc_feature (369)..(369): n includes a, c, g, or t, or contains no nucleotide
  misc_feature (458)..(486): n includes a, c, g, or t, or contains no nucleotide
  misc_feature (511)..(526): n includes a, c, g, or t, or contains no nucleotide
  misc_feature (533)..(533): n includes a, c, g, or t, or contains no nucleotide
cactgtgtggcagttactaggggaattctgcctctgactgttctttttcttttggtctttaaacanccctgtcgtgggatgtgctcactgatttgtggctatgttgaaggtancacttgtcttgagggttttcaatatttcaggatncatgctggtggcaaaaggactccangcctctgtggaatcatgtnccacagggggacctgcctcccgtgatgtcccacctttccttcaaggtctgtcatatgagtcctccccttttacaacacttattatggtatttttcaagttattcttcttagatttgcagtacctactgaaatttgtgtttttatagttgaagttaggaaaatgctatttgatttgtanttagatatttaagtcacttgtccaatgatgtgtatgtctaagcctcatgtaccgatttgaagtcagacttaaaaatgtatttacagatnnnnnnnnnnnnnnnnnnnnnnnnnnnnnaatatttcatgtttacattaaaaannnnnnnnnnnnnnnnaaagtantcactttcctgccttgtcatttctgg

SEQ ID NO: 2801 - DNA, 530 bp, Homo sapiens
  misc_feature (88)..(88): n includes a, c, g, or t, or contains no nucleotide
  misc_feature (185)..(185): n includes a, c, g, or t, or contains no nucleotide
  misc_feature (188)..(218): n includes a, c, g, or t, or contains no nucleotide
  misc_feature (422)..(422): n includes a, c, g, or t, or contains no nucleotide
  misc_feature (474)..(492): n includes a, c, g, or t, or contains no nucleotide
gtctttcctttcaccaaagggcagggagaagtgtctatggacagcagggttccaattcttgtcattccaggaatatctgaatattccntggaatgtggaccctgagacagtgctcaggggccactgggagccaatattaggcattgactctcagccaggagtctgactggtctaacaccacactngcnnnnnnnnnnnnnnnnnnnnnnnnnnnnnnnactttgctgttagtgacagttattacagtttctcagccccattgtctctgccctctgtggcaatggaaggagaatatagagaagacaaaattaaatatagatagacctgagaaggacagccaggatagaattccatttgtgcctattccctgcctcccctcccctcccccatcctaccagttggttattttctcattgcatacntgatgtgttcactgcctagcctctccctaaagaagagagaagacaagtgggnnnnnnnnnnnnnnnnnnntctactgtggtgattaaatcttggttacaacatcctgg

SEQ ID NO: 2802 - DNA, 551 bp, Homo sapiens
  misc_feature (326)..(342): n includes a, c, g, or t, or contains no nucleotide
agatatcctttgctacagttttgttcagtatctaataagtttgatagatgtattggatacagtactggtttacagaggtttttgtacatttttgagatcattcatgtgtccagagatcttggaaaatattttttcacccacgatttattttgttattgatgatttttttttaaagtggtggtattaagggagagttatctacatggatgagtcttccgctatagcacagtttagaaaaggtgtttatgtcttaattaattgtttgagtacattctttcaacactacacatgaatgaatccaatcttataaccttgaagtgctgtannnnnnnnnnnnnnnnntattaagtccaagtttattaactagatatttatttagtattgagagtaatttgtgaatttgttttgtatttataaaatttatacctgaaaaatgttccttaatgttttaaaccttttactgtgtttttattcctctaacttccttaatgatcaatcaaaaaaagtaacaccctccctttttcctgacagttctttcagctttacagaac

SEQ ID NO: 2803 - DNA, 193 bp, Homo sapiens
taacaccctatgcccattgtcctgatctgaaaattcttggaaattgttccatgtgattaacatggaactgcctctacttaatcattctgaatgattaaatcgtttcattttctaaatgtgttataatgtgtttagccctttcttgttgctgtatgtttagatgctttccaatcttttgttactactaataatg

SEQ ID NO: 2804 - DNA, 411 bp, Homo sapiens
  misc_feature (48)..(77): n includes a, c, g, or t, or contains no nucleotide
  misc_feature (218)..(218): n includes a, c, g, or t, or contains no nucleotide
  misc_feature (240)..(241): n includes a, c, g, or t, or contains no nucleotide
  misc_feature (323)..(337): n includes a, c, g, or t, or contains no nucleotide
ttcttcagggaagatggtgcctatgagttcaatcctgacttcctggannnnnnnnnnnnnnnnnnnnnnnnnnnnnnaagaaaagcaatgaggaatggcatatcccccattattattgataataccaacctccacgcctgggaaatgaagccctatgcagtcatggcacttgaaaataactatgaagttatattccgagaacctgacactcgctgganattcaacgttcaagagttagcnnaagaagaaacattcatggtgtctcaagagaaaaaatccaccgaatgaaagaacggtatgaacacgatgttacttttcacagnnnnnnnnnnnnnnnaaagccaagcagaatgaacagaaaccaggacaggaataatgcattgccttccaacaatgccagatactggaatt

SEQ ID NO: 2805 - DNA, 431 bp, Homo sapiens
  misc_feature (40)..(40): n includes a, c, g, or t, or contains no nucleotide
  misc_feature (56)..(56): n includes a, c, g, or t, or contains no nucleotide
  misc_feature (58)..(58): n includes a, c, g, or t, or contains no nucleotide
  misc_feature (66)..(67): n includes a, c, g, or t, or contains no nucleotide
  misc_feature (69)..(69): n includes a, c, g, or t, or contains no nucleotide
  misc_feature (83)..(84): n includes a, c, g, or t, or contains no nucleotide
  misc_feature (87)..(87): n includes a, c, g, or t, or contains no nucleotide
  misc_feature (103)..(103): n includes a, c, g, or t, or contains no nucleotide
  misc_feature (133)..(133): n includes a, c, g, or t, or contains no nucleotide
  misc_feature (135)..(136): n includes a, c, g, or t, or contains no nucleotide
  misc_feature (138)..(138): n includes a, c, g, or t, or contains no nucleotide
  misc_feature (141)..(141): n includes a, c, g, or t, or contains no nucleotide
  misc_feature (144)..(144): n includes a, c, g, or t, or contains no nucleotide
  misc_feature (153)..(153): n includes a, c, g, or t, or contains no nucleotide
  misc_feature (159)..(159): n includes a, c, g, or t, or contains no nucleotide
  misc_feature (162)..(162): n includes a, c, g, or t, or contains no nucleotide
  misc_feature (167)..(167): n includes a, c, g, or t, or contains no nucleotide
  misc_feature (169)..(169): n includes a, c, g, or t, or contains no nucleotide
  misc_feature (174)..(174): n includes a, c, g, or t, or contains no nucleotide
  misc_feature (185)..(185): n includes a, c, g, or t, or contains no nucleotide
  misc_feature (189)..(189): n includes a, c, g, or t, or contains no nucleotide
  misc_feature (198)..(198): n includes a, c, g, or t, or contains no nucleotide
  misc_feature (200)..(200): n includes a, c, g, or t, or contains no nucleotide
  misc_feature (203)..(203): n includes a, c, g, or t, or contains no nucleotide
  misc_feature (208)..(208): n includes a, c, g, or t, or contains no nucleotide
  misc_feature (211)..(212): n includes a, c, g, or t, or contains no nucleotide
  misc_feature (216)..(216): n includes a, c, g, or t, or contains no nucleotide
  misc_feature (223)..(225): n includes a, c, g, or t, or contains no nucleotide
  misc_feature (228)..(230): n includes a, c, g, or t, or contains no nucleotide
  misc_feature (233)..(237): n includes a, c, g, or t, or contains no nucleotide
  misc_feature (301)..(301): n includes a, c, g, or t, or contains no nucleotide
  misc_feature (342)..(357): n includes a, c, g, or t, or contains no nucleotide
  misc_feature (401)..(401): n includes a, c, g, or t, or contains no nucleotide
tgtttcacataactaaaaaaagtcaacacagtctcatgtntgcaattaaaaaaaangntgtcaaanntntaaaaaacccaagnnacntggaagcttgaaaganaaggtgagtagtgagagccattctccaggnannanagnggngtgctcctnctcagnagntcctngntttanagcacttcagncctngagtccagnanggnagggnatnntgangctgagnnnacnnnctnnnnnagaacacaggcttctgagtgatgttgctaatgtccccccacaaatgggagcagtgtctccggcngatgaaaaatttaaagtcaaattagaaactgcttttgattnnnnnnnnnnnnnnnnctcccgccagcctttcacctggctgctccacctgacgttctttnaaaagctggactggccgcactcatcatggt

SEQ ID NO: 2806 - DNA, 474 bp, Homo sapiens
  misc_feature (70)..(70): n includes a, c, g, or t, or contains no nucleotide
  misc_feature (92)..(107): n includes a, c, g, or t, or contains no nucleotide
  misc_feature (420)..(420): n includes a, c, g, or t, or contains no nucleotide
ttgtgagaaaacagccccatcaggcttgtgttaaggcaatggactgaatgagtgcgtgctgggtggggtngggcacggaggctggcgggttnnnnnnnnnnnnnnnntgagaacagcagccccacggccccatgggaggcggcgctgctctccccgagggcggctgggcagagcacatcccccaggacttgatgaccacacggggcagagagaaaccaaccaaggccagcacctccgtcggaagcatttggcacacacaccttcaatacacgtcaaggtcgcttccagttttagaaaacagaaatctgcatctcagcctgagacgcacagagaggtctcttcctgacccagacgcactcacgagccaggtcctgggggtatgggggctgccaggggcgcccgagccctctcctggggggnctgctgggcaggcgacctgctgacccacggtcactgctgtgttcagcccctcag

SEQ ID NO: 2807 - DNA, 386 bp, Homo sapiens
  misc_feature (36)..(36): n includes a, c, g, or t, or contains no nucleotide
  misc_feature (41)..(68): n includes a, c, g, or t, or contains no nucleotide
  misc_feature (172)..(172): n includes a, c, g, or t, or contains no nucleotide
  misc_feature (176)..(176): n includes a, c, g, or t, or contains no nucleotide
  misc_feature (191)..(191): n includes a, c, g, or t, or contains no nucleotide
  misc_feature (206)..(206): n includes a, c, g, or t, or contains no nucleotide
  misc_feature (230)..(230): n includes a, c, g, or t, or contains no nucleotide
ttctcttgctggaactgttgaaagaaaatatatagnaatgnnnnnnnnnnnnnnnnnnnnnnnnnnnnaaacatacgacttattttgttgaaattgtcaaagactgtatttagatctcataatgctttgttaaatgtttacaagtaaatagtttgaattcagtaaatattantggnttgttgtattgatcnaatgcatgttacccnattcaaccattttatagactaccnaatttcttttatgttaactagaatgcttttgttaaaagttatttgttcattatttgtgctacccctttgattatgcagacaacctcatcagctgcctaacttatccatctttgaacttctgactacttgttgtatctgctggatatttagttcaac

SEQ ID NO: 2808 - DNA, 430 bp, Homo sapiens
  misc_feature (164)..(164): n includes a, c, g, or t, or contains no nucleotide
  misc_feature (168)..(168): n includes a, c, g, or t, or contains no nucleotide
  misc_feature (177)..(272): n includes a, c, g, or t, or contains no nucleotide
cggtgacactcagcatcgtccactgccctcccgtcaccaccgccatcatccaccggccccacgcccgcgagcagctgggcttctgcgtggaggacggcatcatctgcagcctcctccgtggtggcatcgccgagcgtgggggcatccgcgtcggccaccgcatnattnagatcaatnnnnnnnnnnnnnnnnnnnnnnnnnnnnnnnnnnnnnnnnnnnnnnnnnnnnnnnnnnnnnnnnnnnnnnnnnnnnnnnnnnnnnnnnnnnnnnnnatcgcctccttacaggccaggagcagcccgtgtacctgtgaccacctcatcccttgcctgccactgtgccttcgcctccatggccccggagccccatcctgggcctgccctggctggccaggaccccagcggttcttggtcctgtatgatttcctaat

SEQ ID NO: 2809 - DNA, 552 bp, Homo sapiens
  misc_feature (208)..(222): n includes a, c, g, or t, or contains no nucleotide
  misc_feature (231)..(257): n includes a, c, g, or t, or contains no nucleotide
  misc_feature (286)..(400): n includes a, c, g, or t, or contains no nucleotide
  misc_feature (421)..(437): n includes a, c, g, or t, or contains no nucleotide
tagaaaactgacacaggctgttgagaattctttgccacttttcccaccccaaaacagcatggggcctgacatcttctgccctggtcccctttctcttgatgtggaaagtctgaatgcagtatttatagacttctaaggttttaaaatccagtatcaagaagaaaatcagaaatactggttggtgaaataaagagtttaggcattgttnnnnnnnnnnnnnnnaaaaaaaannnnnnnnnnnnnnnnnnnnnnnnnnnggcctgtcttttttgaagcatgtgtgttnnnnnnnnnnnnnnnnnnnnnnnnnnnnnnnnnnnnnnnnnnnnnnnnnnnnnnnnnnnnnnnnnnnnnnnnnnnnnnnnnnnnnnnnnnnnnnnnnnnnnnnnnnnnnnnnnnnatatttattcttgggttggtnnnnnnnnnnnnnnnnnttaggagtcatggatcaattactgattatattgaaagtaaatataatcaattatgtacttttgagctttgcaggttcaatttaggtaaaaatcacattatgaaactgggaatgtc

SEQ ID NO: 2810 - DNA, 295 bp, Homo sapiens
tcatgccaagacagtatcagacacagccccagaagggggcattatgggccctgcctccccataggccatttggactctgccttcaaacaaaggcagttcagtccacaggcatggaagctgtgaggggacaggcctgtgcgtgccatccagagtcatctcagccctgcctttctctggagcattctgaaaacagatattctggcccagggaatccagccatgacccccacccctctgccaaagtactcttaggtgccagtctggtaactgaactccctctggaggcaggcttgagg

SEQ ID NO: 2811 - DNA, 331 bp, Homo sapiens
acctggcagctgtcactcctcatgacttcattgagcacatcttgcgcaagctgccccagcagcgggagaagctgtctctgatccgcaagcatgctcagaccttcattgctctgtgtgccaccgactttaagtttgccatgtacccaccgtcgatgatcgcaactggaagtgtgggagcagccatctgtgggctccagcaggatgaggaagtgagctcgctcacttgtgatgccctgactgagctgctggctaagatcaccaacacagacgtggattgtctcaaagcttgccaggagcagattgaggcggtgctcctcaatagcctgcagca

SEQ ID NO: 2812 - DNA, 212 bp, Homo sapiens
tatttaagctgttcattctggcaatgatttggcaacagtgcgggtggtcctcgagctctatttttactgtctggtatttaaactgaaacatacgtttctaagcaatacgaggccaccttcagtcgcaagctgggtgccaggcctggggccctcccagttcccccgccccaggaaacactgctgacctttgcaaaggctgccgagctttcgtg

SEQ ID NO: 2813 - DNA, 404 bp, Homo sapiens
  misc_feature (27)..(55): n includes a, c, g, or t, or contains no nucleotide
  misc_feature (118)..(118): n includes a, c, g, or t, or contains no nucleotide
  misc_feature (185)..(199): n includes a, c, g, or t, or contains no nucleotide
aaggagcgcccagaggaccggcccacnnnnnnnnnnnnnnnnnnnnnnnnnnnnnacttcttcacggccacagagggccagtaccagcctcagccttgagaggccttgagaggccctngggttctccccctttctctccagcctgacttggggagatggagttcttgtgccatagtcacatggcnnnnnnnnnnnnnnnctctgcacatgaatcccacccacatgtgacacatatgcaccttgtgtctgtacacgtgtcctgtagttgcgtggactctgcacatgtcttgtacatgtgtagcctgtgcatgtatgtcttggacactgtacaaggtacccctttctggctctcccatttcctgagaccacagagagaggggagaagcctgggattgacagaagct

SEQ ID NO: 2814 - DNA, 543 bp, Homo sapiens
  misc_feature (48)..(48): n includes a, c, g, or t, or contains no nucleotide
  misc_feature (71)..(71): n includes a, c, g, or t, or contains no nucleotide
  misc_feature (181)..(181): n includes a, c, g, or t, or contains no nucleotide
  misc_feature (263)..(341): n includes a, c, g, or t, or contains no nucleotide
  misc_feature (466)..(480): n includes a, c, g, or t, or contains no nucleotide
gacatagctcttgtgcaacctttaaataaattgttttgagtgtttttngagccccagacaaataatgtttnaaagttatccccttgctactttactgatacctttatcattcctgagacagtttgctaatttaaaaatgtagcattccatttgtatttatttctctcccttgccaaaaagnattttctaatactgcttgtaccagccagagaaagatccaaaacactactcagctctcttgcactgaggaaatttttcccccnnnnnnnnnnnnnnnnnnnnnnnnnnnnnnnnnnnnnnnnnnnnnnnnnnnnnnnnnnnnnnnnnnnnnnnnnnnnnnngctggttgcaaagaattgatatttagatggtttttaatactcagcagattgtcttcctttatattgtgtcttttttatgttgcatgttgcttttgttatcagcctgattttttgctcagtatatnnnnnnnnnnnnnnngttttgtttattgggcagacatatcttcattaagagtttttggaaaactcatcaaattcgatg

SEQ ID NO: 2815 - DNA, 303 bp, Homo sapiens
  misc_feature (149)..(149): n includes a, c, g, or t, or contains no nucleotide
  misc_feature (263)..(263): n includes a, c, g, or t, or contains no nucleotide
  misc_feature (277)..(278): n includes a, c, g, or t, or contains no nucleotide
acaaggccacactggtgtgtctcataagtgacttctacccgggagccgtgacagtggcctggaaggcagatagcagccccgtcaaggcgggagtggagaccaccacaccctccaaacaaagcaacaacaagtacgcggccagcagctanctgagcctgacgcctgagcagtggaagtcccacagaagctacagctgccaggtcacgcatgaagggagcaccgtggagaagacagtggcccctacagaatgttcataggttctnaaccctcacccccnnccacgggagactagagctgcaggat

SEQ ID NO: 2816 - DNA, 121 bp, Homo sapiens
gtatgtgaatctcagtcactaaaatcaatggttcaatccctatttatggctgggtcactgctgggaggtctaatatatggccatctttcagacagctcctgctctcagtctcttgcgtcgg

SEQ ID NO: 2817 - DNA, 315 bp, Homo sapiens
  misc_feature (30)..(59): n includes a, c, g, or t, or contains no nucleotide
  misc_feature (73)..(73): n includes a, c, g, or t, or contains no nucleotide
  misc_feature (75)..(75): n includes a, c, g, or t, or contains no nucleotide
  misc_feature (77)..(78): n includes a, c, g, or t, or contains no nucleotide
  misc_feature (80)..(80): n includes a, c, g, or t, or contains no nucleotide
  misc_feature (117)..(131): n includes a, c, g, or t, or contains no nucleotide
  misc_feature (182)..(205): n includes a, c, g, or t, or contains no nucleotide
tggagtcattcatcctgatgtcctcaattnnnnnnnnnnnnnnnnnnnnnnnnnnnnnntagctccaaccccnancnncncccagactttagatctgtattggtattacctactggnnnnnnnnnnnnnnngttccgtatagactcaactcatctgcccaaccaagtatgttcctcctgaannnnnnnnnnnnnnnnnnnnnnnnaatctacataggctcaccagctagaaacatttatgagcttacattccttcttcccatatcttatcagcatatcatatccatttcactccaacactctgtcttgaatttgg

SEQ ID NO: 2818 - DNA, 426 bp, Homo sapiens
  misc_feature (35)..(35): n includes a, c, g, or t, or contains no nucleotide
  misc_feature (77)..(77): n includes a, c, g, or t, or contains no nucleotide
tctagcctgtggacaccagctgggggatccagggntcaggccccctcctctccccagtttccctctgctgtgggttntgggctgtcatgtctccaccacttaaggatgtctttacactgacttcaggatagatgctgggatgcctgggcatggccacatgttacatgtacagaactttgtctacagcacaaattaagttatataaacacagtgactggtatttaatgctgatctactataaggtattctatatttatatgacttcagagacgcgtatgtaataaaggacgccctccctccagtgtccacatccagttcaccccagagggtcgggcaggttgacatatttatttttgtctattctgtaggcttccatgtccagaatcctgcttaaggttttagggtaccttcagtactttttgcaat

SEQ ID NO: 2819 - DNA, 555 bp, Homo sapiens
  misc_feature (84)..(84): n includes a, c, g, or t, or contains no nucleotide
  misc_feature (118)..(118): n includes a, c, g, or t, or contains no nucleotide
  misc_feature (124)..(124): n includes a, c, g, or t, or contains no nucleotide
  misc_feature (229)..(229): n includes a, c, g, or t, or contains no nucleotide
  misc_feature (257)..(257): n includes a, c, g, or t, or contains no nucleotide
  misc_feature (341)..(341): n includes a, c, g, or t, or contains no nucleotide
  misc_feature (345)..(345): n includes a, c, g, or t, or contains no nucleotide
  misc_feature (347)..(351): n includes a, c, g, or t, or contains no nucleotide
  misc_feature (356)..(359): n includes a, c, g, or t, or contains no nucleotide
caatctggaatcagaaagcggtggattctggcaaatggtccttgtgccctccccactcatccctggtctggtcccctgttgccnatagccctttaccctgagcaccaccccaacaganctgggnaccagccccctcgcctgcctgtgtctctccccaaacccctttagatggggagggaagaggaggagaggggaggggacctgccccctcctcaggcatctgggaggnccctgcccccatgggctttacccttccntgcgggctctctccccgacacatttgttaaaatcaaacctgaataaaactacaagtttaatatgaaaaaaaaaaaaaaaaaaanaaanannnnnaaaannnnaagaactctaggaaacagggacaaaaacacttcaaagagaaagttcatgcacttgtttctgaccacccagggcacccttcagcacacgctgtctggagtggcctgaagcaaggagtgtcttggtcgacgcggccggccgtttcgtagcgactaactcggacccggggacccagaacggcagcctacgacgtcacga

SEQ ID NO: 2820 - DNA, 438 bp, Homo sapiens
  misc_feature (50)..(50): n includes a, c, g, or t, or contains no nucleotide
  misc_feature (274)..(274): n includes a, c, g, or t, or contains no nucleotide
gcccagctcatttcattcgactgacccaggccatgctcacgtccggagtnaacactacatacagttcacctgaaacgcctcgtctctaactgccgtcgtcctgcctccctgtcctctactgccggtagtgtcccttctctgcgagtgagggggggccttcaccccaagcccacctcccttgtcctcagcctactgcagtccctgagttagtctctgctttctttccccagggctgggccatggggagggaaggactttctcccaggggaagccnccagccctgtgggtcatggtctgtgagaggtggcaggaatggggaccctcaccccccaagcagcctgtgccctctggccgcactgtgagctggctgtggtgtctgggtgtggcctggggctccctctgcaggggcctctctcggcagccacagccaagggtgga

SEQ ID NO: 2821 - DNA, 377 bp, Homo sapiens
  misc_feature (41)..(67): n includes a, c, g, or t, or contains no nucleotide
ctatgggcagtatgatctgtggctgggataagaagggtccnnnnnnnnnnnnnnnnnnnnnnnnnnngactcggctctcaggaaatatgttctccacgggtagtgggaacacttatgcctacggggtcatggacagtggctatcggcctaatcttagccctgaagaggcctatgaccttggccgcagggctattgcttatgccactcacagagacagctattctggaggcgttgtcaatatgtaccacatgaaggaagatggttgggtgaaagtagaaagtacagatgtcagtgacctgctgcaccagtaccgggaagccaatcaataatggtggtggtggcagctgggcaggtctcctctgggaggtcttggccga

SEQ ID NO: 2822 - DNA, 457 bp, Homo sapiens
  misc_feature (91)..(91): n includes a, c, g, or t, or contains no nucleotide
  misc_feature (129)..(129): n includes a, c, g, or t, or contains no nucleotide
  misc_feature (133)..(133): n includes a, c, g, or t, or contains no nucleotide
  misc_feature (243)..(248): n includes a, c, g, or t, or contains no nucleotide
  misc_feature (250)..(258): n includes a, c, g, or t, or contains no nucleotide
  misc_feature (282)..(282): n includes a, c, g, or t, or contains no nucleotide
  misc_feature (311)..(311): n includes a, c, g, or t, or contains no nucleotide
  misc_feature (328)..(328): n includes a, c, g, or t, or contains no nucleotide
  misc_feature (356)..(356): n includes a, c, g, or t, or contains no nucleotide
  misc_feature (359)..(360): n includes a, c, g, or t, or contains no nucleotide
  misc_feature (362)..(362): n includes a, c, g, or t, or contains no nucleotide
  misc_feature (365)..(368): n includes a, c, g, or t, or contains no nucleotide
  misc_feature (370)..(370): n includes a, c, g, or t, or contains no nucleotide
  misc_feature (375)..(375): n includes a, c, g, or t, or contains no nucleotide
  misc_feature (378)..(384): n includes a, c, g, or t, or contains no nucleotide
  misc_feature (386)..(390): n includes a, c, g, or t, or contains no nucleotide
  misc_feature (419)..(419): n includes a, c, g, or t, or contains no nucleotide
tgcctatgcccttgccttctagttccaaatattttagccagcttcactgtggcaatagtctttcagagaaaagacttcttgctgttattcnccaactcatccgtgggcttctggggacagccatttggntggngtgccaaacaccagaaggggagataatagttttgactctgaacttggccacaacccctgaactgatcccaaaatctgtgaaaagatttgaatctgatatctccaccaaannnnnnannnnnnnnntgtacagctaagttttctgatggnaatcttcatctcaccccattttctttttnaacctcgcccccttttnctacaatcaaatccattcattattgcgnccnncnggnnnncnccttnttnnnnnnngnnnnnaagagctgcccttggtgggtgccctgggncatgttgcaacgcctgctggtgcccttctgtctgtcca

SEQ ID NO: 2823 - DNA, 560 bp, Homo sapiens
  misc_feature (35)..(35): n includes a, c, g, or t, or contains no nucleotide
  misc_feature (37)..(54): n includes a, c, g, or t, or contains no nucleotide
  misc_feature (101)..(102): n includes a, c, g, or t, or contains no nucleotide
  misc_feature (185)..(186): n includes a, c, g, or t, or contains no nucleotide
  misc_feature (192)..(192): n includes a, c, g, or t, or contains no nucleotide
  misc_feature (516)..(516): n includes a, c, g, or t, or contains no nucleotide
tgaatttcgtggagacggtgcaccggggcatcaangnnnnnnnnnnnnnnnnnntcggcaagccagtcaaaaacgcccggatctcagtcaaaggcattcgnncacgacatcaccacagccccagatggtgactactggagactgctgcccccaggtatccacattgtcattgcccaagcccctgnntacgcnaaagtcatcaagaaagtcatcatccccgcccggatgaagagggctggccgtgtggacttcattctgcaacctctggggatgggacccaagaactttattcatgggctgcggaggactgggccccacgacccgctgggaggtgccagctctttgggggaggccacggagcccgacccgctccgggcgcgcaggcagccctcggccgacgggagtaagccctggtggtggtcctacttcacatcgctgagcacccacaggccacgctggctgctcaagtactagccccggccccagcacccgccaggatgtggagaccgaggcccntctccgcatcccgggctcctggctcttgattttgtctgccacag

SEQ ID NO: 2824 - DNA, 441 bp, Homo sapiens
  misc_feature (354)..(401): n includes a, c, g, or t, or contains no nucleotide
acggacctgcgagtcacacaactggtgacccacaccagcggctggagcaggaccctcttggggagaagagcatcctgcccgcagccagggcccctcatcaaagtcctcggtgttttttaaattatcagaactgcccaggaccacgtttcccaggccctgcccagctgggactcctcggtccttgcctcctagtttctcaggcctggccctctcaaggcccaggcaccccaggccggttggaggccccgacttccactctggagaaccgtccaccctggaaagaagagctcagattcctcttggctctcggagccgcagggagtgtgtcttcccgcgccaccctccaccccccgnnnnnnnnnnnnnnnnnnnnnnnnnnnnnnnnnnnnnnnnnnnnnnnngccaggggccaaggagctattttggggtctcgtttgccca

SEQ ID NO: 2825 - DNA, 450 bp, Homo sapiens
  misc_feature (286)..(303): n includes a, c, g, or t, or contains no nucleotide
  misc_feature (358)..(358): n includes a, c, g, or t, or contains no nucleotide
  misc_feature (371)..(371): n includes a, c, g, or t, or contains no nucleotide
ccagagccccatcaccgtggagtggcgggctcaatctgaatctgcccagagcaagatgctgagtggcattggaggcttcgtgctggggctgatcttcctcgggctgggccttatcatccatcacaggagtcagaaagggctcctgcactgactcctgagactattttaactgggattggttatcacttttctgtaacgcctgcttgtccctgcccagaattcccagctgtctgtgtcagcctgtccccctgagatcagagtcctacagtggctgtcacgcagccannnnnnnnnnnnnnnnnntccccaccttgaggcggatggctgtgaccctacttcctgcactgacccacagccnctgcctgtgcacngccagctgcatctactcaggccccaaggggtttctgtttctattctctcctcagactgctcaagagaagcacatgaaaa

SEQ ID NO: 2826 - DNA, 169 bp, Homo sapiens
gtgttgcttcaaattggtctgaaaggctatcctgctgaaagtcctgctttcctatctagcatttattcctctggcaaacttttctttcttttcttttttaaagtaaacttgtgtattgagtcttaactgtatttcagtattttccagccttatgtgttacattattcca

SEQ ID NO: 2827 - DNA, 477 bp, Homo sapiens
attatatgatttgtctgcactcagtttattccctactcaaatctcagccccatgttgttctttgttattgtcagaacctggtgagttgttttgaacagaactgttttttccccttcctgtaagacgatgtgactgcacaagagcactgcagtgtttttcataataaacttgtgaactaagaactgagaaggtcaaattttaattgtatcaatgggcaagactggtgctgtttattaaaaaagttaaatcaattgagtaaattttagaatttgtagacttgtaggtaaaataaaaatcaagggcactacataacctctctggtaactccttgacattcttcagattaacttcaggatttatttgtatttcacatattacaatttgtcacattgttggtgtgcactttgtgggttcttcctgcatattaacttgtttgtaagaaaggaaatctgtgctgcttcagtaagacttaattgt

SEQ ID NO: 2828 - DNA, 553 bp, Homo sapiens
tatcctcctgagaaagacagtgctcagtaaagcaatagagaagatcaaatgcctcttctgccgcattggcgggtcccgcagggagcgctccggacagcactgctcagacagtcaaaggacatcttctgccatgtcaggccactctcgctccttcatctcccgggagctgaaggagatcagcagtacatctcagaccctcctgccagacctctcactgccagacctcagtgaaaatggccttggaggcaggaatttgcttccaggtgtgcctggcatgggcctggcccaggaagacaccacctcactgaggactttgcgaatatcagagacctcagactcttcacagggtcaggactcagagagtgtcttactggtggatgaggctggtgggagcggcagggctgggcctgcccctaaggggagctccctgcaagtcacatttcccagtgaaacactgaacttatcagaaaaatgtatataataggcaaggaaagaaatacagtactgtttctggacccttataaaatcctgtgcaatagacacatacatgtca

SEQ ID NO: 2829 - DNA, 380 bp, Homo sapiens
  misc_feature (46)..(77): n includes a, c, g, or t, or contains no nucleotide
  misc_feature (79)..(79): n includes a, c, g, or t, or contains no nucleotide
  misc_feature (81)..(82): n includes a, c, g, or t, or contains no nucleotide
  misc_feature (287)..(305): n includes a, c, g, or t, or contains no nucleotide
atctgcattcatagccacgagtttgttattgctacaggctactgannnnnnnnnnnnnnnnnnnnnnnnnnnnnnnncngnntcggtggaggacactcctgggacaggtctctttgtcagtgaacaagggcgtcactctgggaggggtcggcggtgctggcggccgggtccctggtgcactgacctatctgggataggcagtaccctggaggggggcctggggcagaggaggcagcagaaaaccaaacatttcactgagaaagccccctccctgctctaagaagggnnnnnnnnnnnnnnnnnnnagagccgcgctgcctgcagtgcgctctgaccttctcttcatgtgtgtaaatctgtaatataccattctctgtggc

SEQ ID NO: 2830 - DNA, 552 bp, Homo sapiens
ttattttcaccctctgtaccccatgaccttatccttcctctccttccttgttacccatgaaaaactggcaacattccaagaatagcatctgtacaaaggggaaagaacataaaggtaaaacaaaacaaaacaacattttgagaacaaagatgaccataaccactgaagggaatcacatcttttaagacaaattcatattcttttatttgttatggcagatgacaagatggtacaacctttattcttttccaaaataaaacaaagggcacagcatctgtagtcagccgacaactctttcggccttttgggggtgggtctggccgtacttgtgatttcgatggtacgtgaccctctgctgaagacttgccccctgcccgtgtacatagtgcattgtttctgtgggcgggcccagcactttccgtcaacgttgtactgtatgtgatgaattgcgttggtctctgcatttttctgcagaagaggagtaaccgctccaggtaccttgacctttgtacagcccagaggccaacactgtgggtgtgtgactctttagca

SEQ ID NO: 2831 - DNA, 517 bp, Homo sapiens
  misc_feature (113)..(113): n includes a, c, g, or t, or contains no nucleotide
  misc_feature (126)..(127): n includes a, c, g, or t, or contains no nucleotide
  misc_feature (132)..(172): n includes a, c, g, or t, or contains no nucleotide
  misc_feature (211)..(251): n includes a, c, g, or t, or contains no nucleotide
  misc_feature (298)..(298): n includes a, c, g, or t, or contains no nucleotide
  misc_feature (322)..(322): n includes a, c, g, or t, or contains no nucleotide
  misc_feature (324)..(324): n includes a, c, g, or t, or contains no nucleotide
  misc_feature (326)..(359): n includes a, c, g, or t, or contains no nucleotide
  misc_feature (369)..(370): n includes a, c, g, or t, or contains no nucleotide
gtgcctcgaacctgcccatgtcagtgatcattgtgggtgtgggtggtgctgactttgaggccatggagcagctggacgctgatggtggacccctgcatacacgttctgggcangctgctgcccgcnnacatnnnnnnnnnnnnnnnnnnnnnnnnnnnnnnnnnnnnnnnnnccctcgggaggcattggcacagaccgtgctcgcagaagnnnnnnnnnnnnnnnnnnnnnnnnnnnnnnnnnnnnnnnnngggccccgctcaagccacttccaccctcagccaaggatcctgcacangccccccaggcctaggttcccttngngnnnnnnnnnnnnnnnnnnnnnnnnnnnnnnnnnncccagaggtnncctctgggccacaacccaacccttctcactctcctcagtgctagcactttgtattttttgatacttttatacttgtttctgcttttgctgctcttgatcccacctttgctcctgacaaccctcattcaataaagaccagtgaagacc

SEQ ID NO: 2832 - DNA, 177 bp, Homo sapiens
  misc_feature (33)..(47): n includes a, c, g, or t, or contains no nucleotide
gagagtggctttctaccacacacagcctgtccnnnnnnnnnnnnnnntgtcattcctaaaacacccttcagcaatgataatgagcagatgagagtttctggattagcttttcctattttcgatgaagttctgagatactgaaatgtgaaaagagcaatcagaattgtgctttttctc

SEQ ID NO: 2833 - DNA, 521 bp, Homo sapiens
  misc_feature (379)..(402): n includes a, c, g, or t, or contains no nucleotide
tccagctctggcttcctgctgagtccctcacgtttcttccccaacccctcagattttatattttctatttctctgtgtatttatataaaaatttattaaatataaatatccccagggacagaaaccaaggccccgagctcagggcagctgtgctgggtgagctcttccaggagccaccttgccacccattcttcccgttcttaactttgaaccataaagggtgccaggtctgggtgaaagggatacttttatgcaaccataagacaaactcctgaaatgccaagtgcctgcttagtagctttggaaaggtgcccttattgaacattctagaaggggtggctgggtcttcaaggatctcctgtttttttcaggctcctannnnnnnnnnnnnnnnnnnnnnnntggttctgttttcgtaccttcccactggcctcaagtgagccaagaaacactgcctgccctctgtctgtcttctcctaattctgcaggtggaggttgctagtctagtttcctttttgaga

SEQ ID NO: 2834 - DNA, 191 bp, Homo sapiens
  misc_feature (135)..(135): n includes a, c, g, or t, or contains no nucleotide
  misc_feature (158)..(158): n includes a, c, g, or t, or contains no nucleotide
tgcgggtgctgtctgtctccccccctttccttccctccctgtagttttgaagcggatgtttgttctttatagatgttgtttaaaaagcctgataatggtgattgaaatttacaaactttgtgttttttttttttnaagaaaaatataaaatagttttnttcaggctcaatgtgctttcctaaccgtgcccc

SEQ ID NO: 2835 - DNA, 528 bp, Homo sapiens
  misc_feature (26)..(26): n includes a, c, g, or t, or contains no nucleotide
  misc_feature (74)..(74): n includes a, c, g, or t, or contains no nucleotide
  misc_feature (100)..(100): n includes a, c, g, or t, or contains no nucleotide
  misc_feature (470)..(499): n includes a, c, g, or t, or contains no nucleotide
ctcagcctattggtcccatccatgangctgagacaaacagaaactggaagctgaagtcagtgtctctggtgctnagaaaccctgtggatttccctctganccaagatttttagtagtaaaataaacaactcatggacatctgtcagatgagaagttttggtcctgttagagaggagaaagactgtaatgaaactactagacccatttgggctaaagtttggcttttccttccttgagtcatagaacatatccatctcccaggaaatgtccttctctggcgtctgcttgcccttctgagtctgccttttttgcactgaacataagcactttatactaatgggtcacaaatcttgcagcccttaatttgggataagaccagattttcctgacattttcctctaactcattgaactatcaaattataggcaaccactgactagactgatatgagatgaggctaaaagcctttnnnnnnnnnnnnnnnnnnnnnnnnnnnnnnacaccaccaaaacagatacccatgttgag

SEQ ID NO: 2836 - DNA, 472 bp, Homo sapiens
  misc_feature (179)..(195): n includes a, c, g, or t, or contains no nucleotide
  misc_feature (285)..(300): n includes a, c, g, or t, or contains no nucleotide
tgcatgggcatcttcatcttcaacgttgtgtactacgagccgctggtctacaacaacacctacgtgtacccgtggtggggtgaggccatgggctgggccttcgccctgtcctccatgctgtgcgtgccgctgcacctcctgggctgcctcctcagggcaaagggcaccatggctgagcnnnnnnnnnnnnnnnnncagcccatctggggcctccaccacttggagtaccgagctcaggacgcagatgtcaggggcctgaccaccctgaccccagtgtccgagagnnnnnnnnnnnnnnnngtggagagtgtcatgtgacaactcagctcacatcaccagctcacctctggtagccatagcagcccctgcttcagccccaccgcacccctccagggggcctgcctttccctgacacttttggggtctgcctgggggaggaggggagaaagcaccatgagtgctcactaaaaca

SEQ ID NO: 2837 - DNA, 588 bp, Homo sapiens
  misc_feature (107)..(110): n includes a, c, g, or t, or contains no nucleotide
  misc_feature (122)..(128): n includes a, c, g, or t, or contains no nucleotide
  misc_feature (130)..(132): n includes a, c, g, or t, or contains no nucleotide
  misc_feature (136)..(148): n includes a, c, g, or t, or contains no nucleotide
  misc_feature (150)..(150): n includes a, c, g, or t, or contains no nucleotide
  misc_feature (154)..(155): n includes a, c, g, or t, or contains no nucleotide
  misc_feature (210)..(225): n includes a, c, g, or t, or contains no nucleotide
  misc_feature (268)..(268): n includes a, c, g, or t, or contains no nucleotide
  misc_feature (367)..(367): n includes a, c, g, or t, or contains no nucleotide
  misc_feature (382)..(382): n includes a, c, g, or t, or contains no nucleotide
  misc_feature (384)..(427): n includes a, c, g, or t, or contains no nucleotide
cctccagtgggctgatgctgggacccttaggatggggctcccagctcctttctcctgtgaatggaggcagagacctccaataaagtgccttctgggctttttctaannnnaaaaaaaaaaannnnnnnannnaaannnnnnnnnnnnnancgannatggtcaagaggttggaggggaggaaaatgaaggtctaccaggctgagggtgagnnnnnnnnnnnnnnnngaggggagttacagatttcctgtagcaggtgtgggcttacagncacatggactgggctgggaggcgagcaaaggaagcagctgagactgttggagaacgcttacaagacttcatgcaagcaaggacatgaactcagaacacngaggtcagaagcatncnnnnnnnnnnnnnnnnnnnnnnnnnnnnnnnnnnnnnnnnnnnnctgtcctgtttaggactgatttttcctattaggctagggtttggacctgatgttctcaagatgtctagaattgcatggctggccttgtggaatagatggttttgcattccagccaagtgtgctgtaaactgtatatctgtaatatgaatcccagcttttga

SEQ ID NO: 2838 - DNA, 567 bp, Homo sapiens
  misc_feature (57)..(57): n includes a, c, g, or t, or contains no nucleotide
  misc_feature (62)..(121): n includes a, c, g, or t, or contains no nucleotide
  misc_feature (123)..(123): n includes a, c, g, or t, or contains no nucleotide
  misc_feature (246)..(249): n includes a, c, g, or t, or contains no nucleotide
  misc_feature (263)..(264): n includes a, c, g, or t, or contains no nucleotide
  misc_feature (300)..(300): n includes a, c, g, or t, or contains no nucleotide
  misc_feature (360)..(391): n includes a, c, g, or t, or contains no nucleotide
  misc_feature (396)..(396): n includes a, c, g, or t, or contains no nucleotide
  misc_feature (400)..(400): n includes a, c, g, or t, or contains no nucleotide
  misc_feature (497)..(542): n includes a, c, g, or t, or contains no nucleotide
gcttccctgacatcccaggggctgtaagtgccaacatgactgtgaagggccagagtnaagannnnnnnnnnnnnnnnnnnnnnnnnnnnnnnnnnnnnnnnnnnnnnnnnnnnnnnnnnnnanggagcgctccctactgcatggggacttccacgcgttctccgctgggcctggactcttctcctatatccgccactgggaccagaatgagcgttttctggtagtgcttaactttggggatgtggnnnntctcggctggactnnaggcctccgacctgcctgccagcgccagcctgccanccaaggctgacctcctgctcagcacccagccaggccgtgaggagggctcccctcttgagnnnnnnnnnnnnnnnnnnnnnnnnnnnnnnnngctgnctgntccgcttcccctacgcggcctgacttcagcctgacatggacccactacccttctcctttccttcccaggccctttggcttctgatttttctcttttnnnnnnnnnnnnnnnnnnnnnnnnnnnnnnnnnnnnnnnnnnnnnnaatagggtgttttctgccttcaaat

SEQ ID NO: 2839 - DNA, 337 bp, Homo sapiens
gatccgtgccagaagcaagcctgtgagatacagaaatgtttacaagccaacagctacatggaatcaaagtgtcaggctgtcatccaagaactgcgtaagtgttgtgctcagtatcccaagggaagatctgtcgtctgttcaggatttgaaaaagaagaggaagaaaacctaacacggaagtctgcatcaaagtaaagttcttctgaagtgctgctccatgtttccaccaaatgaattttttttatcctcctgactcttcaggccaggtagcagcaaatagcaaatgaaaaagtcagctacaaaagttaatgaatatgccatctatgcagaacaggca

SEQ ID NO: 2840 - DNA, 506 bp, Homo sapiens
ccttagctcatacggaatggacagccgacctcccatggcaatttttgagttgttggattacatagtcaacgagcctcctccaaaactgcccagtggagtgttcagtctggaatttcaagattttgtgaataaatgcttaataaaaaaccccgcagagagagcagatttgaagcaactcatggttcatgcttttatcaagagatctgatgctgaggaagtggattttgcaggttggctctgctccaccatcggccttaaccagcccagcacaccaacccatgctgctggcgtctaagtgtttgggaagcaacaaagagcgagtcccctgcccggtggtttgccatgtcgcttttgggcctccttcccatgcctgtctctgttcagatgtgcatttcacctgtgacaaaggatgaagaacacagcatgtgccaagattctactcttgtcatttttaatattactgtctttattcttattactattattgttcccctaagtggattggc

SEQ ID NO: 2841 - DNA, 592 bp, Homo sapiens
  misc_feature (30)..(31): n includes a, c, g, or t, or contains no nucleotide
  misc_feature (37)..(37): n includes a, c, g, or t, or contains no nucleotide
  misc_feature (47)..(47): n includes a, c, g, or t, or contains no nucleotide
  misc_feature (69)..(69): n includes a, c, g, or t, or contains no nucleotide
  misc_feature (84)..(99): n includes a, c, g, or t, or contains no nucleotide
  misc_feature (108)..(108): n includes a, c, g, or t, or contains no nucleotide
  misc_feature (110)..(110): n includes a, c, g, or t, or contains no nucleotide
  misc_feature (146)..(146): n includes a, c, g, or t, or contains no nucleotide
  misc_feature (148)..(149): n includes a, c, g, or t, or contains no nucleotide
  misc_feature (153)..(153): n includes a, c, g, or t, or contains no nucleotide
  misc_feature (177)..(177): n includes a, c, g, or t, or contains no nucleotide
  misc_feature (180)..(180): n includes a, c, g, or t, or contains no nucleotide
  misc_feature (186)..(201): n includes a, c, g, or t, or contains no nucleotide
  misc_feature (206)..(206): n includes a, c, g, or t, or contains no nucleotide
  misc_feature (212)..(212): n includes a, c, g, or t, or contains no nucleotide
cactgtcttgcagaacactgatggaaatannaatgangcatgggctnaggatttgaagctggcagactntgcgctgctgtgccnnnnnnnnnnnnnnnngcctgtgantnaggctagaagctgccatcttgccatggccccgaatnannccgnggtgtctcggatggataaggtggnacncctgannnnnnnnnnnnnnnnccaanaggctnaatttgggagaaatggatctgactgcccggacaagttttgcttattccagtctgaaaccaaaaaccttctgttcaatgacaacactgagtgtctggccagactccatggcaaaacaacatatgaaaaatatttgggaccacagtatgtcgcaggcattactaatctgaaaaagtgctcaacctcccccctcctggaagcctgtgaattcctcaggaagtaaaaccgaagaagatggcccagctccccaagaaagcctcagccattcactgcccccagctcttctccccaggtgtgttggggccttggcctcccctgctgaaggtggggattgcccatccatctgcttacaattccctgctgtcgtcttagcaagaagtaa

SEQ ID NO: 2842 - DNA, 31 bp, Homo sapiens
actaaagcctagaagagcttctgaggcgctg

SEQ ID NO: 2843 - DNA, 470 bp, Homo sapiens
  misc_feature (368)..(369): n includes a, c, g, or t, or contains no nucleotide
gacattgtggatgtcctgaacagccctttggaaggacctgaccagaagagcttcattcctgtggaaagggcagagagcaccttcctgttcctggtaggtcaggatgaccacaactggaagagtgagttctatgctaatgaggcctgtaaacgcttgcaggcccatgggaggagaaagccccagatcatctgttacccagagacagggcactatattgagcctccttacttccccctgtgtcgggcttccctgcatgccttggtgggcagtcctattatctggggaggggagcccagggctcatgccatggctcaggtggatgcttggaaacaactccagactttcttccacaaacacttgggtggccnncgaggggacaatcccatcaaaagtgtaaattttatttgatcatgtggcctctctgttgctaatctctcctggaaacatctgccacatttagtgtgtgtatg

SEQ ID NO: 2844 - DNA, 549 bp, Homo sapiens
  misc_feature (101)..(102): n includes a, c, g, or t, or contains no nucleotide
  misc_feature (107)..(107): n includes a, c, g, or t, or contains no nucleotide
  misc_feature (127)..(127): n includes a, c, g, or t, or contains no nucleotide
  misc_feature (132)..(132): n includes a, c, g, or t, or contains no nucleotide
tcaactacagtgtgctgcagcatcttggccagtttccaccccttatgcctaacaagcagatcgcggagtcggccaatagcagtagcccccagagctctgcnnggggnaagcccgccatgtcctatgnccagngctctgcgggcccctccaaagcccaggccccctcctgagcaggccaagaagagtagcgaccctctgtctctcttccaggaactgagcctagggagctcatctggcagcaatggcttttactcatattttaaataatcactttttttttccctcaagggagaatgttttaatttctgtttgtatcagtagaattaaggtagttggacttcatctatagatgcacagttccctttgttttaatattaaatatgttctcacttaattgctttgctgctagacttgcaactaatttttttaaagtatattccattattttgcatttttgatgtgtcaaaactttgacagcttttatgtagaataaaaaaatttttaaatttgtgtattgttacatatgtttgcatcaagctagcagccaag

SEQ ID NO: 2845 - DNA, 383 bp, Homo sapiens
agctcaggaaactagggtgtcactttttttgcactgcagcatatacactaactagcttattaaaatttacaaaatgtctttttgaatgtatcaaggatatatttagtttgagtggaatttgtcagcagatatcagtaacttattgccgcttatattgtacaatgttaaacttcaattcctgtaacctggttagtattaatgtcagtgactaaaaaacttagagttagttttagggcactttttattttgagagcatgaagtgtggaatgtgtcactacgattgttgataaagctgaggccacttgcaacttgattttttaaatgaaatagataaagtctttttgaataatatagtatgcactgctatttgcttgattatgtaa

SEQ ID NO: 2846 - DNA, 445 bp, Homo sapiens
cgaccagaaccacatgagtcagaatcatcagaatatcccaccaacaaatacagagagaagatcaaaatcctgtacaatactataaatatatatttatgttttcacagtcaccaagtgtattgtaatgtatacttgaaaaatgttataacttatgaagtaaagtttctgatagtagtctttaaaagatataagacttaatatgttttattcagcttctataagtgtgaccagttttgatatttatttatgctaatatttttaacaagtcatttcaaaatatgtgtatctcaaattctccctaaagtgttgtggccttaactgttcagtattgcaataaaaaatatatttttatatgtggaaaattgaaataagatatttcctagtttttactaaacaattttacttctttataattttataaggcaatatttgcaatcttacgaca

SEQ ID NO: 2847 - DNA, 568 bp, Homo sapiens
  misc_feature (26)..(68): n includes a, c, g, or t, or contains no nucleotide
  misc_feature (78)..(78): n includes a, c, g, or t, or contains no nucleotide
  misc_feature (100)..(100): n includes a, c, g, or t, or contains no nucleotide
  misc_feature (150)..(150): n includes a, c, g, or t, or contains no nucleotide
  misc_feature (330)..(344): n includes a, c, g, or t, or contains no nucleotide
  misc_feature (393)..(408): n includes a, c, g, or t, or contains no nucleotide
gagcgtctgggcatcctccatctctnnnnnnnnnnnnnnnnnnnnnnnnnnnnnnnnnnnnnnnnnnntgggtcaatnggggccaagataatgccacacngctgatccaggccacagctgctaattctcttctggcctgtgagtttctcntccagaacggggcgaacgtgaaccaagcggacagtgcgggccggggcccgctgcaccacgcaaccattcttggccacacggggctcgcctgcctgttcctgaaacggggagctgatctgggggctcgagactctgaaggcagggaccctctgaccatcgccatggaaacagccaacgctnnnnnnnnnnnnnnnctacgactggcaaagatgagggaggctgaagcggcccaggggcaggcannnnnnnnnnnnnnnnttgacatcttccgcgacttctccctcatggcgtcagacgacccggagaagctgagccgtcgcagtcatgacctccacacgctgtgacccgaggcccacggggcccgcgcctgcctcccttccccgccaccgggccctctgccattaaagcctccgtgctt

SEQ ID NO: 2848 - DNA, 588 bp, Homo sapiens
  misc_feature (217)..(217): n includes a, c, g, or t, or contains no nucleotide
  misc_feature (219)..(219): n includes a, c, g, or t, or contains no nucleotide
  misc_feature (243)..(260): n includes a, c, g, or t, or contains no nucleotide
  misc_feature (291)..(291): n includes a, c, g, or t, or contains no nucleotide
  misc_feature (314)..(314): n includes a, c, g, or t, or contains no nucleotide
  misc_feature (442)..(458): n includes a, c, g, or t, or contains no nucleotide
  misc_feature (520)..(550): n includes a, c, g, or t, or contains no nucleotide
  misc_feature (556)..(556): n includes a, c, g, or t, or contains no nucleotide
agggctctgccgatcgcctatgtgacagcaaaggggcctacctgctcatggagttagccaagagccaggacaagactctcaagatttatgaaggtgcctaccatgttctccacaaggagcttcctgaagtcaccaactccgtcttccatgaaataaacatgtgggtctctcaaaggacagccacggcaggaactgcgtccccaccctgaatgcattngncggtgcccggctcatggtctgggnnnnnnnnnnnnnnnnnnggcagagatggcttctcagatatggcttgcnaaaaaaaaaaaaaaaaaaaaaancagaaattggagaaatccttaacacaattttctaaaaaataacagacatttttgttatacattagactatcagacactggacctaccttaatggttagacactttatgcaaaaaaagagaaaggtccnnnnnnnnnnnnnnnnnagaatgtgctaaaatgtccactgaaaacaaagccaagcctctgccctgcctctcccagctcnnnnnnnnnnnnnnnnnnnnnnnnnnnnnnnccaggncaccagactgcaataactggaggcgcctcctt

SEQ ID NO: 2849 - DNA, 428 bp, Homo sapiens
  misc_feature (187)..(202): n includes a, c, g, or t, or contains no nucleotide
  misc_feature (330)..(358): n includes a, c, g, or t, or contains no nucleotide
gtatcagcttttttcacttaaggaaaataatacatcttcattcaaatattcagtgcataaataattgccttaaattgagtctttgctgtggaatttgagagttttggaaatcaaaggcccttgtgaaacatttcctgttgccatttatttatagatagcaatagcttcaaatgagtgggaaagtctnnnnnnnnnnnnnnnnaaatagtcactaagattgtataaatagcgcattgatgagttgcctaattgttttctccaacaataaccactggtccattggttcactacttactcaagaaagacatatactgagatggcttgaaatgnnnnnnnnnnnnnnnnnnnnnnnnnnnnntgttttggaaaaagatcttgatgttattgtcttcctttattttccacaattaagtgcatctaactgtgaa

SEQ ID NO: 2850 - DNA, 175 bp, Homo sapiens
  misc_feature (37)..(90): n includes a, c, g, or t, or contains no nucleotide
  misc_feature (101)..(136): n includes a, c, g, or t, or contains no nucleotide
cgtcctctggagctctgtcttgtcggggagatgggcnnnnnnnnnnnnnnnnnnnnnnnnnnnnnnnnnnnnnnnnnnnnnnnnnnnnnnactctatggannnnnnnnnnnnnnnnnnnnnnnnnnnnnnnnnnnnatcagtcacctgtgttgctgcaggccaaggtagaaacgc

SEQ ID NO: 2851 - DNA, 584 bp, Homo sapiens
  misc_feature (115)..(129): n includes a, c, g, or t, or contains no nucleotide
  misc_feature (318)..(318): n includes a, c, g, or t, or contains no nucleotide
  misc_feature (339)..(339): n includes a, c, g, or t, or contains no nucleotide
  misc_feature (510)..(510): n includes a, c, g, or t, or contains no nucleotide
  misc_feature (515)..(515): n includes a, c, g, or t, or contains no nucleotide
  misc_feature (557)..(557): n includes a, c, g, or t, or contains no nucleotide
agcaccgatttctggtttgaggctgtgggtcccacccactcagctcactcgggcctctggccaacagggcatggggacatcatatcaggctacatccacgtgacgcagaccttcnnnnnnnnnnnnnnnctgtgggccctggtgtccgtgagcttcctggtcctgtcctgcttcccctcactgttccccccaggccacggcccgcttgtctcaaccaccgcagcctttgctgcagccatctccatggtggtggccatggcggtgtacaccagcgagcggtgggaccagcctccacacccccagatccagaccttcttntcctggtccttctacctgggntgggtctcagctatcctcttgctctgtacaggtgccctgagcctgggtgctcactgtggcggtccccgtcctggctatgaaaccttgtgagcagaaggcaagagcggcaagatgagttttgagcgttgtattccaaaggcctcatctggagcctcgggaaagtctggtccnacatntgcccgcccttccagcccttccccagcccctcctcttgtttnttcattcattcaacaaaatttggctgg

SEQ ID NO: 2852 - DNA, 448 bp, Homo sapiens
  misc_feature (64)..(64): n includes a, c, g, or t, or contains no nucleotide
  misc_feature (68)..(69): n includes a, c, g, or t, or contains no nucleotide
  misc_feature (331)..(345): n includes a, c, g, or t, or contains no nucleotide
gatgcccttctgtaagtgcccaccgcgggatgccgggaaggggcattatttgtgcactgagaancacnncgcagcgtgactgtgagttgctcataccgtgctgctatctgggcagcgctgcccatttatttatatgtagattttaaacactgctgttgacaagttggtttgagggagaaaactttaagtgttaaagccacctctataattgattggactttttaattttaatgtttttccccatgaaccacagtttttatatttctaccagaaaagtaaaaatcttttttaaaagtgttgtttttctaatttataactcctaggggttatnnnnnnnnnnnnnnnattccacctctccagtattgcaggacagaatatatgtgttaatgaaaatgaatggctgtacatatttttttctttcttcagagtactctgtacaataaatgca

SEQ ID NO: 2853 - DNA, 545 bp, Homo sapiens
  misc_feature (31)..(105): n includes a, c, g, or t, or contains no nucleotide
  misc_feature (310)..(324): n includes a, c, g, or t, or contains no nucleotide
acctggtctggaattatgtcataggctactnnnnnnnnnnnnnnnnnnnnnnnnnnnnnnnnnnnnnnnnnnnnnnnnnnnnnnnnnnnnnnnnnnnnnnnnnnntataagaggtaagttgaacaattccccagatgatgctgatgctcctggtccacaatgtgagaaccactaagttggagtactgactcatagagataaaattctttgaaagaaatgtactgttttaagatactgtaaaatgtggaggcagggcaaacgtttataagggctgttatgtatgaaatgtgcctctgacccaaatccacgnnnnnnnnnnnnnnnaccaaggagactttgcattaagttcagagtacaatacaaactgggcctagctctgtatttagtcagtatgtgcacgtgggaaactttagtaaaatatcacctccttattgagacaagtttggacatctggccttaagcctctgttgaacaggagaagtgaagctgtttgcaattatataattttctaatttgaaatcatgacaagcagtcttagaacaaag

SEQ ID NO: 2854 - DNA, 171 bp, Homo sapiens
  misc_feature (76)..(106): n includes a, c, g, or t, or contains no nucleotide
gtcatttctaaggtgtgttgcccgtggatctgggcacaatcattggaattccttggagccactgggattcatggcnnnnnnnnnnnnnnnnnnnnnnnnnnnnnnngctgacgtttgacaccagggccagtagagagtgcccttttgtatcttaagccaagaagtgaggcc

SEQ ID NO: 2855 - DNA, 454 bp, Homo sapiens
  misc_feature (150)..(151): n includes a, c, g, or t, or contains no nucleotide
  misc_feature (233)..(235): n includes a, c, g, or t, or contains no nucleotide
  misc_feature (237)..(237): n includes a, c, g, or t, or contains no nucleotide
  misc_feature (239)..(239): n includes a, c, g, or t, or contains no nucleotide
  misc_feature (246)..(247): n includes a, c, g, or t, or contains no nucleotide
  misc_feature (258)..(258): n includes a, c, g, or t, or contains no nucleotide
  misc_feature (274)..(274): n includes a, c, g, or t, or contains no nucleotide
  misc_feature (280)..(297): n includes a, c, g, or t, or contains no nucleotide
  misc_feature (381)..(398): n includes a, c, g, or t, or contains no nucleotide
atgtccccatagtgggccccttgacccacatgctgaccggtgccttgggatttgactagagttgctggctcgaggcccagcacgaggacttaccctggggttttgttaggtttggaagcagctgtccctagggggtgaagtccccccccnntttttttttttacccctgcttctcccacggcttcacctccctatgtgaactgtagactcagatcccaataaagtgctgttgnnngncnatgatgnntaggtggtttntaagcacaggggacancccacnnnnnnnnnnnnnnnnnnatgggtccatcccaggcactggtacttgcccccttgttctgtatccccctttgcccttgccttgcccttccaacaaaccctagnnnnnnnnnnnnnnnnnncttctccttttgctcacagctgccttggccccacccctgggagatgtagcaaattg

SEQ ID NO: 2856 - DNA, 212 bp, Homo sapiens
  misc_feature (27)..(27): n includes a, c, g, or t, or contains no nucleotide
  misc_feature (74)..(74): n includes a, c, g, or t, or contains no nucleotide
  misc_feature (96)..(110): n includes a, c, g, or t, or contains no nucleotide
aggccaaggctatgaagggacagctgntgggacccacctccccctccccggccacatgccgcgtccctgccccnacccgggtctggtgctgaggannnnnnnnnnnnnnntgtctgaacaatctccaaaattgaaatgtatatttttgctaggagccccagcttcctgtgtttttaatataaatagtgtacacagactgacgaaactttaaa

SEQ ID NO: 2857 - DNA, 444 bp, Homo sapiens
  misc_feature (176)..(195): n includes a, c, g, or t, or contains no nucleotide
  misc_feature (388)..(388): n includes a, c, g, or t, or contains no nucleotide
cctctcttgtacaggctgagaggctgagaaatcatcccctgaataactttttcctctcgattcccatccccaatttaatattaaattaacaggcaagccggcccccacctctccctgggggtctcagggagaacctttcacggcaccctttccctaccttttccttctttaatctnnnnnnnnnnnnnnnnnnnnttcgcctctgcatctactgacttgatttttcattctgccactccatcttcaaaccccctcacctttcccatcctactcctgccatgcattgaagggtcaatgcattttggggtgagctctgggtttaggggccccctccatccctcagctaccctggatctttgcccacctcttcctcagagcccccactgangggccgtagccctatctagggctgtggaaggagcagactggttcctaactctctcc

SEQ ID NO: 2858 - DNA, 251 bp, Homo sapiens
  misc_feature (28)..(28): n includes a, c, g, or t, or contains no nucleotide
  misc_feature (161)..(161): n includes a, c, g, or t, or contains no nucleotide
  misc_feature (163)..(163): n includes a, c, g, or t, or contains no nucleotide
ccacgcactagctcggttattggttatnccaaaggcactctccatctcccacatctggttattgacaagtgtaactttattttcatcgcggactctggggaagggggtcactcacaagctgtagctgccatacatgcccatctagcttgcagtctcttcgngntttcgctgtctctcttattatgactgtgtttatctgaaacttgaagacaagtctgttaaaatggttcctgagccgtctgtaccactgc

SEQ ID NO: 2859 - DNA, 338 bp, Homo sapiens
agtggcagcctcctgcgcagctacgagctggctggcggggacctggcaggtctactggaggccctgtctgacatgggcctagaggagggagtgaggctgctgaggggtccagaaacccgagacaagctgcccagcacaacagaggtgaaggaagacagtgcgtacgggagccagtcagtggagcagaaggcagagaagctgggcccaccccctgagccaccaggagggctctgccacgggcacccccagcctcaggtgcactgacctgctgcctgcccccagcccccttcccggaccccctgtacagcgtccccacctatttcaaatcttatttaaca

SEQ ID NO: 2860 - DNA, 483 bp, Homo sapiens
ggtactcccgctcagtgcttctcatcacccagcacctcagcctggtggagcaggctgaccacatcctctttctggaaggaggcgctatccgggaggggggaacccaccagcagctcatggagaaaaaggggtgctactgggccatggtgcaggctcctgcagatgctccagaatgaaagccttctcagacctgcgcactccatctccctcccttttcttctctctgtggtggagaaccacagctgcagagtaggcagctgcctccaggatgagttacttgaaatttgccttgagtgtgttacctcctttccaagctcctcgtgataatgcagacttcctggagtacaaacacaggatttgtaattccttactgtaacggagtttagagccagggctgatgctttggtgtggccagcactctgaaactgagaaatgttcagaatgtacggaaagatgatcagctattttcaacataactgaagg

SEQ ID NO: 2861 - DNA, 393 bp, Homo sapiens
  misc_feature (26)..(26): n includes a, c, g, or t, or contains no nucleotide
  misc_feature (51)..(51): n includes a, c, g, or t, or contains no nucleotide
  misc_feature (56)..(57): n includes a, c, g, or t, or contains no nucleotide
  misc_feature (69)..(69): n includes a, c, g, or t, or contains no nucleotide
  misc_feature (88)..(88): n includes a, c, g, or t, or contains no nucleotide
  misc_feature (90)..(90): n includes a, c, g, or t, or contains no nucleotide
  misc_feature (129)..(129): n includes a, c, g, or t, or contains no nucleotide
  misc_feature (179)..(179): n includes a, c, g, or t, or contains no nucleotide
  misc_feature (306)..(350): n includes a, c, g, or t, or contains no nucleotide
  misc_feature (365)..(365): n includes a, c, g, or t, or contains no nucleotide
ggcactatgcctttgcgcaacatctncaagaactgcacctactactggggnttcgnngcgtggatggcntattacatcaatcaccctntntacactccccctacctacggagctcagcaggtgaaactngcgctcgccatctttgtgatctgccagctcggcaacttctccatccacantggccctgcgggacctgcggcccgctgggtccaagacgcggaagatcccataccccaccaagaaccccttcacgtggctcttcctgctggtgtcctgccccaactacacctacgaggtggggtcctnnnnnnnnnnnnnnnnnnnnnnnnnnnnnnnnnnnnnnnnnnnnnttctccctggtgggnttcacccagatgaccatctgggccaagg

SEQ ID NO: 2862 - DNA, 460 bp, Homo sapiens
  misc_feature (71)..(75): n includes a, c, g, or t, or contains no nucleotide
  misc_feature (88)..(88): n includes a, c, g, or t, or contains no nucleotide
  misc_feature (95)..(95): n includes a, c, g, or t, or contains no nucleotide
  misc_feature (215)..(235): n includes a, c, g, or t, or contains no nucleotide
  misc_feature (413)..(434): n includes a, c, g, or t, or contains no nucleotide
cagtccgtgccctcgtagcagggcggcagctcctcaggcgtgggcgtgcgcccatcacacatatgcaacgnnnnnttccacgtggcanccctctngcacatgccgccactcgctcaggtagcgggacacggggtctcgtagcagggtgatgtagtagaacttcctgggcgtgcgcagcgcggcggagtcgcggcggtccagcacgccgggcacgnnnnnnnnnnnnnnnnnnnnntcggcgtgcagcccgcagctccagccggtggagaagcgggagaagagccaagtctcgcggcggttgggccggtagcaggtgcacttcttctggccgggccggcagtcgcacggcacctcgaggcgtacgttctgcacgaggtggcggccgaaggtggtgccgcccgtcttctggatgnnnnnnnnnnnnnnnnnnnnnncgcccttcatgtcgaagcgcagcgag

SEQ ID NO: 2863 - DNA, 284 bp, Homo sapiens
cgttggttgaggtgtgtctccaacctacatcagaccatgaagttcaacccctccagggaagctcctgatttcccctgcataattgaaaataggatatttctcagctattgaacagttactaatttatggggtggaaacagcattaagaatactgaatcaaatggaaaaacaaatgaatacaggaagataagtgttcgttcttttctgaaaaagagtatgtgtaccacaagagctggttttaattgggtgaattgtttttgtcctcattctgtacagaaatttgt

SEQ ID NO: 2864 - DNA, 576 bp, Homo sapiens
  misc_feature (102)..(105): n includes a, c, g, or t, or contains no nucleotide
  misc_feature (191)..(191): n includes a, c, g, or t, or contains no nucleotide
  misc_feature (346)..(348): n includes a, c, g, or t, or contains no nucleotide
  misc_feature (350)..(350): n includes a, c, g, or t, or contains no nucleotide
  misc_feature (389)..(398): n includes a, c, g, or t, or contains no nucleotide
  misc_feature (402)..(404): n includes a, c, g, or t, or contains no nucleotide
  misc_feature (406)..(406): n includes a, c, g, or t, or contains no nucleotide
  misc_feature (408)..(410): n includes a, c, g, or t, or contains no nucleotide
  misc_feature (412)..(416): n includes a, c, g, or t, or contains no nucleotide
  misc_feature (420)..(420): n includes a, c, g, or t, or contains no nucleotide
  misc_feature (422)..(423): n includes a, c, g, or t, or contains no nucleotide
  misc_feature (425)..(425): n includes a, c, g, or t, or contains no nucleotide
  misc_feature (427)..(427): n includes a, c, g, or t, or contains no nucleotide
  misc_feature (434)..(434): n includes a, c, g, or t, or contains no nucleotide
  misc_feature (439)..(441): n includes a, c, g, or t, or contains no nucleotide
  misc_feature (444)..(444): n includes a, c, g, or t, or contains no nucleotide
  misc_feature (446)..(446): n includes a, c, g, or t, or contains no nucleotide
  misc_feature (448)..(448): n includes a, c, g, or t, or contains no nucleotide
  misc_feature (452)..(462): n includes a, c, g, or t, or contains no nucleotide
  misc_feature (464)..(465): n includes a, c, g, or t, or contains no nucleotide
  misc_feature (493)..(493): n includes a, c, g, or t, or contains no nucleotide
  misc_feature (496)..(496): n includes a, c, g, or t, or contains no nucleotide
gttttaagatgcctgagccagccaagtctgctcccgccccgaagaagggctccaagaaggcagtgaccaaagcgcagaagaaagatggcaagaagcgcaagnnnngccgcaaggagagttactctgtgtacgtgtacaaggtgctgaaacaggtccatcccgacactggcatctcttccaaggccatgggnatcatgaattctttcgttaacgacatatttgagcgcatcgcgggcgaggcttcccgcctggcgcattacaacaagcgctcgaccatcacctccagggagatccagacggccgtgcgcctgctgcttcccggagagctggccaagcacgccgtgtnnngnagggcaccaaggccgtcaccaagtacaccagctccaagnnnnnnnnnncaannngngnnnannnnncagntnntngnacatatnttttnnnacngntngtcnnnnnnnnnnncnntaccagaaacattttcttttattgttanttnctttttaaactttgtttagccacttaaaatctgcttatggcacaatttgcctcaaaatccattccaagttgtatatttgt

SEQ ID NO: 2865 - DNA, 421 bp, Homo sapiens
tccactgggtgatgaagtatattccagaattcctcagcccctcttttttatcaactctgaatatttccaatatcctgctaatatcataaaaatgaaaaaatgctactcacctgataaagaaagaaagatgattacaatcaggggttcagtccaccagaattttgctgacttcacttttgcaactggcaaaataattggacacatgctcaaattaaagggagacatagattcaaatgcagctattgatcttagcaacaaagcttcattagcattcttacaaaagcatttaggacttcataaagattttgatcagtgggactgcttgattgaaggagatgatgagaatcttattccagggaccaacattaacacaaccaatcaacacatcatgttacagaactcttcaggaatagagaaatac

SEQ ID NO: 2866 - DNA, 459 bp, Homo sapiens
ctcattctttgtctgagaaacagcccccagtcctcctccactacaacctccatgaccttgagacgcatcccaggaggtgacgaggcaggggctccaggaaaggaatcagagacaattcacagagcctccctccctgggctccttgccagctccctcttcccttactaggctctatggcccctgctcagtcagccccactccctgggcttcccagagagtgacagctgctcaggccctaacccttggctccaggagacacagggcccagcacccaggttgctgtcggcaggctgaagacactagaatcctgacctgtacattctgcccttgcctcttaccccttgcctcccagtggtatttgaataaagtatgtagctatatctgcccctattttcctgttctgcagccccccaaatccacatgtaactcattactgtctcctgttatttatctcagtag

SEQ ID NO: 2867 - DNA, 490 bp, Homo sapiens
  misc_feature (254)..(257): n includes a, c, g, or t, or contains no nucleotide
ccagcccttagcacagagagggacacatgcccctcccccagctgcgtttttttatagtagatttttaacaaaaaacggggagaaataatgcatttctgtggatacagtgcccaccgccctcctccacttggaaacggtatcctccctgcccatccgtctgtctgtcgcccttctcccggccctcactaagccccggcacttctagtggtctcacctggaggcaagagggaggggacagaggccctgccacgtcnnnngctgcctcctgctctctggaggtactgagacagggtgctgatgggaaggaggggagcctttggggggccacccggggcctggacctatgcagggaggccacgtcccaccccacctcttgtttctgggtccctgctcccctttgggggtgtgtgtgtgtgttttaattttctttatggaaaaattgacaaaaaaaaaatagagagagaggtatttaactgcaataaactggccc

SEQ ID NO: 2868 - DNA, 492 bp, Homo sapiens
  misc_feature (26)..(26): n includes a, c, g, or t, or contains no nucleotide
  misc_feature (31)..(31): n includes a, c, g, or t, or contains no nucleotide
  misc_feature (35)..(37): n includes a, c, g, or t, or contains no nucleotide
  misc_feature (39)..(39): n includes a, c, g, or t, or contains no nucleotide
  misc_feature (361)..(361): n includes a, c, g, or t, or contains no nucleotide
atgtccagcaaactcttgcatgtggnccacnaggnnngnaatgtgtaagaatgttcatagttacatatttataatagttaataactggaaaaagtgaaatgtatgtctgtctacaggaaaataggtgaataattagatatatgtattcattctacgggatattattcagtagtggaaatgagtgaactacagctatacctcacaataagaatgaatctcagaaaatattaaggaaaaaagcaagtttgaagagaccacatggggcgtactatttttattgagcccaaaaacaagcaaaaccaaagaatatgtagtctaagcatacgtatacaataaaactatgctattaaaaaaaaaaganggtaactgataaaccaaaattgagcatagtaattacccacagaaggaggaagtggaagggacaggagcacataggtagatgccaagttatgcagctgttctggttcctcctggtaggcttacaagtgttta

SEQ ID NO: 2869 - DNA, 379 bp, Homo sapiens
ctttcatgtcccagaacttagcctttacctgtgaagtgttactacagccttaatattttcctagtagatctatattagatcaaatagttgcatagcagtatatgttaatttgtgtgtttttagctgtgacacaactgtgtgattaaaaggtatactttagtagacatttataactcaaggataccttcttatttaatcttttcttatttttgtactttatcatgaatgcttttagtgtgtgcataatagctacagtgcatagttgtagacaaagtacattctggggaaacaacatttatatgtagcctttactgtttgatataccaaattaaaaaaaaattgtatctcattacttatactgggacaccattaccaaaat

SEQ ID NO: 2870 - DNA, 534 bp, Homo sapiens
  misc_feature (235)..(253): n includes a, c, g, or t, or contains no nucleotide
  misc_feature (334)..(366): n includes a, c, g, or t, or contains no nucleotide
  misc_feature (380)..(394): n includes a, c, g, or t, or contains no nucleotide
  misc_feature (479)..(479): n includes a, c, g, or t, or contains no nucleotide
  misc_feature (490)..(490): n includes a, c, g, or t, or contains no nucleotide
  misc_feature (496)..(496): n includes a, c, g, or t, or contains no nucleotide
gctccaggccaaagtgccggtgagacccatggctgtgttggtgtggcccatggctgttggtgggacccgtggctgatggtgtggcctgtggctgtcggtgggactcgtggctgtcaatgggacctgtggctgtcggtgggacctacggtggtcggtgggaccctggttattgatgtggccctggctgccggcacggcccgtggctgttgacgcacctgtggttgttagtggggcnnnnnnnnnnnnnnnnnnnccaaggccggcaggtcaacctcgcgcttgctggccagtccaccctgcctgccgtctgtgcttcctcctgcccagaacgccnnnnnnnnnnnnnnnnnnnnnnnnnnnnnnnnngtgcccttcctgcnnnnnnnnnnnnnnntcctgggacggcggcagtattgaagctcgtgacaagtgccttcacacagacccctcgcaactgtccacgcgtgccgtggcaccangcgctgcccancctgcnggccccggccgcccctcctcgtgaaagtgcatttttgt

SEQ ID NO: 2871 - DNA, 487 bp, Homo sapiens
  misc_feature (35)..(295): n includes a, c, g, or t, or contains no nucleotide
ctccaatatgttttgggatggatcgtgaagatcannnnnnnnnnnnnnnnnnnnnnnnnnnnnnnnnnnnnnnnnnnnnnnnnnnnnnnnnnnnnnnnnnnnnnnnnnnnnnnnnnnnnnnnnnnnnnnnnnnnnnnnnnnnnnnnnnnnnnnnnnnnnnnnnnnnnnnnnnnnnnnnnnnnnnnnnnnnnnnnnnnnnnnnnnnnnnnnnnnnnnnnnnnnnnnnnnnnnnnnnnnnnnnnnnnnnnnnnnnnnnnnnnnnnnnnnnnnnnnnnnnnnnnnnnnnnnnnnnnnncaggctcagccattataattgattttcaaaaaaaatttagtttcttaagcttcatggattcaaattgagtgccatttggattttgaggcccctcagtggaaataatttgtttttagcaagtaattatgatatttctaaagtgcaaattcactgacctactttctgtgcttctggaaatgctgaatcgaataa

SEQ ID NO: 2872 - DNA, 268 bp, Homo sapiens
  misc_feature (26)..(26): n includes a, c, g, or t, or contains no nucleotide
  misc_feature (59)..(76): n includes a, c, g, or t, or contains no nucleotide
  misc_feature (241)..(241): n includes a, c, g, or t, or contains no nucleotide
gacacctcctctggatagaagctttnggtctctcccttgtattctacttggaccttggnnnnnnnnnnnnnnnnnnccaccataaagggccaatgtttcatatcagactggacaacagcatcatcaaatctgcgtccaatcagacgtttggcatcaaaaactgtgttggtggggttcattgcaacttgattctttgggggatcaccgatcaaccgttcagtgtccgtaaaggcgacatagnttggagtggttcggtttccctgatcat

SEQ ID NO: 2873 - DNA, 334 bp, Homo sapiens
gtaacgcctatcgaggcccaaacacgggtgcggggctccggcctgggtgcacggggcagctcctacggggtcacctcaaccgagtcctacaaggagacactgcacaagacaatggtgacccgcttcaacgaggcccagtgagcagcttcaagagcaacttctccacatgttgggtgtccatcctggggcagggaaggacagagtgttggatggctgggacggggccttgctcttgtcggccagcccactccccagccagagagggcttgaccaaatcaaattgaggtggtgacttttgttggaaaattgggctgggatcacgtcctgttttgta

SEQ ID NO: 2874 - DNA, 181 bp, Homo sapiens
ttcgctgcctgggtgagtttctctgccgccggtgctaccgcctgaagcacctgtcccccacggaccccgtgctctggctgcgcagcgtggaccgctcgctgcttctgcagggctggcaggaccagggcttcatcacgccggccaacgtggtcttcctctacatgctctgcagggatgttat

SEQ ID NO: 2875 - DNA, 472 bp, Homo sapiens
  misc_feature (98)..(98): n includes a, c, g, or t, or contains no nucleotide
  misc_feature (126)..(126): n includes a, c, g, or t, or contains no nucleotide
  misc_feature (136)..(136): n includes a, c, g, or t, or contains no nucleotide
  misc_feature (145)..(145): n includes a, c, g, or t, or contains no nucleotide
  misc_feature (151)..(152): n includes a, c, g, or t, or contains no nucleotide
  misc_feature (291)..(294): n includes a, c, g, or t, or contains no nucleotide
  misc_feature (330)..(330): n includes a, c, g, or t, or contains no nucleotide
gtctgtaatgttcatgtcataacttttagttaattgccattgagcacctgttctgaggaggtgagatgtggacttgtgcttataaactggagagtttnagtcataatccctcctggctttgtgtgnaatagcttgnctcactttngctggnncctttgaaatgtgttctccgtgataagctatccatgtgtttgtgataagagtgcttgtcaaccatgaccatctttgagccttcctagtcctccacctggcacagtatttgaaatggcaaaggatgtgcttcatcctctnnnnaacagtgtacactcccagagctgatattctggattntgactgtgcacatttcctctagttcatgtctgtagtccctatagaatgatctgtaataaaatagtatactggactgtgcatcaaagggatgtaaaattacagtattccaaaggttgaagttctgctgttttgttataatgcc

SEQ ID NO: 2876 - DNA, 530 bp, Homo sapiens
gatcactgtggtaagatggaacccacctgcaagcgccactttatccaggacagctgtctctatgagtgctcacccaacctggggccctggatccggcaggtcaaccagagctggcgcaaagagcgcattctgaacgtgcccctgtgcaaagaggactgtgagcgctggtgggaggactgtcgcacctcctacacctgcaaaagcaactggcacaaaggctggaattggacctcagggattaatgagtgtccggccggggccctctgcagcacctttgagtcctacttccccactccagccgccctttgtgaaggcctctggagccactccttcaaggtcagcaactatagtcgagggagcggccgctgcatccagatgtggtttgactcagcccagggcaaccccaatgaggaggtggccaagttctatgctgcggccatgaatgctggggccccgtctcgtgggattattgattcctgatccaagaagggtcctctggggttcttccaacaacctattctaatagacaa

SEQ ID NO: 2877 - DNA, 313 bp, Homo sapiens
  misc_feature (48)..(83): n includes a, c, g, or t, or contains no nucleotide
ggactcctgtgctaattgtcagcttacatatcattgtatagagactgnnnnnnnnnnnnnnnnnnnnnnnnnnnnnnnnnnnnacattgaaaataaaccggtgactgtttttcttcataaagttctgcgtttggcatcttcactctttccaaaatgtatctgtacatcagaaatgtcactattccaagtgtctttttagtgtggctttagtatggcttccttttaatattgtacatacattgtatctttgttttatggtaataagtaataaaaatgtagacttcatattttgtacaaaatgtcctatgtacag

SEQ ID NO: 2878 - DNA, 517 bp, Homo sapiens
tttctactgctgtattatctataactgccaaggctaaaaagaaggaaaaagaaaaggaaaaaaaggaggaggagaaaatggaagtggatgaggcagagaaaaaggaggaaaaagagaagaaaaaagaacctgagccaaacttccagttattggataacccagcccgagttatgcctgcccagcttaaggtcctaaccatgccggagacctgtagataccagcctttcaaaccactctctattggaggcatcatcattctgaaggataccagtgaagacattgaggagctggtggaacctgtggcagcacatggcccaaaaatcgaggaggaggaacaagagccagaacccccagaaccatttgagtatattgatgattaaggaccagaggatctcacttgcttatctgaagaagattgtccaggctcatattgggaatgcttatgaggaaattcatgccgagacctgctattcaatgcatgtatcgttgcctctgcactgacctgaagaaccctgtc

SEQ ID NO: 2879 - DNA, 343 bp, Homo sapiens
  misc_feature (58)..(58): n includes a, c, g, or t, or contains no nucleotide
  misc_feature (66)..(94): n includes a, c, g, or t, or contains no nucleotide
  misc_feature (269)..(287): n includes a, c, g, or t, or contains no nucleotide
ctgtgtcagtaatctggttataagcaaaactagcaatctgcaggtagggcagttcatncatctggnnnnnnnnnnnnnnnnnnnnnnnnnnnnngagccagagcaggtgggtgaggtagttgagtggagacaggtctgtcaggtggttctcagaaatatccacatagcgcagatggatgtaggagcgcagcaagtagatgtctgtcaggtccctctctttaacctccagcttgacataagcatgagccagcccattgcctgtcttacannnnnnnnnnnnnnnnnnncttcatcatgtcctccgtgaggggggtgggcagccattcctcaagggaactcttcc

SEQ ID NO: 2880 - DNA, 554 bp, Homo sapiens
  misc_feature (26)..(26): n includes a, c, g, or t, or contains no nucleotide
  misc_feature (507)..(507): n includes a, c, g, or t, or contains no nucleotide
acttggacagatttatcagtcctggnctagacaagtccacaccctacacggctgtgcgatgggtcgtgacactgggcctgagctttgtctacatgattcgagtttacctgctgcagggttggtacattgtgacctatgccttggggatctaccatctaaatcttttcatagcttttctttctcccaaagtggatccttccttaatggaagactcagatgacggtccttcgctacccaccaaacagaacgaggaattccgccccttcattcgaaggctcccagagtttaaattttggcatgcggctaccaagggcatccttgtggctatggtctgtactttcttcgacgctttcaacgtcccggtgttctggccgattctggtgatgtacttcatcatgctcttctgtatcacgatgaagaggcaaatcaagcacatgattaagtaccggtacatcccgttcacacatgggaagagaaggtacagaggcaaggaggatgccggcaagnccttcgccagctagaagcgggactgaggctgcctcacgtgttgcaag

SEQ ID NO: 2881 - DNA, 383 bp, Homo sapiens
  misc_feature (29)..(29): n includes a, c, g, or t, or contains no nucleotide
  misc_feature (194)..(213): n includes a, c, g, or t, or contains no nucleotide
gcgctgtttctcgttttcatcatatagancaaaacagccctgctgcaaagatggtcaacgtacctaaaacccgaagaaccttctgtaagaagtgtggcaagcatcagcctcacaaagtgacacagtataagaagggcaaggattctttgtatgcccagggaaggaggcgctatgatcggaagcagagtggctannnnnnnnnnnnnnnnnnnnttttccggaagaaggctaagaccacaaagaagattgtgctaaggctggaatgtgttgagcctaactgcagatccaagaggatgctggccattaagagatgcaagcattttgaactgggaggagataagaagagaaagggccaagtgatccagttctaaactttgggatat

SEQ ID NO: 2882 - DNA, 543 bp, Homo sapiens
gggcccggccatgtccttagcacaggggggccgccggtttgagtgagggtttctgagctgctctgaattagtccttgcttggctgcttggccttgggttcattcaagctcacgatgctgttcccacgtttcccgggatatatattctctcccctccgttgggccccagccttctttgcttgcctctctgtttgtaaccttgtcgacaaagaggtagaaaagattgggtctaggatatggtgggtggacaggggccccgggacttggagggttggtcctcttgcctcctggaaaaaacaaaaacaaaaaactgcagtgaaagacaagctgcaaatcagccatgtgctgcgtgcctgtggaatctggagtgaggggtaaaagctgatctggtttgactccgctggaggtggggcctggagcaggccttgcgctgttgcgtaactggctgtgttctggtgaggccttgctcccaaccccacacgctcctccctctgaggcgtgaggactcgcagtcaggggcagctgaccatggaagattgagagc

SEQ ID NO: 2883 - DNA, 412 bp, Homo sapiens
  misc_feature (182)..(208): n includes a, c, g, or t, or contains no nucleotide
  misc_feature (271)..(341): n includes a, c, g, or t, or contains no nucleotide
tgtcaaagtgactgcgttcatcagttttacactggggctgctacataatattttcatttgaacgaagaacttcaaaaagcacaggactagatgatctctgttccttttggctctaatatgctacaactgtaggccaattatcactttaccaattaagagttaggccagataagtgaaatttnnnnnnnnnnnnnnnnnnnnnnnnnnnataggcctaaactggatttccttattccaaatcctgtcttttccccactattccattagaccnnnnnnnnnnnnnnnnnnnnnnnnnnnnnnnnnnnnnnnnnnnnnnnnnnnnnnnnnnnnnnnnnnnnnnnaaaatttctcccttatctactgtgatgacttcagaagatacaatggtcccaggggccaagtagaaagcatt

SEQ ID NO: 2884 - DNA, 493 bp, Homo sapiens
  misc_feature (42)..(80): n includes a, c, g, or t, or contains no nucleotide
  misc_feature (221)..(237): n includes a, c, g, or t, or contains no nucleotide
agttagccaacatccgggcagcggaaaaggttgaggaaaagnnnnnnnnnnnnnnnnnnnnnnnnnnnnnnnnnnnnnnngacgacgccggcaggccccagactgcctacctgcagtgcaagtgtgtgaatgagcttaaccagtggctgtctgcgctgcggaaggtgagcatcaacaacaccggactgctgggctcctaccaccctggcgtcttccgtggnnnnnnnnnnnnnnnnngccaccaaaaagagaagacaggtcagggctgcgataagacccggtcacgggtgaccctgcaggagtggaatgaccctcttgaccatgaccttgaggcccagctcatctgccggcacctgctgggcgtggaggccatgctgtgggagaggcaccgggagctgagcgggggcgcagaggcaggcacggtgcccacgagccctggcaaagtccccgaggactcattggcccggctgctccgggtgctgcaggacctccg

SEQ ID NO: 2885 - DNA, 374 bp, Homo sapiens
  misc_feature (263)..(332): n includes a, c, g, or t, or contains no nucleotide
gtcccgcacagtggacggaggtccccggttgctggtcaggtccccatggcttgttctctggaacctgactttagatgttttgggatcaggagcccccaacacaggcaagtccaccccataataaccctgccagtgccagggtgggctggggactctggcacagtgatgccgggcgccaggacagcagcactcccgctgcacacagacggcctaggggtggcgctcagaccccaccctacgctcatctctggaaggggcagccnnnnnnnnnnnnnnnnnnnnnnnnnnnnnnnnnnnnnnnnnnnnnnnnnnnnnnnnnnnnnnnnnnnnnnctcagtgtcagcgggtgacgtgtgttcttttgagtccttgta

SEQ ID NO: 2886 - DNA, 559 bp, Homo sapiens
  misc_feature (28)..(28): n includes a, c, g, or t, or contains no nucleotide
  misc_feature (73)..(75): n includes a, c, g, or t, or contains no nucleotide
  misc_feature (77)..(82): n includes a, c, g, or t, or contains no nucleotide
  misc_feature (84)..(84): n includes a, c, g, or t, or contains no nucleotide
  misc_feature (86)..(87): n includes a, c, g, or t, or contains no nucleotide
  misc_feature (89)..(90): n includes a, c, g, or t, or contains no nucleotide
  misc_feature (106)..(106): n includes a, c, g, or t, or contains no nucleotide
  misc_feature (133)..(147): n includes a, c, g, or t, or contains no nucleotide
  misc_feature (306)..(347): n includes a, c, g, or t, or contains no nucleotide
  misc_feature (403)..(448): n includes a, c, g, or t, or contains no nucleotide
gataagcatctgcactgaaatataattnaacagcaaaagtaaaaaaggattgaaagttgtaaattcctcatannncnnnnnngncnntnnttctagaaatcgttgncttgtgtagcaaagaccaaataaatannnnnnnnnnnnnnncttgagcacagttgattttggacagctgctgtttattaggaaagggctccaggtggcaaaggtgcacacttcctcagacacaggtgagaagatgcagcaccttccacaggtgaatgggacggattcgaagtgagcaaagggattcacaaattatgtatnnnnnnnnnnnnnnnnnnnnnnnnnnnnnnnnnnnnnnnnnncagcaacagagatgaaagtgtggctttttagttttgtgaatggatgatcacaaagnnnnnnnnnnnnnnnnnnnnnnnnnnnnnnnnnnnnnnnnnnnnnnatgaagcgcattgcatttccatagcactgaagtaccagtttccattcctgggctgagattgtttttcccgtggttgtattgttctgatttcacgtacaccagagtaactga

SEQ ID NO: 2887 - DNA, 451 bp, Homo sapiens
  misc_feature (124)..(125): n includes a, c, g, or t, or contains no nucleotide
  misc_feature (215)..(215): n includes a, c, g, or t, or contains no nucleotide
  misc_feature (222)..(222): n includes a, c, g, or t, or contains no nucleotide
  misc_feature (234)..(235): n includes a, c, g, or t, or contains no nucleotide
ggcttccagaggaggctgtgcacccctgcaaaggctcctgccctgcgtccagcctatccgcggggactccacgtgcaccccctcctcattgtccttgtctagggccgcggcggcaaggtccttnntcccatggcgtgactccagggtgcaggagcctgggctgagcaggtggagtagggtgagctccgccaagaacccagcgagagtggcgcccnagggcgncacaggaggccnnatttaacatgtcaatcatctgaaagattttatggcatcttttttttgacatcttataatatctataatgtttattatatcttgtgatataattattaacaccacttcagtgtgattattatgattatttttataccaacacatcttcaattattaatattcccagttgctagagaaaactgaaaactactagttttgaaagcctcacttctgccaa

SEQ ID NO: 2888 - DNA, 487 bp, Homo sapiens
tatgttatagcaatactcttactcaaaagaagaaatttcctaactctatcagataaactcatctttagtataaataagcattatttgcaggttgcctacaggtggacttttagtaagtaacctaacccatgtttcagcttctaaatctcgaaaatgagcaaggtacaggtacagtagcacatttttaggtgattcttagtaactccagtagccttcattagttaaaaacattattattttttgcatgctgcttcgactctaaatatcttgttttccctgtctttttggtttactacttccccagattcagaacagaggagtaactaggggatctgattttagaggcctaattttctgttcatggactgttaaaagtaaaaccaaactttcaaaagggataaacctaaatatttacttgttatcattagagagggaacatcaaatgctggcactatatacatacgatcagcctgattatgatatcaca

SEQ ID NO: 2889 - DNA, 427 bp, Homo sapiens
  misc_feature (106)..(107): n includes a, c, g, or t, or contains no nucleotide
  misc_feature (152)..(170): n includes a, c, g, or t, or contains no nucleotide
  misc_feature (207)..(207): n includes a, c, g, or t, or contains no nucleotide
tagccaccggtgtctccttctacatccgcctctgcgccggctgccacccgcgctccctccgccgccgccgccttgctgctgctcaaagctgctgccgccccttggnntaaaaggttttcaaatggaacattttgatgcatcacttagtaccnnnnnnnnnnnnnnnnnnngccctcgaggtatcagcagctctgtcctcagaatggntcccccacttcacacagttgtaggatggctacagcagctccaagcagcacattcagaggaagaagaaaaaatgtttcatttgtgtggttttaagcataaagaagttgtttcccagagctctttgccagctgtcatccctcaaaactcactggccacaattgcttcacatgcccctgcctgaaccagccaccagagggggttaggaccaccacagattgac

SEQ ID NO: 2890 - DNA, 209 bp, Homo sapiens
  misc_feature (124)..(152): n includes a, c, g, or t, or contains no nucleotide
ctgtatcaccactggggttccgtggactcccacttccaagaggtggctcagaaattccaaggtgtgcgactgctgcgacaagaccccatcgaatgccttttctcttttatctgttcctccaacnnnnnnnnnnnnnnnnnnnnnnnnnnnnnggagcggctgtgccaggcttttggacctcggctcatccagcttgatgatgtcaccta

SEQ ID NO: 2891 - DNA, 531 bp, Homo sapiens
  misc_feature (88)..(89): n includes a, c, g, or t, or contains no nucleotide
  misc_feature (113)..(113): n includes a, c, g, or t, or contains no nucleotide
  misc_feature (240)..(255): n includes a, c, g, or t, or contains no nucleotide
  misc_feature (261)..(261): n includes a, c, g, or t, or contains no nucleotide
  misc_feature (293)..(293): n includes a, c, g, or t, or contains no nucleotide
  misc_feature (312)..(313): n includes a, c, g, or t, or contains no nucleotide
  misc_feature (355)..(355): n includes a, c, g, or t, or contains no nucleotide
  misc_feature (479)..(493): n includes a, c, g, or t, or contains no nucleotide
tgcaaatgatacactactgctgcagctcacaaacacctctgcatattacatgtacctcctcctgctcctcaagagtgtggtctatttnnccatcatcacctgctgtctgcttngaagaacggctttctgctgcaatggagagaaatcataacagacggtggcacaaggaggccatcttttcctcatcggttattgtccctagaagcgtcttctgaggatctagttgggctttctttctgnnnnnnnnnnnnnnnngttctnatgtgtgtactattctatcattattgtataanggttttcaaaccagtgggnncacagagaacctcactctgtaataacaatgaggaatagccanggcgatctccagcaccaatctctccatgttttccacagctcctccagccaacccaaatagcgcctgctatagtgtagacatcctgcggcttctagccttgtccctctcttagtgttctttaatnnnnnnnnnnnnnnnaagcctttcattttacacgccctgaagcagtcttcttt

SEQ ID NO: 2892 - DNA, 321 bp, Homo sapiens
agcatttatatcatcctcaaccctaaatggacataagagaattcatactagagagaaaccctacaaatgtgaagaatgtggcaaagcatttagccaatcttcaaccctaactagacataagaggttgcacaccggagagaaaccctacaaatgtggagaatgtggcaaagcctttaaagagtcctcagctcttactaaacataagataattcacactggagagaaaccctacaaatgtgaaaaatgttgcaaagcctttaaccagtcttcaatccttactaaccataagaaaattcatactatcacacctgtaatcccact

SEQ ID NO: 2893 - DNA, 314 bp, Homo sapiens
  misc_feature (41)..(41): n includes a, c, g, or t, or contains no nucleotide
  misc_feature (45)..(70): n includes a, c, g, or t, or contains no nucleotide
  misc_feature (144)..(158): n includes a, c, g, or t, or contains no nucleotide
ccgacgagagtgctggggaataaaaaggggatcttcactcnggcnnnnnnnnnnnnnnnnnnnnnnnnnncttttgcgagagagatactggaagattgccaatgaaaccaggtatccccactcagtagccaagtcacaatgttnnnnnnnnnnnnnnnttacttgagcaagactgataccacctgcgtgtcccttcctccccgagtcagggcgacttccacagcagcagaacaagtgcctcctggactgttcacggcagaccagaacgtttctggcctgggttttgtggtcatctattctagcagggaacacta

SEQ ID NO: 2894 - DNA, 237 bp, Homo sapiens
  misc_feature (104)..(122): n includes a, c, g, or t, or contains no nucleotide
  misc_feature (126)..(126): n includes a, c, g, or t, or contains no nucleotide
  misc_feature (177)..(191): n includes a, c, g, or t, or contains no nucleotide
  misc_feature (193)..(193): n includes a, c, g, or t, or contains no nucleotide
cggaggcgaacctgacttccatgcggttgaaccctacacgaagaaagaactttctgctgttactttccctgacatcattcgcaattacaaagtcatggctgctnnnnnnnnnnnnnnnnnnncccntgaagtatctgtatccaaatattgacaaagaccatgcctttggaaagtatnnnnnnnnnnnnnnngnaagcaccagagccaatggaacttgatggccctaaaggaactgga

SEQ ID NO: 2895 - DNA, 434 bp, Homo sapiens
  misc_feature (128)..(188): n includes a, c, g, or t, or contains no nucleotide
  misc_feature (369)..(383): n includes a, c, g, or t, or contains no nucleotide
tacctgctggcacagacactggcctctgagaggtcactgaccgctcacctgcagcttgtcccgctgccttgtgtgggacatgagaaggtcttccgtggatagcatgcttctgggcagctctgctgtgnnnnnnnnnnnnnnnnnnnnnnnnnnnnnnnnnnnnnnnnnnnnnnnnnnnnnnnnnnnnntttcgatggcctggaaggtcagacaattgtaacaatatggagagattaacattcaccaacatgctgtcttgatggaaagacaacagatttagttgataaaattagtgaataatcacctcaccttggaaatggtatagaggacctgattctgatagggagattaaaaagaggctggttttannnnnnnnnnnnnnnctagttgaccaaatgactttggataagtcacctctttacactgaacgtcag

SEQ ID NO: 2896 - DNA, 147 bp, Homo sapiens
gcctggatgattaccttctacgtccgcttcttcctcacttatgtgccactattggggctgaaagccttcctgggccttttcttcatagtcaggttcctggaaagcaactggtttgtgtgggtgacacagatgaaccatattcccatg

SEQ ID NO: 2897 - DNA, 276 bp, Homo sapiens
  misc_feature (51)..(51): n includes a, c, g, or t, or contains no nucleotide
  misc_feature (53)..(90): n includes a, c, g, or t, or contains no nucleotide
  misc_feature (112)..(140): n includes a, c, g, or t, or contains no nucleotide
  misc_feature (142)..(143): n includes a, c, g, or t, or contains no nucleotide
  misc_feature (145)..(145): n includes a, c, g, or t, or contains no nucleotide
  misc_feature (152)..(167): n includes a, c, g, or t, or contains no nucleotide
  misc_feature (242)..(244): n includes a, c, g, or t, or contains no nucleotide
  misc_feature (246)..(246): n includes a, c, g, or t, or contains no nucleotide
  misc_feature (248)..(249): n includes a, c, g, or t, or contains no nucleotide
  misc_feature (251)..(251): n includes a, c, g, or t, or contains no nucleotide
atttgtaattaattctaccatcttgcaataaagtgacaattgaatgaaaanannnnnnnnnnnnnnnnnnnnnnnnnnnnnnnnnnnnnntttgtcatatgggtaaaaattnnnnnnnnnnnnnnnnnnnnnnnnnnnnnannanaccattnnnnnnnnnnnnnnnnctggctgataggttatgagatatgtaaagctttctagtactcttaaaataactaaatggagtattatatatcaannnanannantgactttattattttagtagtatgc

SEQ ID NO: 2898 - DNA, 282 bp, Homo sapiens
ccagttggttttcttctgactgcacttgttctcatagtagtaaaatgctatgcgcatttataccttgcataagtcctcattctaccacatgttaaccctctagctgataatgcaaacactaactgggggattttatttataagggctctagaaaaaacgagttattcacaccagcatcatcttaactaacattctgaactagttagtgcagcttttcattgtgttgtgtggttggtctcataactaggttgagtttttctcctctgctgaggaaacagtacc

SEQ ID NO: 2899 - DNA, 537 bp, Homo sapiens
  misc_feature (27)..(27): n includes a, c, g, or t, or contains no nucleotide
  misc_feature (29)..(29): n includes a, c, g, or t, or contains no nucleotide
  misc_feature (32)..(32): n includes a, c, g, or t, or contains no nucleotide
  misc_feature (36)..(36): n includes a, c, g, or t, or contains no nucleotide
  misc_feature (42)..(42): n includes a, c, g, or t, or contains no nucleotide
  misc_feature (105)..(107): n includes a, c, g, or t, or contains no nucleotide
  misc_feature (110)..(112): n includes a, c, g, or t, or contains no nucleotide
  misc_feature (115)..(118): n includes a, c, g, or t, or contains no nucleotide
  misc_feature (120)..(127): n includes a, c, g, or t, or contains no nucleotide
  misc_feature (129)..(129): n includes a, c, g, or t, or contains no nucleotide
  misc_feature (131)..(131): n includes a, c, g, or t, or contains no nucleotide
  misc_feature (133)..(134): n includes a, c, g, or t, or contains no nucleotide
  misc_feature (136)..(141): n includes a, c, g, or t, or contains no nucleotide
  misc_feature (144)..(146): n includes a, c, g, or t, or contains no nucleotide
  misc_feature (161)..(178): n includes a, c, g, or t, or contains no nucleotide
actgtgtctcatggatttggcactagncnaangcgnaggcancccttactggcttacctcctcatggcagcctactctccttgagtgtatgagtagccagggtannnggnnnaannnnannnnnnnnanananncnnnnnnaannngggcttaatggagtnnnnnnnnnnnnnnnnnnatgcagttagctgaagaattgaaaagtttttgtttggagacgtttataaacagaaatggaaagcagagttttcattaaatccttttaccttttttttttcttggtaatcccctaaaataacagtatgtgggatattgaatgttaaagggatatttttttctattatttttataattgtacaaaattaagcaaatgttaaaagttttatatgctttattaatgttttcaaaaggtattatacatgtgatacattttttaagcttcagttgcttgtcttctggtactttctgttatgggcttttggggagccagaagccaatctacaatctctttttgtttgccaggacatgcaataaaat

SEQ ID NO: 2900 - DNA, 577 bp, Homo sapiens
  misc_feature (28)..(42): n includes a, c, g, or t, or contains no nucleotide
  misc_feature (145)..(145): n includes a, c, g, or t, or contains no nucleotide
  misc_feature (194)..(194): n includes a, c, g, or t, or contains no nucleotide
  misc_feature (220)..(220): n includes a, c, g, or t, or contains no nucleotide
  misc_feature (239)..(239): n includes a, c, g, or t, or contains no nucleotide
  misc_feature (301)..(301): n includes a, c, g, or t, or contains no nucleotide
  misc_feature (306)..(306): n includes a, c, g, or t, or contains no nucleotide
  misc_feature (319)..(319): n includes a, c, g, or t, or contains no nucleotide
  misc_feature (324)..(324): n includes a, c, g, or t, or contains no nucleotide
  misc_feature (329)..(329): n includes a, c, g, or t, or contains no nucleotide
  misc_feature (352)..(368): n includes a, c, g, or t, or contains no nucleotide
  misc_feature (386)..(386): n includes a, c, g, or t, or contains no nucleotide
  misc_feature (447)..(462): n includes a, c, g, or t, or contains no nucleotide
cataaagactgaccttgaattcagcctnnnnnnnnnnnnnnnatcactcagaactattgattcaaagttgggtagtgaatcaggaagccagtaactgactaggagaagctggtatcagaacagcttccctcactgtgtacagaancgcaagaagggaataggtggtctgaacgtggtgtctcactctgaaaagncaggaatgtaagatgatgaaagagancaatgtaatactgttggtnccaaaagcatttaaaatcaatagatctgggattatgtggccttaggtagctggttgtacatnctttnccctaaatcgatnccatngttanccacatagtagttttagtttagnnnnnnnnnnnnnnnnngtgtttactatgtgcaanggtattgaagttcttatgaccacagatcatcagtactgttgtctcatgtaatgctaaaacnnnnnnnnnnnnnnnntgcattgttaaaaatgatgtgtgaaatagaatgagtgctatggtgttgaaaactgcagtgtccgttatgagtgccaaaaatctgtcttgaaggcagctacactttgaagtggtct

SEQ ID NO: 2901 - DNA, 414 bp, Homo sapiens
  misc_feature (60)..(60): n includes a, c, g, or t, or contains no nucleotide
  misc_feature (251)..(265): n includes a, c, g, or t, or contains no nucleotide
cattgtctctgagctaatgtttatatttttccattcaggcaccgaaatagttaatatttnaaataagtcttcaaaagaaaacataagagattattgagttcttgggactggatcctttatttcataagttcagatcatcttaaatgaaaatgccatgattatctgcagttaagtagatgacagctattctacatcagacttgatttttgtcagctaattacataattggtaagctataattgaaaccttannnnnnnnnnnnnnntaactcctttttgattcatgtttgtagtcatgttgtcaacagaggcaaagttaagcttgatgatggttaaaatcggtttgatagcaccatgggacatttttctaacaaaaataaatgcatgaagagacatagccttttagttttgctaa

SEQ ID NO: 2902 - DNA, 543 bp, Homo sapiens
  misc_feature (96)..(96): n includes a, c, g, or t, or contains no nucleotide
  misc_feature (103)..(103): n includes a, c, g, or t, or contains no nucleotide
  misc_feature (148)..(148): n includes a, c, g, or t, or contains no nucleotide
attcttagtccttgcctgtgagatatgaggtcttacaggagacctcagagctcccagcccttctcctcctgctaacccttctcacaccctcaaganggagttnagaaaagaggtccttgtcattctcacctcttatggaaaatggaanaagaaataatcatatcctttcttcccacccttctcctgttatttaggatttctgacaaagctggcttgagattggtcacttagagccgactgtctcctctgccttttgtttttcagcttcagagacagatccaatatagtcccagggacctgggtctctgggagaggaaggaagagggagggagcaaagagattggggtatgtcccctgtagtacactcttacctcttacttcctagactttgatttctccggcagcccagatgttcagttctcttggcccctctctaccccttactgggatctggttttcattttccggtccttttgccatacacagttacagagatcagtcaaatccataccaccactgagatctcatttattgccacagatg

SEQ ID NO: 2903 - DNA, 471 bp, Homo sapiens
  misc_feature (262)..(285): n includes a, c, g, or t, or contains no nucleotide
  misc_feature (318)..(381): n includes a, c, g, or t, or contains no nucleotide
  misc_feature (398)..(398): n includes a, c, g, or t, or contains no nucleotide
  misc_feature (412)..(412): n includes a, c, g, or t, or contains no nucleotide
  misc_feature (421)..(423): n includes a, c, g, or t, or contains no nucleotide
  misc_feature (436)..(436): n includes a, c, g, or t, or contains no nucleotide
  misc_feature (446)..(446): n includes a, c, g, or t, or contains no nucleotide
ttcgtcttcatcgtggacctgctgcagatgctggagatgaacatggccatcgccttccccgcagcgcccctgctgaccgtcatcctggccctcgtcgggatggaggccatcatgtcggagttcttcaacgacaccaccaccgccttctacatcatcctcatcgtgtggctcgcggaccagtatgacgccatctgctgccacaccagcaccagcaagcggcattggctgcggttcttctatctctaccacttcgccttctatnnnnnnnnnnnnnnnnnnnnnnnncagtatagcagcctggccctggtcacctcctgnnnnnnnnnnnnnnnnnnnnnnnnnnnnnnnnnnnnnnnnnnnnnnnnnnnnnnnnnnnnnnnncaggtccgcatccaggnagatgctgcttcanggcgccgcnnntgggccccggganccccacggcngctgcccgatgacatgaacaacaac

SEQ ID NO: 2904 - DNA, 214 bp, Homo sapiens
ctgccatgtcttgtcttattccctgaggctcccttgaactcaggactgtcctcgaattgtgggtggttttttgtcttctgttgtccacagccagagcttagtggatgggtgtgtgtgtgtgtgtgggggtggtgatcaggcaggttcataaatttccttggtcatttctgccctctagccacatccctctgttcctcactgtggggattactac

SEQ ID NO: 2905 - DNA, 389 bp, Homo sapiens
  misc_feature (302)..(302): n includes a, c, g, or t, or contains no nucleotide
  misc_feature (340)..(340): n includes a, c, g, or t, or contains no nucleotide
tgtcccgggagagcatcttcaacaaaatgaacagctctaacctggcctgtgtcttcgggctgaatttgatctggccatcccagggggtctcctccctgagtgcccttgtgcccctgaacatgttcactgaactgctgatcgagtactatgaaaagatcttcagcaccccggaggcacctggggagcacggcctggcaccatgggaacaggggagcagggcagcccctttgcaggaggctgtgccacggacacaagccacgggcctcaccaagcctaccctacctccgagtcccctgatggcngccagaagacgtctctagtgttgcgaacactctgtatntttcgagctacctcccacacctgtctgtgcacttgtatgttttgtaaac

SEQ ID NO: 2906 - DNA, 378 bp, Homo sapiens
  misc_feature (43)..(43): n includes a, c, g, or t, or contains no nucleotide
  misc_feature (65)..(65): n includes a, c, g, or t, or contains no nucleotide
  misc_feature (78)..(79): n includes a, c, g, or t, or contains no nucleotide
  misc_feature (82)..(83): n includes a, c, g, or t, or contains no nucleotide
  misc_feature (181)..(181): n includes a, c, g, or t, or contains no nucleotide
  misc_feature (183)..(183): n includes a, c, g, or t, or contains no nucleotide
  misc_feature (189)..(189): n includes a, c, g, or t, or contains no nucleotide
  misc_feature (203)..(204): n includes a, c, g, or t, or contains no nucleotide
  misc_feature (210)..(210): n includes a, c, g, or t, or contains no nucleotide
  misc_feature (214)..(214): n includes a, c, g, or t, or contains no nucleotide
  misc_feature (223)..(223): n includes a, c, g, or t, or contains no nucleotide
  misc_feature (225)..(225): n includes a, c, g, or t, or contains no nucleotide
  misc_feature (229)..(229): n includes a, c, g, or t, or contains no nucleotide
  misc_feature (239)..(239): n includes a, c, g, or t, or contains no nucleotide
  misc_feature (245)..(245): n includes a, c, g, or t, or contains no nucleotide
  misc_feature (282)..(282): n includes a, c, g, or t, or contains no nucleotide
  misc_feature (295)..(295): n includes a, c, g, or t, or contains no nucleotide
  misc_feature (326)..(326): n includes a, c, g, or t, or contains no nucleotide
ccctctgtgttgtgattgggttgtttcctgccctgcctggggntgcttctcgtcaccaagccctnggtcctgcggcanntgnncacccctaccatccataccactgtgctgaccgctcagcctgaagagcagagaatgccatgggtgggactgtgggggtcggatcgtggggttgttggcnanagggcnaaccctgggccccnnacaccntgtnggacaggcnanacanccagattgtnccaggnagcaggagctgctgggactgcgctggccccggacctnagtgggccttctncctggctgctgagatgtcgtctgtgactggncctggctggagggggagtgttgacaacccaaagctgttctccagtctgggga

SEQ ID NO: 2907 - DNA, 250 bp, Homo sapiens
  misc_feature (29)..(43): n includes a, c, g, or t, or contains no nucleotide
tactattgagcagtgccggcgagagggcnnnnnnnnnnnnnnncaggagcagaagaatgaaggctgccaggtgtatggcttcttggaagtcaataaggtggccggaaacttccactttgcccctgggaagagcttccagcagtcccatgtgcacgtccatgacttgcagagctttggccttgacaacatcaacatgacccactacatccagcacctgtcatttggggaggactatccaggcattgtgaac

SEQ ID NO: 2908 - DNA, 238 bp, Homo sapiens
tttcaacctaataagtaactgtgagatgtacagaaaggtgttcttacatgaagaagggtgtgaaggctgaacaatcatggatttttctgatcaattgtgctttaggaaattattgacagttttgcacaggttcttgaaaacgttatttataatgaaatcaactaaaactatttttgctataagttctataaggtgcataaaacccttaaattcatctagtagctgttcccccgaacag

SEQ ID NO: 2909 - DNA, 327 bp, Homo sapiens
cttctcttttcttgatgccttccggctgaaaccctctctgctccatatgccctaaacttatctgggaaggctggggaagtaggctctgggtccatgcctaactctgtaccgttttattcctcaaggcctatagcctgtcactccttgaagccttctctgcctgtccctccgatccttgtccaccgtctatttattgcccaatttattgtttatacggatgactgggaggcactgcaccacaacgtaggaccctggctcccctttccttgggtccttgtgttccttgcccctgtccaaccctggacagttggctctacctcagtaaca

SEQ ID NO: 2910 - DNA, 460 bp, Homo sapiens
  misc_feature (43)..(59): n includes a, c, g, or t, or contains no nucleotide
  misc_feature (179)..(194): n includes a, c, g, or t, or contains no nucleotide
  misc_feature (350)..(390): n includes a, c, g, or t, or contains no nucleotide
agtagcccagaccacggcagggcatgacctggggagggcaggnnnnnnnnnnnnnnnnnaggatgggcagaggggactcctcccggcttccaaataccactctgtccggctcccccagctctcactcagcccgggaagcaggaagccccttctgtcactggtctcagacacaggccccnnnnnnnnnnnnnnnngggctcagctggaccctccccgggctcgagggcagggactcgcgcccacggcacctctgggagctgggatgataaagatgaggcttgcggctgtggcccgctggtgggctgagccacaaggcccccgatggcccaggagcagatgggaggaccccnnnnnnnnnnnnnnnnnnnnnnnnnnnnnnnnnnnnnnnnnagccgggaatcggggcctgctgctcctgctggcctgaagaatctgtggggtcagcactgtactccgttgc

SEQ ID NO: 2911 - DNA, 499 bp, Homo sapiens
  misc_feature (210)..(238): n includes a, c, g, or t, or contains no nucleotide
ggagatgccctacctgaaatgccctcttcacaccgtcctgaaactgacgcctgtcgcttatggctgccgtgtggaatccatctacctgaacgtggagtccgtctgcacacaccgggagaggtcagaggatgcaaagaagggacctaacccgctcatgagacgcaatagtgtcaccccgctagccagccccgaacccaccaaaaagcctcnnnnnnnnnnnnnnnnnnnnnnnnnnnnntccacctcggccgccctgcccagctgcctgcccccggaggtgcccacgcagctgcctggacaaaacatgaaaggctcccggagcagcgctgactcctccaggaaacactgaggcagacgtgtcggttccattccatttccatttctgcagcttagcttgtgtcctgccctccgcccgaggcaaaacgtatcctgaggacttcttccggagagggtggggtggagcagcgggggagccttggccgaagagaaccatgcttgg

SEQ ID NO: 2912 - DNA, 239 bp, Homo sapiens
cccttgctagcttgtgagaagaatgagttgatgacatgctccataccagtggctagatggagtattaaggtggagcagaaaagaagtgagaacatcttgattcccctttcttttacttgatggtgtttatgaacatgccgtagtgcctttatggccagtttgagtcctgcctactttgacttttacgttcccattcctgtgttaccaccttcctcccgatttgttcacctattttgtgc

SEQ ID NO: 2913 - DNA, 449 bp, Homo sapiens
  misc_feature (40)..(99): n includes a, c, g, or t, or contains no nucleotide
  misc_feature (285)..(285): n includes a, c, g, or t, or contains no nucleotide
  misc_feature (289)..(289): n includes a, c, g, or t, or contains no nucleotide
  misc_feature (291)..(291): n includes a, c, g, or t, or contains no nucleotide
  misc_feature (293)..(294): n includes a, c, g, or t, or contains no nucleotide
tcctgttacgagatgaatctcatttcaccaaaattaaatnnnnnnnnnnnnnnnnnnnnnnnnnnnnnnnnnnnnnnnnnnnnnnnnnnnnnnnnnnnnaagacctcaccacttaaggctccacagtggcttactcagctgaactctaggttactactctttactttgttcacccattggggggtgcagtttttttaaaatgttgggagatggccattctaactactgttgaatgtctctgttttgggaaggtataacaagaaataaaaaagaatatatatgaanggananannggttatctcctcccatatggttgtgcttatcctcttatggcttacaaatgaatatttggaggtttgctttcacaatgatttcccatcaacaaatatttttagtaggatttttcctgtttctgttagtccttgcagtactcataaatgttttaagc

SEQ ID NO: 2914 - DNA, 590 bp, Homo sapiens
  misc_feature (34)..(53): n includes a, c, g, or t, or contains no nucleotide
  misc_feature (427)..(450): n includes a, c, g, or t, or contains no nucleotide
  misc_feature (457)..(488): n includes a, c, g, or t, or contains no nucleotide
cagcttatcaatgtggtggtgatcagtgtggccnnnnnnnnnnnnnnnnnnnncacgctgcttgtctgctgcagtgctcttcagaagcgctgccgaaagtgcttcaacaaggactccactgaggccacagttacctacgtcaacctagagagactgggctacagcgaggacggcttggaggagctgtcccggcacagtgtcagcgaggctgacaggcttctctcagctcgttccagtgtggactttcaggcctttggagtcaaagggggcaggagaatcaatgagtacttctgctgagggatatgcctccgcaactcacacacctgcctgcccacgctccttctttagctctgacacctgagtacacgatcacccactcttacctgctcgggtacctgcttactcagatacttacacacaacaacannnnnnnnnnnnnnnnnnnnnnnnaccgctnnnnnnnnnnnnnnnnnnnnnnnnnnnnnnnnagtgttctaagtgctaaattcttgtaacaatcatttgcagcaggcatcactattctctccatttccctggggtggggggttaagaaacttgcctgtatcagt

SEQ ID NO: 2915 - DNA, 511 bp, Homo sapiens
caaacacatattgatagatgcaagagactcttatttagaaggcgtgggggacaagaaggatacaaggtaagtttcagtggagctcagaggacggggagatagaactgtggcacttaggggagatgacatttgctttgggcagaggcagctagccaggacacatttccactataattttacaaagttaaatttataagctagcattaagtaaagtgaagtccagctcccttgctaaaaataactagaggtaataattggtattcaggtaactcatttacagtcataatgtgttgtgaaaatttaatcttaaaaattaaatttttaaactatgtgggtctgtgaatttctttaatgtctaagaaatccagcttcataatttccatgatacaaagatcttttttcaggtggatttttacctttgttccttttgctctgatagacaaaatcagtttaggactattaaagaatgttttggaataaactgtctttttcctcaatgaatgggatgtct

SEQ ID NO: 2916 - DNA, 511 bp, Homo sapiens
  misc_feature (417)..(428): n includes a, c, g, or t, or contains no nucleotide
gggctctgtgattccagagtttagaatgtagaaatgaaatgcttagctttaccttttcttggggggtgtggaccctgccagaaatgtaattacgtatgctcaagtgcattaattgaaggcactgtgcacaccattggactgctgaccacagttaaacatttccagtaaaatttcgtaactggtcacagctcattcataatcactgtattttttgaccctgataaagacaattattttgatggtgttctggtactgtaattggtatcctttaaattatttaaaacttttgggtgtggggcaggcagagagggatggtgtccagagatacatcacactttacatcctatcttactgtcctctgtttttcttaccctccttacatcctttttgttaaaaataaaaagcattgtagctgtnnnnnnnnnnnntattttaacaaagaatgaatgattacagtgtgcatcatttagaaacctttcaaatgttaccttcttgaattgccctagaaaag

SEQ ID NO: 2917 - DNA, 481 bp, Homo sapiens
agacagatctcatgcaggacaccagcagactcctggacccctatatacgtatccaaggcctggatgttcctaaactgagagagcactgcagggagcgccccggggccttccccagtgaggagaccctgagggggctgggcaggcggggcttcctgcagaccctcaatgccacactgggctgcgtcctgcacagactggccgacttagagcagcgcctccccaaggcccaggatttggagaggtctgggctgaacatcgaggacttggagaagctgcagatggcgaggccgaacatcctcgggctcaggaacaacatctactgcatggcccagctgctggacaactcagacacggctgagcccacgaaggctggccggggggcctctcagccgcccacccccacccctgcctcggatgcttttcagcgcaagctggagggctgcaggttcctgcatggctaccatcgcttcatgcactcagt

SEQ ID NO: 2918 - DNA, 48 bp, Homo sapiens
ctattccaaccattctgcactggagtcgctggctctgatcccattaca

SEQ ID NO: 2919 - DNA, 490 bp, Homo sapiens
  misc_feature (101)..(150): n includes a, c, g, or t, or contains no nucleotide
ctgctgtgggtcagtgtgccaccctctgcagggcagcctgtgggagaagggacagcgggttaaaaagagaaggcaagcctggcaggagggttggcacttcnnnnnnnnnnnnnnnnnnnnnnnnnnnnnnnnnnnnnnnnnnnnnnnnnnctcttcctccctccctgcagggtagggcgcctgagcctaggcggttccctctgctccacagaaaccctgttttattgagttctgaaggttggaactgctgccatgattttggccactttgcagacctgggactttagggctaaccagttctctttgtaaggacttgtgcctcttgggagacgtccacccgtttccaagcctgggccactggcatctctggagtgtgtgggggtctgggaggcaggtcccgagccccctgtccttcccacggccactgcagtcaccccgtctgcgccgctgtgctgttgtctgccgtgagagcccaatcactgcctatacc

SEQ ID NO: 2920 - DNA, 520 bp, Homo sapiens
  misc_feature (32)..(32): n includes a, c, g, or t, or contains no nucleotide
  misc_feature (266)..(334): n includes a, c, g, or t, or contains no nucleotide
  misc_feature (432)..(432): n includes a, c, g, or t, or contains no nucleotide
  misc_feature (454)..(454): n includes a, c, g, or t, or contains no nucleotide
  misc_feature (456)..(492): n includes a, c, g, or t, or contains no nucleotide
ctcatagttgtgttaagcttgcgtagaattgncaggtctctgtacgggccagtttctctgccttcttccaggatcaggggttagggtgcaagaagccatttagggcagcaaaacaagtgacatgaagggagggtccctgtgtgtgtgtgtgctgatgtttcctgggtgccctggctccttgcagcagggctgggcctgcgagacccaaggctcactgcagcgcgctcctgacccctccctgcaggggctacgttagcagcccagcnnnnnnnnnnnnnnnnnnnnnnnnnnnnnnnnnnnnnnnnnnnnnnnnnnnnnnnnnnnnnnnnnnnnntgattattttctgctacagacctggtacactctgattttagataaagtaagcctaggtgttgtcagcaggcaggctggggaggccagtgttgtgggcntcctgctgggactgagaaggcncnnnnnnnnnnnnnnnnnnnnnnnnnnnnnnnnnnnnngcctcctggtctcttcaccactgtagtt

SEQ ID NO: 2921 - DNA, 117 bp, Homo sapiens
actcagcctcattcctgctttaaaatctctcggccacctttgatgaggggactgggcagttctagacagtcccgaagttctcaaggcacaggtctcttcctggtttgactgtcctta

SEQ ID NO: 2922 - DNA, 532 bp, Homo sapiens
  misc_feature (63)..(84): n includes a, c, g, or t, or contains no nucleotide
  misc_feature (209)..(253): n includes a, c, g, or t, or contains no nucleotide
  misc_feature (261)..(355): n includes a, c, g, or t, or contains no nucleotide
  misc_feature (411)..(507): n includes a, c, g, or t, or contains no nucleotide
ctgagcagtgtttcggcgatggcttgaactgggctggttgctccatcattgtcctgctgggcnnnnnnnnnnnnnnnnnnnnnnttcgacttctgttaccacctgctaaaagtgcagaggcaggacgggaaggatgaaatcattaagaatgtgcccctgaagaagatggccgaccggatcaggaagtatcagatcttgaacaatgaggnnnnnnnnnnnnnnnnnnnnnnnnnnnnnnnnnnnnnnnnnnnnngttccacnnnnnnnnnnnnnnnnnnnnnnnnnnnnnnnnnnnnnnnnnnnnnnnnnnnnnnnnnnnnnnnnnnnnnnnnnnnnnnnnnnnnnnnnnnnnnnnaagagaagcaggagagagaaagccacagccagcctgccataggatccaactggacnnnnnnnnnnnnnnnnnnnnnnnnnnnnnnnnnnnnnnnnnnnnnnnnnnnnnnnnnnnnnnnnnnnnnnnnnnnnnnnnnnnnnnnnnnnnnnnnnggtttctccatagcataaatgaaaa

SEQ ID NO: 2923 - DNA, 371 bp, Homo sapiens
  misc_feature (68)..(83): n includes a, c, g, or t, or contains no nucleotide
  misc_feature (115)..(116): n includes a, c, g, or t, or contains no nucleotide
  misc_feature (136)..(151): n includes a, c, g, or t, or contains no nucleotide
  misc_feature (153)..(180): n includes a, c, g, or t, or contains no nucleotide
  misc_feature (189)..(189): n includes a, c, g, or t, or contains no nucleotide
gctctaccccaggaaaatgtgagctcgttttcctgctcggcatgtgctccccctaaggctctgctccnnnnnnnnnnnnnnnngttccttctcagcctgagagggggcccttcgnnctcaggcatgactcagcccnnnnnnnnnnnnnnnngnnnnnnnnnnnnnnnnnnnnnnnnnnnncttgggtcngtccccttttcccaggtactgccttacaaagctgtggccaggaagtggccggtataaaggatgcccaaggtctttgtacgtgtgtaggagttagcgtgtttgatattgttaatataataataattattttttagagtactgcttttgtatgtatgttgaacaggatccaggtttttatagct

SEQ ID NO: 2924 - DNA, 540 bp, Homo sapiens
  misc_feature (58)..(72): n includes a, c, g, or t, or contains no nucleotide
  misc_feature (287)..(317): n includes a, c, g, or t, or contains no nucleotide
  misc_feature (408)..(409): n includes a, c, g, or t, or contains no nucleotide
  misc_feature (413)..(420): n includes a, c, g, or t, or contains no nucleotide
  misc_feature (429)..(429): n includes a, c, g, or t, or contains no nucleotide
  misc_feature (431)..(439): n includes a, c, g, or t, or contains no nucleotide
  misc_feature (490)..(514): n includes a, c, g, or t, or contains no nucleotide
tgtttatcatctaatggctgtaaactgtagtactagaataaaaaaaatggaaaatcannnnnnnnnnnnnnnggttcaccttcatcttacttttctttagaatttgtttcttctccatcttttcccccccataatttcttcacctgtgtcctgcaaagtttttttcctctctctgtctctctgtgcattcttccttgggttattttattttgtgttgtgaacttggtcttcttccccaccatggcttttgttttttatcacaagttcatgtggctcacatccagatnnnnnnnnnnnnnnnnnnnnnnnnnnnnnnntgctgagttggacaaccggctcttcaaacaggactttggagacaagatcaacagtctgcagctggaagtcgaggagctcaccaggcagcgnngaannnnnnnnagcttgagntnnnnnnnnnacagggtggtcatgggtaattcttagggtagacagcaagaaaaggggtctnnnnnnnnnnnnnnnnnnnnnnnnngtctttgcaatgtcctttctctggaa

SEQ ID NO: 2925 - DNA, 575 bp, Homo sapiens
  misc_feature (38)..(38): n includes a, c, g, or t, or contains no nucleotide
  misc_feature (52)..(52): n includes a, c, g, or t, or contains no nucleotide
  misc_feature (58)..(63): n includes a, c, g, or t, or contains no nucleotide
  misc_feature (66)..(66): n includes a, c, g, or t, or contains no nucleotide
  misc_feature (68)..(68): n includes a, c, g, or t, or contains no nucleotide
  misc_feature (89)..(89): n includes a, c, g, or t, or contains no nucleotide
  misc_feature (121)..(121): n includes a, c, g, or t, or contains no nucleotide
  misc_feature (148)..(148): n includes a, c, g, or t, or contains no nucleotide
  misc_feature (379)..(393): n includes a, c, g, or t, or contains no nucleotide
  misc_feature (408)..(408): n includes a, c, g, or t, or contains no nucleotide
ctcttaggtttcattacgaatgtggaatatcagagtgngggaaggcccaggngagggnnnnnnttntntttcttaccccctctggaatnccaaaggcaaggtactaggtgacctcctggtnccccaagaaaatgtgatttattctganggcgaacagccaagggaggactagtctggagcacgctcggccgtcctggcaggagctgagcctcaggtgtctggcggtgccccagcagccctggattcacccaacaccagaatcccacttttctaaatccacctgttgttctgagcacctctgaacccgcagcttcggcaaaaggagtctgtaccaagctgcttctggatgaccaacactggagactctggccttaccatnnnnnnnnnnnnnnnctgaagtctggaacnaattttgagaagtttttttctcaacacttttgtgtttctaacactgtatcttgactgtgtaaataccaacaaggctgtaaataaatgcagatgtagataccttctagaaaaaaaaaagcataaaaacaaaaccagaagtgatcccgtgtagccttcgttgacaaata

SEQ ID NO: 2926 - DNA, 563 bp, Homo sapiens
  misc_feature (63)..(63): n includes a, c, g, or t, or contains no nucleotide
  misc_feature (281)..(324): n includes a, c, g, or t, or contains no nucleotide
  misc_feature (446)..(476): n includes a, c, g, or t, or contains no nucleotide
cttctgttcagtaagaatcatgtcttactgatctaaccctaaatccaactcatttatactttnatttttagttcagtttaaaatgttgataccttccctcccaggctccttaccttggtcttttccctgttcatctcccaacatgctgtgctccatagctggtaggagagggaaggcaaaatctttcttagttttctttgtcttggccattttgaattcatttagttactgggcataacttactgctttttacaaaagaaacaaacattgtctgtacaggnnnnnnnnnnnnnnnnnnnnnnnnnnnnnnnnnnnnnnnnnnnnttttaagctttctaccttcttttcctccgaccgtccccttccctcacatgccatccagtgagaagacctgctcctcagtcttgtaaatgtatcttgagaggtaggagcagagccactatctnnnnnnnnnnnnnnnnnnnnnnnnnnnnnnngtgggaaaactataaactctcttgttacagccccgccaccccttgctgtgtgtatatatataatactttgtccttcatatgtgaaag

SEQ ID NO: 2927 - DNA, 462 bp, Homo sapiens
agaatactttctagctgctttgtaattttttaagagtgttattttgtttttgtttttctgttctttgttgtggctcttgttttcatttttgttgtacgtgtagatctgtaaataaaattgcagtatttaaagcttaagctttcaggaaaaagaaaataagaattcagtgtgtgcatgacaactcgtgtgtatgagaaggagggatatgaaggaagatggcttgcagagtaagtcgggtggcaattgtcagggtgtgggaatttcttttcctacggggtacgtgattttgtaaaaaggaagtatttctcccaaaattgggagtaggcaaactactaatcagtttagctttgtgttgtatgctagtttaaaaaagaaaatatgtaatataatgtaaaaaaaaacaaaaaaaagcttttatgatggattttgtaaatagatttgttacagggtgacctgttctct

SEQ ID NO: 2928 - DNA, 522 bp, Homo sapiens
  misc_feature (444)..(458): n includes a, c, g, or t, or contains no nucleotide
cgggaacagagtaccctcttcaagccccggtcatgatggaggtcccagccacagggaaccatgagctcagtggtcttggaacagctcactaagtcagtccttccttagcctggaagtcagtagtggagtcacaaagcccatgtgttttgccatctaggccttcacctggtctgtggacttatacctgtgtgcttggtttacaggtccagtggttcttcagcccatgacagatgagaaggggctatattgaagggcaaagaggaactgttgtttgaattttcctgagagcctggcttagtgctgggccttctcttaaacctcattacaatgaggttagtacttttagtccctgttttacaggggttagaatagactgttaaggggcaactgagaaagaacagagaagtgacagctaggggttgagaggggccagaaaaacatgannnnnnnnnnnnnnngtgaaatctgccaccactttataaccagatggttcctttcacaaccctgggtcaaaaagagaat

SEQ ID NO: 2929 - DNA, 257 bp, Homo sapiens
  misc_feature (43)..(43): n includes a, c, g, or t, or contains no nucleotide
  misc_feature (47)..(63): n includes a, c, g, or t, or contains no nucleotide
  misc_feature (102)..(102): n includes a, c, g, or t, or contains no nucleotide
  misc_feature (131)..(161): n includes a, c, g, or t, or contains no nucleotide
  misc_feature (188)..(188): n includes a, c, g, or t, or contains no nucleotide
  misc_feature (190)..(194): n includes a, c, g, or t, or contains no nucleotide
  misc_feature (198)..(203): n includes a, c, g, or t, or contains no nucleotide
tcaaggggccaaagacgggactacgggccttcatggtcttttnccgnnnnnnnnnnnnnnnnngttggggacaaagcggggggaagcttgccccgcttggantccaggagcaccttcacagatgccaaccnnnnnnnnnnnnnnnnnnnnnnnnnnnnnnnggccaagtacttcctgcggcagatgcncnnnnnttcnnnnnngaggatcagctgggcctgtccctgctcagcctggagcagctagaatcagaggag

SEQ ID NO: 2930 - DNA, 397 bp, Homo sapiens
  misc_feature (45)..(45): n includes a, c, g, or t, or contains no nucleotide
  misc_feature (75)..(75): n includes a, c, g, or t, or contains no nucleotide
  misc_feature (80)..(80): n includes a, c, g, or t, or contains no nucleotide
  misc_feature (131)..(131): n includes a, c, g, or t, or contains no nucleotide
  misc_feature (182)..(215): n includes a, c, g, or t, or contains no nucleotide
tgctcgctctttgtctctgcctcatcttcttcatagtgaagaccnacaggaggaaagcagccaggacagcagtgngcagnaatgacacccaccctaccacagggtcagcctccccgaaacaccagaagaantccaagttacatggccccactgaaacctcaagctgttcaggtgccgccccnnnnnnnnnnnnnnnnnnnnnnnnnnnnnnnnnntccctcaactttcatgggatgaatccttccaaggacacctccaccgaatactcagaggtcaggacccagtgaggaacccacaagagcatcaggctcagctagaagatccacatcctctacaggtcggggaccaaaggctgattcttggagatttaacaccccacaggcaatgggtttataga

SEQ ID NO: 2931 - DNA, 440 bp, Homo sapiens
  misc_feature (43)..(44): n includes a, c, g, or t, or contains no nucleotide
  misc_feature (49)..(50): n includes a, c, g, or t, or contains no nucleotide
  misc_feature (53)..(54): n includes a, c, g, or t, or contains no nucleotide
  misc_feature (56)..(59): n includes a, c, g, or t, or contains no nucleotide
  misc_feature (61)..(61): n includes a, c, g, or t, or contains no nucleotide
  misc_feature (64)..(66): n includes a, c, g, or t, or contains no nucleotide
  misc_feature (68)..(182): n includes a, c, g, or t, or contains no nucleotide
  misc_feature (192)..(192): n includes a, c, g, or t, or contains no nucleotide
  misc_feature (311)..(334): n includes a, c, g, or t, or contains no nucleotide
aatgtcaaccggagcccttacaccagccctccagcatctaatnnacttnnaanntnnnntnaannnannnnnnnnnnnnnnnnnnnnnnnnnnnnnnnnnnnnnnnnnnnnnnnnnnnnnnnnnnnnnnnnnnnnnnnnnnnnnnnnnnnnnnnnnnnnnnnnnnnnnnnnnnnnnnnnnnntggcagcggncttatccttctctgttgccaaccttgccgtccgacctcctccgcccccatgcggtgaccccgtccgtgtctgtgtctgtccatacgtgtgagtccagctaaaaagacaaaacagaaccnnnnnnnnnnnnnnnnnnnnnnnntggagaaggctccgacgtctccgaagtgcagcccttgggatggcattccgttgtgtgccttattcctggagaatctgtatacggctcgcctatagaaatatagcct

SEQ ID NO: 2932 - DNA, 503 bp, Homo sapiens
  misc_feature (182)..(201): n includes a, c, g, or t, or contains no nucleotide
  misc_feature (204)..(208): n includes a, c, g, or t, or contains no nucleotide
  misc_feature (229)..(229): n includes a, c, g, or t, or contains no nucleotide
  misc_feature (231)..(231): n includes a, c, g, or t, or contains no nucleotide
  misc_feature (268)..(268): n includes a, c, g, or t, or contains no nucleotide
  misc_feature (477)..(478): n includes a, c, g, or t, or contains no nucleotide
agcacgtggaccgcttcatcccctccagagccggagccaactggagcgtgaacttccacaggattaacgagaatgagaagtctcccagtcagaaccggaaagccaaggacgccacctcagacaacggcaaagacggcctggcctactctgccctgctcaagaatgagctgctgggtgccggnnnnnnnnnnnnnnnnnnnncgnnnnngccctccatccttcgagaagntncccaggctcctctgcttctctgtctcatgctcccagnctgcacagcaggcagggagggaggcaaggcaggggagtggggcctgagctgagcactgccccctcacccccccaccaccccttcccatttcatcggtggggacgtggagagggtggggcgggctggggttggagggtcccacccaccaccctgctgtgcttgggaacccccactccccactccccacatcccaacatcctggtgtctgnncccagtggggttggcgtgcatgtgt

SEQ ID NO: 2933 - DNA, 101 bp, Homo sapiens
agtgtctctgctgaggagccactgcacttgttttttgctcctccaagtccacctaatggtgataagagtgtcttgagtatctgtcctgtgataaacccggg

SEQ ID NO: 2934 - DNA, 486 bp, Homo sapiens
  misc_feature (100)..(100): n includes a, c, g, or t, or contains no nucleotide
tcccggacgtttttcaggaggcctggttggacttgggttcctggatggtgggattgttgtacagcctctcaggagaccctgctgtcaagactgtgtgtgnggatttcccacccttagaagctctactaagacatcaacggaattagggccttcctttttgccttgtgagcgccaaggaaaagaaactatctcggtcacgtgagcgccagcgaaaagaaactgtatcagtcatccagagaccgtttattgcccaacacgttattcttgctgttggtggggtaactagccgaggaagacacagcgccttcccttcaggagttgcgtctcctctgcaggccacgatggtctgctctggagcattgggtgaacacacaggctggctgctctgggcagcgccttcactctgaccctggagaaccatttcatttcatcctggtcagtctagagtctgtgcaccaggcagtccatccactgaaggctgtgttt

SEQ ID NO: 2935 - DNA, 278 bp, Homo sapiens
  misc_feature (79)..(101): n includes a, c, g, or t, or contains no nucleotide
  misc_feature (231)..(248): n includes a, c, g, or t, or contains no nucleotide
gcagacaagatccagctcatcaataatatgctggacaaagtcaatgagatgattattggtggtggaatggcttttaccnnnnnnnnnnnnnnnnnnnnnnnggcggtaggaaacaaatgccaagtggatgtgaaatagctctccatgataatagcagattggcacttctctgtttgatgaagagggagccaagattgtcaaagacctaatgtccaaagctgagaagaatgnnnnnnnnnnnnnnnnnnctgttgactttgtcactgctgacaagtttg

SEQ ID NO: 2936 - DNA, 484 bp, Homo sapiens
  misc_feature (416)..(416): n includes a, c, g, or t, or contains no nucleotide
  misc_feature (428)..(430): n includes a, c, g, or t, or contains no nucleotide
ttcaggtgactgaggaagagccacaaaacaaaacacaacaaaaccaaaccacagaatcatctttaacccaactttttatacgatgccccagttccccataactttgcacacaagcttctgtgttcagttgaattgtaactgctttttgtatttggagagagtgactattgaacttgaaaccttttattccgggcgtcttggtagtttctggtgggattcagtgggtgagagggaagaaggggaggttggggggctccttcccttcagaacttgaagtttctcccactgcctcctctccagtggtctcccaggtgccagacccaaaagcttttcctacagtgataccctttatttttacttccccttgactcatatgttttaacatgattttaacaaactgcacttattaagaaatntgtttgccctgnnntgtttggtttcgttttgttttctttgaataaatgacatggcacctcctagcagg

SEQ ID NO: 2937 - DNA, 549 bp, Homo sapiens
  misc_feature (388)..(426): n includes a, c, g, or t, or contains no nucleotide
tgaccttttcagtcctacagagacgcatctgtggttcttttgtacttgccatagatgtaacctaaaaagttttggcatatttaggtcagcctagcggaactttttttttcatttaaatggagctgaataatggagattttgtgtctgcaaaattcctgagatcattgaaaaagtaacaagctgttccttgtttctgatacataaaattattttaagcattttatcaatcattaaaatttactgccagttgtgagtggctttttaattaacttgtctttcattgcacttcactctgcctgttttcaaggggagtaagattggtaacatttggggagactgtatctgtctacttagcgtggctgttttgagggactgtcccatcagtgannnnnnnnnnnnnnnnnnnnnnnnnnnnnnnnnnnnnnngctcagatgtgttcatcaaatactcctttcagagctgttgtgggtgtaagtgacatgatgtggccaaaaatccaaactgtgcagttgcgttgtgacaaacatgcaatgtgctgtaaaaattca

SEQ ID NO: 2938 - DNA, 283 bp, Homo sapiens
  misc_feature (59)..(59): n includes a, c, g, or t, or contains no nucleotide
  misc_feature (63)..(63): n includes a, c, g, or t, or contains no nucleotide
  misc_feature (72)..(121): n includes a, c, g, or t, or contains no nucleotide
cgtcctgtgaggagccccaagccaacaaggccacactggtgtgtctcatgaataacttnatcngggaatctnnnnnnnnnnnnnnnnnnnnnnnnnnnnnnnnnnnnnnnnnnnnnnnnnnaagaccacgccctccaaacagagcaacaacaagtacgtggccagcagctacctgagcctgacgcccgagcagtggaggtcccgcagaagctacagctgccaggttatgcaagaagggagcaccgtggagaagtcagtggcccctgcagaatgttcataggtt

SEQ ID NO: 2939 - DNA, 317 bp, Homo sapiens
  misc_feature (150)..(164): n includes a, c, g, or t, or contains no nucleotide
ggtaaatatacgttctgcatccaaatgcactttgagattgttacgatttattctgagcaagatctgcattttttgaaagtttgagattgtagttatcttttttgagatgagatactttcacgactttggtatcatctgtcagtttttgcnnnnnnnnnnnnnnntttgcagctccttgttttggtctgttcgtaactgcagtgttctccatgagtatcaggaaggtagggtttcacttaggagtaagaacagtccccagtccagcagccacccttttcagctgctgttcattgccagttgatgaggtgagtgtcatc

SEQ ID NO: 2940 - DNA, 425 bp, Homo sapiens
  misc_feature (138)..(154): n includes a, c, g, or t, or contains no nucleotide
  misc_feature (217)..(257): n includes a, c, g, or t, or contains no nucleotide
  misc_feature (326)..(374): n includes a, c, g, or t, or contains no nucleotide
cccatggtgactatgccaggagagactcttgcttctcgagttgcagcatcccagctcacttgcttaggttgtcttgagcttattgctaaaaacagacaagaatatgaagacatagctgtgaagctgggaactgatctnnnnnnnnnnnnnnnnnttcgtggcaaagtctggaagcaaagaatatctagccctctgttcaacaccaaacaatacacannnnnnnnnnnnnnnnnnnnnnnnnnnnnnnnnnnnnnnnntgcagctggcaacaaacctgaccacatgattaagcctgttgaagtcactgagtcagcataaataaagannnnnnnnnnnnnnnnnnnnnnnnnnnnnnnnnnnnnnnnnnnnnnnnnctgcatggtagggagagacacaaaagatgggaaactgcttttccacaagga

SEQ ID NO: 2941 - DNA, 355 bp, Homo sapiens
  misc_feature (250)..(267): n includes a, c, g, or t, or contains no nucleotide
cgaccggggagaaggtcacgcacactggccaggtttatgatgataaagactacaggagaattcggtttgtaggtcgtcagaaagaggtgaatgaaaactttgccattgatttgatagcagagcagcccgtgagcgaggtggagactcgggtgatagcgtgcgatggcggcgggggagctcttggccacccaaaagtgtatataaacttggacaaagaaacaaaaaccggcacatgcggttactgtgggcnnnnnnnnnnnnnnnnnnaccactagagcgtgtggcacgccgggggtcccgcagcatcctgtgagcatttccgcggggaagctgagcacgtgaagctcgctggttc

SEQ ID NO: 2942 - DNA, 467 bp, Homo sapiens
  misc_feature (161)..(161): n includes a, c, g, or t, or contains no nucleotide
  misc_feature (168)..(168): n includes a, c, g, or t, or contains no nucleotide
  misc_feature (282)..(282): n includes a, c, g, or t, or contains no nucleotide
ctccatcaatgagaagtgtgccaaggagttttctgagttttaggggtgtgcttgtgcccctgtggttttctttcctttttgtttttggtggtttgggggatgggagggttggattgaacagccagagggccccagagttccttgtatctaatttcatcctncacccancctccagggttgggggagcaggaagcccagatatttggaggaacagaaacaccagctgctccctcacccccccccatgccttcctggtccctctgtgcttctctctttctcctnccacaggtcccccttgccccagcccccttctgcctgttttaaacgagtttctcagctctattcaggccaggtcttgctgttgtatcaagggacacggtgtggaaagaggggctcaaacttaactccagccctgaacaggcaccacttactaagagaggatgaatgaaaagcacacctaccctttg

SEQ ID NO: 2943 - DNA, 600 bp, Homo sapiens
gaagaccttgtacagaatgtgttaaatttcttgtacaaaattgtttatttgccttttctttgtttgtaacttatctgtaaaaggtttctccctactgtcaaaaaaaaatatgcatgtatagtaatttaggacttcattcctccatgttttcttcccttatcttactgtcattgtcctaaaacctatttagaaaattgatcagtaacatgttgcatgtggcttactctggctatatctaagcccttcgtcacatctaaacttagatggagttggtcaaatgagggaacatctgggttatgcctttttttaagtagttttctttaggaactgtcagcatgatgttgttgaagtgtggagttgtaactctgcgtggactatggacagtcgactatggacactcaacaatatgtacttaaaaagtgcactatgcaaacgggtgtattatccaggtgatcgtacactatttttttgtactgctggtcctgtaccagaaacattttcttttattgttacttgctttttaaactttgtttagccacttacttaaaagatctgcttatggcacaatttgcctcaaatccattccaagttgtatatttg

SEQ ID NO: 2944 - DNA, 594 bp, Homo sapiens
  misc_feature (39)..(39): n includes a, c, g, or t, or contains no nucleotide
  misc_feature (44)..(44): n includes a, c, g, or t, or contains no nucleotide
  misc_feature (264)..(296): n includes a, c, g, or t, or contains no nucleotide
  misc_feature (417)..(431): n includes a, c, g, or t, or contains no nucleotide
  misc_feature (524)..(525): n includes a, c, g, or t, or contains no nucleotide
  misc_feature (537)..(569): n includes a, c, g, or t, or contains no nucleotide
ataccacttgtcagggcacaggggactggctgggccccnagggntgctccccacttgcagcacaatgccttctccacctgccctcccactcttccagtccaatccacgctgtcttctgttgcaggactaacctttgagaaatccttttgtgaagtcattgcctgctcaagaatgtacagtggctccccaatgccttggaggccataaggccagccagttctagctctctattacctgtccccactcaactgactcatacctgtnnnnnnnnnnnnnnnnnnnnnnnnnnnnnnnnncgatgatcgtcacctctgtgcctgagttctccctgttgtctcaaagcggtacccatcctcccccagaagctgtccccagcgagcctcccttctttgtttgaattctctaataagagcaacnnnnnnnnnnnnnnntagaacacatttacagtattactattttctaggatataaagtgccatatatatttttaattccaatattaataaatgtatgccaaacaacaannaaaaaaaaaaannnnnnnnnnnnnnnnnnnnnnnnnnnnnnnnncagctgcaaggaaacacatgagaac

SEQ ID NO: 2945 - DNA, 565 bp, Homo sapiens
tgtcctcagaacagatgagctcagggtagggtagagaacgccactttctcagacctgtcccctttgtgtttagaaatgagttaaccaggaccaagtggccatttagtgtcctggaaacttagaggacagtgttggcctttggagtcgggccttcttgtgttaaggggcacaaggtccagatcactctggagcaggccagctctgctggacagtgaccctcttcccaggcctcaggagtgaccatagccactgctgaaaagtcacgcagctgctccctcggaccccccaaggatggttgctgttagcagaggattggtgcagtcccagctgaagcccactgtgtgccaaaggaagaagctcccagggctgcttccttcacctgcagaaagccccaagtgagccaccagcactcatggggcagtccctgtccaggctgcccagggcttctcatagacgtcctgagaaggacggtgtaatgcaaggaaatggctgtggtaacactgatccttcagaagaagcttcattccctcttaatctagttaagccaggacatccagaattcatt

SEQ ID NO: 2946 - DNA, 414 bp, Homo sapiens
  misc_feature (133)..(133): n includes a, c, g, or t, or contains no nucleotide
  misc_feature (343)..(343): n includes a, c, g, or t, or contains no nucleotide
cctagaaagttgctggctgactcttttttgtctggggcctggggaaagggcttggactgtgaaaagaaatgtggcccctttccatcttcaagagagatggaattaatgatggatggaccctggagggaatctnccccagccgacttccactgggctgacagactttgctgaccacaggggaacgatgttcttttctttcttcatgatcagacataaacttagcatcttaatggaagaaaaatgaggggaacttcaattatgatttattaaagacaatttctattacaccctcctttatgacaagtgacattttagatgtaaaagtaaaaactttaccatgccntttttttttttgttggcctaacattgaggccttaaaacctgaggctcctgtgcctgatggaattcttgtaa

SEQ ID NO: 2947 - DNA, 526 bp, Homo sapiens
  misc_feature (30)..(30): n includes a, c, g, or t, or contains no nucleotide
  misc_feature (53)..(54): n includes a, c, g, or t, or contains no nucleotide
  misc_feature (57)..(57): n includes a, c, g, or t, or contains no nucleotide
  misc_feature (154)..(154): n includes a, c, g, or t, or contains no nucleotide
  misc_feature (195)..(195): n includes a, c, g, or t, or contains no nucleotide
  misc_feature (223)..(223): n includes a, c, g, or t, or contains no nucleotide
  misc_feature (232)..(232): n includes a, c, g, or t, or contains no nucleotide
  misc_feature (242)..(242): n includes a, c, g, or t, or contains no nucleotide
  misc_feature (253)..(253): n includes a, c, g, or t, or contains no nucleotide
  misc_feature (263)..(263): n includes a, c, g, or t, or contains no nucleotide
  misc_feature (485)..(486): n includes a, c, g, or t, or contains no nucleotide
  misc_feature (488)..(488): n includes a, c, g, or t, or contains no nucleotide
tagagcttggttatcggccggcccggtggnttggcaggcagtgctgtgcgctnntcnatggagaagacctgggcttagcaatctccttagttcttgctacacaggatggtgactggaactaaggctacacagagggtcgcacttggactctganggttgggtgtggaagggggaaaaggggatggagacctgctnccccagctcttcctgtcagccggtttancatgggaancagggttaancatctgtgttnaggggaggtncaccttaccctttttcataggggaagagtgtcacactcctggctatctcagggggaatggggaaaagaatctttcaagggcaaagaactcgtgggaggatgtctgttgtatgtaatactcacaatggcttttggttagtgttgaaggtgggaagagcatttgtaggtccagaagagtgaaagagagggaggggtgcagcaacatgtgcacaggcacgcacanntntgcacgcacacatacaatctgggttatctttgtgctat

SEQ ID NO: 2948 - DNA, 293 bp, Homo sapiens
  misc_feature (62)..(88): n includes a, c, g, or t, or contains no nucleotide
  misc_feature (170)..(170): n includes a, c, g, or t, or contains no nucleotide
  misc_feature (222)..(222): n includes a, c, g, or t, or contains no nucleotide
  misc_feature (225)..(225): n includes a, c, g, or t, or contains no nucleotide
  misc_feature (229)..(229): n includes a, c, g, or t, or contains no nucleotide
  misc_feature (247)..(247): n includes a, c, g, or t, or contains no nucleotide
  misc_feature (258)..(258): n includes a, c, g, or t, or contains no nucleotide
  misc_feature (260)..(261): n includes a, c, g, or t, or contains no nucleotide
  misc_feature (263)..(263): n includes a, c, g, or t, or contains no nucleotide
  misc_feature (266)..(267): n includes a, c, g, or t, or contains no nucleotide
tctgaactcttagtgattcatatatgtacataaatctgtgatcccatttcttattgcaccannnnnnnnnnnnnnnnnnnnnnnnnnnggctttttatttcatattattagtagtatcatggttccattacaggcctattaacatcatacattgtcattagtctttgaangaaaaaatatgtaaatatatatgtgtaacatgagaatttctctctaaagcanggncttnaaaattttttggaaaagnttgacaaagcntnncncanngggatttcaggatttaccccccatgg

SEQ ID NO: 2949 - DNA, 521 bp, Homo sapiens
  misc_feature (125)..(125): n includes a, c, g, or t, or contains no nucleotide
  misc_feature (133)..(133): n includes a, c, g, or t, or contains no nucleotide
  misc_feature (152)..(152): n includes a, c, g, or t, or contains no nucleotide
  misc_feature (162)..(162): n includes a, c, g, or t, or contains no nucleotide
  misc_feature (174)..(174): n includes a, c, g, or t, or contains no nucleotide
  misc_feature (186)..(186): n includes a, c, g, or t, or contains no nucleotide
  misc_feature (209)..(210): n includes a, c, g, or t, or contains no nucleotide
  misc_feature (225)..(225): n includes a, c, g, or t, or contains no nucleotide
  misc_feature (227)..(227): n includes a, c, g, or t, or contains no nucleotide
  misc_feature (241)..(241): n includes a, c, g, or t, or contains no nucleotide
  misc_feature (288)..(288): n includes a, c, g, or t, or contains no nucleotide
agactgtgacatcagaagtaactcccactcctaatcaagagtctctccagcctcacagatgctggcctcttggcacctgcctagctcttgggcctgacctccagtcctgctggcctgctcttacnttcccccnaccctgggtttggcccctnggaacctttncccttgtgtgtnaccacaccctgncctgctgtggagcccattgtggnnaggcggtgggggggnanaaggcctcccctgnaggatcccctgtcccctggggctggtggattgggcagaatcctgggncccccagagacctttgcccacacacactccttccccttgtccctggggcactcccccaggattgtgcaatagtcagagtgtccctttttgcaggggactgggccatgggtcctcggcccatctgtccatcctcctctccatgcaagtgctgtttgggcaggagtcaccatgcaagggtgacatcgacaaccacgtaccaagccaccgcagctgctgccactctgctgcctgta

SEQ ID NO: 2950 - DNA, 582 bp, Homo sapiens
  misc_feature (69)..(193): n includes a, c, g, or t, or contains no nucleotide
  misc_feature (226)..(288): n includes a, c, g, or t, or contains no nucleotide
  misc_feature (294)..(333): n includes a, c, g, or t, or contains no nucleotide
gagctccgggttaattaccaccttgtcaatgtgaagggtgaaaacatcaccaatgcccctgaactgcannnnnnnnnnnnnnnnnnnnnnnnnnnnnnnnnnnnnnnnnnnnnnnnnnnnnnnnnnnnnnnnnnnnnnnnnnnnnnnnnnnnnnnnnnnnnnnnnnnnnnnnnnnnnnnnnnnnnnnnnnnnntggggaaagctgtatgaggaggagtccccgtcnnnnnnnnnnnnnnnnnnnnnnnnnnnnnnnnnnnnnnnnnnnnnnnnnnnnnnnnnnnnnnnttcccnnnnnnnnnnnnnnnnnnnnnnnnnnnnnnnnnnnnnnnngagcttctcaacaggcccacccagaatgcgagagaaacggaggctccatgaccctgcgtcctgacgccctgcgttggagccactcctgtcccgccttcctcctccacagtgctgcttctcttgggaactccactctccttcgtgtctctcccaccccggcctccactcccccacctgacaatggcagctagactggagtgaggcttccaggctcttcctggacctgagtcggccccacatgggaaccta

SEQ ID NO: 2951 - DNA, 531 bp, Homo sapiens
  misc_feature (141)..(159): n includes a, c, g, or t, or contains no nucleotide
  misc_feature (224)..(241): n includes a, c, g, or t, or contains no nucleotide
ctaaatgcagctttgttaatagctgagtgaactttcaattatgaaatttgtggagcttgacaaaatcacaaaaggaaaattactggggcaaaattagacctcaagtctgcctctactgtgtctcacatcaccatgtagaannnnnnnnnnnnnnnnnnnaccgtgacatcctgaaccctggatagaaagcctgagcccattggatctgtgaaagcctctagctnnnnnnnnnnnnnnnnnnttcctctagatcagaatcttcaagaatcagttaggttcctcactgcaagaaataaaatgtcaggcagtgaatgaattatattttcagaagtaaagcaaagaagctataacatgttatgtacagtacactctgaaaagaaatctgaaacaagttattgtaatgataaaaataatgcacaggcatggttacttaatattttctaacaggaaaagtcatccctatttccttgttttactgcacttaatattatttggttgaatttgttcagtataagctcgttcttgtgcaaa

SEQ ID NO: 2952 - DNA, 385 bp, Homo sapiens
catttgctctcctagggacaagtgtaatacatttatgtgaagtaagacaatgcgagactggtggccgtcaaatagcatccgtcaatctgtgttaactgcataggaggctctcgatagcacctgctatagcggtgtcatgttggatcgctttgtgactgttcatctgtccttgacagtggctgtcatcttgactactttgttgatttgttggtattggggacattttaaaggctgagttatttttgaatgtcatgtttatgtcatagacgtagaaaacgcatccttgaattaaactgccttaactccttttgtggtataagcaaactacatggactctgtccctggtatccttttcctgtgtggttgcccctgtgcctgtggtctg

SEQ ID NO: 2953 - DNA, 458 bp, Homo sapiens
  misc_feature (40)..(40): n includes a, c, g, or t, or contains no nucleotide
  misc_feature (183)..(184): n includes a, c, g, or t, or contains no nucleotide
  misc_feature (186)..(247): n includes a, c, g, or t, or contains no nucleotide
  misc_feature (385)..(385): n includes a, c, g, or t, or contains no nucleotide
ggtcaagccaggttccatcaagccccaccagaaggtgganggcccaggtttacatcctcagcaaggaggaaggtggccgccacaagccctttgtgtcccacttcatgcctgtcatgttctccctgacttgggacatggcctgtcggattatcctgcccccagagaaggagcttgccatgcccnngnnnnnnnnnnnnnnnnnnnnnnnnnnnnnnnnnnnnnnnnnnnnnnnnnnnnnnnnnnnnnnttcaccctgcgagatggcaaccggactattggcaccggtctagtcaccaacacgctggccatgactgaggaggagaagaatatcaaatggggttgagtgtgcagatctctgctcagcttcccttgcgtttaaggcctnccctagccagggctccctcctgcttccagtaccctctcatggcataggctgcaacccagcagagggcagctag

SEQ ID NO: 2954 - DNA, 595 bp, Homo sapiens
  misc_feature (130)..(148): n includes a, c, g, or t, or contains no nucleotide
  misc_feature (201)..(204): n includes a, c, g, or t, or contains no nucleotide
  misc_feature (206)..(206): n includes a, c, g, or t, or contains no nucleotide
  misc_feature (252)..(395): n includes a, c, g, or t, or contains no nucleotide
  misc_feature (511)..(541): n includes a, c, g, or t, or contains no nucleotide
acctccgttatgtgccgctctggaaggtccatattttcacagtcattcagcttacttgtttggtccttttatgggtgataaaagtttcagctgctgcagtggtttttcccatgatggttcttgcattagnnnnnnnnnnnnnnnnnnnggacctgtgtttcacgaagagagaacttagttggcttgatgatcttatgccannnngnaagaaaaagaaagaagatgacaaaaagaaaaaagagaaagaggaannnnnnnnnnnnnnnnnnnnnnnnnnnnnnnnnnnnnnnnnnnnnnnnnnnnnnnnnnnnnnnnnnnnnnnnnnnnnnnnnnnnnnnnnnnnnnnnnnnnnnnnnnnnnnnnnnnnnnnnnnnnnnnnnnnnnnnnnnnnnnnncagtggaaggcactttccatgaatactgagaatgccaaagtaaccagatctaacatgagtcctgataaacctgtgagtgtgaaataagtttgagatgaaccaagaaagaaatacgnnnnnnnnnnnnnnnnnnnnnnnnnnnnnnnagaggcatatacatatagatatatacatatgtaagggtgcgatcatggcactat

SEQ ID NO: 2955 - DNA, 322 bp, Homo sapiens
  misc_feature (31)..(49): n includes a, c, g, or t, or contains no nucleotide
  misc_feature (53)..(54): n includes a, c, g, or t, or contains no nucleotide
  misc_feature (88)..(88): n includes a, c, g, or t, or contains no nucleotide
  misc_feature (106)..(106): n includes a, c, g, or t, or contains no nucleotide
  misc_feature (165)..(165): n includes a, c, g, or t, or contains no nucleotide
  misc_feature (273)..(291): n includes a, c, g, or t, or contains no nucleotide
ccatagtgtttgtcatctatgatgaagtggnnnnnnnnnnnnnnnnnnngtgnngaagacggactaagcctagagaggccgcaagggnaccgccccaggcaccgcnagagtgtcctgctacctttgtctcacgattccagtgcagtagtgccaaaaggccccttncccacgtccctcgagctctgtagcctggtctgtgcattgtggctgtcaaatccatgtgtcccccctgtggtctgtgtgtgacaccaccactgtgtcccagtgtctggnnnnnnnnnnnnnnnnnnngcatctggcctatgaccctgtgcctgtgttt

SEQ ID NO: 2956 - DNA, 143 bp, Homo sapiens
tacctgtgtcgttttgttatacgtcagtataccagaatagacttaattcagaaactgcctttgccaaacaaaatgaaggattatttacaggagaagcactactgaaagattgagaaccctgcatcttgcactttgggaataag

SEQ ID NO: 2957 - DNA, 502 bp, Homo sapiens
  misc_feature (27)..(27): n includes a, c, g, or t, or contains no nucleotide
  misc_feature (35)..(35): n includes a, c, g, or t, or contains no nucleotide
  misc_feature (97)..(97): n includes a, c, g, or t, or contains no nucleotide
  misc_feature (150)..(150): n includes a, c, g, or t, or contains no nucleotide
  misc_feature (240)..(241): n includes a, c, g, or t, or contains no nucleotide
ggccggtctcatcaggcacaagcggangcactcgngggagaagccctacatgtgcaggcagtgtggactgggctttggcaataagtcagctctaatnacacacaagcgggctcactcggaagagaagccttgtgtgtgcagagagtgtgnccaaggctttctccaaaagtcacacctcaccttacatcaaatgacacatacgggggagaagccatatgtgtgcaagacgtgtgggcgggnnttcagcctcaagtctcacctcagcagacacaggaagaccacgtctgtccaccacagactgccagtgcagcccgaccctgagccgtgtgcagggcaaccttcggattccttatactctctctgaaggcaaagatggggacaaggactaagagtcagaatgttgacactttgatgaaatggagtagagaaatgcattctgtaagtggtcaaaggacatttgactgtttactttctccacactaagtcttctccatgttttgtg

SEQ ID NO: 2958 - DNA, 356 bp, Homo sapiens
  misc_feature (85)..(85): n includes a, c, g, or t, or contains no nucleotide
  misc_feature (250)..(250): n includes a, c, g, or t, or contains no nucleotide
  misc_feature (283)..(284): n includes a, c, g, or t, or contains no nucleotide
agctccacaggttgggagccgtcgtgggacctgggtccccaccgtgaggaccccgtgggcgacagcaggtgtggccagggtgggnctccgagccccgggtcaccgcccgcccagcgttccaggcacatgaagagaaagcattccaaagcctctgattgttgtttcctttttctcctcccgaaggaacagctgattcatgctcctcccgcaattgtcacgtctgtgatttatttggtgtttcgggcgtggnctctggagccccggcacgtggtgggccacgctnntggcgctcatgggccctggtgtttgcaccgcactttgtaatcagtcccgtggttgtctgtacagaattaaac

SEQ ID NO: 2959 - DNA, 445 bp, Homo sapiens
  misc_feature (45)..(84): n includes a, c, g, or t, or contains no nucleotide
  misc_feature (225)..(240): n includes a, c, g, or t, or contains no nucleotide
tgagggctcaggtctccagccctgggcccccacccctctcctgtnnnnnnnnnnnnnnnnnnnnnnnnnnnnnnnnnnnnnnnntggcttacctctcagaacgtaagtttgttcaccgagatttagccaccaggaactgcctggtgggcgagaacatggtggtgaaaattgccgactttggcctctccaggaacatctactcagcagactactacaaagctaatnnnnnnnnnnnnnnnnctatccgttggatgccaccagagtccattttttataaccgctacactacagagtctgatgtgtgggcctatggcgtggtcctctgggagatcttctcctatggcctgcagccctactatgggatggcccatgaggaggtcatttactacgtgcgagatggcaacatcctctcctgccctgagaactgccccgtggagctgtacaa

SEQ ID NO: 2960 - DNA, 279 bp, Homo sapiens
  misc_feature (39)..(39): n includes a, c, g, or t, or contains no nucleotide
  misc_feature (54)..(54): n includes a, c, g, or t, or contains no nucleotide
  misc_feature (85)..(86): n includes a, c, g, or t, or contains no nucleotide
  misc_feature (106)..(128): n includes a, c, g, or t, or contains no nucleotide
  misc_feature (206)..(230): n includes a, c, g, or t, or contains no nucleotide
tgtctggagcgcttcagttcagctttaaaggccaggacngggccacacgtggcntggcggcctcgttccagtggcggcacgtccnnttgggcgtctctaatgtctnnnnnnnnnnnnnnnnnnnnnnntttaaatataaaaatgggtgttatttttatttttttttgtaaagtgatttttggtcttctgttgacattcggggtgannnnnnnnnnnnnnnnnnnnnnnnngagatcggtgcgttctcctgatgttttgccgtggcttggggattgtaca

SEQ ID NO: 2961 - DNA, 341 bp, Homo sapiens
  misc_feature (219)..(219): n includes a, c, g, or t, or contains no nucleotide
agatccgccggctgtcggcctgcaagcagcagtgaggctggccgcctgcagcccgtgtccaggagccccgccaggtgcccgcgccaggccctcagtcttcctgccggttccgcccgccctcccggagaggtggccgccatgcttctgtgccgaccacgccccaggacctccggagcgccctgcagggccgggcagggggacagcagggaccgggcgcangccctcccccctcggccgcccggcagtgcacgcggcttgttgacttcgcagccccgggcggagccttcccgggcgggcgtgggaggagggaggcggcctccatgcactttatgtggagacta

SEQ ID NO: 2962 - DNA, 591 bp, Homo sapiens
  misc_feature (88)..(124): n includes a, c, g, or t, or contains no nucleotide
  misc_feature (163)..(183): n includes a, c, g, or t, or contains no nucleotide
gcttcactggcttcggagtgagcgcgaagtgctggtgagcagtgggcctgtgattggatgggaagatgtgcatccgtggtcaaaagtnnnnnnnnnnnnnnnnnnnnnnnnnnnnnnnnnnnnngatggggaggcctccctgcttccacctgcatggtgggcnnnnnnnnnnnnnnnnnnnnngctttgacggtttctccaagtaaggatctgcaaatcttgaatcgtcctcaaaatgacgaagcttgaattgtcctcaagatggatgtgaatcttacattccttttcatcatttcctttgtaaaaatgacgagtgctgggtttttgttttaagaagcattatgaaggccagacttactcatttttctcccccaagtgagctgcaagaggcccctgttaggcccctgtttcctgagcagtgatgtgctgctcttcttggtggggctttgggctgggaggggaaggcgggtcagagatgggggacctgtggctgccatgcaggagcccctgcgtcatctcgttggactctttaagggagtcaggaatagatgtatgaacagtcgtgtcactggatgcctatttagaaataaa

SEQ ID NO: 2963 - DNA, 517 bp, Homo sapiens
  misc_feature (309)..(356): n includes a, c, g, or t, or contains no nucleotide
gatgctttcctagcttacaaaaagttctatttttgggttaaaaatcaatcaactttctgatatttccccttctgcaatgttattgttcataagaaaacacgagctgaaaatggaaatctgcagttgtttcagttgtcttgaatttctttcagtggccacatcatttccacgttttccacatccgggaggaagcctggactgtgcagccttcgggcacccggcacagacactgtgctggcaggagcttcagacacgccaagtggatggatttggattgaacgcatatgaaacaggagacgggttctcatnnnnnnnnnnnnnnnnnnnnnnnnnnnnnnnnnnnnnnnnnnnnnnnnaaatgttaccatttattaaaggtaaactacacctgttgaaggccaagttcagggcagctgttgtgatctgtgtagttaatgtatttattaatgcttgacttttaaaatcctgggcataaatagtgcagagcctcgtatgtttgtcagttcatgccgagatg

SEQ ID NO: 2964 - DNA, 366 bp, Homo sapiens
aacctacccagcaaagaagcatagcttttagctctaataattctgtagcaaagccaatacaaaaatcagctaaagctgccacagaagaggcatcttcaagatcaccaaaaatagatcagaaaaaaagtccatatggactgtggatacctatctaaaagaagaaaactgatggctaagtttgcatgaaaactgcactttattgcaagttagtgtttctagcattatcccatccctttgagccattcaggggtacttgtgcatttaaaaaccaacacaaaaagatgtaaatacttaacactcaaatattaacattttaggtttctcttgcagatatgagagatagcacagatggaccaaaggttatgc

SEQ ID NO: 2965 - DNA, 217 bp, Homo sapiens
  misc_feature (113)..(155): n includes a, c, g, or t, or contains no nucleotide
atggctgtttgcttccataaacaagtgcaattttttaaagtgctgtcttactaagtcttgtttattaactctcctttattctatatggaaataaaaaggaggcagtcatgttnnnnnnnnnnnnnnnnnnnnnnnnnnnnnnnnnnnnnnnnnnnttccctgtcgatcccttctgaggtatggcccatccaagacttttaggccattcttgatggaa

SEQ ID NO: 2966 - DNA, 266 bp, Homo sapiens
ctccagagcaggagactggcaagagctctttgtctcaccagctcagccccggccactccctgccaactccatgaccaggccaccatctgtaccctgcttcccaaactcccaggacctggagacaggattgtctggggccgaggggccagggtgtgaggtttcacctccgttgcggctgtgctcctgtggataacattgctagcgagccgcctctggttccactcagcttggttcctgcccccgccctgctgtatgatattaatgtg

SEQ ID NO: 2967 - DNA, 566 bp, Homo sapiens
  misc_feature (26)..(26): n includes a, c, g, or t, or contains no nucleotide
  misc_feature (49)..(49): n includes a, c, g, or t, or contains no nucleotide
  misc_feature (86)..(86): n includes a, c, g, or t, or contains no nucleotide
  misc_feature (91)..(91): n includes a, c, g, or t, or contains no nucleotide
  misc_feature (98)..(98): n includes a, c, g, or t, or contains no nucleotide
  misc_feature (109)..(124): n includes a, c, g, or t, or contains no nucleotide
  misc_feature (315)..(315): n includes a, c, g, or t, or contains no nucleotide
  misc_feature (400)..(434): n includes a, c, g, or t, or contains no nucleotide
tcttcattgatcaaccaggtttgggnttacacaaatcaattgtgggggnaaaaatcaaataaaacaattgcttattatattttccnaaggnctgagcntttatcttttnnnnnnnnnnnnnnnntatgaggatgataatgatctttaacagattttttagagatagaatttataaagaggctgatactaagaatactacaatcaaaattgaagctagagaatgtaaaaatagaaagtaaatagttctaagaatattctggcataaattatttttatttagccaataaaatagcctccaaatgtatatctcagacnccatagagctgctaacaatgagaatcaaggaagatgcttgcacttagatttcgtttgttgtatttcagtagttctggatgtcctnnnnnnnnnnnnnnnnnnnnnnnnnnnnnnnnnnngaaatgtcaatctggtgattctgtgaactgtaaaatgttcacttttaaaaataaagttgtaaacaagttactcatataagttggtattacagtagcaaaaacagaaaaccatgtgatccatcctgtattttg

SEQ ID NO: 2968 - DNA, 357 bp, Homo sapiens
  misc_feature (170)..(199): n includes a, c, g, or t, or contains no nucleotide
ctcaggagcatttacggatttaacttcccttcccctctatcttcctcagactctagtgtctctttctcacactattgaacctgtgatgaaaacatctgtaactactagcccacagagtgacatgatgagggagcaactgcagctgtcagaggcgacaggaacgtgtctannnnnnnnnnnnnnnnnnnnnnnnnnnnnnatccggagttcaagggaagaggaagttgcctctgagctccatctctctgcgctgctagacatggtggacatttgagcagcctgacctgtggggagggggtctctcccgaagagtttctgtttttactcaaaataatgttattctcagatgcttgatgc

SEQ ID NO: 2969 - DNA, 537 bp, Homo sapiens
  misc_feature (26)..(68): n includes a, c, g, or t, or contains no nucleotide
  misc_feature (135)..(135): n includes a, c, g, or t, or contains no nucleotide
  misc_feature (150)..(151): n includes a, c, g, or t, or contains no nucleotide
  misc_feature (153)..(153): n includes a, c, g, or t, or contains no nucleotide
  misc_feature (156)..(160): n includes a, c, g, or t, or contains no nucleotide
  misc_feature (162)..(164): n includes a, c, g, or t, or contains no nucleotide
  misc_feature (166)..(175): n includes a, c, g, or t, or contains no nucleotide
  misc_feature (177)..(180): n includes a, c, g, or t, or contains no nucleotide
  misc_feature (182)..(190): n includes a, c, g, or t, or contains no nucleotide
  misc_feature (192)..(194): n includes a, c, g, or t, or contains no nucleotide
  misc_feature (197)..(197): n includes a, c, g, or t, or contains no nucleotide
  misc_feature (199)..(201): n includes a, c, g, or t, or contains no nucleotide
  misc_feature (210)..(230): n includes a, c, g, or t, or contains no nucleotide
  misc_feature (245)..(245): n includes a, c, g, or t, or contains no nucleotide
  misc_feature (258)..(258): n includes a, c, g, or t, or contains no nucleotide
  misc_feature (275)..(275): n includes a, c, g, or t, or contains no nucleotide
  misc_feature (496)..(496): n includes a, c, g, or t, or contains no nucleotide
gcttgtttccccacggtctggcttcnnnnnnnnnnnnnnnnnnnnnnnnnnnnnnnnnnnnnnnnnnntcctcagcccctgtggggcagccaagttcctgatagcacttgtgcctcagcccctcacctggccacntgccagggcacctgnnanccnnnnnannncnnnnnnnnnngnnnngnnnnnnnnncnnnttntnnncctgcctgnnnnnnnnnnnnnnnnnnnnntgcccccgggagggntgccgcactgccnaaagagtctccctcctncctggggaaggggctgccaacgaaccagactcagtgaccacgtcatgacagaacagcacatcctggccagcacccctggctggagtgggttaaagggacgagtctgccttcctggctgtgacacgggaccccttttctacagacctcatcactggatttgccaactagaattcgatttcctgtcataggaagctccttggaagaagggatggggggatganatcatgtttacagacctgttttgtcatcctgctgccaagaa

SEQ ID NO: 2970 - DNA, 269 bp, Homo sapiens
gctggacaggacacactctcagggcctctcggcttgggaaaactgcattgactccaggactccaggcgagggaagatgcacccgactctaactaataccccctctccctcctcgggctgaggcctctgccattctcccaaaagtatgcaatcaggcccgcggtgggcctcccagccatgccggcctcctcatatgcaatatttcttctggcttctcatggggatggttcatccccgacttgaaatttcctgacacctttccccagtgag

SEQ ID NO: 2971 - DNA, 551 bp, Homo sapiens
  misc_feature (226)..(226): n includes a, c, g, or t, or contains no nucleotide
  misc_feature (229)..(230): n includes a, c, g, or t, or contains no nucleotide
  misc_feature (232)..(234): n includes a, c, g, or t, or contains no nucleotide
  misc_feature (276)..(276): n includes a, c, g, or t, or contains no nucleotide
  misc_feature (279)..(279): n includes a, c, g, or t, or contains no nucleotide
  misc_feature (281)..(283): n includes a, c, g, or t, or contains no nucleotide
  misc_feature (285)..(288): n includes a, c, g, or t, or contains no nucleotide
  misc_feature (348)..(348): n includes a, c, g, or t, or contains no nucleotide
  misc_feature (389)..(430): n includes a, c, g, or t, or contains no nucleotide
taattttcaaatcactgttggtgcctaatcacttaagttattaatttattctgttgtattcttttttttaaattgtaacatatttatccggtgggtgggacaggagtgtgttcaagtgggtcatgtttttgctgtggtgacacatggtacaggcttggagcttgcaggtccctttctactgtggtgttggagcaggacaataaagtccactagaaatgcaccccanaannannngccgtgtccatcttgtcttgaggggcttggtggtggaacccnttntnnntnnnntctgttccaatttttgctttatttggaaataattgggtatttttcttggctgtgaataanaacaaatgctctctacctcagcgtctgttgtaaagtggaannnnnnnnnnnnnnnnnnnnnnnnnnnnnnnnnnnnnnnnnnagatgggttctgggcgtgtctgtctgctgctttcacaggtcacttagatgtgacatcttgagggtctgtgacattgggcccaaactccacaccaccatcacagcaggcagcccctggggaa

SEQ ID NO: 2972 - DNA, 493 bp, Homo sapiens
caagatcctgtactcgcacctggtggactacttccccgagttcgatggtccccagcgggagccccaggcggcgcgggagttcatcctgaagatgttcgtggacctgaaccccgacagcgacaagatcatctactcacacttcacgtgtgccaccgacacggagaacatccgcttcgtgttcgcggccgtgaaggacaccatcctgcagctcaacctcaaggagtacaacctggtctgagcgccccaggcccagggagacgggatggagacacggggcaggaccttccttccacggagcctgcgctgccgggcgggtggcgctgccgagtccgggccggggctctgccgcgggaggagattttttttttttcatatttttaacaaatggtttttatttcacagttatcaggggatgtacatctctccctccgtacacttcgcgcaccttctcaccttttgtcaacggcaaaggcagcctttttctggccttgac

SEQ ID NO: 2973 - DNA, 165 bp, Homo sapiens
  misc_feature (69)..(93): n includes a, c, g, or t, or contains no nucleotide
gtgctttactccatgaactgtctaatgacggtgctcataagcagtttgatcactacctcgaagagctcnnnnnnnnnnnnnnnnnnnnnnnnnccaagaaaggagaacgagagtgccacattgttgtgctgacggatgaggattctgtggactgggatgaagacc

SEQ ID NO: 2974 - DNA, 502 bp, Homo sapiens
  misc_feature (297)..(298): n includes a, c, g, or t, or contains no nucleotide
  misc_feature (409)..(452): n includes a, c, g, or t, or contains no nucleotide
acatgaaagttatccaggcgcagagttgaagaagcataagcaagacaaaaacagagagaccgcagaaggaggaagatactgtggtactgtcataaaaaacagtggagctctgtattagaaagcccctcagaactgggaaggccaggtaactctagttacacagaaactgtgactaaagtctatgaaactgattacaacagactgtaagaatcaaagtcaactgacatctatgctacatattattatatagtttgtactgagctattgaagtcccattaacttaaagtatatgttttnnaaattgccattgctactattgcttgtcggtgttattttattttattgtttttgactttggaagagatgaactgtgtatttaacttaagctattgctcttaaaaccagggannnnnnnnnnnnnnnnnnnnnnnnnnnnnnnnnnnnnnnnnnnntgtggattttgtattaaaatatatagaagcaatttctgtttacatgtcct

SEQ ID NO: 2975 - DNA, 200 bp, Homo sapiens
  misc_feature (140)..(141): n includes a, c, g, or t, or contains no nucleotide
ccccgagtgtgcccaggaactcagagagggcgcggcccccggggattcccccccgagggtgcccaggactcggaaggggcgccccggactcgacaagctggaccccctgctcccgggggggcgagcgcatgacccccccnnccctcgcgctgcctctttcccccgcgcggccgccccgtgttgcacaaacccgcgcgtct

SEQ ID NO: 2976 - DNA, 453 bp, Homo sapiens
tttgtatgtcaaagctttgactctataagcaaattgcttttttccaaaacaaaaagatgtctcaggtttgttttgtgaattttctaaaagctttcatgtcccagaacttagcctttacctgtgaagtgttactacagccttaatattttcctagtagatctatattagatcaaatagttgcatagcagtatatgttaatttgtgtgtttttagctgtgacacaactgtgtgattaaaaggtatactttagtagacatttataactcaaggataccttcttatttaatcttttcttatttttgtactttatcatgaatgcttttagtgtgtgcataatagctacagtgcatagttgtagacaaagtacattctggggaaacaacatttatatgtagcctttactgtttgatataccaaattaaaaaaaaattgtatctcattacttatactggg

SEQ ID NO: 2977 - DNA, 464 bp, Homo sapiens
  misc_feature (53)..(71): n includes a, c, g, or t, or contains no nucleotide
  misc_feature (102)..(180): n includes a, c, g, or t, or contains no nucleotide
  misc_feature (332)..(332): n includes a, c, g, or t, or contains no nucleotide
  misc_feature (374)..(374): n includes a, c, g, or t, or contains no nucleotide
  misc_feature (402)..(402): n includes a, c, g, or t, or contains no nucleotide
  misc_feature (404)..(404): n includes a, c, g, or t, or contains no nucleotide
  misc_feature (407)..(421): n includes a, c, g, or t, or contains no nucleotide
ggaggccttcacctacgagcgccggccccagtcccaggcctacatccccaagnnnnnnnnnnnnnnnnnnnacctgggggggttcttcggggggtcggtgcnnnnnnnnnnnnnnnnnnnnnnnnnnnnnnnnnnnnnnnnnnnnnnnnnnnnnnnnnnnnnnnnnnnnnnnnnnnnnnncgacgagagccacctgaacaagtacctgctgcgccacaaacccaccaaggtgctctcccccgagtacttgtgggaccagcagctgctgggctggcccgccgtcctgaggaagctgaggttcactgcggtgcccaagaaccaccaggcggtcnggaacccgtgagcggctgccaggggctctgggagggctgccngcagccccgtccccctcccgcccttggntntannnnnnnnnnnnnnnctctgtttcctttgtccgtcctgttgtgagtaactgaagccta

SEQ ID NO: 2978 - DNA, 437 bp, Homo sapiens
  misc_feature (238)..(258): n includes a, c, g, or t, or contains no nucleotide
cttaactattcaggagagtagaacagataatcagtgtgtctaaatttgaatgttaagcagatggaatgctgtgttaaataaacctcaaaatgtctaagatagtaacaatgaagataaaaagacattcttccaaaaagattttcagaaaatattatgtgtttccatattttataggcaacctttatttttaatggtgttttaaaaaatctcaaatttggattgctaatcaccaaaggcnnnnnnnnnnnnnnnnnnnnnttaaggagaacgacccctgcttctgacactgaaacttccctttctgcttgtgttaagtatgtgtaaaatgtgaagtgaatgaaacactcagttgttcaataataaatatttttgccataatgactcagaatattgctttggtcatatgagcttccttctgtgaaatacattttggagac

SEQ ID NO: 2979 - DNA, 198 bp, Homo sapiens
  misc_feature (138)..(160): n includes a, c, g, or t, or contains no nucleotide
acttctccatctctgtcaggcatgaggatgacgttcaacacttcaaggtcatgcgagacaacaagggtaattactttctgtggactgagaagtttccatccctaaataagctggtagactactacaggacaaattccnnnnnnnnnnnnnnnnnnnnnnnccttagagacagaacccgagaagaccagcgagtgcggt

SEQ ID NO: 2980 - DNA, 570 bp, Homo sapiens
  misc_feature (194)..(194): n includes a, c, g, or t, or contains no nucleotide
  misc_feature (205)..(207): n includes a, c, g, or t, or contains no nucleotide
  misc_feature (209)..(210): n includes a, c, g, or t, or contains no nucleotide
  misc_feature (326)..(326): n includes a, c, g, or t, or contains no nucleotide
tgaatttgttcaaacctgtaatggcttgtaaacaaagatgaccatcagctgtttctcacatctatagtgacaataaagcgggaagtataagatttaataggaggggttaaggttcatgagaaccatggaaagatgtggtctgagatgggtgctgcaaagatcataataaagtcatttttatagacagtctaaanaaaaaaaaaannnanntcatgttttttgcccaattcagcttttgttctgcctgaacattaatggcaagtctagaactctccgaatcctacagctttgtaattttttttctacaaatgtctaacatccaaaantgaggggtgggaaaaaggacttccctcctgtagtttttttcatattacttctcactttatatcttatattctaaatagctatcacctcagcagtcttttgcctattggttatgttagtatcacattacttctagcctttcaattactccatgttttatttaatatccattgaagtctatgaattctctgttctggtggcacagctattcataacctatattctagagtagacaatctggactat

SEQ ID NO: 2981 - DNA, 319 bp, Homo sapiens
  misc_feature (62)..(253): n includes a, c, g, or t, or contains no nucleotide
cgcacgcagccctcggggatcttgatgcccacttgcttcttcctgtccttggtcttcagccnnnnnnnnnnnnnnnnnnnnnnnnnnnnnnnnnnnnnnnnnnnnnnnnnnnnnnnnnnnnnnnnnnnnnnnnnnnnnnnnnnnnnnnnnnnnnnnnnnnnnnnnnnnnnnnnnnnnnnnnnnnnnnnnnnnnnnnnnnnnnnnnnnnnnnnnnnnnnnnnnnnnnnnnnnnnnnnnnnnnnnnnnnnnnnnncgtagccactctcccagggctccttggcctcctccgcggtgacctagggacacagggccgcatgag

SEQ ID NO: 2982 - DNA, 608 bp, Homo sapiens
caccaactattgcttcagctccacggagaagaactgctgcgtgcggcagctgtacattgacttccgcaaggacctcggctggaagtggatccacgagcccaagggctaccatgccaacttctgcctcgggccctgcccctacatttggagcctggacacgcagtacagcaaggtcctggccctgtacaaccagcataacccgggcgcctcggcggcgccgtgctgcgtgccgcaggcgctggagccgctgcccatcgtgtactacgtgggccgcaagcccaaggtggagcagctgtccaacatgatcgtgcgctcctgcaagtgcagctgaggtcccgccccgccccgccccgccccggcaggcccggccccaccccgccccgcccccgctgccttgcccatgggggctgtatttaaggacaccgtgccccaagcccacctggggccccattaaagatggagagaggactgcggatctctgtgtcattgggcgcctgcctggggtctccatccctgacgttcccccactcccactccctctctctccctctctgcctcctcctgcctgtctgcactattcctttgcccggcatcaaggcacaggggac

SEQ ID NO: 2983 - DNA, 234 bp, Homo sapiens
  misc_feature (34)..(49): n includes a, c, g, or t, or contains no nucleotide
atttgcaggcaaatgagatggagccctctctgtnnnnnnnnnnnnnnnntgcaagtagacggggtctgtgggtgcaggccctggaggggcacacaattgcctggaggcttctgtgagatcgggagagggaggagaggcagtctcttgacaaaataaagtatttttattcatttgtatttattaaatgaaaaaacaatcccatggtgtccctgttgtgtggtggaacctaatgac

SEQ ID NO: 2984 - DNA, 572 bp, Homo sapiens
  misc_feature (188)..(188): n includes a, c, g, or t, or contains no nucleotide
  misc_feature (274)..(274): n includes a, c, g, or t, or contains no nucleotide
  misc_feature (286)..(286): n includes a, c, g, or t, or contains no nucleotide
  misc_feature (301)..(301): n includes a, c, g, or t, or contains no nucleotide
  misc_feature (457)..(472): n includes a, c, g, or t, or contains no nucleotide
  misc_feature (542)..(542): n includes a, c, g, or t, or contains no nucleotide
tgtgccttcgtctttcccatggggagggattctggttccagggtccctctgtgtatttgcttttttgttttggctgaaattctcctggaggtcggtaggttcagccaaggttttataaggctgatgtcaatttctgtgttgccaagctccaagccccatcttctaaatggcaaaggaaggtggatggnccccagcacagcttgacctgaggctgtggtcacagcggaggtgtggagccgaggcctaccccgcagacaccttggacatcctcctncccacccggctngcagaggccagaggncccccagcccagggctcctgcacttacttgcttatttgacaacgtttcagcgactccgttggccactccgagaggtgggccagtctgtggatcagagatgcaccaccaagccaagggaacctgtgtccggtattcgatactgcgactttctgcctnnnnnnnnnnnnnnnncatgactcgggggtggggaaaggggtcggctgaccatgctcatctgctggtccgtgggacggtgcccaanccagaggctgggttcatttgtgtaacgaca

SEQ ID NO: 2985 - DNA, 337 bp, Homo sapiens
ctgcagccagcctgctcgaaactttagtcggcctgatggcttagaggactctgaggatagcaaagaagatgagaatgtgcctactgctcctgatcctccaagtcaacatttacgtgggcatgggacaggcttttgctttgattccagctttgatgttcacaagaagtgtcccctctgtgagttaatgtttcctcctaactatgatcagagcaaatttgaagaacatgttgaaagtcactggaaggtgtgcccgatgtgcagcgagcagttccctcctgactatgaccagcaggtgtttgaaaggcatgtgcagacccattttgatcagaatgttcta

SEQ ID NO: 2986 - DNA, 202 bp, Homo sapiens
ccatcccttctggataaccagatgttaaatcatgagatcagagatgctgttcatcagtcccaacaagatggcctagaaatcgcattctcacctcgccttgctgctgctttaattccaagttctatttcttcccttatagttttctatgggaatgaggcggatacaggaaacaccctatctcctctgtatttttgtagtggaa

SEQ ID NO: 2987 - DNA, 467 bp, Homo sapiens
  misc_feature (28)..(28): n includes a, c, g, or t, or contains no nucleotide
  misc_feature (247)..(262): n includes a, c, g, or t, or contains no nucleotide
  misc_feature (271)..(289): n includes a, c, g, or t, or contains no nucleotide
  misc_feature (375)..(375): n includes a, c, g, or t, or contains no nucleotide
  misc_feature (377)..(379): n includes a, c, g, or t, or contains no nucleotide
  misc_feature (393)..(401): n includes a, c, g, or t, or contains no nucleotide
  misc_feature (403)..(408): n includes a, c, g, or t, or contains no nucleotide
  misc_feature (410)..(412): n includes a, c, g, or t, or contains no nucleotide
ggtccacaacacacagatttgagctcanccctggtgggcagagaggtagggatggggctgtggggatagtgaggcatcgcaatgtaagactcgggattagtacacacttgttgattaatggaaatgtttacagatccccaagcctggcaagggaatttcttcaactccctgccccccagccctccttatcaaaggacaccattttggcaagctctatcaccaaggagccaaacatcctacaagacannnnnnnnnnnnnnnntataccccnnnnnnnnnnnnnnnnnnnaccttcacttaggaacgtaatcgtgtcccctatcctacttccccttcctaattccacagctgctcaataaagtacaagagcttaanannnaaaaaaaaaaaaannnnnnnnnannnnnnannncccactagacccactggactcacctcccccatctcttctgggttccttcctctga

SEQ ID NO: 2988 - DNA, 494 bp, Homo sapiens
  misc_feature (55)..(55): n includes a, c, g, or t, or contains no nucleotide
  misc_feature (408)..(411): n includes a, c, g, or t, or contains no nucleotide
  misc_feature (413)..(414): n includes a, c, g, or t, or contains no nucleotide
  misc_feature (418)..(418): n includes a, c, g, or t, or contains no nucleotide
  misc_feature (420)..(420): n includes a, c, g, or t, or contains no nucleotide
  misc_feature (422)..(422): n includes a, c, g, or t, or contains no nucleotide
  misc_feature (425)..(438): n includes a, c, g, or t, or contains no nucleotide
  misc_feature (440)..(447): n includes a, c, g, or t, or contains no nucleotide
ctcggaggccatctcgggcacaggcccaccccgccccacccctccagaacacggntcacgcttacctcaaccatcctggctgcggcgtctgtctgaaccacgcgggggccttgagggacgctttgtctgtcgtgatggggcaagggcacaagtcctggatgttgtgtgtatcgagaggccaaaggctggtggcaagtgcacggggcacagcggagtctgtcctgtgacgcgcaagtctgagggtctgggcggcgggcggctgggtctgtgcatttctggttgcaccgcggcgcttcccagcaccaacatgtaaccggcatgtttccagcagaagacaaaaagacaaacatgaaagtctagaaataaaactggtaaaaccccaaaaaaaaaaaaaaaaaaaaaaaaaannnnannaaanananaannnnnnnnnnnnnnannnnnnnntcttactttcaaaactctaacttttgcagattttcttgaaaagtgcc

SEQ ID NO: 2989 - DNA, 443 bp, Homo sapiens
  misc_feature (173)..(173): n includes a, c, g, or t, or contains no nucleotide
gacagctgaccagaccacgggcagggcctgcctccgtgtgcccctcagctcagccccagcaagtgtgtgctcagagcatctttgttcttcacggcagcagctaccttccctcactgtctcaggtgccgagaggggcaggtgccagcctccactggcatcagtgacaagcccanggcacagcccacccgggggtcctcgcttcatgctcacacaggctatggggatggtgggctccaggtcagctctgcaaggggcttgtctctgtggcacccacactcctgccctgccagggaggctctggttgtctgagcaccatgggggccccctcaccttgtccctcctcagccagcagaggcccagggcaagggacaggaggacaggggttctccttcaccacagaacccaaacctcaggtctcacccctgtggcctgtgattatgaat

SEQ ID NO: 2990 - DNA, 512 bp, Homo sapiens
  misc_feature (264)..(265): n includes a, c, g, or t, or contains no nucleotide
  misc_feature (349)..(349): n includes a, c, g, or t, or contains no nucleotide
gatgaccagctcagtggggcccagcaatggatgactaagtcattgacagaagagaaaaccatgaagtcattcagcaaaaagaaaggtgagcagccaacaggccagcagcggcggaaacaccagatcacatatcttattcatcaggccaaggagcgggagctggaactgaagaacacctggtcagagaacaagctcagccgccgtcagacccaagccaaatatggattctagggctctggaactgattgctcccaggatctcctnncagcccagctggcctggcccccagcttcacctctgggaccccagctgctctaagcccaggatctctttccccaaggacccagcncctcgcctctgcgagaatgaacatatttgatagatttttcttaacaagttagaaaattcagctcctttctgtcctggagctagcaaagacttgtgtgatgcctccgaaggggctctgagttctggggtgggagttttgctctctgtcaggtgtgataaaatgt

SEQ ID NO: 2991 - DNA, 522 bp, Homo sapiens
  misc_feature (106)..(106): n includes a, c, g, or t, or contains no nucleotide
  misc_feature (109)..(109): n includes a, c, g, or t, or contains no nucleotide
  misc_feature (165)..(235): n includes a, c, g, or t, or contains no nucleotide
  misc_feature (239)..(239): n includes a, c, g, or t, or contains no nucleotide
  misc_feature (243)..(243): n includes a, c, g, or t, or contains no nucleotide
  misc_feature (246)..(251): n includes a, c, g, or t, or contains no nucleotide
  misc_feature (323)..(323): n includes a, c, g, or t, or contains no nucleotide
gtgcccggatccagagtgtgaagacagaggcagaggagctgtttggggagaccatggagatgatggacaggatgaaagacatggagttggagctgctgcggggcanccnaggccatcatgctgcgctcagcggacctgacaggactggagaagcgtgtggagcannnnnnnnnnnnnnnnnnnnnnnnnnnnnnnnnnnnnnnnnnnnnnnnnnnnnnnnnnnnnnnnnnnnnnngccngttnccnnnnnnatctgccgcctttgcttttggttgggggcagattgggttggaatgctttccatctccaggagactttcatgnagcctaaagtacagcctggaccacccctggtgtgtagctagtaagattaccctgagctgcagctgagcctgagccaatgggacagttacacttgacagacaaagatggtggagattggcatgccattgaaactaagagctctcaagtcaaggaagctgggctgggcagtatcccccgcctttagttctccactggggag

SEQ ID NO: 2992 - DNA, 56 bp, Homo sapiens
taacctgggattggacctgagaacagctgcctatgtcaatgccattgaaaaagtct

SEQ ID NO: 2993 - DNA, 387 bp, Homo sapiens
  misc_feature (171)..(210): n includes a, c, g, or t, or contains no nucleotide
atgccacgggcctgccttttctatgcgcctcactagcttaccaccctgtgcaggtaatgcaactgactttgtctcatcagtctttttctttccctgccaccctttatttatcaagcgtaatgttacactttaaaggacagcaaataagaactttgtagaatcccaccaggnnnnnnnnnnnnnnnnnnnnnnnnnnnnnnnnnnnnnnnngaaaaaatatcagccaccaaaatagttatgttggcactgtgttcacacgcatggtccccacacccccaggttgggtgggtttttttgttttttgggtttttttggggggggggctttttcatgttacatccatatctgtatttatatcttatttgtttcactttcaagtgtatcatg

SEQ ID NO: 2994 - DNA, 414 bp, Homo sapiens
  misc_feature (26)..(26): n includes a, c, g, or t, or contains no nucleotide
  misc_feature (29)..(29): n includes a, c, g, or t, or contains no nucleotide
  misc_feature (32)..(32): n includes a, c, g, or t, or contains no nucleotide
  misc_feature (37)..(37): n includes a, c, g, or t, or contains no nucleotide
  misc_feature (41)..(42): n includes a, c, g, or t, or contains no nucleotide
  misc_feature (66)..(66): n includes a, c, g, or t, or contains no nucleotide
  misc_feature (74)..(74): n includes a, c, g, or t, or contains no nucleotide
  misc_feature (207)..(207): n includes a, c, g, or t, or contains no nucleotide
  misc_feature (280)..(280): n includes a, c, g, or t, or contains no nucleotide
  misc_feature (306)..(309): n includes a, c, g, or t, or contains no nucleotide
  misc_feature (311)..(339): n includes a, c, g, or t, or contains no nucleotide
gctcctgacactgctggagaggcccnagncgnttggngatnncagccaagctctgcagtcccagcngtgggacntagggaggcatggtctgccctctgcatcctctggagccagccgagcaggaggcctaggagggtcctctgagactccagacctgaggcgagaagggctgcttccctgaagctcccacagtcccatctgcttcangcccccgccttggcctgtgttcttcctggccgcctgggtccaatgctcaggtgctggggcctggttcccgganaagtgtgccttctctctcccttttcnnnngnnnnnnnnnnnnnnnnnnnnnnnnnnnnnctctccctcctccaggaagccttcccctaccccttgtcgcccctccctcccagagcacctgctgtctgggtggct

SEQ ID NO: 2995 - DNA, 331 bp, Homo sapiens
  misc_feature (97)..(113): n includes a, c, g, or t, or contains no nucleotide
tggaaactcctgtgtctgtgtatattacaagcctacatgacacagttggatttattctgccaaacctgtgtaggcattttataagctacatgttctnnnnnnnnnnnnnnnnnattattttgacaaatatttcatatattttcattgaaatgcacagatctgcttgatcaattcccttgaatagggaagtaacatttgccttaaattttttcgacctcgtctttctccatattgtcctgctcccctgtttgacgacagtgcatttgccttgtcacctgtgagctggagagaacccagatgttgtttattgaatctacaactctgaaagaga

SEQ ID NO: 2996 - DNA, 89 bp, Homo sapiens
caaatacgcttagctgtgtgccgcttagaacgatgcgaaaccatccctctgtgtaagcccgtgccgtgtgactcgaagcctagcgccct

SEQ ID NO: 2997 - DNA, 438 bp, Homo sapiens
  misc_feature (35)..(35): n includes a, c, g, or t, or contains no nucleotide
  misc_feature (38)..(38): n includes a, c, g, or t, or contains no nucleotide
  misc_feature (47)..(47): n includes a, c, g, or t, or contains no nucleotide
  misc_feature (61)..(77): n includes a, c, g, or t, or contains no nucleotide
  misc_feature (197)..(197): n includes a, c, g, or t, or contains no nucleotide
  misc_feature (200)..(200): n includes a, c, g, or t, or contains no nucleotide
cccaggaggcttttatgaagcgggccatggctaanctnccaggcggnccaaaggacagtannnnnnnnnnnnnnnnntctggggctgcttccacccagtcgctcttcacagcctgctatacctactagggtccaatgcccgccagcctagctccagtgcttctagtaggagggctgaaagggagcaacttttcctcnaancctggaaattcgacacaattagatttgaactgctggaaatacaacacatgttaaatcttaagtacaagggggaaaaaataaatcagttattgaaacataaaaatgaataccaaggacctgatcaaatttcacacagcagtttccttgcaacactttcagctccccatgctccagaatacccacccaagaaaataataggctttaaaacaatatcggctcctcatccaaagaacaactg

SEQ ID NO: 2998 - DNA, 443 bp, Homo sapiens
  misc_feature (167)..(170): n includes a, c, g, or t, or contains no nucleotide
  misc_feature (391)..(394): n includes a, c, g, or t, or contains no nucleotide
  misc_feature (397)..(406): n includes a, c, g, or t, or contains no nucleotide
  misc_feature (410)..(410): n includes a, c, g, or t, or contains no nucleotide
  misc_feature (412)..(412): n includes a, c, g, or t, or contains no nucleotide
  misc_feature (414)..(414): n includes a, c, g, or t, or contains no nucleotide
  misc_feature (416)..(418): n includes a, c, g, or t, or contains no nucleotide
tgttttatgacagacacacgtatctaacaaacaaacaaacagtgaccttctccatgggtcaaggacttccttacaatttctcctgagttaacttttgtgaaaataatacctaaggttttctggcttattgaggaaatttcctaacaaacaaacaaacaaacaaacannnngaagagaagatcattaaccactgtatactttgtgtatataataggtcagtgtaaagaaatatgatttgaggtggtgcatgcaagtaactagggtttattctatataatgaatatttatagatctgtaacatttgtttcaaaatgctgtttcatttttataaagtaccagtgtttagctgctttttatacattaaattagcaatttgaaaaactcaaaaaannnnaannnnnnnnnntttngngngnnnccgcatggaactcactagagattta

SEQ ID NO: 2999 - DNA, 541 bp, Homo sapiens
  misc_feature (160)..(160): n includes a, c, g, or t, or contains no nucleotide
  misc_feature (447)..(448): n includes a, c, g, or t, or contains no nucleotide
  misc_feature (450)..(455): n includes a, c, g, or t, or contains no nucleotide
  misc_feature (457)..(463): n includes a, c, g, or t, or contains no nucleotide
  misc_feature (465)..(465): n includes a, c, g, or t, or contains no nucleotide
  misc_feature (467)..(468): n includes a, c, g, or t, or contains no nucleotide
  misc_feature (470)..(470): n includes a, c, g, or t, or contains no nucleotide
  misc_feature (472)..(482): n includes a, c, g, or t, or contains no nucleotide
  misc_feature (484)..(485): n includes a, c, g, or t, or contains no nucleotide
  misc_feature (492)..(507): n includes a, c, g, or t, or contains no nucleotide
cactacattgttgaaatcaatgaagcaattagtttctcattcagaaatgtgcacactaatatttagttttgctttctcgtggataatattaagcacttactctgcagtttcctggaagttgtgtcaactgcagtgatactattcaggatggtgggaaatnccccaaaaatatgtatgtgtgggcttgcttagattactatatttcatagttaatcttttgtctcttgcggtgctcatgatgtgtggggcacacggaaggcattgctgtagtcagtcattttggttttcttctatagccattttattattttagtgtattagttatgaagataatattatctatttgtaaattgctactttgtattttatgcatgctctgtaatttgatttttttttagttattgatttggattatattcacattctaataaacagttatagggggannannnnnnannnnnnnanannanannnnnnnnnnnanngctttgnnnnnnnnnnnnnnnncctgatgtaaaagcataggttcttgcattactga

SEQ ID NO: 3000 - DNA, 540 bp, Homo sapiens
  misc_feature (78)..(83): n includes a, c, g, or t, or contains no nucleotide
  misc_feature (86)..(86): n includes a, c, g, or t, or contains no nucleotide
  misc_feature (92)..(96): n includes a, c, g, or t, or contains no nucleotide
  misc_feature (104)..(104): n includes a, c, g, or t, or contains no nucleotide
  misc_feature (114)..(114): n includes a, c, g, or t, or contains no nucleotide
  misc_feature (123)..(123): n includes a, c, g, or t, or contains no nucleotide
  misc_feature (185)..(185): n includes a, c, g, or t, or contains no nucleotide
  misc_feature (187)..(187): n includes a, c, g, or t, or contains no nucleotide
  misc_feature (189)..(190): n includes a, c, g, or t, or contains no nucleotide
  misc_feature (198)..(201): n includes a, c, g, or t, or contains no nucleotide
  misc_feature (203)..(203): n includes a, c, g, or t, or contains no nucleotide
  misc_feature (206)..(206): n includes a, c, g, or t, or contains no nucleotide
  misc_feature (208)..(209): n includes a, c, g, or t, or contains no nucleotide
  misc_feature (213)..(215): n includes a, c, g, or t, or contains no nucleotide
  misc_feature (217)..(217): n includes a, c, g, or t, or contains no nucleotide
  misc_feature (259)..(259): n includes a, c, g, or t, or contains no nucleotide
  misc_feature (272)..(272): n includes a, c, g, or t, or contains no nucleotide
  misc_feature (277)..(300): n includes a, c, g, or t, or contains no nucleotide
  misc_feature (343)..(344): n includes a, c, g, or t, or contains no nucleotide
  misc_feature (350)..(350): n includes a, c, g, or t, or contains no nucleotide
ccttagtgggctcagcagggcccacatgcccccatctccaagcgtggggttgggggccccaagcccagcgagggagcnnnnnnccntggagnnnnnttctgccntctcctgtcncccctgccnaccaccccctgattgtttttctttgcggagaagaagctgtaaatgttttgtagcagccagcnancnntgtttccnnnngnaancnngggnnncnggcctgtacagattctgtcctggggggctacacagtcctctngctttgtgttaanggggnnnnnnnnnnnnnnnnnnnnnnnncccctccccagtttaggggtctctggggcagtggccatgttcnncccctnggggggctctgcacccccagtcctggggactccgtgcctggaaccctgcctcatctgttcctgccagaccctgagggtcacccttccaccctggtgtcactccccggctcagccaggccaggatggcggggtgggtcccttttgctgggctggactgtacatatgttaatagcgcaaacccgacgccaca

SEQ ID NO: 3001 - DNA, 242 bp, Homo sapiens
  misc_feature (41)..(58): n includes a, c, g, or t, or contains no nucleotide
  misc_feature (189)..(189): n includes a, c, g, or t, or contains no nucleotide
  misc_feature (195)..(195): n includes a, c, g, or t, or contains no nucleotide
  misc_feature (197)..(197): n includes a, c, g, or t, or contains no nucleotide
  misc_feature (201)..(201): n includes a, c, g, or t, or contains no nucleotide
gactccagatactgcctgagcagccgcctgagggtctcggnnnnnnnnnnnnnnnnnncccgcaaccacttccgctgtcaagtccagttctacgggctctcggagaatgacgagtggacccaggatagggccaaacccgtcacccagatcgtcagcgccgaggcctggggtagagcagactgtggcttnacctcngngtcntaccagcaaggggtcctgtctgccaccatcctctatgagat

SEQ ID NO: 3002 - DNA, 436 bp, Homo sapiens
  misc_feature (105)..(106): n includes a, c, g, or t, or contains no nucleotide
  misc_feature (203)..(217): n includes a, c, g, or t, or contains no nucleotide
  misc_feature (279)..(279): n includes a, c, g, or t, or contains no nucleotide
ctgcttcggagctgcctggctcatggcccaacccctttcccggaccccccagctggcctctgaagctggcccaccagagctgccatttgtctccagcccctggtnnccagctcttgccaaagggcctggagtagaaggacaacagggcagcaacttggagggagttctctggggatggacgggacccagccttctgggggtgnnnnnnnnnnnnnnntccccacacatgggatgggggaggcagagactggtccagagcccgcaaatggactcggagcngagggcctcccagcagagcttgggaagggccatggacccaactgggccccagaagagccacaggaacatcattcctctcccgcaaccactcccaccccagggaggccctggcctccagtgccttcccccgtggaataaacggtgtgtcctgagaaac

SEQ ID NO: 3003 - DNA, 604 bp, Homo sapiens
  misc_feature (64)..(102): n includes a, c, g, or t, or contains no nucleotide
  misc_feature (277)..(321): n includes a, c, g, or t, or contains no nucleotide
  misc_feature (527)..(576): n includes a, c, g, or t, or contains no nucleotide
cgtaccgagagataggcagaagactgaagttttggaatgagactgatcctgagttcgtcattgnnnnnnnnnnnnnnnnnnnnnnnnnnnnnnnnnnnnnnnaatataggatagggcactacagattccggtacagtgacaccctggagctggtagtgacaggcttgtatggcaaacccttcctctctgcagatcggggtctggtgttgatgccaggagagaatatttccctcacgtgcagctcagcacacatcccatttgatagattttcactggnnnnnnnnnnnnnnnnnnnnnnnnnnnnnnnnnnnnnnnnnnnnnacccggccaacttctctttgggtcctgtggacctcaatgtctcagggatctacaggtgctacgactccatccaccaagattacacgacgcagaacttgatccgcatggccgtggcaggactggtcctcgtggctctcttggccatactggttgaaaattggcacagccatacggcactgaacaaggaagcctcggcagatgtggcnnnnnnnnnnnnnnnnnnnnnnnnnnnnnnnnnnnnnnnnnnnnnnnnnngaacaccaagtgtctgcaagtaaacacc

SEQ ID NO: 3004 - DNA, 118 bp, Homo sapiens
gggcagcctaggaggccgaccctctttggagtcctgctgtctgggtgccagggccggaacgaggtagtggccatctcatacctactctgaaatgcaaaacttctattctgttgagtga

SEQ ID NO: 3005 - DNA, 485 bp, Homo sapiens
  misc_feature (26)..(26): n includes a, c, g, or t, or contains no nucleotide
  misc_feature (42)..(42): n includes a, c, g, or t, or contains no nucleotide
  misc_feature (48)..(48): n includes a, c, g, or t, or contains no nucleotide
  misc_feature (59)..(59): n includes a, c, g, or t, or contains no nucleotide
  misc_feature (282)..(355): n includes a, c, g, or t, or contains no nucleotide
tacagcgccttgtgagcaggacggcnagcaagtacacagacngggccntgcgggccagntacacaccatccccagcacgctccacccacctcaagaccccggccagtgggctgcagacccccacaagcacaccggcgcctggctctgccacacgcacccctctcacacaggacccggcctccatcacggacaacctgctgcagctccctgcccggcgcaaagcttcggacttcttttagagccaggcctgggctgggctcatagacgcttcacagagcctgnnnnnnnnnnnnnnnnnnnnnnnnnnnnnnnnnnnnnnnnnnnnnnnnnnnnnnnnnnnnnnnnnnnnnnnnnnaccaggagtcactggagaaaggggctgtgctggggccagactggcacaaggcactcgtgcccacaccacaccccagggccttgccaagctgtttgctgtttaattggccccttgaactgtcattaaagaa

SEQ ID NO: 3006 - DNA, 605 bp, Homo sapiens
  misc_feature (449)..(450): n includes a, c, g, or t, or contains no nucleotide
  misc_feature (452)..(452): n includes a, c, g, or t, or contains no nucleotide
  misc_feature (458)..(458): n includes a, c, g, or t, or contains no nucleotide
  misc_feature (461)..(463): n includes a, c, g, or t, or contains no nucleotide
  misc_feature (465)..(468): n includes a, c, g, or t, or contains no nucleotide
  misc_feature (470)..(470): n includes a, c, g, or t, or contains no nucleotide
atccaattgtacctgatgtttttggtatttgtcttccttaccaagtgaactccatggccccaaagcaccagatgaatgttgttaagtaagctgtcattaaaaatacataatatatatttatttaaagagaaaaaatatgtgtatatcatggaaaaagacaaggatattttaataaaacattacttatttcatttcacttatcttgcatatcttaaaattaagcttcagctgctccttgatattaacatttgtacagagttgaagttgttttttcaagttcttttctttttcatgactattaaatgtaaaaatatttgtaaaatgaaatgccatatttgacttggcttctggtcttgatgtatttgataagaatgattcattcaatgtttaaagttgtataactgattaattttctgatatggcttcctaataaaatatgaataaggaannanaaaaanaannnannnnanacttgaaagacagtggtcggcagcggccttgtggcctttgcaaaggaattcccttaatgcctggtccttggggcaattgctctgaccattcttggcattgctttatagagatatggaaaaaccacaccagggtct

SEQ ID NO: 3007 - DNA, 529 bp, Homo sapiens
  misc_feature (277)..(297): n includes a, c, g, or t, or contains no nucleotide
  misc_feature (418)..(436): n includes a, c, g, or t, or contains no nucleotide
tcaccgaccaagtgagcgacagctccccctaccacagccccaaggtggaggagtggagcagcctgggccgcaacaacttccccgccgccgccccgcacgcggtgaacgggttggagaagggagccctggagcaggaagccaagtacggtcaggcaccaaatggtctcccagctgtgggcagttttgtgtcagcatccagcatggctccttaccctaccccagcccaagtgtcgccttacatgacctacagtgctgctccttctggttatgttgctgnnnnnnnnnnnnnnnnnnnnnggggcacctcattgtctccccacaactgtgacattccggcatcgctggcgttcaagggaatgcaggcagccagagaaggtagtcattctgtcacggcttccgcgctctgatgggaaattcnnnnnnnnnnnnnnnnnnncgggtctccctgtctcagcacctcctcccccaattcccaggtctcacatcccacccctcctgccctccaacccttctgccttgaaagctggct

SEQ ID NO: 3008 - DNA, 552 bp, Homo sapiens
  misc_feature (167)..(167): n includes a, c, g, or t, or contains no nucleotide
  misc_feature (185)..(200): n includes a, c, g, or t, or contains no nucleotide
  misc_feature (352)..(375): n includes a, c, g, or t, or contains no nucleotide
tcaataaagcagagttctgtcaagaatgagtaagttaacagccagagacagacactgtgcaggcattgcaaatagatggaattacagcaaaatgtgctcaatgtatttgcctgcttacaacactgggagatgtgtttgccagtaagttgctcatcacaagagcaccnagacttgggggtgtaatnnnnnnnnnnnnnnnngccctctgaaagaagggttttctgtgctgtgaaatgcatagaactatactttgccatgcacgactgttcctgcaattgatattgtgtgaaatctgggagggtggtctttgggtgttctcaggggccaatggtaatttttgggttggggagcnnnnnnnnnnnnnnnnnnnnnnnnctgggcctccgctctttaactatataaacatttatctgtatatctatgtccctgtctggggggcaggaggaatctgccaaagaccaacagtcttactttatcttactatacttcacaaaggttctaaaatgtgaagagtttacttggattgcagtagcccattggttgttcatatat

SEQ ID NO: 3009 - DNA, 473 bp, Homo sapiens
agtgtcaagatcagcaagtgtccttaagtcaaacaggttttttttgttgttgtttttgctttgtttccttttttagaaagttctagaaaataggaaaacgaaaaatttcattgagatgagtagtgcatttaattattttttaaaaaactttttaagtacttgaattttatatcaggaaaacaaagttgttgagccttgcttcttccgttttgccctttgtctcgctccttattctttttttggggggagggttatttgcttttttatcttcctggcataatttccattttattcttctgagtgtctatgttaacttccctctatcccgcttataaaaaaattctccaacaaaaatacttgttgacttgatgttttatcacttctctaagtaaggttgaaatatccttattgtagctactgtttttaatgtaaaggttaaacttgaaaagaaattcttaatcacggtgccaaaa

SEQ ID NO: 3010 - DNA, 586 bp, Homo sapiens
  misc_feature (92)..(92): n includes a, c, g, or t, or contains no nucleotide
  misc_feature (100)..(100): n includes a, c, g, or t, or contains no nucleotide
  misc_feature (290)..(305): n includes a, c, g, or t, or contains no nucleotide
  misc_feature (477)..(477): n includes a, c, g, or t, or contains no nucleotide
  misc_feature (484)..(484): n includes a, c, g, or t, or contains no nucleotide
  misc_feature (526)..(540): n includes a, c, g, or t, or contains no nucleotide
ttccatgtacgagaaggagatgaacagagaacattcttcagtttccctgctgtagttgctccattcaaatgttccgtcctcccactgagccnaaaaccanggagttcatgccatttgtcaaggaattatcggaagccctgaccaggcatggagtatctcacaaagtagacgattcctctgggtcaatcggaaggcgctatgccaggactgatgagattggcgtggcttttggtgtcaccattgactttgacacagtgaacaagaccccccacactgcaactctgagggannnnnnnnnnnnnnnncagataagagcagagatctctgagctgcccagcatagtccaagacctagccaatggcaacatcacatgggctgatgtggaggccaggtatcctctgtttgaagggcaagagactggtaaaaaagagacaatcgaggaatgaggacaattttgacaacttttgaccacttgcngctaatnaaaaaaaaaaaaaactactcttatgtccactttacaaaagannnnnnnnnnnnnnntactcccagggaccgtattttatcttcagtggctgcctgattttac

SEQ ID NO: 3011 - DNA, 496 bp, Homo sapiens
  misc_feature (69)..(124): n includes a, c, g, or t, or contains no nucleotide
  misc_feature (299)..(317): n includes a, c, g, or t, or contains no nucleotide
  misc_feature (320)..(365): n includes a, c, g, or t, or contains no nucleotide
tcgcgggcgcagtacaacgcgctcaccctcaccttccagcgcgccatgcacgactacaaccaggccgannnnnnnnnnnnnnnnnnnnnnnnnnnnnnnnnnnnnnnnnnnnnnnnnnnnnnnngcaaggaagtctcgggcgaccagatcgaggacatgttcgagcagggtaagtgggacgtgttttccgagaacttgctggccgacgtgaagggcgcgcgggccgccctcaacgagatcgagagccgccaccgcgaactgctgcgcctggagagccgcatccgcgacgtacacgagcnnnnnnnnnnnnnnnnnnngcnnnnnnnnnnnnnnnnnnnnnnnnnnnnnnnnnnnnnnnnnnnnnnacaaaagacggtcgactacaccggccaggccaaggcgcaggtgcggaaggccgtgcagtacgaggagaagaacccctgccggaccctctgctgcttctgctgtccctgcctcaagtagcaggccggcccgg

SEQ ID NO: 3012 - DNA, 253 bp, Homo sapiens
  misc_feature (192)..(192): n includes a, c, g, or t, or contains no nucleotide
gggacagctgcttgggttctaatgctcctgctctcttctctttcccctccaaccagttcaatctcatccctcccagcagctccccttccaccccccggggaactgaagattgtcctggccgcgacctgagacctccatgagtggagggaagagtgatctatgtctcttcccccagcagctcggaccactccnagccccccatccccccgttccccaggggagctggggaattcctgccaagcaccttgaatgg

SEQ ID NO: 3013 - DNA, 399 bp, Homo sapiens
  misc_feature (164)..(181): n includes a, c, g, or t, or contains no nucleotide
  misc_feature (254)..(281): n includes a, c, g, or t, or contains no nucleotide
caatttcagtggtttattgttcacaaaaaaatcttcaaaacaagtattgactttcacaaaatttaaatcataaacaggcaaaccaaacagcacactgtagctatagttgttatgtgattgttttttaattgctgtaggatcctgttctttcagcaggtgaaaannnnnnnnnnnnnnnnnntttcatggttttaattttcaactcagaagcactcaaaaatgcaaaatgtgataatgggcacttgtttaaaagnnnnnnnnnnnnnnnnnnnnnnnnnnnntggttaaaaatgttgcacttatcagcaaccctaccactttcatctgctgaaaggacaaatgtgcttggttttactattatgtaatcacaacttactttctgcttgtagttgcttaaaa

SEQ ID NO: 3014 - DNA, 273 bp, Homo sapiens
gacaacatggcacagaatatcagtattccggccaggcctcagagacgtggcatatcaatatgtgaaaaaggggtctcgaatttatttggaagggaaaatagactatggtgaatacatggataaaaataatgtgaggcgacaagcaacaacaatcatagctgataatattatatttctgagtgaccagacgaaagagaaggagtagaaaggatgattcttctttggccatcatttggtacagtctcatttccaagtcatgtataatctttatgg

SEQ ID NO: 3015 - DNA, 109 bp, Homo sapiens
cgcccggccttgcatgctctttgaccctgaatttgacctacttgctggggtacagttgcttccttttgaacctccaacagggaaggctctgtccagaaaggattgaatg

SEQ ID NO: 3016 - DNA, 293 bp, Homo sapiens
tgccactctgggtgttcttctttgtgatcctcaccctcagcaacagctcccactgctccccacctccccctttgaccctcaggatgcggcggtatgcagatgccatcttcaccaacagctaccggaaggtgctgggccagctgtccgcccgcaagctgctccaggacatcatgagcaggcagcagggagagagcaaccaagagcgaggagcaagggcacggcttggtcgtcaggtagacagcatgtgggcagaacaaaagcaaatggaattggagagcatcctggtggccctg

SEQ ID NO: 3017 - DNA, 540 bp, Homo sapiens
  misc_feature (205)..(208): n includes a, c, g, or t, or contains no nucleotide
  misc_feature (210)..(210): n includes a, c, g, or t, or contains no nucleotide
  misc_feature (238)..(241): n includes a, c, g, or t, or contains no nucleotide
  misc_feature (280)..(281): n includes a, c, g, or t, or contains no nucleotide
  misc_feature (290)..(290): n includes a, c, g, or t, or contains no nucleotide
  misc_feature (357)..(357): n includes a, c, g, or t, or contains no nucleotide
  misc_feature (391)..(391): n includes a, c, g, or t, or contains no nucleotide
  misc_feature (456)..(470): n includes a, c, g, or t, or contains no nucleotide
  misc_feature (501)..(501): n includes a, c, g, or t, or contains no nucleotide
atctccagaaagtggtattccataaaacctaccaactcatggattcccaagatgtgagctttttacataatgaaagaacccagcaattctgtctcttaatgcaatgacactattcatagactttgattttatttataagccacttgctgcatgaccctccaagtagacctgtggcttaaaataaagaaaatgcagcaaaaagaannnnanagaaatatttggtggttttttttttttnnnnaaacatccacagttaaggttgggccagctacctttgggnntgacccccnccattgccataacatcctgctccattccctctaagatgtaggaagaattcggatccttaccattggnaatcttccatcgaacatactcaaacacttttggnccaggatttgagtctctgcatgacatatacttgattaaaaggttattactaacctgttaaaaatnnnnnnnnnnnnnnntttaacagacaccctaaaagtctccttttcnacatagttgaagacagcaacatcttcactgaatgttttg

SEQ ID NO: 3018 - DNA, 377 bp, Homo sapiens
  misc_feature (99)..(99): n includes a, c, g, or t, or contains no nucleotide
  misc_feature (111)..(111): n includes a, c, g, or t, or contains no nucleotide
  misc_feature (118)..(118): n includes a, c, g, or t, or contains no nucleotide
  misc_feature (121)..(121): n includes a, c, g, or t, or contains no nucleotide
  misc_feature (128)..(129): n includes a, c, g, or t, or contains no nucleotide
  misc_feature (132)..(132): n includes a, c, g, or t, or contains no nucleotide
  misc_feature (137)..(139): n includes a, c, g, or t, or contains no nucleotide
  misc_feature (141)..(146): n includes a, c, g, or t, or contains no nucleotide
  misc_feature (148)..(148): n includes a, c, g, or t, or contains no nucleotide
  misc_feature (152)..(200): n includes a, c, g, or t, or contains no nucleotide
  misc_feature (244)..(244): n includes a, c, g, or t, or contains no nucleotide
  misc_feature (269)..(285): n includes a, c, g, or t, or contains no nucleotide
  misc_feature (312)..(312): n includes a, c, g, or t, or contains no nucleotide
gctgtgcattctattttctacatagcactgaatctgagtaacagtcatcctggatttatagttggaacagaacagtaacagacctaactgggactcagnccagcactagcntcatctnagntgccccnnttntctgnnntnnnnnntnctgnnnnnnnnnnnnnnnnnnnnnnnnnnnnnnnnnnnnnnnnnnnnnnnnnagcaagacagtgtattaatagtgtgaattagatacactgatgancctgctctgcctagttaagaaactnnnnnnnnnnnnnnnnncaaagcacatactttgttacgtgctangctttgcctcctggcctctagataattaagacggcccagggaataccagcagagaagtgctaatt

SEQ ID NO: 3019 - DNA, 487 bp, Homo sapiens
ctgcctctgtctcactgaactagaagccgagcctagaaactaacacagccatcaagggaatgacttgggcggccttgggaaatcgatgagaaattgaacttcagggagggtggtcattgcctagaggtgctcattcatttaacagagcttccttaggttgatgctggaggcagaatcccggctgtcaaggggtgttcagttaaggggagcaacagaggacatgaaaaattgctatgactaaagcagggacaatttgctgccaaacacccatgcccagctgtatggctgggggctcctcgtatgcatggaacccccagaataaatatgctcagccaccctgtgggccgggcaatccagacagcaggcataaggcaccagttaccctgcatgttggcccagacctcaggtgctagggaaggcgggaaccttgggttgagtaatgctcgtctgtgtgttttagtttcatcacctgttatctgtgtttgct

SEQ ID NO: 3020 - DNA, 577 bp, Homo sapiens
  misc_feature (149)..(149): n includes a, c, g, or t, or contains no nucleotide
  misc_feature (193)..(193): n includes a, c, g, or t, or contains no nucleotide
  misc_feature (308)..(308): n includes a, c, g, or t, or contains no nucleotide
  misc_feature (355)..(361): n includes a, c, g, or t, or contains no nucleotide
  misc_feature (386)..(460): n includes a, c, g, or t, or contains no nucleotide
tatatgcacatatacaaagacagtgtctatttatgattgatttatttatttataaatttacttatgggtggtaaggggcaaaaaagaggcccacaccttgatatccaggccataccagggtatcccttgtcccttcacccccatttctnacctcagttcctggaggggggaaagggtgaaagagaaaccacgnattttgttattattttggattattttttatcgaagagatcatagaaaccagagccttctccccaggcctgccctcctcgggtttggaaggggaacacaccagcctctggtttttnatttttttaagaagccatcacctgagcaaccaaaaattcctctgcgnnnnnnnccgactgccctctggtggccatttnnnnnnnnnnnnnnnnnnnnnnnnnnnnnnnnnnnnnnnnnnnnnnnnnnnnnnnnnnnnnnnnnnnnnnnnnnnccacagccatggcctgggggccaagcctcaccctgcggtgccctaaaggagggggggcacgagccaacaccccacccctctgccaaccggggtatggcccccagtgcattccctgtt

SEQ ID NO: 3021 - DNA, 449 bp, Homo sapiens
  misc_feature (67)..(67): n includes a, c, g, or t, or contains no nucleotide
  misc_feature (160)..(200): n includes a, c, g, or t, or contains no nucleotide
  misc_feature (316)..(316): n includes a, c, g, or t, or contains no nucleotide
  misc_feature (318)..(318): n includes a, c, g, or t, or contains no nucleotide
tatatagagcacctggaagcagtaacatgcaaatgtcagcaagaatatttcggtgaacggtgtgggnaaaagtccatgaaaactcacagcatgattgacagtagtttatcaaaaattgcattagcagccatagctgcctttatgtctgctgtgatcctcnnnnnnnnnnnnnnnnnnnnnnnnnnnnnnnnnnnnnnnnncgtcaggaaatatgaaggagaagctgaggaacgaaagaaacttcgacaagagaatggaaatgtacatgctatagcataactgaagataaaattacaggatatcacattggagtcantnccaagtcatagccataaatgatgagtcggtcctctttccagtggatcataagacaatggaccctttttgttatgatggttttaaactttcaattgtcactttttatgctatttctgtatataaaggtgcac

SEQ ID NO: 3022 - DNA, 456 bp, Homo sapiens
  misc_feature (110)..(110): n includes a, c, g, or t, or contains no nucleotide
  misc_feature (121)..(121): n includes a, c, g, or t, or contains no nucleotide
  misc_feature (123)..(125): n includes a, c, g, or t, or contains no nucleotide
  misc_feature (128)..(131): n includes a, c, g, or t, or contains no nucleotide
  misc_feature (133)..(135): n includes a, c, g, or t, or contains no nucleotide
  misc_feature (137)..(137): n includes a, c, g, or t, or contains no nucleotide
  misc_feature (139)..(140): n includes a, c, g, or t, or contains no nucleotide
  misc_feature (145)..(159): n includes a, c, g, or t, or contains no nucleotide
  misc_feature (312)..(355): n includes a, c, g, or t, or contains no nucleotide
ctgagtgcaaattgcatgggcggaaaggcgggggtggctgctcttcctggcaggcctgggccatcagcgaactgggccccgtgaggagggcgggagtgtggaggagggtnggcctctcacncnnnctnnnncnnncncnntcctnnnnnnnnnnnnnnngccagccccctccttagggggtgggcgaggagcctctgggcagacccaagaaccatggggactggggtgggttggtggcaccaatggcagccctccccgcccctctccttcaaggagggttcccgcagctggggggtgtgcggaggcgcatgnnnnnnnnnnnnnnnnnnnnnnnnnnnnnnnnnnnnnnnnnnnnagccagcgggtgggggattctgctgctcgctcacctgcctggctcgctggtctctcgaattttcttccctctgaaatcctatttaagaacttttggaagct

SEQ ID NO: 3023 - DNA, 348 bp, Homo sapiens
  misc_feature (51)..(56): n includes a, c, g, or t, or contains no nucleotide
  misc_feature (58)..(58): n includes a, c, g, or t, or contains no nucleotide
  misc_feature (61)..(61): n includes a, c, g, or t, or contains no nucleotide
  misc_feature (64)..(65): n includes a, c, g, or t, or contains no nucleotide
  misc_feature (67)..(67): n includes a, c, g, or t, or contains no nucleotide
  misc_feature (69)..(72): n includes a, c, g, or t, or contains no nucleotide
  misc_feature (74)..(74): n includes a, c, g, or t, or contains no nucleotide
  misc_feature (76)..(76): n includes a, c, g, or t, or contains no nucleotide
  misc_feature (79)..(80): n includes a, c, g, or t, or contains no nucleotide
  misc_feature (84)..(89): n includes a, c, g, or t, or contains no nucleotide
  misc_feature (91)..(96): n includes a, c, g, or t, or contains no nucleotide
  misc_feature (98)..(99): n includes a, c, g, or t, or contains no nucleotide
  misc_feature (134)..(176): n includes a, c, g, or t, or contains no nucleotide
  misc_feature (180)..(323): n includes a, c, g, or t, or contains no nucleotide
gtgcctgacttgggataggactgagtggtaggaggagggggagtggagggnnnnnncnttnccnnantnnnncntnaannaaannnnnntnnnnnntnnaaaaaaaaaaaaaaaaaaaaaaaaaaaaaaaaaannnnnnnnnnnnnnnnnnnnnnnnnnnnnnnnnnnnnnnnnnnacannnnnnnnnnnnnnnnnnnnnnnnnnnnnnnnnnnnnnnnnnnnnnnnnnnnnnnnnnnnnnnnnnnnnnnnnnnnnnnnnnnnnnnnnnnnnnnnnnnnnnnnnnnnnnnnnnnnnnnnnnnnnnnnnnnnnnnnnnnnnnnnttcccaaacaagtttgcggaagcct

SEQ ID NO: 3024 - DNA, 508 bp, Homo sapiens
tgagagagccctaaagcattgtacctagtggtacctagtgacttccaaccaaagcctttgagtatgcactaaataggtgagaagaaaggagagaaggtttttaggttagaaacctttaaccgatagaaggatatggtatgttgtaaagctggaaccaagtttgcatttttgagggcttgagatgaagggaagactcttaccagatagtaagacagctgagttttcctcagttttctcgtcttaacactagtggacaattctagcattttgtttggaggatttcagagttaacctcatggaattcaggattttttagcaagtttgcttttggttttatcttggcttttagtaatcatgttggctggtctggtcacaggtgactgtgaaacagatgccctggtcttgctttcatcactctaggatcatgaagtgctatgctatttcctggttatgaatattaaggttggaattacatttttattgattgtttggatcagagctcagttcc

SEQ ID NO: 3025 - DNA, 464 bp, Homo sapiens
  misc_feature (180)..(182): n includes a, c, g, or t, or contains no nucleotide
  misc_feature (188)..(207): n includes a, c, g, or t, or contains no nucleotide
  misc_feature (272)..(272): n includes a, c, g, or t, or contains no nucleotide
  misc_feature (307)..(307): n includes a, c, g, or t, or contains no nucleotide
  misc_feature (328)..(328): n includes a, c, g, or t, or contains no nucleotide
  misc_feature (330)..(331): n includes a, c, g, or t, or contains no nucleotide
  misc_feature (338)..(339): n includes a, c, g, or t, or contains no nucleotide
  misc_feature (346)..(346): n includes a, c, g, or t, or contains no nucleotide
  misc_feature (352)..(353): n includes a, c, g, or t, or contains no nucleotide
  misc_feature (355)..(355): n includes a, c, g, or t, or contains no nucleotide
  misc_feature (357)..(357): n includes a, c, g, or t, or contains no nucleotide
  misc_feature (361)..(361): n includes a, c, g, or t, or contains no nucleotide
  misc_feature (371)..(371): n includes a, c, g, or t, or contains no nucleotide
  misc_feature (384)..(385): n includes a, c, g, or t, or contains no nucleotide
  misc_feature (390)..(390): n includes a, c, g, or t, or contains no nucleotide
  misc_feature (393)..(393): n includes a, c, g, or t, or contains no nucleotide
  misc_feature (397)..(397): n includes a, c, g, or t, or contains no nucleotide
  misc_feature (400)..(400): n includes a, c, g, or t, or contains no nucleotide
  misc_feature (403)..(403): n includes a, c, g, or t, or contains no nucleotide
  misc_feature (406)..(406): n includes a, c, g, or t, or contains no nucleotide
  misc_feature (409)..(409): n includes a, c, g, or t, or contains no nucleotide
  misc_feature (412)..(412): n includes a, c, g, or t, or contains no nucleotide
  misc_feature (416)..(416): n includes a, c, g, or t, or contains no nucleotide
  misc_feature (419)..(419): n includes a, c, g, or t, or contains no nucleotide
  misc_feature (421)..(421): n includes a, c, g, or t, or contains no nucleotide
  misc_feature (429)..(429): n includes a, c, g, or t, or contains no nucleotide
  misc_feature (438)..(438): n includes a, c, g, or t, or contains no nucleotide
actcgagtctttaattgtaatgactttgttttatccacagttaagccttttctcattacatatttatgtatttcactgtcatgtcaacatgtctgcagaatcactgtatgtaacaaacagccatatttaagacatgcctggataaataaaattggtaggaatgttttcttgccattatannnaaaaannnnnnnnnnnnnnnnnnnnacaaatcttgataagtttttttatattagttttattttctagaaaatgtcttatgaatttctccnatttgctctagcatgcttatagaaaatgtcagtgntttcttacagctcaaatttgntnntagttgnntttaaantgcggnncncnttcnttcttccccnggtacttttttcnntttcngtntacngangtnagntcntanacanggncntatatttnggctgtctntttttccctaggaacattcatacagg

SEQ ID NO: 3026 - DNA, 464 bp, Homo sapiens
  misc_feature (30)..(30): n includes a, c, g, or t, or contains no nucleotide
  misc_feature (78)..(78): n includes a, c, g, or t, or contains no nucleotide
  misc_feature (108)..(108): n includes a, c, g, or t, or contains no nucleotide
  misc_feature (118)..(118): n includes a, c, g, or t, or contains no nucleotide
  misc_feature (150)..(150): n includes a, c, g, or t, or contains no nucleotide
  misc_feature (155)..(155): n includes a, c, g, or t, or contains no nucleotide
  misc_feature (167)..(167): n includes a, c, g, or t, or contains no nucleotide
  misc_feature (170)..(170): n includes a, c, g, or t, or contains no nucleotide
  misc_feature (177)..(177): n includes a, c, g, or t, or contains no nucleotide
  misc_feature (184)..(184): n includes a, c, g, or t, or contains no nucleotide
  misc_feature (192)..(193): n includes a, c, g, or t, or contains no nucleotide
  misc_feature (204)..(204): n includes a, c, g, or t, or contains no nucleotide
  misc_feature (256)..(256): n includes a, c, g, or t, or contains no nucleotide
ctgggaactcacagccagcatagggacatnccccctgcagccttctgacctgcaatcaaggctggggaggggtttgcnaggcaggaatatgctgacctttcaccctgnccatcccatncccaaccccagctcactagccttcatatatgnccttnatacttggagtncancaggggncaaaggncctgagannccccaccctgncccccaaactggctaagacagctttcagttcctgactccccaacttggtctnctgccctgaagcagggcactgaactctgggctgcttctctgtgtgtaaaatgggcacatcttcctaatctgttaatggtcagtggtgtccccaaggatagtgctggcttccatggaaaccctcactcctggagattccattccattttcaagtgtacagccacagcaaggagcccgacactgatttgatcgattctgtgacacaaacc

SEQ ID NO: 3027 - DNA, 589 bp, Homo sapiens
  misc_feature (28)..(28): n includes a, c, g, or t, or contains no nucleotide
  misc_feature (35)..(51): n includes a, c, g, or t, or contains no nucleotide
  misc_feature (55)..(55): n includes a, c, g, or t, or contains no nucleotide
  misc_feature (64)..(130): n includes a, c, g, or t, or contains no nucleotide
  misc_feature (272)..(288): n includes a, c, g, or t, or contains no nucleotide
  misc_feature (341)..(341): n includes a, c, g, or t, or contains no nucleotide
ggtgctatatgttccgcatggatgactntgatgtnnnnnnnnnnnnnnnnnatgncaatgccgnnnnnnnnnnnnnnnnnnnnnnnnnnnnnnnnnnnnnnnnnnnnnnnnnnnnnnnnnnnnnnnnnnnacacattgttatcttcgccctgcgccgcatcctgcgtggtgaggagctcacctacgactacaagttccccatcgaggatgccagcaacaagctgccctgcaactgtggcgccaagcgctgccgtcggttccttaactgaggnnnnnnnnnnnnnnnnngacccctcacacctcctgctgccgtcgctgccatcttgcccctagcctggggnctccctagcccctcccagagcatctcacccccaccctcatgttcagggtggatgtgggcatgcaggtgacaagggccctgcctccacccctccagcccatccagcaatcgccccctttctgccctgggggcccaggatgtagatattgtacaaaggtttctaaatcccttcttttctatgcacttttttatttaagaggtggggtcccaggtgggaacccccccacaataaagtctgtcaatgtttgg

SEQ ID NO: 3028 - DNA, 148 bp, Homo sapiens
  misc_feature (61)..(61): n includes a, c, g, or t, or contains no nucleotide
  misc_feature (91)..(91): n includes a, c, g, or t, or contains no nucleotide
  misc_feature (109)..(109): n includes a, c, g, or t, or contains no nucleotide
  misc_feature (112)..(112): n includes a, c, g, or t, or contains no nucleotide
gtgaaggcaacagactccagtgcaggtccacaagggcccccctgcgggagcgcctgtctgnaggatgcggggcagagggaactgatttggnagcccaaaggaagagggnagntgggagcaggagcccctagcccttttcagaataggg

SEQ ID NO: 3029 - DNA, 563 bp, Homo sapiens
  misc_feature (274)..(289): n includes a, c, g, or t, or contains no nucleotide
tggtcttgagcaccactgggggcccttccccagatacttgttcccaggaccttaactcacgtgtgaagccaggatttcctaaaacaataaagaccaatgacccaggagtcctccaagcagccagatacagtgttgaaaagttcaacaactgcacgaacgacatgttcttgttcaaggagtcccgcatcacaagggccctagttcagatagtgaaaggcctgaaatatatgctcgaggtggaaattggcagaactacctgcaagaaaaaccagcnnnnnnnnnnnnnnnnctgtgacttccaaaccaaccacaccttgaagcagactctgagctgctactctgaagtctgggtcgtgccctggctccagcacttcgaggtgcctgttctccgttgtcactgacccccgcctcttcagcaagaccacagccatgacaaacaccaggatgcatgctccttgtcccctcccacccgcctcatgacccagcctcacagaccctctcaggcctctgacgagtgagcgggtgaagtgccactgggtcaccgcagggcagctggaatggca

SEQ ID NO: 3030 - DNA, 480 bp, Homo sapiens
  misc_feature (441)..(455): n includes a, c, g, or t, or contains no nucleotide
tattcccatgggtcacaggagacagatgaggagtttgatgctcgctgggtaacatacttcaacaagccagatatagatgcctgggaattgcgtaaagggataaacacacttgttacctatgatatggttccagagcccaaaatcattgatgctgctttgcgggcatgcagacggttaaatgattttgctagtacagttcgtatcctagaggttgttaaggacaaagcaggacctcataaggaaatctacccctatgtcatccaggaacttagaccaactttaaatgaactgggaatctccactccggaggaactgggccttgacaaagtgtaaaccgcatggatgggcttccccaaggatttattgacattgctacttgagtgtgaacagttacctggaaatactgatgataacatattaccttatttgaacaagttttcnnnnnnnnnnnnnnnagccatgtaatggtaacttggactt

SEQ ID NO: 3031 - DNA, 478 bp, Homo sapiens
  misc_feature (36)..(54): n includes a, c, g, or t, or contains no nucleotide
  misc_feature (88)..(162): n includes a, c, g, or t, or contains no nucleotide
gctaatggcacaactgtccacgtaggcattcacccnnnnnnnnnnnnnnnnnnnaggctaaaactggacaaagaccgcaaaaagatcnnnnnnnnnnnnnnnnnnnnnnnnnnnnnnnnnnnnnnnnnnnnnnnnnnnnnnnnnnnnnnnnnnnnnnnnnnncaggaataaagtaatcttatatacaagctttgattaaaacttgaaacaaaaaaaaaggggaagaaacgacagcctcacttctgtatggactgctgatgtggcctgccatcctgttcagcgggcattgtctttggagcagcaggagactaggatgcctctcactcacatcgagttcctggctggccagctgctcagggctcaggctggggcctcccattgacatcctccccctacactccctctctgagcctccgtcgcccctcctgttgggtaagggtgttgagtgtgacttgtgctgaaaacctggttcatatat

SEQ ID NO: 3032 - DNA, 132 bp, Homo sapiens
ctagctccaaaaccatcccaggtcattcttcatcctcacccaggattctcctgtacctgctcccaatctgtgttcctaaaagtgattctcactctgcttctcatctcctacttacatgaatacttctctctt

SEQ ID NO: 3033 - DNA, 405 bp, Homo sapiens
  misc_feature (26)..(26): n includes a, c, g, or t, or contains no nucleotide
  misc_feature (49)..(49): n includes a, c, g, or t, or contains no nucleotide
  misc_feature (77)..(77): n includes a, c, g, or t, or contains no nucleotide
  misc_feature (95)..(95): n includes a, c, g, or t, or contains no nucleotide
  misc_feature (132)..(132): n includes a, c, g, or t, or contains no nucleotide
  misc_feature (184)..(184): n includes a, c, g, or t, or contains no nucleotide
gctccaagtgagctctcgcagctgcnagcaatccaaaggctcttttcanagccactcacgcttccagagaaagagcntgtgcattttgcttgtangtcttttgggtggactccggccggcctccattaggangggaagacggcgggaaaagtacagccgtctctgtgtacctgcaaccaccttngcccagctccaaggaccaaggaaagatggtttctctcttctatggaatcattgcacccatgctgaatccccttatatatacacttaggaacaaggaggtaaaggaaggctttaaaaggttggttgcaagagtcttcttaatcaagaaataagaaatatgcaaatgataagctttgctaaagacaaaatgtttacttagcttactaacttctctgtaagttg

SEQ ID NO: 3034 - DNA, 494 bp, Homo sapiens
  misc_feature (33)..(56): n includes a, c, g, or t, or contains no nucleotide
  misc_feature (198)..(198): n includes a, c, g, or t, or contains no nucleotide
  misc_feature (243)..(243): n includes a, c, g, or t, or contains no nucleotide
  misc_feature (252)..(254): n includes a, c, g, or t, or contains no nucleotide
  misc_feature (256)..(259): n includes a, c, g, or t, or contains no nucleotide
  misc_feature (263)..(263): n includes a, c, g, or t, or contains no nucleotide
  misc_feature (266)..(266): n includes a, c, g, or t, or contains no nucleotide
  misc_feature (270)..(316): n includes a, c, g, or t, or contains no nucleotide
  misc_feature (322)..(324): n includes a, c, g, or t, or contains no nucleotide
  misc_feature (327)..(328): n includes a, c, g, or t, or contains no nucleotide
acagcagaggccaccaaggactgccccagcccnnnnnnnnnnnnnnnnnnnnnnnncatggggctgtgggtggactgcaggggccacggactcacggccctgcctgccctgccggcccgcacccgccaccttctgctggccaacaacagccttcagtccgtgcccccgggagcctttgaccacctgccccagctgcanaccctcgatgtgacgcagaacccctggcactgtgactgcagcctnacctatctnnncnnnntggntgnaggnnnnnnnnnnnnnnnnnnnnnnnnnnnnnnnnnnnnnnnnnnnnnnnctcgcnnnccnnggcccgctgggccggctgacaggctaccagctgggcagctgtggctggcagctgcaggcgtcctgggtgcgcccgggggtcttgtgggacgtggcgctggtcgccgtggccgcgctgggcctggctcttctggctggcctgctgtgtgccaccacagaggccctgg

SEQ ID NO: 3035 - DNA, 223 bp, Homo sapiens
  misc_feature (58)..(99): n includes a, c, g, or t, or contains no nucleotide
agcaccgtgaagacgaatatgatctgtgctgggggtgatggcgtgatatgcacctgcnnnnnnnnnnnnnnnnnnnnnnnnnnnnnnnnnnnnnnnnnnggccggtgggaggtgcatggcatcggcagcctcacgtcggtccttggttgcaactactactacaagccctccatcttcacgcgggtctccaactacaacgactggatcaattcggtgattgcaa

SEQ ID NO: 3036 - DNA, 528 bp, Homo sapiens
  misc_feature (160)..(219): n includes a, c, g, or t, or contains no nucleotide
  misc_feature (376)..(398): n includes a, c, g, or t, or contains no nucleotide
  misc_feature (456)..(475): n includes a, c, g, or t, or contains no nucleotide
ctgccgcggggcactgccaaagaagggcaagggcccggccccaaacggggaactgagcctaaagtcaagctgccccccaagtcccaacctccggagaaaacagaggaatctccttcagcccctgatgcacccacctgcccaaagcagtgccgccggacannnnnnnnnnnnnnnnnnnnnnnnnnnnnnnnnnnnnnnnnnnnnnnnnnnnnnnnnnnnatggttcgggagccaggggagggccttgccgtgactgtcagtcttattggtgcttataaaactggaggactggacctgccaactccacccactggtgcctccctgaagttttacgtgccttgcaagcagtgcccccccatgaagaaaggagtcagtnnnnnnnnnnnnnnnnnnnnnnnagagaacagaggccccgtccttcctccagagagctttgtggttctccaccggcccaannnnnnnnnnnnnnnnnnnnacctaagcaagaggaagtgcccctctcaacctgtgcgggctgctgcgtcccag

SEQ ID NO: 3037 - DNA, 548 bp, Homo sapiens
  misc_feature (77)..(93): n includes a, c, g, or t, or contains no nucleotide
  misc_feature (150)..(150): n includes a, c, g, or t, or contains no nucleotide
  misc_feature (161)..(162): n includes a, c, g, or t, or contains no nucleotide
  misc_feature (285)..(286): n includes a, c, g, or t, or contains no nucleotide
  misc_feature (352)..(352): n includes a, c, g, or t, or contains no nucleotide
  misc_feature (354)..(354): n includes a, c, g, or t, or contains no nucleotide
  misc_feature (409)..(409): n includes a, c, g, or t, or contains no nucleotide
  misc_feature (411)..(414): n includes a, c, g, or t, or contains no nucleotide
  misc_feature (416)..(416): n includes a, c, g, or t, or contains no nucleotide
  misc_feature (418)..(421): n includes a, c, g, or t, or contains no nucleotide
  misc_feature (443)..(443): n includes a, c, g, or t, or contains no nucleotide
  misc_feature (455)..(456): n includes a, c, g, or t, or contains no nucleotide
  misc_feature (492)..(492): n includes a, c, g, or t, or contains no nucleotide
  misc_feature (496)..(496): n includes a, c, g, or t, or contains no nucleotide
  misc_feature (519)..(519): n includes a, c, g, or t, or contains no nucleotide
cagatccgttctttctctgtgttgtcctcctccttcccttcccagtctcccttttctctctcctggtgtctctgccnnnnnnnnnnnnnnnnnaccttatcctctattcttcactttggggtcagaacttcgggggtgtggaggaggtgnggctctagggnnacaggtaatgtcggcttccaagtgatgccctcctgccactcccctgcgatttataagggaattttaatttttatagtgaatctcaagggatcatcccatccttgaccacagggacaagagggnnccccctcgccccagccccaccccacatggagctcagggggaagcagggaggggttcccaaaagagncntgcggaggctaggagtggttcttgatgctcacctgaagcccctagacgctgctangnnnngngnnnntcctgggcccccaatacccctncgcttgccgctnntagcgcacccctgcagtccagcgtgcatccaccccnacgnacgccccgtgctgtgttcctggnccctgcccatggcctcaataaactctctg

SEQ ID NO: 3038 - DNA, 415 bp, Homo sapiens
aaggcaagggcttgctccagttccaaatggtgttgatgtcgatgaatttataaatgtaaggctgcatgaggcagataatgatcccacagccccgccatatgactccattcaaatatatggctatgaaggccgagggtcagtggctggctccctcagctccttggagtccaccacatcagactcagaccagaattttgactacctcagtgactggggtccccgctttaagagactgggcgaactctactctgttggtgaaagtgacaaagaaacttgacagtggattataaataaatcactggaactgagcattctgtaatattctagggtcactccccttagatacaaccaatgtggctatttgtttagaggcaagtttagcaccagtcatctataactcaaccacatttaatgt

SEQ ID NO: 3039 - DNA, 391 bp, Homo sapiens
aaaggagcaactcagctctttgcaagaggagctagaatcactcctagagaagtaaaaagaactgatatttaatttcagtcttcagactggtcagcattagaaaattcttggctttattgtactgggtattaagaccttgctcttcctagtccttttaatgctgtgtgttctgttaagttctttcatttgtttgtaattttgtttttcagcaaatttatattgttttgctaggtgttcatcctataagaagcaggatcgtataggcagaaaaatgattgtaggaaagttgcaggattagcggaatgtatggttcaaccttaattatagcttcattgcaggactttactgtttctccattttctagaagctgctgttgctgctttgtgatgac

SEQ ID NO: 3040 - DNA, 408 bp, Homo sapiens
  misc_feature (127)..(148): n includes a, c, g, or t, or contains no nucleotide
  misc_feature (183)..(183): n includes a, c, g, or t, or contains no nucleotide
  misc_feature (185)..(187): n includes a, c, g, or t, or contains no nucleotide
  misc_feature (312)..(312): n includes a, c, g, or t, or contains no nucleotide
ttctgtaaagaatcctctttagctgtggcctggcagtatataaatggtgctttatttaacagaatacctgtggaggaaataaagcacacttgatgtaaaaataattgttttatttttattgacatgnnnnnnnnnnnnnnnnnnnnnntgtgcacttaattaaactgattgtgatgacttttnannngtttacatacgttgcttcagtcttctcaggtgaaagtagtgagaaaaccgtgaaagaggggggaaacatttatccattatatgctgtttcactggaagtgttaccagcagtccacagaactaatntgtccccacagacttctcaatcctctccacaccgaagtgcaaaaccacagcagggagatgtgcagggagatgtggagcaaaacacagccaatttgc

SEQ ID NO: 3041 - DNA, 539 bp, Homo sapiens
  misc_feature (62)..(62): n includes a, c, g, or t, or contains no nucleotide
  misc_feature (64)..(64): n includes a, c, g, or t, or contains no nucleotide
  misc_feature (87)..(87): n includes a, c, g, or t, or contains no nucleotide
  misc_feature (367)..(381): n includes a, c, g, or t, or contains no nucleotide
  misc_feature (512)..(512): n includes a, c, g, or t, or contains no nucleotide
cctgagaagctgctccaggcctgcagcaggagtggtgcagacagaagtctcctcaatttttntntcagaagtgaaaatcttggagancctgcaaacagaacagggtcatgtttgcaggggtgacggccctcatctatgaggaaaggttttggatcttgaatgtggtctcaggatatccttatcagagctaagggtgggtgctcagaataaggcaggcattgaggaagagtcttggtttctctctacagtgccaactcctcacacaccctgaggtcagggagtgctggctcacagtacagcatgtgccttaatgcttcatatgaggaggatgtccctgggccagggtctgtgtgaatgtgggcactgnnnnnnnnnnnnnnnttatttgctaatcaaagccagggtctctccctcaggtgttttttatgaagtgcgtgaatgtatgtaatgtgtggtggcctcagctgaatgcctcctgtggggaaaggggttggggtgacagtcatcatcanggcctggggcctgagagaattggctca

SEQ ID NO: 3042 - DNA, 508 bp, Homo sapiens
  misc_feature (112)..(112): n includes a, c, g, or t, or contains no nucleotide
  misc_feature (129)..(129): n includes a, c, g, or t, or contains no nucleotide
  misc_feature (356)..(370): n includes a, c, g, or t, or contains no nucleotide
tggtgtgctcccaggactggcatgacaggtgtctcctcctcaccacaggctgtgcccatgagtccctgtgcagaccagtgggcaaggcagctgggccagatctcaggccagnccgtttgtgctcctagncagggttgctgtgctggccacacggagaggccctagagagcctcatggattgtaactaaagaagaaacggttcctttttgtttttttaaaaatgatttttaaataccgttttttacaccgttctctcggtactttttttaagctaagtcagcattgtcttccagtgttaaaggcatccctcacctctgcattgaacttacgtatccatgccaaggaatggaatttcnnnnnnnnnnnnnnncagttaggtgtcaattgatactattttaattttttatgcaatctgatgagatgagctcagatttaaaaatctcaaaagcacgtttattgtaacaagaattgttatgtattaatactgcagttttcaataaagattgac

SEQ ID NO: 3043 - DNA, 434 bp, Homo sapiens
  misc_feature (44)..(62): n includes a, c, g, or t, or contains no nucleotide
  misc_feature (328)..(343): n includes a, c, g, or t, or contains no nucleotide
  misc_feature (374)..(374): n includes a, c, g, or t, or contains no nucleotide
attgacatctcttgtatttatggtctcaaagaagatggagcagnnnnnnnnnnnnnnnnnnnatccacagccatcataaagcttaataatacaaccgtgctttatttaaaagaggtgacaaagttcctggctctcgtttgctttgtcagagaggaaagctttgaaagaaaagggctaattgactataattttcattgcttccggaaggccattcatgaagtttttgaggtgagaatgaaagtagtaaaatctcgaaaggttcagaatcggctgcagaagaaaaagagagccacccctaatgggacccctagagtgctgctgtaggtgnnnnnnnnnnnnnnnnttttgaaatcagaccttatccatgaggctgntgcgccatgttgcactaaaggaagaggaagaaggagattgggacacataccattgatttg

SEQ ID NO: 3044 - DNA, 411 bp, Homo sapiens
  misc_feature (82)..(82): n includes a, c, g, or t, or contains no nucleotide
  misc_feature (102)..(102): n includes a, c, g, or t, or contains no nucleotide
  misc_feature (107)..(108): n includes a, c, g, or t, or contains no nucleotide
  misc_feature (134)..(134): n includes a, c, g, or t, or contains no nucleotide
  misc_feature (323)..(323): n includes a, c, g, or t, or contains no nucleotide
tacctggagggcacctgcatggagtggctccgcagacacctggagaacgggaaggagacgctgcagcgcgcggacccccccnaagacacacgtgacccaccnccctnnctctgaacatgaggcataacgaggtnctgggttctgggcttctaccctgcggagatcacattgacctggcagcgggatggggaggaccagacccaggacatggagctcgtggagaccaggcccacaggggatggaaccttccagaagtgggcggttgtggtagtgccttctggagaggaacagagatacacatgccatgtgcagcacaaggggcntgcccaagcccctcatcctgagatgggagccctctccccagcccaccatccccattgtgggtatcattgctggcctggttctccttgg

SEQ ID NO: 3045 - DNA, 249 bp, Homo sapiens
  misc_feature (42)..(42): n includes a, c, g, or t, or contains no nucleotide
  misc_feature (58)..(58): n includes a, c, g, or t, or contains no nucleotide
  misc_feature (63)..(63): n includes a, c, g, or t, or contains no nucleotide
  misc_feature (85)..(99): n includes a, c, g, or t, or contains no nucleotide
  misc_feature (115)..(115): n includes a, c, g, or t, or contains no nucleotide
  misc_feature (124)..(124): n includes a, c, g, or t, or contains no nucleotide
  misc_feature (126)..(128): n includes a, c, g, or t, or contains no nucleotide
  misc_feature (139)..(191): n includes a, c, g, or t, or contains no nucleotide
ggccccagggcagagggtcaccatctcctgcactgggagcanctccaacatcggggcnggttntgatgtacactggtaccagcannnnnnnnnnnnnnnccccaaactcctcatntatggtaanannnatcggccctcnnnnnnnnnnnnnnnnnnnnnnnnnnnnnnnnnnnnnnnnnnnnnnnnnnnnnccatcactgggctccaggctgaggatgaggctgattattactgccagtcctatgacag

SEQ ID NO: 3046 - DNA, 528 bp, Homo sapiens
  misc_feature (42)..(62): n includes a, c, g, or t, or contains no nucleotide
  misc_feature (246)..(317): n includes a, c, g, or t, or contains no nucleotide
  misc_feature (342)..(342): n includes a, c, g, or t, or contains no nucleotide
  misc_feature (432)..(481): n includes a, c, g, or t, or contains no nucleotide
gatgcagcagtgacaaatggcattttaacttgtaaaatcgtnnnnnnnnnnnnnnnnnnnnnaaatagaagaataaaaacctggtcccgtttcaccagacatgaatttcaagtggagtcgtcgttctctgagagtgagtgtcttgacattttcacccaggccctcctgtcatcacatcaccggctgtcactggcgggtggccgtaaacgtcctgcgttgctatattaggatctctgcagttcaggnnnnnnnnnnnnnnnnnnnnnnnnnnnnnnnnnnnnnnnnnnnnnnnnnnnnnnnnnnnnnnnnnnnnnnnngagctgtagttgcggcttgcgtgcntcgcggcccactacagggctgcagacaatcgaggcgagggcgctggccgccagcagctcacagcgcgggggtcatgtggtcgctcctcgnnnnnnnnnnnnnnnnnnnnnnnnnnnnnnnnnnnnnnnnnnnnnnnnnntaaactattggtaatttaagtttccttttgtgtcattcagtgtaaaa

SEQ ID NO: 3047 - DNA, 235 bp, Homo sapiens
  misc_feature (149)..(209): n includes a, c, g, or t, or contains no nucleotide
agctcctccaggtgacccagcaaggctgttgtctgtatggaaggacacgctcgcggcaagggcagggcctggggagggtggcctgtccagtcctgcagacaaggggaggcctgacagagcccaagaatgaggacaccctcggcacgggnnnnnnnnnnnnnnnnnnnnnnnnnnnnnnnnnnnnnnnnnnnnnnnnnnnnnnnnnnnnnggcttgttttactcaggcaagagaat

SEQ ID NO: 3048 - DNA, 475 bp, Homo sapiens
  misc_feature (35)..(35): n includes a, c, g, or t, or contains no nucleotide
  misc_feature (65)..(65): n includes a, c, g, or t, or contains no nucleotide
  misc_feature (67)..(67): n includes a, c, g, or t, or contains no nucleotide
  misc_feature (127)..(127): n includes a, c, g, or t, or contains no nucleotide
  misc_feature (132)..(133): n includes a, c, g, or t, or contains no nucleotide
  misc_feature (339)..(339): n includes a, c, g, or t, or contains no nucleotide
  misc_feature (365)..(365): n includes a, c, g, or t, or contains no nucleotide
  misc_feature (419)..(419): n includes a, c, g, or t, or contains no nucleotide
  misc_feature (443)..(443): n includes a, c, g, or t, or contains no nucleotide
aagggctctttccaggatgctggcgttatccaagntgcctacagcctaaacttccccctgttggntntgccagcccccagcccagcgcccgccacctcctggagtgcgttttccgtgtcttcacccncggtnngtattggagaccgtcaagcaggcggagagcagcccccagcgccgctcgctggtcctgaggctgtatgaggcccacggcagccacgtggactgctggctgcacttgtcgctgccggttcaggaggccatcctctgcgatctcttggagcgaccagaccctgctggccacttgacccttcgggacaaccgcctgaagctcaccttttntcccttccaagtgctgtccctgttgntcgtgcttcagcctccgccacactgagtccctggggctggggttttgtttgtanaaggctctggggactcctaatttntgcttccccagcctaaagcagggatcagtctt

SEQ ID NO: 3049 - DNA, 421 bp, Homo sapiens
aatccaggctattaaagttcattaaatttttaagaagtatgtccatttcccatctcactttcaagggaggtgtcagatattatctccatttcaatctccctccaagctctactctggaggatctgtcccatctgtcaagttggaatctccttccctttccaactctacctccctatttagcctctttcccctattagagaaaggggacttaggggggttgggaggggggaaagagaccagccttggtccctaagcctccagaaaggtcttcttaatccccaccttttcttactcccaaaaaagaatgaacacccctgactctggagttggtgatatctgccacatcagtgtttgagtcagttccccagaggagaggggaacctcctccatcttttttgcaacacctcatttcttccttttg

SEQ ID NO: 3050 - DNA, 239 bp, Homo sapiens
  misc_feature (161)..(161): n includes a, c, g, or t, or contains no nucleotide
ctccctatgtggtgctggacttgccgcaggagaccctggaggaggagacccccggcgccaacctgtggcccaccaccatcaccttcctcaccctcttcctgctgagcctgttctatagcacagcactgaccgtgaccagcgtccggggcccatctggcaanagggagggcccccagtactgagcgggagccggcaaggcacagggaggaagtgtggaggaacctcttggagaagccagc

SEQ ID NO: 3051 - DNA, 417 bp, Homo sapiens
  misc_feature (65)..(65): n includes a, c, g, or t, or contains no nucleotide
  misc_feature (116)..(131): n includes a, c, g, or t, or contains no nucleotide
  misc_feature (134)..(134): n includes a, c, g, or t, or contains no nucleotide
  misc_feature (136)..(136): n includes a, c, g, or t, or contains no nucleotide
  misc_feature (139)..(141): n includes a, c, g, or t, or contains no nucleotide
  misc_feature (162)..(190): n includes a, c, g, or t, or contains no nucleotide
  misc_feature (288)..(288): n includes a, c, g, or t, or contains no nucleotide
  misc_feature (360)..(360): n includes a, c, g, or t, or contains no nucleotide
ctgtacgtcctgtgccggatcctgcatgactggccagacgacaaagtccacaagttactcagcanggtcgccgagagctgcaagccaggggccggcctgctgctggtggagacgcnnnnnnnnnnnnnnnnagngnggnnnagcgcgccctgatgcagtcannnnnnnnnnnnnnnnnnnnnnnnnnnnnggagcggagcctgggcgagtatcagtgcttgctggagctgcacggcttccaccaggtgcaggtggtgcacttggggggtgtcctggatgccatcttgnccaccaaagtggccccctgaagcccaggcagcatgttcattatagggatgtcctcccccaggctgcaggtgnaccgcccggtccccaagtaccataggacagtcacataggagcgtgtagtcgtgactg

SEQ ID NO: 3052 - DNA, 449 bp, Homo sapiens
  misc_feature (131)..(131): n includes a, c, g, or t, or contains no nucleotide
  misc_feature (183)..(183): n includes a, c, g, or t, or contains no nucleotide
  misc_feature (219)..(292): n includes a, c, g, or t, or contains no nucleotide
  misc_feature (357)..(357): n includes a, c, g, or t, or contains no nucleotide
gtctctgcttatcacctctcttgcgtatttctggatctccttccctcctttctcgtccaaatcatgaaatgtttggccttagtcaatgtctatgcccgtcacataacagccgaggcaccgaggcccacagngaagcagctgggagcttggaaacctggtctcttgaatttcaaacctggtttncttacaggtggttgtctggggtgggtggagtggcgnnnnnnnnnnnnnnnnnnnnnnnnnnnnnnnnnnnnnnnnnnnnnnnnnnnnnnnnnnnnnnnnnnnnnnnnnncctacaggcaaaaagcaggctaggtgaccttgggacactacgctaagggagggaggctaaaggcngccaggtttgcagtgcgggaagatgagcaggccagtgggaggaggggcagggcagggctgtagttggtgactgggtgttcattttagctcta

SEQ ID NO: 3053 - DNA, 578 bp, Homo sapiens
  misc_feature (36)..(36): n includes a, c, g, or t, or contains no nucleotide
  misc_feature (50)..(50): n includes a, c, g, or t, or contains no nucleotide
  misc_feature (72)..(72): n includes a, c, g, or t, or contains no nucleotide
  misc_feature (79)..(79): n includes a, c, g, or t, or contains no nucleotide
  misc_feature (82)..(82): n includes a, c, g, or t, or contains no nucleotide
  misc_feature (90)..(90): n includes a, c, g, or t, or contains no nucleotide
  misc_feature (101)..(101): n includes a, c, g, or t, or contains no nucleotide
  misc_feature (131)..(131): n includes a, c, g, or t, or contains no nucleotide
  misc_feature (150)..(151): n includes a, c, g, or t, or contains no nucleotide
  misc_feature (155)..(155): n includes a, c, g, or t, or contains no nucleotide
  misc_feature (160)..(160): n includes a, c, g, or t, or contains no nucleotide
  misc_feature (165)..(165): n includes a, c, g, or t, or contains no nucleotide
  misc_feature (172)..(173): n includes a, c, g, or t, or contains no nucleotide
  misc_feature (177)..(177): n includes a, c, g, or t, or contains no nucleotide
  misc_feature (181)..(181): n includes a, c, g, or t, or contains no nucleotide
  misc_feature (186)..(186): n includes a, c, g, or t, or contains no nucleotide
  misc_feature (191)..(191): n includes a, c, g, or t, or contains no nucleotide
  misc_feature (201)..(201): n includes a, c, g, or t, or contains no nucleotide
  misc_feature (218)..(218): n includes a, c, g, or t, or contains no nucleotide
  misc_feature (229)..(229): n includes a, c, g, or t, or contains no nucleotide
  misc_feature (245)..(245): n includes a, c, g, or t, or contains no nucleotide
  misc_feature (288)..(288): n includes a, c, g, or t, or contains no nucleotide
  misc_feature (351)..(351): n includes a, c, g, or t, or contains no nucleotide
  misc_feature (410)..(440): n includes a, c, g, or t, or contains no nucleotide
  misc_feature (442)..(442): n includes a, c, g, or t, or contains no nucleotide
  misc_feature (448)..(457): n includes a, c, g, or t, or contains no nucleotide
  misc_feature (459)..(459): n includes a, c, g, or t, or contains no nucleotide
  misc_feature (461)..(474): n includes a, c, g, or t, or contains no nucleotide
  misc_feature (476)..(476): n includes a, c, g, or t, or contains no nucleotide
  misc_feature (478)..(478): n includes a, c, g, or t, or contains no nucleotide
  misc_feature (480)..(484): n includes a, c, g, or t, or contains no nucleotide
  misc_feature (486)..(487): n includes a, c, g, or t, or contains no nucleotide
  misc_feature (489)..(492): n includes a, c, g, or t, or contains no nucleotide
  misc_feature (495)..(495): n includes a, c, g, or t, or contains no nucleotide
  misc_feature (499)..(499): n includes a, c, g, or t, or contains no nucleotide
  misc_feature (507)..(527): n includes a, c, g, or t, or contains no nucleotide
  misc_feature (529)..(533): n includes a, c, g, or t, or contains no nucleotide
ctgcgggcaggtgtgcatatcaagctgcccaacctngggcaagcatgagnaagttctcggaggtgcttaagncggctgncgnacttcagnaagcgaggcancaggcggtgtggacacggctgcggtgggcnggggtcttcgacgtctccnnaacngctgnaccgncctgggnncttnctcnagagngtggnagctggtgcnagatggtggtggacggnagtgaagctgnctcatcgagatggaancagcggctggagcagggccaggccatcgacgacctcatgcctngcccagaaatgaagcccggcccacacccgacaccagccctgctgcttcctaacttattgcctnggcagtgcccaccatgcacccctgatgttcgccgtctggcgagcccttagccttgctgnnnnnnnnnnnnnnnnnnnnnnnnnnnnnnntntttttnnnnnnnnnnanannnnnnnnnnnnnnananannnnngnntnnnngcntgcnaaaaaaannnnnnnnnnnnnnnnnnnnnannnnngagggggaagggcagcagccaggccccaggagtcttgagtcctgg

SEQ ID NO: 3054 - DNA, 451 bp, Homo sapiens
agtagcaaattcactaaacttttgtgttcagagttaaattgttctcagtactttcaatgtaggggaatgtaataaacatagtgtgtatgtttgggttttaattacacattttatatatgagccatttagatatgcagtgttaattctatactgcatttgaagtgtatgtaacttagcttatgttaatgcagtcatgaagttggtttgctccagcatccggtagtctttaaacattcttttagtgaaattgtcattgttttatcagtgctaatgtgtgcaagcagtttttttattttgcttttctcctggcatcagaaagtggtggcgttttctgtactggattgcaccaaggaagcttttggggaggaaggaaggacattaaattctttccctggtaatgaaaagagccctttatcaatacagtgctgcaatttctggatatcagctacac

SEQ ID NO: 3055 - DNA, 528 bp, Homo sapiens
  misc_feature (52)..(78): n includes a, c, g, or t, or contains no nucleotide
  misc_feature (137)..(137): n includes a, c, g, or t, or contains no nucleotide
  misc_feature (139)..(140): n includes a, c, g, or t, or contains no nucleotide
  misc_feature (145)..(147): n includes a, c, g, or t, or contains no nucleotide
  misc_feature (149)..(149): n includes a, c, g, or t, or contains no nucleotide
  misc_feature (151)..(152): n includes a, c, g, or t, or contains no nucleotide
  misc_feature (154)..(187): n includes a, c, g, or t, or contains no nucleotide
  misc_feature (345)..(359): n includes a, c, g, or t, or contains no nucleotide
aaaggattttctccatggcctgaattaagaccattagaaagcaccaggccgnnnnnnnnnnnnnnnnnnnnnnnnnnntcttgtggatcttgtgtccagggacatggggtgacatgcctcgtatgtgttagagggtngnntggannngntnngnnnnnnnnnnnnnnnnnnnnnnnnnnnnnnnnnncctggattcacatccccacccagggcccgcttttactaagtgttctgccctagattggttcaaggaggtcatccaactgactttatcaagtggaattgggatatatttgatatacttctgcctaacaacatggaaaagggttttcttttccctgcaannnnnnnnnnnnnnntttgaacttccaagtatgtctagtcaccttttaaaatgtaaacattttcagaaaaatgaggattgccttccttgtatgcgctttttaccttgactacctgaattgcaagggatttttatatattcatatgttacaaagtcagcaactctcctgttggttcattattgaa

SEQ ID NO: 3056 - DNA, 150 bp, Homo sapiens
  misc_feature (63)..(77): n includes a, c, g, or t, or contains no nucleotide
  misc_feature (114)..(116): n includes a, c, g, or t, or contains no nucleotide
ttggctgatattggagtgctcattcacatgaagtggatagatacttctcaagacatcacacannnnnnnnnnnnnnnggagggaagccacaagcagactgacaacgtttctagnnngatcaggtgagctgtgtccagaaaaccaacgaga

SEQ ID NO: 3057 - DNA, 507 bp, Homo sapiens
  misc_feature (320)..(320): n includes a, c, g, or t, or contains no nucleotide
  misc_feature (322)..(365): n includes a, c, g, or t, or contains no nucleotide
gtcatagctgtgtcctgggtcactgtggctggtgaggacctcaaggaccccatcaagtgtacacagcagcagcaaaatcaagggatgaccctcctctggggccccctgtcctcagcacattccaggcagctgtgccctgacccacagggacccgtggggatgggaggaggtccaggcctgtgttgccagagctggcagtgtgagctgtaggcagggacggggagggactgtcgctgtgatcagagtgggttaagctgaccaggaacacccatttaacccctttttctttttgctttcatttttataaaggaaaagaggancnnnnnnnnnnnnnnnnnnnnnnnnnnnnnnnnnnnnnnnnnnnnttgttttgttttgtaaattgtataatttttaaatatctgagttttaaaaaaagaaaaaagtacaaaaaaatcttgttatggccttaagaaggggttagtgcatctttcaggggtcactctgccatggggataaaatagctgt

SEQ ID NO: 3058 - DNA, 560 bp, Homo sapiens
  misc_feature (26)..(91): n includes a, c, g, or t, or contains no nucleotide
  misc_feature (324)..(324): n includes a, c, g, or t, or contains no nucleotide
  misc_feature (364)..(365): n includes a, c, g, or t, or contains no nucleotide
  misc_feature (369)..(369): n includes a, c, g, or t, or contains no nucleotide
  misc_feature (392)..(392): n includes a, c, g, or t, or contains no nucleotide
  misc_feature (402)..(402): n includes a, c, g, or t, or contains no nucleotide
  misc_feature (405)..(420): n includes a, c, g, or t, or contains no nucleotide
  misc_feature (422)..(423): n includes a, c, g, or t, or contains no nucleotide
  misc_feature (425)..(425): n includes a, c, g, or t, or contains no nucleotide
  misc_feature (427)..(431): n includes a, c, g, or t, or contains no nucleotide
  misc_feature (434)..(447): n includes a, c, g, or t, or contains no nucleotide
  misc_feature (449)..(451): n includes a, c, g, or t, or contains no nucleotide
  misc_feature (454)..(456): n includes a, c, g, or t, or contains no nucleotide
  misc_feature (462)..(478): n includes a, c, g, or t, or contains no nucleotide
aggcttggggagcacctaccttactnnnnnnnnnnnnnnnnnnnnnnnnnnnnnnnnnnnnnnnnnnnnnnnnnnnnnnnnnnnnnnnnnncatgtggcctgcctttcctgtccacatccccacctctgatgctcaagatgctatttccaagatctcttactgctgcttctcctggcttactggccagaaactagctcactcaaggctgccatccttcacttgcagcctccctgccattctccttcactggttggcaaccttgagagttcaaagaaaatcaacctctgtggtggtcaactaaaggtattaggaaactaagtctngtggctcttctctgctgatggaaacagaagggcgccaagnnatgnctaaaaagatctcgccaataatncttgtctttnggnnnnnnnnnnnnnnnntnngntnnnnnagnnnnnnnnnnnnnngnnnggnnntttccnnnnnnnnnnnnnnnnnacatctgctgctactcaaaatgtcctgttgaagagggacagctgtgatgcccttttgctggggctgccatcttgaaatctga

SEQ ID NO: 3059 - DNA, 425 bp, Homo sapiens
  misc_feature (196)..(228): n includes a, c, g, or t, or contains no nucleotide
ggggtcttgggcatttcacatcactccatttctactgagactttcagaatcacacaggccctttccgtggatttcatttggggcaaagaaacaacgtagttttgtttttgttttcagcctatggaatgatttccttttgtctgtcttgttcaagttcagacgaagctactctggcatctgcacatttccgtgttannnnnnnnnnnnnnnnnnnnnnnnnnnnnnnnntttcagcatgtggctcgcgtggacaggtggacggacgctgtggccgcatggaaccttgagaacccagggacgagccagtgccgggaaggaactgccgggactcaccgagctgcacttaactgttctctttctggctattttttgttgtttgtttctttgtgttgactttgtccctggcaaaattttccactctgagt

SEQ ID NO: 3060 - DNA, 519 bp, Homo sapiens
  misc_feature (204)..(210): n includes a, c, g, or t, or contains no nucleotide
  misc_feature (215)..(215): n includes a, c, g, or t, or contains no nucleotide
  misc_feature (217)..(374): n includes a, c, g, or t, or contains no nucleotide
  misc_feature (430)..(449): n includes a, c, g, or t, or contains no nucleotide
cagatatctaaaacgattcgaaaagaagtgggaagatttgagaaagaacgagtgaaggattttaaaaccgttatcatcaagtacttagaatcactagttcaaacacaacaacagctgataaaatactgggaagcattcctacctgaagccaaagccattgcctagcaataagattgttgccgttaagaagaccttggatgttgnnnnnnntatgntnnnnnnnnnnnnnnnnnnnnnnnnnnnnnnnnnnnnnnnnnnnnnnnnnnnnnnnnnnnnnnnnnnnnnnnnnnnnnnnnnnnnnnnnnnnnnnnnnnnnnnnnnnnnnnnnnnnnnnnnnnnnnnnnnnnnnnnnnnnnnnnnnnnnnnnnnnnnnntgacattctgcaatactttgctgaattgaacactattgtgtcttaaatacttgcannnnnnnnnnnnnnnnnnnnccagaaaattttacaatattttttctttacaatatgttctgtagtatgtttaccctctttatgaagtgaa

SEQ ID NO: 3061 - DNA, 253 bp, Homo sapiens
gctgttgcctcatctataacatgcatttgtctttgtaatgtcaccaccttcccagctctccctctggccctgcttcttcggggaactcctgaaatatcagttactcagccctgggccccaccacctaggccactcctccaaaggaagtctaggagctgggaggaaaagaaaagaggggaaaatgagtttttatggggctgaacggggagaaaaggtcatcatcgattctactttagaatgagagtgtgaaata

SEQ ID NO: 3062 - DNA, 525 bp, Homo sapiens
  misc_feature (217)..(217): n includes a, c, g, or t, or contains no nucleotide
  misc_feature (372)..(373): n includes a, c, g, or t, or contains no nucleotide
gtggaaccaaaccaccttagtgagtaaccctaagaattgacacaaatctcatattttaggagattatattggttctgcctctggcatgctggtagactagggccatcctaacttattattttccagaggttctcctccagacaagacctgcagtaagcaaagagttatattctacctctctctcaattttctttttcttttctctgtatcctcatcnttagccacacacagatttgtgtggcttttattgtagaactaaacttagcatagtgttctgttgtttacatgaagtgtgtttttctttggtttcttctgttttccaactaaatatttttttctaaataaatattttcaacaattgatttgaaaaanntgtcaggattatttcaacttttcacatttgttatctgaaattcctatttcctgttaacataggaggtgtgtgcagactttattaatgtgaggaaaagaaatgctcaattgaaggacatttccctgttttctataaagcaatggttgaactca

SEQ ID NO: 3063 - DNA, 556 bp, Homo sapiens
  misc_feature (277)..(284): n includes a, c, g, or t, or contains no nucleotide
  misc_feature (507)..(521): n includes a, c, g, or t, or contains no nucleotide
aggtatgaacggatgcctcagtgtccaagatacaaaaggcaccacatagaagtttgctttttccctgcctgtcttggtcactaccacctcttccctgagaagggcgggccttccatgttctctcacccgcttcaactccacattgtccaagtcacagaaaaagagaggcctgaatggagattcgaccacaaacagttttaatggtctggttttctccctagttccccaactgtttgttagtattattattactacaagaataaaggattcctgagannnnnnnncctcctctcctgtgttccccttgacaggactcatccctaccaaccccccacccccccgccccggatttctggggaaaaaaagaagtgaaaggcactgcaggggtagggggcttgagtgccagtgagttggggttgggcgggggcgggggcgggggtgggcactagggcagggcgaacctagaggaggaaagttccagtccatgcctgaaggaattgtggagannnnnnnnnnnnnnngacacccccatcagtccttccctgaacctgtctag

SEQ ID NO: 3064 - DNA, 254 bp, Homo sapiens
atgatcagcgcaaccgaccatactgatgactgttttgaatgttcctttgtctctgacatgatccatagtgaaattgccagagttttgcctgctgctttcctcgtggcctcttcttgggtagtgaaattaagtgacatttggatttttatttgggtgggagggctgggacagtttttcttctagaaatgtctgttgagatttccccctttagtttccaaccttctccccaacccttggagctaaatgcgttgtaa

SEQ ID NO: 3065 - DNA, 473 bp, Homo sapiens
  misc_feature (26)..(67): n includes a, c, g, or t, or contains no nucleotide
  misc_feature (69)..(71): n includes a, c, g, or t, or contains no nucleotide
  misc_feature (73)..(76): n includes a, c, g, or t, or contains no nucleotide
  misc_feature (80)..(81): n includes a, c, g, or t, or contains no nucleotide
  misc_feature (83)..(83): n includes a, c, g, or t, or contains no nucleotide
  misc_feature (87)..(88): n includes a, c, g, or t, or contains no nucleotide
  misc_feature (90)..(93): n includes a, c, g, or t, or contains no nucleotide
  misc_feature (95)..(97): n includes a, c, g, or t, or contains no nucleotide
  misc_feature (113)..(113): n includes a, c, g, or t, or contains no nucleotide
  misc_feature (117)..(117): n includes a, c, g, or t, or contains no nucleotide
  misc_feature (133)..(133): n includes a, c, g, or t, or contains no nucleotide
  misc_feature (275)..(290): n includes a, c, g, or t, or contains no nucleotide
  misc_feature (334)..(348): n includes a, c, g, or t, or contains no nucleotide
gccactcatttatgagagcgaccgtnnnnnnnnnnnnnnnnnnnnnnnnnnnnnnnnnnnnnnnnnncnnnannnncgcnnanacanngnnnncnnnagtgcccgtcggcgtncccngggccccccactgcanggtcacctccgacctctcgctgtagccgctatttctgcaggtggattctgcaggggtgtggggccgtggacaggctgaggctcaaggaaggtggtcctcagctcggctggccgggcagcccctcctccgctgtggcccgccnnnnnnnnnnnnnnnnatcctcctcttggccacagagggcagcatcgcccgccccttccnnnnnnnnnnnnnnncagcacccaccctaaagccccctccaaatagccatacttagcctcagcaggagcctggcctgtaacttataaagtgcacctcgcccccgcaagccccagccccgaggaccgtccatggaccttat

SEQ ID NO: 3066 - DNA, 496 bp, Homo sapiens
  misc_feature (26)..(63): n includes a, c, g, or t, or contains no nucleotide
  misc_feature (118)..(118): n includes a, c, g, or t, or contains no nucleotide
  misc_feature (389)..(409): n includes a, c, g, or t, or contains no nucleotide
  misc_feature (453)..(467): n includes a, c, g, or t, or contains no nucleotide
tgccatcttaggttgccatgagccannnnnnnnnnnnnnnnnnnnnnnnnnnnnnnnnnnnnnctttagttcaatggacagacctcccaaggcaaaaactaccttctgacttgggttngaggctgggttcccctctattgttcccctatcataagagctaggccaagcctatgggaccttgagtcatgcaggatgggatctgtggtcaaaggacaggcgaggagctgtgggcgcagggcctgccgccactgcctacatcttctctcttccccatcttgcattggaggtcccagaaaacaattagcttctggcaaagggggtacccacttctttccctgttgactttgctgtttcccaggctcctttttgtgtttttataactgtcaccnnnnnnnnnnnnnnnnnnnnntatatattgttctgaggcgcctggcctgtcccttcagtgagccnnnnnnnnnnnnnnnttgtagtgagaagctgttgtcacgactaa

SEQ ID NO: 3067 - DNA, 452 bp, Homo sapiens
  misc_feature (180)..(180): n includes a, c, g, or t, or contains no nucleotide
  misc_feature (238)..(243): n includes a, c, g, or t, or contains no nucleotide
  misc_feature (396)..(396): n includes a, c, g, or t, or contains no nucleotide
ctacatcagcctctctgcgcaccgctcctgggtggagaagatcgtgcaaggggtgcagctccgcgggcgcgctcaggggggtggggccctcagggcaccgagccagggctctggggccgccgcgcgctcctagggcgcagcgggacgcggggctcggatctgaaaggcggccagatccanatctggatctggatctgcggcggcctcgggcggtttcccccgccgtaaataggctcannnnnntctacctctgggggcccggacggctgctgcggaaaggaaaccccctccccgacccgcccgacggcctcaggccccgcctccaaggcatcaggccccgcccaacggcctcatgtccccgcccccacgacttccggccccgcccccgggccccancgcttttgtgtatataaatgttaatgatttttataggtatttgtaaccctgcccac

SEQ ID NO: 3068 - DNA, 518 bp, Homo sapiens
  misc_feature (32)..(47): n includes a, c, g, or t, or contains no nucleotide
  misc_feature (225)..(257): n includes a, c, g, or t, or contains no nucleotide
  misc_feature (305)..(307): n includes a, c, g, or t, or contains no nucleotide
  misc_feature (324)..(324): n includes a, c, g, or t, or contains no nucleotide
  misc_feature (428)..(429): n includes a, c, g, or t, or contains no nucleotide
  misc_feature (437)..(448): n includes a, c, g, or t, or contains no nucleotide
agctgtaatgtagcttcctgatgcttgactannnnnnnnnnnnnnnntgacttgagaatctttttcatgaatgattttaaagaaaaatttggattttaaaggtattaaaatatttttgttttgtacgagagtttgttgctctgtatgactcctgtatgcattgtatattgcaatttattactgtcagagatttgtagacagtttcttattttcatattgaatcannnnnnnnnnnnnnnnnnnnnnnnnnnnnnnnntaattcatgatgtttgcccttttaataaaatataagggtagagttcannntgaatgcaagttgcctntattataaatttgagtttgtcttggttataccttgcatgataacctagctagatttctagcatttgctgtatttattaaaattattatttttttggtaaaacannaaaaaaannnnnnnnnnnntttttttaaaaaatgtaattgaataagtgtgaatgcagaagcaaatattgtctgccctgttaaacttggt

SEQ ID NO: 3069 - DNA, 412 bp, Homo sapiens
  misc_feature (93)..(93): n includes a, c, g, or t, or contains no nucleotide
  misc_feature (122)..(122): n includes a, c, g, or t, or contains no nucleotide
  misc_feature (157)..(157): n includes a, c, g, or t, or contains no nucleotide
  misc_feature (262)..(278): n includes a, c, g, or t, or contains no nucleotide
cccttcaggtcctcagtggattacttaaccactgctgtccctcggtccctttttcctaaacgggtttagttctgtcttttttctccttttttnctaaatgctggtaaatatttacattcagnccagggaagaggaggccagaggtcgggccagctgnccccattcttttaacgttgtagggcctgcccatggagcggaccctcctctttgggcctcgtgagcttttttgcttatcatgttccatttcgtgccgctttccccnnnnnnnnnnnnnnnnngagggtaggggatctgcttcccactgtgactgggctatgggattctgactaccttgcttacagattcatggtttgataaatttgttgtattcaaaaacttgaaatgcaggacgccattaagtgtctgtttatat

SEQ ID NO: 3070 - DNA, 561 bp, Homo sapiens
  misc_feature (85)..(99): n includes a, c, g, or t, or contains no nucleotide
  misc_feature (101)..(101): n includes a, c, g, or t, or contains no nucleotide
  misc_feature (104)..(109): n includes a, c, g, or t, or contains no nucleotide
  misc_feature (112)..(112): n includes a, c, g, or t, or contains no nucleotide
  misc_feature (148)..(148): n includes a, c, g, or t, or contains no nucleotide
  misc_feature (374)..(374): n includes a, c, g, or t, or contains no nucleotide
  misc_feature (386)..(386): n includes a, c, g, or t, or contains no nucleotide
  misc_feature (392)..(392): n includes a, c, g, or t, or contains no nucleotide
  misc_feature (430)..(466): n includes a, c, g, or t, or contains no nucleotide
  misc_feature (491)..(516): n includes a, c, g, or t, or contains no nucleotide
gaggcagcactaggtgctggccttggagcctgccctgaccttgggaagctgggcagcgtgggtggagagagactgctcacacaannnnnnnnnnnnnnngnccnnnnnngcntcccggagcccacggtggtcatggctgccagagcgntctgcatgctggggctggtcctggccttgctgtcctccagctctgctgaggagtacgtgggcctgtctgcaaaccagtgtgccgtgccagccaaggacagggtggactgcggctacccccatgtcacccccaaggagtgcaacaaccggggctgctgctttgactccaggatccctggagtgccttggtgtttcaagcccctgcaggaagcagaatgcaccttctngaggcacctccnagctgnccccggccgggggatgcgaggctcggagcacccttgcnnnnnnnnnnnnnnnnnnnnnnnnnnnnnnnnnnnnnttttctgtccctttgctcccggcannnnnnnnnnnnnnnnnnnnnnnnnnggagcctgatgtcttaacgaataaaggtcccatgctccacccgag

SEQ ID NO: 3071 - DNA, 403 bp, Homo sapiens
  misc_feature (38)..(59): n includes a, c, g, or t, or contains no nucleotide
  misc_feature (69)..(83): n includes a, c, g, or t, or contains no nucleotide
  misc_feature (112)..(112): n includes a, c, g, or t, or contains no nucleotide
  misc_feature (346)..(346): n includes a, c, g, or t, or contains no nucleotide
  misc_feature (354)..(354): n includes a, c, g, or t, or contains no nucleotide
tggggttatgtctcaatgagcactttagcaaccacacnnnnnnnnnnnnnnnnnnnnnngcagaaggannnnnnnnnnnnnnntctcttccatggcaattacagcagagccnactgagatttgtgtgggggatccaaagaagacacagaccggtttcaagggggactccggggggcccctcgtgtgtaaggacgtagcccaaggtattctctcctatggaaacaaaaaagggacacctccaggagtctacatcaaggtctcacacttcctgccctggataaagagaacaatgaagcgcctctaacagcaggcatgagactaaccttcctctgggcctgaccatctntgggacanaggcaagaatccccaaggggtgggcagtcggggttgcaggactgtaata

SEQ ID NO: 3072 - DNA, 474 bp, Homo sapiens
  misc_feature (26)..(26): n includes a, c, g, or t, or contains no nucleotide
  misc_feature (31)..(31): n includes a, c, g, or t, or contains no nucleotide
  misc_feature (81)..(81): n includes a, c, g, or t, or contains no nucleotide
  misc_feature (88)..(88): n includes a, c, g, or t, or contains no nucleotide
  misc_feature (113)..(115): n includes a, c, g, or t, or contains no nucleotide
  misc_feature (128)..(128): n includes a, c, g, or t, or contains no nucleotide
  misc_feature (168)..(168): n includes a, c, g, or t, or contains no nucleotide
  misc_feature (209)..(209): n includes a, c, g, or t, or contains no nucleotide
  misc_feature (330)..(330): n includes a, c, g, or t, or contains no nucleotide
cttgacagcagtggacgtcccaactncggcnaaaaccgttttgagattgtctacaacctgttgtctctgcgcttcaactcnacggatnccgtgtgaagacctacacagatgannntgacgcccattgnagtctgctgtctctgtgttcaaggcagccaactggtatgnaaagggagatctgggacatgtttggagtcttctttgctaanccaccctgatctaagaaggatcctgacagattatggcttcgagggacatcctttccggaaagactttcctctatctggctatgttgagttacgttatgatgatgaagtgaagcgggtggtngcagagccggtggagttggcccaagagttccgcaaatttgacctgaacagcccctgggaggctttcccagtctatcgccaacccccggagagtctcaagcttgaagccggagacaagaagcctgatgccaagtagctccaggga

SEQ ID NO: 3073 - DNA, 538 bp, Homo sapiens
gaggcacctcatagagattccagtgcgttaccaggaagagtttgaagctcgaggtctagaagactgcaggctggatcatgctttatatgcactgcctgggccaaccatcgtggacctgaggaaaaccagggcagcgcagtctcctccagtggactcagcggcagagacgccaccccgagaaggcaaatcccactttcagatcctgctggacgtggtccagttcctccctgaagacatcatcattcagaccttcgaaggctggctactgataaaagcacaacacggaaccagaatggatgagcacggttttatctcaagaagcttcacccgacagtacaaactaccagatggcgtggaaatcaaagatttgtctgcagtcctctgtcatgatggaattttggtggtggaagtaaaggatccagttgggactaagtgacatcgtatcggttcctgttcagatgacatggggaagatgatggttcagccactggtactacgagaatgtttgtattacccacatttgaaatgatttgctatg

SEQ ID NO: 3074 - DNA, 514 bp, Homo sapiens
  misc_feature (134)..(134): n includes a, c, g, or t, or contains no nucleotide
  misc_feature (138)..(138): n includes a, c, g, or t, or contains no nucleotide
  misc_feature (142)..(142): n includes a, c, g, or t, or contains no nucleotide
  misc_feature (144)..(171): n includes a, c, g, or t, or contains no nucleotide
  misc_feature (419)..(434): n includes a, c, g, or t, or contains no nucleotide
atttgagcaacttctatgcacagtacaaatccattgagccttatttgaagaagaaggatgaatctcaggaaggcaagcagcagtatctgcagtccatagaagagcgtgagaaactggacgggctctacgagtgnattntctntnnnnnnnnnnnnnnnnnnnnnnnnnnnnctactggtggaacggagacaaatatctggggcctgcagttcttatgcaggcctatcgctggatgattgactccagagatgacttcacagaggagcgcctggccaagctgcaggacccattctctctataccgctgccacaccatcatgaactgcacaaggacctgtcctaagggtctgaatccagggaaagctattgcagagatcaagaaaatgatggcaacctataaggagaagaaagcttcagttnnnnnnnnnnnnnnnnaaacatgatttataaccagctcagagctgaacataatttatatctaatttgagttcctttaaagatcttggttttccatg

SEQ ID NO: 3075 - DNA, 393 bp, Homo sapiens
cgagatgcaggctccggtcgccagccgtcgaagccacccagcgccttccgcgagtggaggctgctggggccgttccggagacccacgacccagctgcgcgccaaagtctccagcctgtcgcacaagatcgccgccgggggcgcgcagcgcgcagaggcagcgtgcgcccagcgctcagaggtggaggctgtgtccctaggcgtcccacacgaggtggccgagggcgccacctgccaggcctacgaattggccgactacagcaacctacgggagaccgatatttaaggaccccagagctaggccgcggagtgtgctgggcttgggggtaagggggaccagagaggcgggctggtgttctaagagcccccgtgcaaatcggagacccggaaactg

SEQ ID NO: 3076 - DNA, 329 bp, Homo sapiens
gttccccgtcgtgtctcctttgactcacctgagagaggcgtttgcagccaatgaagctggctgctcagacggtcgacattgaatttgggtgggggttgggatcctgtctgaagtacagactgttcttgctctaaaaacaggactgtccctgatgggagccaggccacagggaggaggcttctttgtgggtctctcctgcagagggtgggggtctcagggtcttaggtgatacgggagagaaagaacgtgccaggcaggaggccccctgaagtctgtgtactccgaggtggatctccatccccatccacctgtacggacatcttttccgt

SEQ ID NO: 3077 - DNA, 112 bp, Homo sapiens
ccggcccactctgaagtaatcttaagaagacgttaactcatttttcttgtgtattgtagacacttttggctgtctggtaacatggaaaatctcagaatgatgttttaagtat

SEQ ID NO: 3078 - DNA, 211 bp, Homo sapiens
catttctacctaagtcagctttcatctttgtggatggtgtctcctttactaaataagaaaataacaaagcccttattctctttttttcttgtcctcattcttgccttgagttccagttcctctttggtgtacagacttcttggtacccagtcacctctgtcttcagcaccctcataagtcgtcactaatacacagttttgtacatgtaaca

SEQ ID NO: 3079 - DNA, 182 bp, Homo sapiens
  misc_feature (61)..(100): n includes a, c, g, or t, or contains no nucleotide
tttgcagagccctcttctggctgggcgagtccctcgctagtcagtgcttcctttctaaaannnnnnnnnnnnnnnnnnnnnnnnnnnnnnnnnnnnnnnnaaaagggtagaaagagctttgcttcctttcagaaaccactgagggtgtgctgttgggtctttcagctcctcgggtggtaggg

SEQ ID NO: 3080 - DNA, 548 bp, Homo sapiens
  misc_feature (321)..(401): n includes a, c, g, or t, or contains no nucleotide
tggagattgcggtgcctgagaacctggtgggagccatcctggggaaggggggcaagacgttggtggagtaccaggagctgacgggcgctcgcatccagatctccaagaagggcgagttcctgccaggcacgcggaaccggcgggtcaccatcacgggcagccccgcggccacgcaagccgctcaatacctcatcagtcagcgggtcacctacgagcagggagtgagggcctcaaacccccagaaagtgggatgaggcctgtggtgtgtgctcccacccttttctctcctcccatctcctcctcttccctctcctcctcccnnnnnnnnnnnnnnnnnnnnnnnnnnnnnnnnnnnnnnnnnnnnnnnnnnnnnnnnnnnnnnnnnnnnnnnnnnnnnnnnnctggtagtcataggcaggattgagtgacggttgggaagggggctcagaagccccctccccagcccggaactgacccctccttcctccctccctgtgcttggctgggcctgacccttcctgtcccagggcccaggtctgtgtgatatc

SEQ ID NO: 3081 - DNA, 436 bp, Homo sapiens
  misc_feature (69)..(69): n includes a, c, g, or t, or contains no nucleotide
  misc_feature (71)..(71): n includes a, c, g, or t, or contains no nucleotide
  misc_feature (82)..(84): n includes a, c, g, or t, or contains no nucleotide
  misc_feature (86)..(86): n includes a, c, g, or t, or contains no nucleotide
tctgtcctcgcacagcgaacctgggctcctgcccaggacaggcaccagggtcatggcctgggacctggncnctggcccctcnnncntccctcccctcccggctccccggccagagggagagcttggtctctggacctgccttaggaaggagagggagggcaggaaggaaaagaaaggacttggaggtggcaggagtccgagccctgctccttgtgggcgctcacactgcccccggagcctgctgggagtggggccagccgtggacagctgaggttggggtcaatgcctcctgggcacccttgcctcgccccagaccggcccgtccagtccccatcacacctcggcggcctttatttattctgttcccccagctcggccacttctctgaaggagggctgggttctgggcctgtatcgaataaacacaaacctggatg

SEQ ID NO: 3082 - DNA, 451 bp, Homo sapiens
  misc_feature (29)..(43): n includes a, c, g, or t, or contains no nucleotide
  misc_feature (170)..(170): n includes a, c, g, or t, or contains no nucleotide
  misc_feature (257)..(258): n includes a, c, g, or t, or contains no nucleotide
  misc_feature (260)..(324): n includes a, c, g, or t, or contains no nucleotide
actgtaccataaagatagttcactgagtnnnnnnnnnnnnnnncatcttatttttccaaggtttaatttagtgagagggcagcattagtgtggagtggcatgcttttgccctatcgtggaatttacacatcagaatgtgcaggatccaagtctgaaagtgttgccacccngtcacacaacatgggctttgtttgcttattccatgaagcagcagctatagaccttaccatggaaacatgaagagaccctgcaccccnntnnnnnnnnnnnnnnnnnnnnnnnnnnnnnnnnnnnnnnnnnnnnnnnnnnnnnnnnnnnnnnnnncttgtcccaagctctccatctctagatctggggactgactgttgagctgatggggaaagaaaagctctcacacaaaccggaagccaaatgtcccctatctcttgaatgatcaagtcacttttgacaa

SEQ ID NO: 3083 - DNA, 472 bp, Homo sapiens
  misc_feature (28)..(28): n includes a, c, g, or t, or contains no nucleotide
  misc_feature (229)..(245): n includes a, c, g, or t, or contains no nucleotide
  misc_feature (388)..(388): n includes a, c, g, or t, or contains no nucleotide
atggctgggcctgtcctgccgtcatggncccctgcttcctgctccttggagctggctcccggaccttgcccaccatccatgcagtggctcccagggcagagcctctccttgtactttggcagccatagaaagcgtgctcattttctgttttcctgtgttaggaaaaaaccacctgttttccaaggggagagggcggggcctgagggtgggggcggggcctcttcattgnnnnnnnnnnnnnnnnncgaggcacactgcttactgccttggggttgtggagatggacccgtgacctcgtggaggccgtgtgggggcagcagcctggcctgtgccatggtgggtgtcctggggcctgtgcggagggagccacctcaccctgcagcccagnttgcaggtgtggccttgtttctccttgcccagcagtgctgccttcagcggccgtgacggggccagctggacacacggtgagatt

SEQ ID NO: 3084 - DNA, 391 bp, Homo sapiens
ctgcttttgctatgggaaagctttaggcaaatccacagtggtacctgtaccatatgagaagatgctgcgagaccagtcggctgtggtagtgcaggggcttacggaaggtgttgcctttaaacaccccgagaactatgatcttgcaaccctgaaatggattttggagaacaaagcagggatttcattcatcattaagagaccttttttagagccaaagaagcatgtaggtaagtaagtgctttgcttccttgatagctggctggcctccgttttgctagattttcatacactttaatggtttctgttttattgtctttgagaatatgatgtcagacattttcggatgggctgtttagatgttatataatccacaaaaggttcattgagctaa

SEQ ID NO: 3085 - DNA, 505 bp, Homo sapiens
caggaacttttctattacaatcgcttaggaagtaaagccttgtctccctccctgttctctgcctcttgtacccctctgacccacccgctctgccccactcccagccctcctcagccccagccctgcctgccctgcccctccagggggccatgagtgcctaggtttctcataccccacaaggtcacagcaggggagggagggacaattttataatgaaccaaaaattccatgtgttggggggtggggggcggaggagggtgaggggtgccgcccatgggccacaaatctctacaagtgcctgctatccctctcccactccccaccccagcaccggtccaaccccttcatccccagctgctcctaggactggcccatgggcaggcgggtggggggatgggaagggggtgccctgaaaccaaactggaagccccctctgcctcccagctggggcctctggggtggggtggggggctgtggtcaagccttattctgtattggggactga

SEQ ID NO: 3086 - DNA, 558 bp, Homo sapiens
  misc_feature (381)..(381): n includes a, c, g, or t, or contains no nucleotide
  misc_feature (435)..(449): n includes a, c, g, or t, or contains no nucleotide
  misc_feature (500)..(514): n includes a, c, g, or t, or contains no nucleotide
gtgcgaggtctgtctgcaccggcccccacatctaaccaggccctgatgtaggggtcgtccgctcaggctgcccccttgggctcttgcagctcttgttcaggtagtcgcccttctggtttgttctctgtggggcagttggtgggggctgggggaagaggctggcagaagttaccctggatagggaagggggaggaggggacttttagagccagcaggccccactgtattatgtatatatttttcaaggtctgtttttctaactgaaaagctaagggcttgattcctagccccgttctgtggggcactgggtgatactcagtttcttgttcctggccgtggagaggggcctggggcactggttccggctgtgtctggtggtcnggctgcggggaaggggcaagaaggcgggcaggccttcactgcagcactgagccnnnnnnnnnnnnnnnagcatgaggctggatgcagtggtggtgaggccgccccgctccatcccgagnnnnnnnnnnnnnnntttgcgctctcctgtcacaaatgctgcactattggttcttaagt

SEQ ID NO: 3087 - DNA, 585 bp, Homo sapiens
  misc_feature (112)..(126): n includes a, c, g, or t, or contains no nucleotide
  misc_feature (248)..(262): n includes a, c, g, or t, or contains no nucleotide
  misc_feature (454)..(486): n includes a, c, g, or t, or contains no nucleotide
ccaggctgtccttagcatggtccggaaggcaaagtaccgggaactgctcctatcagagctcctgggccggcgggcgcctgtcgtggtgcggcttggcctcacctaccatgtnnnnnnnnnnnnnnnggcccagctagtggactgcatctctaccacttcaggaaccctcctccgcctgccagagacatgaagattctgctcatcattgctcagctcctcagagtgggccgggaggggactagaagagnnnnnnnnnnnnnnntgagacagggtcaccttgggaaggcttgggagccaggatgagtgtcgggctctcgtgtgtgcaaaaggtcagatgtgactgctgctgtttgcctggtttctgacccagtggtggggtttgagcaatgcttctctgcccttccatggaaagtggaaccagaaatggtgccaaggctgtggctgttccctttcnnnnnnnnnnnnnnnnnnnnnnnnnnnnnnnnnaataggaaggtgggatttctggggaggctggtgaaggagggcagggttcttttctctacgtgtcatgttaaaattgccaaataaagtacctctgcctgt

SEQ ID NO: 3088 - DNA, 516 bp, Homo sapiens
  misc_feature (33)..(33): n includes a, c, g, or t, or contains no nucleotide
  misc_feature (36)..(36): n includes a, c, g, or t, or contains no nucleotide
  misc_feature (88)..(90): n includes a, c, g, or t, or contains no nucleotide
  misc_feature (99)..(99): n includes a, c, g, or t, or contains no nucleotide
  misc_feature (102)..(103): n includes a, c, g, or t, or contains no nucleotide
  misc_feature (106)..(107): n includes a, c, g, or t, or contains no nucleotide
  misc_feature (109)..(112): n includes a, c, g, or t, or contains no nucleotide
  misc_feature (114)..(117): n includes a, c, g, or t, or contains no nucleotide
  misc_feature (119)..(122): n includes a, c, g, or t, or contains no nucleotide
  misc_feature (124)..(128): n includes a, c, g, or t, or contains no nucleotide
  misc_feature (130)..(134): n includes a, c, g, or t, or contains no nucleotide
  misc_feature (136)..(142): n includes a, c, g, or t, or contains no nucleotide
  misc_feature (144)..(146): n includes a, c, g, or t, or contains no nucleotide
  misc_feature (148)..(189): n includes a, c, g, or t, or contains no nucleotide
ttcttacaagggataaacgtcttgtacccggangtnggagcaacagaaattgaattagccaaacagatcacatcatatggagagacannncctggactngannagnntnnnntnnnnannnntnnnnngnnnnntnnnnnnntnnncnnnnnnnnnnnnnnnnnnnnnnnnnnnnnnnnnnnnnnnnnntaatctctaaactttatgcagtacatcaagaaggaaataaaaacgttggattagatattgaggctgaagtccctgctgtaaaggacatgctggaagctggtattctagatacttacctgggaaaatattgggctatcaaactcgctactaatgctgcagtcactgtacttagagtggatcagatcatcatggcaaaaccagctggtgggcccaagcctccaagtgggaagaaagactgggatgatgaccaaaatgattgaaattggcttaatttttactgtaggtgaaggctgtatttgtagtagtactcaagaatcacctgatgtt

SEQ ID NO: 3089 - DNA, 447 bp, Homo sapiens
tgctacggccatttcggaagaagcgagttcccatgggaggttcccaggaagcttgtattttagagccagggggagctgggcctggtctcaccctggaggcaactggtggccatgctcctcttccccagacgcctggctgctgatcgccttccccacccaccaaccctcagggcaaagccaggtccctctcatttagcctgtcctgtcatcatcatggccagctggaggcaggggcttcctggtgctggaggttggatcttgatgtaaggatgggcatggtgttctcctgctgctccctcagactggggcaatgttaatttagtggaaaaggcacccccgtcaagagtgaattccctcactcgtctcccccaacagctgggaccctgaccagcttccccctccctccccttgcctgtgccagggtgaggtcagcacattttcaacagg

SEQ ID NO: 3090 - DNA, 323 bp, Homo sapiens
  misc_feature (102)..(127): n includes a, c, g, or t, or contains no nucleotide
  misc_feature (145)..(145): n includes a, c, g, or t, or contains no nucleotide
  misc_feature (197)..(274): n includes a, c, g, or t, or contains no nucleotide
ttcgacttggtccatctgagtcagaggccagattccacattgactcagtaagtgaaggaaatgccgggctttatcgctgcctctattataagccccctggannnnnnnnnnnnnnnnnnnnnnnnnngctgctggtgaaagaaanctctggaggcccggactccccggacacagagcccggctcctcagctgggacnnnnnnnnnnnnnnnnnnnnnnnnnnnnnnnnnnnnnnnnnnnnnnnnnnnnnnnnnnnnnnnnnnnnnnnnnnnnnngggagaaataattagaatgagcaatagaaatgcacagatgcctatacat

SEQ ID NO: 3091 - DNA, 448 bp, Homo sapiens
  misc_feature (56)..(75): n includes a, c, g, or t, or contains no nucleotide
  misc_feature (139)..(173): n includes a, c, g, or t, or contains no nucleotide
  misc_feature (183)..(188): n includes a, c, g, or t, or contains no nucleotide
  misc_feature (193)..(193): n includes a, c, g, or t, or contains no nucleotide
  misc_feature (213)..(213): n includes a, c, g, or t, or contains no nucleotide
tgtgaatacgtgagcctctaccaccagcctgccgccatgatggaggacagtgattnnnnnnnnnnnnnnnnnnnncctgcctgacaactccccagctatcccccaaccccaggctcggactgtggtgccaaggagtctnnnnnnnnnnnnnnnnnnnnnnnnnnnnnnnnnnngttctcagannnnnnatcanttcccatgccccatctcgantcccatccccatctatctgtgccctgagcatggctctgcccccaggtcgtcttgcacaccttggcagccccctgtagttgacaggtaagctgtaggcatgtagagcaattgtcccaatgccacttgcttcctttccaagccgtcgaacagactgtgggatttgcagagtgtttcttccatgtctttgaccacagggttgttgctgcccaggctctagatcacatggcatcaggct

SEQ ID NO: 3092 - DNA, 541 bp, Homo sapiens
  misc_feature (145)..(145): n includes a, c, g, or t, or contains no nucleotide
  misc_feature (153)..(153): n includes a, c, g, or t, or contains no nucleotide
  misc_feature (182)..(182): n includes a, c, g, or t, or contains no nucleotide
  misc_feature (184)..(184): n includes a, c, g, or t, or contains no nucleotide
  misc_feature (199)..(199): n includes a, c, g, or t, or contains no nucleotide
  misc_feature (208)..(242): n includes a, c, g, or t, or contains no nucleotide
  misc_feature (248)..(248): n includes a, c, g, or t, or contains no nucleotide
  misc_feature (251)..(251): n includes a, c, g, or t, or contains no nucleotide
  misc_feature (278)..(278): n includes a, c, g, or t, or contains no nucleotide
  misc_feature (286)..(286): n includes a, c, g, or t, or contains no nucleotide
  misc_feature (344)..(358): n includes a, c, g, or t, or contains no nucleotide
  misc_feature (384)..(399): n includes a, c, g, or t, or contains no nucleotide
gccactgagggcaaaagtgtctgttaaaaatgccccattaggccaggatctgctgacataattgcctagtcagtccttgccttctgcatggccttcttccctgctacctctcttcctggatagcccaaagtgtccgcctaccaanactggagnccgctgggagtcactggctttgccctggnantttgccagatgcatnctcaagtannnnnnnnnnnnnnnnnnnnnnnnnnnnnnnnnnnagtatnctnctgccgggggcttctggtactcctctnctaaatanccagagggaagatgcccatagcactaggacttggtcatcatgcctacagacactattnnnnnnnnnnnnnnngccaccagaagacccgagggaggctnnnnnnnnnnnnnnnngaggaccagctatatccaggatcatttctctttcttcagggccagacagcttttaattgaaattgttatttcacaggccagggttcagttctgctcctccactataagtctaatgttctgactctctcctggtgctcaataa

SEQ ID NO: 3093 - DNA, 407 bp, Homo sapiens
  misc_feature (138)..(138): n includes a, c, g, or t, or contains no nucleotide
  misc_feature (143)..(161): n includes a, c, g, or t, or contains no nucleotide
  misc_feature (247)..(265): n includes a, c, g, or t, or contains no nucleotide
ttggaagcacaagtgcatggcactgactgaatgctgttaatatttctaaaagtttctacattcagattatatgcctgattcatagtaaaatacctctaataaacactgttttatagaaaacctgacttcagtgaatanttttnnnnnnnnnnnnnnnnnnntttatatactgctatttacactattatttcctatagctacatgttctttgtaccttttgtagttttatttgtattactagattcannnnnnnnnnnnnnnnnnntatctggttttgggtgtttttcatgttttagcatttgtataaagaaactggtccatgtaaatactttccatgttttttcttcaaatgtttaaaccactagttgatgtatggtatctttagatatttgcctgtctgtttgctc

SEQ ID NO: 3094 - DNA, 536 bp, Homo sapiens
  misc_feature (90)..(90): n includes a, c, g, or t, or contains no nucleotide
  misc_feature (208)..(231): n includes a, c, g, or t, or contains no nucleotide
  misc_feature (374)..(374): n includes a, c, g, or t, or contains no nucleotide
gatgccatttccattgctgtaaaggctgctctcttcaatacaaggataccaagggttcgagttttggaggatgaagaggggtcgaaggancattgaattgtcagatgacccttatgactgcatacgactaagtgtggagaatgtcccctgcattgtcactctgtgcaagattggctatcggcatgtggtggatgctactcttcaggannnnnnnnnnnnnnnnnnnnnnnngctggtgtcggtgaccagcaagggagttgtgacgtgcatgaggaaagtggggaagggcagcctggacccagagagcatcttcgagatgatggagactggcaagcgtgtgggcaaggtactgcatgcctccttgcagagtgttntgcacaaggaagaaagcctggggcccaagagacagaaagttggattcctgggatgatttgcacatcaactgctcaactgtggattgttttttacttttccttttaaaccggttcgtatatatttttcttcgctgttacgaatttacagcagcatttgtacat

SEQ ID NO: 3095 - DNA, 544 bp, Homo sapiens
  misc_feature (29)..(29): n includes a, c, g, or t, or contains no nucleotide
gagcatcccagtaatggttgtcctgcctncaatatttgaattttaaatctaaatctatttattaatatttaacattatttatatggggaatatatttttagactcatcaatcaaataagtatttataatagcaacttttgtgtaatgaaaatgaatatctattaatatatgtattatttataattcctatatcctgtgactgtctcacttaatcctttgttttctgactaattaggcaaggctatgtgattacaaggctttatctcaggggccaactaggcagccaacctaagcaagatcccatgggttgtgtgtttatttcacttgatgatacaatgaacacttataagtgaagtgatactatccagttactgccggtttgaaaatatgcctgcaatctgagccagtgctttaatggcatgtcagacagaacttgaatgtgtcaggtgaccctgatgaaaacatagcatctcaggagatttcatgcctggtgcttccaaatattgttgacaactgtgactgtacccaaatggaaagtaactca

SEQ ID NO: 3096 - DNA, 505 bp, Homo sapiens
  misc_feature (254)..(254): n includes a, c, g, or t, or contains no nucleotide
  misc_feature (265)..(265): n includes a, c, g, or t, or contains no nucleotide
  misc_feature (292)..(308): n includes a, c, g, or t, or contains no nucleotide
  misc_feature (416)..(416): n includes a, c, g, or t, or contains no nucleotide
  misc_feature (456)..(457): n includes a, c, g, or t, or contains no nucleotide
  misc_feature (471)..(471): n includes a, c, g, or t, or contains no nucleotide
gagatctacttgtgacttgttggccttcttcccacatctgcctcagactggggggggctcagctcctcgggtgatatctagcctgcttgtgagctctagcagggataaggagagctgagattggagggaattgtgttgctcctggaggaagcccaggcatcattaaacaagccagtaggtcacctggcttccgtggaccaattcatctttcagacaagctttagcagaaatggactcagggaagagactcacangctttggttantatctgtgtttccggtgggtgtaatannnnnnnnnnnnnnnnngggactgagctaaacagtgttattatgggaaaggaaatggcattgctgctttcaaccagcgactaatgcaatccattcctctcttgtttatagtaatctaagggttgngcagttaaaacggcttcaggatagaaagctgtttcccacnnctgtttgcttttancattaaaagggaaatgtgcctctgccccacagtt

SEQ ID NO: 3097 - DNA, 293 bp, Homo sapiens
  misc_feature (49)..(49): n includes a, c, g, or t, or contains no nucleotide
  misc_feature (74)..(75): n includes a, c, g, or t, or contains no nucleotide
  misc_feature (82)..(83): n includes a, c, g, or t, or contains no nucleotide
  misc_feature (110)..(110): n includes a, c, g, or t, or contains no nucleotide
  misc_feature (113)..(113): n includes a, c, g, or t, or contains no nucleotide
  misc_feature (142)..(142): n includes a, c, g, or t, or contains no nucleotide
  misc_feature (154)..(154): n includes a, c, g, or t, or contains no nucleotide
  misc_feature (159)..(159): n includes a, c, g, or t, or contains no nucleotide
  misc_feature (192)..(192): n includes a, c, g, or t, or contains no nucleotide
  misc_feature (199)..(199): n includes a, c, g, or t, or contains no nucleotide
  misc_feature (203)..(203): n includes a, c, g, or t, or contains no nucleotide
  misc_feature (212)..(212): n includes a, c, g, or t, or contains no nucleotide
  misc_feature (225)..(240): n includes a, c, g, or t, or contains no nucleotide
tgatccagtactatcagaatgacatcccctactgaggaggggaccttcngagggcctctgccccatgtgccctnnaagctgnncccacaatcatggagccctgcgacctnccngccctgccgccacatgcagtggaggagangcctgtggcccnaagancctggtagcgcctcctggggcagcacgtgggtngcgcagncttngtaacgccntggactgcagcgnnnnnnnnnnnnnnnngctgtctatgcacaggtgtgagtcctctgtttgcactggacatattccctacc

SEQ ID NO: 3098 - DNA, 507 bp, Homo sapiens
  misc_feature (85)..(85): n includes a, c, g, or t, or contains no nucleotide
  misc_feature (215)..(229): n includes a, c, g, or t, or contains no nucleotide
  misc_feature (231)..(231): n includes a, c, g, or t, or contains no nucleotide
atgacatggccctgcctgagcccggggccggcctcgggccacccacgagggcctcccggcctagggcccgaccgcgccggacgcnggtgtccggggcagggcagggctggggcctgggcctcaggagcctaggctaggggcacctccgagagcccctttttgtgataatgttttgcactttttcgtacagggtgggcgggggcgggaggggctannnnnnnnnnnnnnntngatgctttttttttgtgtgggagaggcctgatgccgtttctgctttctgctgagaccacccccaccctgacaccatcagtccccctctgtcctggggcctggcttggacagagaccaggatttggggctgagctggtttcccctccttcctccccaagggcttactctttctcttgctggaggtggaggaagggcgtccatgccaaggccccatacctgggccgggggcagcacggcctggctttcccccgcttcagtgggccttgccctttgtac

SEQ ID NO: 3099 - DNA, 444 bp, Homo sapiens
  misc_feature (27)..(27): n includes a, c, g, or t, or contains no nucleotide
  misc_feature (29)..(29): n includes a, c, g, or t, or contains no nucleotide
  misc_feature (78)..(118): n includes a, c, g, or t, or contains no nucleotide
  misc_feature (131)..(147): n includes a, c, g, or t, or contains no nucleotide
  misc_feature (159)..(160): n includes a, c, g, or t, or contains no nucleotide
  misc_feature (379)..(404): n includes a, c, g, or t, or contains no nucleotide
  misc_feature (419)..(419): n includes a, c, g, or t, or contains no nucleotide
gaccaggtgccttgccgcagagaaaancnaccaaagtctcctgttcgctcataaagaagtttttgggatgggagagannnnnnnnnnnnnnnnnnnnnnnnnnnnnnnnnnnnnnnnntttttacagaggnnnnnnnnnnnnnnnnncaacacaaaacnncttcccctttttaaaatgatttctgttctaatgccatagatcaaaggcctcagaaaccattgtgtgtttcctctttgaagcaatgacaagcactttactttcacggtggtttttgttttttcttattgctgtggaacctcttttggaggacgttaaaggcgtgttttacttgtttttttaagagtgtgtgatgtgtgttttgtagatttcttgacagtnnnnnnnnnnnnnnnnnnnnnnnnnngcctatttaaagacnctacgtgatctgattgagatgtaca

SEQ ID NO: 3100 - DNA, 407 bp, Homo sapiens
  misc_feature (71)..(71): n includes a, c, g, or t, or contains no nucleotide
  misc_feature (76)..(78): n includes a, c, g, or t, or contains no nucleotide
  misc_feature (92)..(92): n includes a, c, g, or t, or contains no nucleotide
tagtaggctgcaaccctggtccccacccctaacctcctgctccccctcaagccaactatgcagcccacaanaaggnnntgcgggcccccccnattgcccagcactgtctcatagaaggctctggtggtacctctgggccccaggagcatcagccccttgatcatctggggtttgtcatcaccatattttctccctgctgttcccaccatgcccttctgccatcttctgggagaaggaaaccaaaggatctaaaactggggtttgggggaaggtttcagcctctccccactccccttgccccacaccctttactccccagcccagagagacgctgcttttaccaggaaagactattgaaagatgttttattttatttttctctgacctttccatccttgaaaaaatgg

SEQ ID NO: 3101 - DNA, 64 bp, Homo sapiens
agaatatgcagccgttttctccttcctgggtacagtgctattctgcctagagctctgactacca

SEQ ID NO: 3102 - DNA, 153 bp, Homo sapiens
  misc_feature (52)..(66): n includes a, c, g, or t, or contains no nucleotide
gccccagacccttgaaggaaggtgctccccttcacacacccaggctggaaannnnnnnnnnnnnnngacggcttgatggtagccaggacctcctctttactgcgggggtgggcgggggcggaggatgggaactggctagtgagccctgaaata

SEQ ID NO: 3103 - DNA, 615 bp, Homo sapiens
ccctgtgactaacatctgtcaggcagctgacaaacagctattcacgcttgttgagtgggcgaagaggatcccacacttttcctccttgcctctggatgatcaggtcatattgctgcgggcaggctggaatgaactcctcattgcctccttttcacaccgatccattgatgttcgagatggcatcctccttgccacaggtcttcacgtgcaccgcaactcagcccattcagcaggagtaggagccatctttgatcgggtgctgacagagctagtgtccaaaatgcgtgacatgaggatggacaagacagagcttggctgcctgagggcaatcattctgtttaatccagatgccaagggcctctccaaccctagtgaggtggaggtcctgcgggagaaagtgtatgcatcactggagacctactgcaaacagaagtaccctgagcagcagggacggtttgccaagctgctgctacgtcttcctgccctccggtccattggccttaagtgtctagagcatctgtttttcttcaagctcattggtgacacccccatcgacaccttcctcatggagatgcttgaggctccccatcaactggcctgagctcagacccagac

SEQ ID NO: 3104 - DNA, 524 bp, Homo sapiens
tgcctgctgcttcaggtttccaagtttctgaaacaccccgtcaagctcctgctgagtccctgtcttacgctccctcacctctgcagaaacctccgccagatgctgcagatgcttctcctgttgtagctgccactggttctggactgctctgcgtttctccatggccatttgtttcttggcctggagctgctcaaaggcttcccggagttgtgtccgtttcctctgggcttcctccatctgagtcagggccttggtgaggccaattttgatggcctctacgtgctccctgtaggtggccttcagctctttccattgttccttagctgcaattgccttctgtccctccttacaggtttccttaagtctgctcctgccaatgctgccctgtatctcagtaagaggagccaggaccagaccctggcttctgaaaggctcgctctcatcttgtacataccaccacaaactcaaccaggatcttggctggcagttctgcctcctcctgcaggcctacaggttccaagatg

SEQ ID NO: 3105 - DNA, 597 bp, Homo sapiens
  misc_feature (26)..(54): n includes a, c, g, or t, or contains no nucleotide
  misc_feature (70)..(70): n includes a, c, g, or t, or contains no nucleotide
  misc_feature (161)..(161): n includes a, c, g, or t, or contains no nucleotide
  misc_feature (176)..(176): n includes a, c, g, or t, or contains no nucleotide
  misc_feature (178)..(178): n includes a, c, g, or t, or contains no nucleotide
  misc_feature (180)..(180): n includes a, c, g, or t, or contains no nucleotide
  misc_feature (184)..(185): n includes a, c, g, or t, or contains no nucleotide
  misc_feature (193)..(193): n includes a, c, g, or t, or contains no nucleotide
  misc_feature (195)..(195): n includes a, c, g, or t, or contains no nucleotide
  misc_feature (215)..(215): n includes a, c, g, or t, or contains no nucleotide
  misc_feature (237)..(237): n includes a, c, g, or t, or contains no nucleotide
  misc_feature (239)..(239): n includes a, c, g, or t, or contains no nucleotide
  misc_feature (266)..(266): n includes a, c, g, or t, or contains no nucleotide
  misc_feature (297)..(297): n includes a, c, g, or t, or contains no nucleotide
  misc_feature (435)..(449): n includes a, c, g, or t, or contains no nucleotide
caaagtcataaatcctgagtgacaannnnnnnnnnnnnnnnnnnnnnnnnnnnngtggacaacctggctnggggtggggggctgttccaccagctcacctgagcatgtagaggtgggtcctgcagtggtctcgtgggtattactgcttgtgtctgattgtncctgtattttgtaancncntttnngaagaatncngaaaagtgccagtaattctnctttctcccatagtatttaagncngaaatattgctagtttaatattgtgtncaggtcgtcctattaaccaggagcagatgancagtaaaatttcagtgaatagcaccttgacatctacaacttaaaaatggtgattgaagcaaaatatgtaaacttgtacggggtgatcgtgtgctttggaacagagtattgttgaagtaattagaagatatattaaggnnnnnnnnnnnnnnnaggcatgtaagttataataattgtagctttctgaataagtgtcaaactatatctttaagtgtgctgtatgctgagttacaagttaggtcatttatgaatggaatgtaaaataatactaaaaatgcttcaataacttatcttggtattg

SEQ ID NO: 3106 - DNA, 272 bp, Homo sapiens
tgcctttaatcaagcctggcatttggttgctcacgaatgtcccaactacttccgctaggcccatcatggctcaggctgcccaaggcttttctgtcacctcttttgttctctcacactgaccagtcttggccttaagctgacttagaagggtttttctgaattgtctagatccatgcattatttttctagcttcctgccttgctccctattcactttacactgtgaaaggtggggggtgagtcccacttgagcgcttcctgttgaataaagca

SEQ ID NO: 3107 - DNA, 618 bp, Homo sapiens
  misc_feature (136)..(142): n includes a, c, g, or t, or contains no nucleotide
  misc_feature (155)..(187): n includes a, c, g, or t, or contains no nucleotide
  misc_feature (307)..(337): n includes a, c, g, or t, or contains no nucleotide
atgtctcttgtatgttttgaaactcttgtatttatgatatagcttatatgatttttttgccttggtatacattttaaaatatgaatttaaaaaatttttgtaaaaataaaattcacaaaattgttttgaaaaacannnnnnnattgtttcattcnnnnnnnnnnnnnnnnnnnnnnnnnnnnnnnnnaaagtgaaggattcaagctaaatacatcaacctttctatttaggctttatcagctatatgtaaattcaattctatcaaaattttctgagtgcctcctcagtgtgtctctctgatggttcnnnnnnnnnnnnnnnnnnnnnnnnnnnnnnntgtaaaaaagagaattcatttatttattcacttagtttgttcatgcatttgtttaataaatattgagatgtaccatgtgcctgacattgtggtaggtattgggaacacaggagtgagcaaaacaaaattcttgctctactgcagttaagggccagggagaggcagaaaaagtaaataagtaaaatctatagtgaatttggtggtatgtacaagcggaggggaaggggttacggttttagatggactggctctttcagaagctgacacttgtacagacctga

SEQ ID NO: 3108 - DNA, 181 bp, Homo sapiens
  misc_feature (54)..(68): n includes a, c, g, or t, or contains no nucleotide
gttaggagcttctaacccgtcatggtttcaatacacattcttcttttgccagcnnnnnnnnnnnnnnnctctcacctctctgcatcccaatagatatccccctatgtgcatgcacacctgcacactcacggctgaaatctccctaacccagggggaccttagcatgcctaagtgactaaac

SEQ ID NO: 3109 - DNA, 461 bp, Homo sapiens
agtagccaaagactcagcttcccctgtccttccccagtcccttcacttcccctaccctctgacctatctctgaaagccaagttatgcgtatgtgtgtgtgcacaagcttgtctttgtgtggtatgtgtgtgtgagtgtgcatgtatgcacacacacaggggttaaccacccctcacctagggctccagactccagttgtccctctcctcctacctgtgtctccttgttttggggtcctgactgaagaaggtgtccagggggcagagtcagggccaagcactggggtgcctcctctcacctggccagactctgacccacctacctcagctggggtgaggggcacccctcaaactcagtcatgtggttccaaactaccccattccccactccagactctgacccagcctcagtcctaactcctggggctgggctgaggggaacaagcatttgctgaaacttga

SEQ ID NO: 3110 - DNA, 343 bp, Homo sapiens
  misc_feature (75)..(75): n includes a, c, g, or t, or contains no nucleotide
  misc_feature (147)..(147): n includes a, c, g, or t, or contains no nucleotide
  misc_feature (188)..(188): n includes a, c, g, or t, or contains no nucleotide
  misc_feature (285)..(285): n includes a, c, g, or t, or contains no nucleotide
  misc_feature (311)..(311): n includes a, c, g, or t, or contains no nucleotide
  misc_feature (318)..(318): n includes a, c, g, or t, or contains no nucleotide
gaagaagatccacttggacctaattgctattatgacaaaactaaatccttctttgataatatttcttgtgatganaatagagaacggagaccaacctgggctgaagaaagaagattaaatgctgaaacatttggaatcccacttcgnccaaatcgtggccgtgggggatacagaggcagaggaggtcnttggtttccgtggtggcagagggcgtggtggtggcagaggtggtaccttcactgcccctcgaggatttcgcggtggattcagaggaggtcgtggggnccgggagtttgcggattttgaatatnggaaagnacaacaaagttgctgcatagtctac

SEQ ID NO: 3111 - DNA, 503 bp, Homo sapiens
  misc_feature (396)..(419): n includes a, c, g, or t, or contains no nucleotide
  misc_feature (434)..(437): n includes a, c, g, or t, or contains no nucleotide
ctttgtagccatatatgtaattgactttgaatgttatttacctgaaattaatcttccttcacacatggaccgtaaacggttcccagttgtctgagagcctcatgagggtttctaggatttatgaccttatgaccagtttttttcatttaccaagattttattttcctacatgaaaatttaattgagtaataattattcacatgtgcattttctttttagctgttaaatgtactatgccatcatccaccatttagtaaaatgtagctggcccaggacatgtaaaaaaaaaaaaaaaacaacaacaataaatagggcatgtgaaatgttaagttacagcaatagatattttatttgtatttcatgttagtacttttttgttttatatcacttataaannnnnnnnnnnnnnnnnnnnnnnnctcagttggtaaccnnnntccattgaaaagttggccttgtaaaatacaactctcatttaatattcatgcttttgtgcctttaag

SEQ ID NO: 3112 - DNA, 561 bp, Homo sapiens
  misc_feature (90)..(90): n includes a, c, g, or t, or contains no nucleotide
  misc_feature (100)..(100): n includes a, c, g, or t, or contains no nucleotide
  misc_feature (118)..(118): n includes a, c, g, or t, or contains no nucleotide
  misc_feature (129)..(129): n includes a, c, g, or t, or contains no nucleotide
  misc_feature (142)..(142): n includes a, c, g, or t, or contains no nucleotide
  misc_feature (152)..(153): n includes a, c, g, or t, or contains no nucleotide
  misc_feature (162)..(162): n includes a, c, g, or t, or contains no nucleotide
  misc_feature (173)..(173): n includes a, c, g, or t, or contains no nucleotide
  misc_feature (175)..(175): n includes a, c, g, or t, or contains no nucleotide
  misc_feature (178)..(178): n includes a, c, g, or t, or contains no nucleotide
  misc_feature (279)..(279): n includes a, c, g, or t, or contains no nucleotide
  misc_feature (291)..(306): n includes a, c, g, or t, or contains no nucleotide
  misc_feature (395)..(395): n includes a, c, g, or t, or contains no nucleotide
  misc_feature (402)..(421): n includes a, c, g, or t, or contains no nucleotide
  misc_feature (426)..(426): n includes a, c, g, or t, or contains no nucleotide
  misc_feature (447)..(447): n includes a, c, g, or t, or contains no nucleotide
  misc_feature (534)..(535): n includes a, c, g, or t, or contains no nucleotide
acctggacgccctcaagtgggaagagcgctgttcaaggaccacctgagcgtgacctctgtggctgctacagcgtgtccagtgtcctgccnggctgtgccnagccatggaaccatgggnagaccttcacntgcactgctgccnaccccgagtnnaagaccccnctaaccgccancntcncaaaatccggaaacacattccggcccgaggtccacctgctgccgccgccgtcggaggagctggccctgaacgagctggtgacgctgacgtgcctggcacgnggcttcagcccnnnnnnnnnnnnnnnncgctggctgcaggggtcacaggagctgccccgcgagaagtacctgacttgggcatcccggcaggagcccagccagggcaccaccacctncgctgtnnnnnnnnnnnnnnnnnnnncagcngaggactggaagaaggggganaccttctcctgcatggtgggccacgaggccctgccgctggccttcacacagaagaccatcgaccgcttggcgggtaaacccacccanntcaatgtgtctgttgtcatggcggag

SEQ ID NO: 3113 - DNA, 513 bp, Homo sapiens
  misc_feature (26)..(47): n includes a, c, g, or t, or contains no nucleotide
  misc_feature (95)..(95): n includes a, c, g, or t, or contains no nucleotide
  misc_feature (98)..(98): n includes a, c, g, or t, or contains no nucleotide
  misc_feature (124)..(124): n includes a, c, g, or t, or contains no nucleotide
  misc_feature (139)..(139): n includes a, c, g, or t, or contains no nucleotide
  misc_feature (145)..(151): n includes a, c, g, or t, or contains no nucleotide
  misc_feature (262)..(289): n includes a, c, g, or t, or contains no nucleotide
  misc_feature (295)..(295): n includes a, c, g, or t, or contains no nucleotide
  misc_feature (345)..(345): n includes a, c, g, or t, or contains no nucleotide
  misc_feature (349)..(350): n includes a, c, g, or t, or contains no nucleotide
  misc_feature (352)..(352): n includes a, c, g, or t, or contains no nucleotide
  misc_feature (354)..(355): n includes a, c, g, or t, or contains no nucleotide
  misc_feature (409)..(409): n includes a, c, g, or t, or contains no nucleotide
tctatgactttgaaccagcgctcaannnnnnnnnnnnnnnnnnnnnnttttctgagttccaagagaaggggttcaggattcagtgggtggatganacncacgcactcggcatctttccctgccnggcctcagctgcggnaagccnnnnnnncccgggagttctcggtgctcaagatccggcccctcacgcagggaaccaagcagtcaaagctcaaagccttgcagaggccaaaactcctgcgtctggtgaaggagaggccannnnnnnnnnnnnnnnnnnnnnnnnnnnctggtngcccgggccctgggactccaacacaaaaagaaagagcggcctgctgtccngggnntncnntgccgccctgaggcctggagacccaactggcctggatctgcgtcccgacgtagntggcgcccccaacaccataagccttcacagacgccagagcagccccgcaccaccctcgagcttcaccatggggtgtggtgggctttagtttagtcccagaaatg

SEQ ID NO: 3114 - DNA, 499 bp, Homo sapiens
  misc_feature (26)..(26): n includes a, c, g, or t, or contains no nucleotide
  misc_feature (306)..(338): n includes a, c, g, or t, or contains no nucleotide
  misc_feature (449)..(465): n includes a, c, g, or t, or contains no nucleotide
tagggcagcttctaacatgctttttncaaggggagaggagtagtgacaagtcgtgtgtcggaattggatttgagaacactctgaatgacccctggaggccgagggggcaggcttcgggcgtgaactgaactccagacccctctttgtgttgggcagtgtcatcttgcttacaaactgtaagacacatttttttgtgtgtttgtttttgttgttgttcttttgcagcactcacgcctctgacagtcttttgggaaagagtaacacccacatacagaatttgtcacatccagagtagcactgttcctnnnnnnnnnnnnnnnnnnnnnnnnnnnnnnnnnttttttatatttaaaatgttacttttctgtatgatgtgcatgcaagtttaccgtaacttttcttaaactttttagtgccgtttctagtatattcctgtaaatgtcagttannnnnnnnnnnnnnnnngtaagtagtttagcttgtttattgcaatgctggc

SEQ ID NO: 3115 - DNA, 530 bp, Homo sapiens
  misc_feature (60)..(60): n includes a, c, g, or t, or contains no nucleotide
  misc_feature (80)..(115): n includes a, c, g, or t, or contains no nucleotide
  misc_feature (301)..(334): n includes a, c, g, or t, or contains no nucleotide
gcacaattggcactgtacatctaaaaatattacagtagaatctgagtgtaatatgtgtanccaaaatgagaaagaatacnnnnnnnnnnnnnnnnnnnnnnnnnnnnnnnnnnnnttgtagaatcttacagcatctttgataaacttctcagtgaaaatgttggctaggcaagttcagttaaaatatagtagaaatgtttatcctggtatctctaagtatacatttaattgtacagaaaatttacagtgtaacattgtgtcaacatttgcagattgactgtatatgaccttaatctttgtnnnnnnnnnnnnnnnnnnnnnnnnnnnnnnnnnnagtgctttttacctaagacttccttctcagcttctcccataaagagaccctaatatgcattttgatttgtaattggaaatgtaactttcactgaaagtgtcatgtgatgtttgcattacttttaactgctatgtataaaggaaagtgtgtcttttgacttcatcagttatttctcttgtgcacagagaaaaatgca

SEQ ID NO: 3116 - DNA, 589 bp, Homo sapiens
tcgccaatcgagtgactgacaagctgacacctattcacgaccgcattttctgctgtcgctcaggctcagctgctgatacccaggcagtagctgatgctgtcacctaccagctcggtttccacagcattgaactgaatgagcctccactggtccacacagcagccagcctctttaaggagatgtgttaccgataccgggaagacctgatggcgggaatcatcatcgcaggctgggaccctcaagaaggagggcaggggtactcagtgcctatggggggtatgatggtaaggcagtcctttgccattggaggctccgggagctcctacatctatggctatgttgatgctacctaccgggaaggcatgaccaaggaagagtgtctgcaattcactgccaatgctctcgctttggccatggagcgggatggctccagtggaggagtgatccgcctggcagccattgcagagtcaggggtagagcggcaagtacttttgggagaccagatacccaaattcgccgttgccactttaccacccgcctgaatcctgggattctagtatgcaataagagatgccctgtactgatgcaa

SEQ ID NO: 3117 - DNA, 403 bp, Homo sapiens
  misc_feature (93)..(121): n includes a, c, g, or t, or contains no nucleotide
  misc_feature (298)..(298): n includes a, c, g, or t, or contains no nucleotide
  misc_feature (303)..(304): n includes a, c, g, or t, or contains no nucleotide
  misc_feature (311)..(311): n includes a, c, g, or t, or contains no nucleotide
gaccccagaggagctgcagaagcgagaggaggaggaatttaacaccggtccactctctgtgctcacacagtcagtcaagaacaatacccaagnnnnnnnnnnnnnnnnnnnnnnnnnnnnngaaactcctgggccgcgtgaaggccttcgataggcactgcaacatggtgctggagaacgtgaaggagatgtggactgaggtacccaagagtggcaagggcaagaagaagtccaagccagtcaacaaagaccgctacatctccaagatgttcctgcgcggggactcagtcatcgtggntcctnngcggaancccgctcatcgccggcaagtaggggccgcctgtctgttgacagaactcactcctctgtcctatgaagaccgctgccattggtgttgagaata

SEQ ID NO: 3118 - DNA, 478 bp, Homo sapiens
  misc_feature (26)..(26): n includes a, c, g, or t, or contains no nucleotide
  misc_feature (33)..(34): n includes a, c, g, or t, or contains no nucleotide
  misc_feature (39)..(39): n includes a, c, g, or t, or contains no nucleotide
  misc_feature (122)..(122): n includes a, c, g, or t, or contains no nucleotide
  misc_feature (170)..(188): n includes a, c, g, or t, or contains no nucleotide
  misc_feature (230)..(230): n includes a, c, g, or t, or contains no nucleotide
  misc_feature (250)..(264): n includes a, c, g, or t, or contains no nucleotide
  misc_feature (276)..(276): n includes a, c, g, or t, or contains no nucleotide
  misc_feature (341)..(341): n includes a, c, g, or t, or contains no nucleotide
  misc_feature (441)..(441): n includes a, c, g, or t, or contains no nucleotide
tcttcctggcctatcgcatgggggtnttcatcnnggcangcatccggctacccatcgtactggtgggtatcacggtgcccctggttggcctgttggtgggctactgcctagccacgtgtctnaagctgccagtggcccagcggcggacggtcagcattgaggtaggggtnnnnnnnnnnnnnnnnnnnttggccatgctgcagctatccctccgccgccttcaagctgantatgcctcccaggccccctnnnnnnnnnnnnnnngcggcacctccnagatgctggccttggtcattggccacttcatctacagcagcctgttcccagttccctgaggcctntgggtcaagctttcatcagccccagcccccacactccaccaaagttctcatgcactatgcactcagaaaaatccaggcttattttttttactgatttttnattctccagctttcagtgccaaagaggccatgctgag

SEQ ID NO: 3119 - DNA, 521 bp, Homo sapiens
  misc_feature (46)..(72): n includes a, c, g, or t, or contains no nucleotide
  misc_feature (304)..(321): n includes a, c, g, or t, or contains no nucleotide
aagttccatgcctccatcaggatcccccccttcgacaatgatctannnnnnnnnnnnnnnnnnnnnnnnnnntctagcaccagggaacggaaggcagcacgcatcctggggctgattctgggtgcattcattttatcctggctgccatttttcatcaaagagttgattgtgggtctgagcatctacaccgtgtcctcggaagtggccgactttctgacgtggctcggttatgtgaattctctgatcaaccctctgctctatacgagttttaatgaagactttaagctggcttttaaaaagctcnnnnnnnnnnnnnnnnnnacttagactgtaaaaagctaaaaggcacgactttttccagagcctcatgagtggatgggggtaaggggtgcaacttattaattcttgaacatacttggttcaggagagtttgtaagtatgtgtggtcttgtttccttgtttgtttgtttgttttgttctgttttgtttgaggattgttatttggcgtgctgttttctacc

SEQ ID NO: 3120 - DNA, 391 bp, Homo sapiens
aaggctgttttctctcggatctccaaatttaaaagcacaaggaatgattgtaccacacaaagtaatgtaaaacattaaaggactcattaaaaagtaacagttgtctcatatcatcttgatttattgtcactgttgctaactttcaggctcggaggagatgctcctcccaaaatgagttcggagatgatagcagtaataatgagacccccgggctccagctctgggccccccattcaggccgagggggctgctccggggggccgacttggtgcacgtttggatttggaggatccctgcactgccttctctgtgtttgttgctcttgctgttttctcctgcctgataaacaacaacttgggatgatcctttccattttgatgccaacctcttt

SEQ ID NO: 3121 - DNA, 509 bp, Homo sapiens
  misc_feature (428)..(428): n includes a, c, g, or t, or contains no nucleotide
  misc_feature (456)..(456): n includes a, c, g, or t, or contains no nucleotide
  misc_feature (469)..(484): n includes a, c, g, or t, or contains no nucleotide
cacactgggccctggctgaggagtagaggggccgtgggggttgaggcagggcaaatgacatgcactgacccttccagacatagaaaacacaaaccacaactgacacaggaaaccaacacccaaagcatggactaaccccaacgcacaggaaaaggtagcttacctgacacaagaggaataagaatggagcagtacatgggaaaggaggcatgcctctgatatgggactgagcctggcccatagaaacatgacactgaccttggagagacacagcgtccctagcagtgaactatttctacacagtgggaactctgacaagggctgacctgcctctcacacacatagattaatggcactgattgttttagagactatggagcctggcacaggactgactctgggatgctcctagtttgacctcacagtgncccttcccaatcagcactgaaaataccntcaggcctaatcnnnnnnnnnnnnnnnncaggctgttctgcactgaaaaggtt

SEQ ID NO: 3122 - DNA, 594 bp, Homo sapiens
  misc_feature (53)..(53): n includes a, c, g, or t, or contains no nucleotide
  misc_feature (117)..(117): n includes a, c, g, or t, or contains no nucleotide
  misc_feature (353)..(375): n includes a, c, g, or t, or contains no nucleotide
  misc_feature (480)..(507): n includes a, c, g, or t, or contains no nucleotide
gtctgatcgatcatgcagatacaatgttggtatttgagaggttagtttttttncctacacttttttttgccaactgacttaacaacattgctgtcaggtggaaatttcaagcacttntgcacatttagttcagtgtttgttgagaatccatggcttaacccacttgttttgctatttttttctttgcttttaattttccccatctgattttatctctgcgtttcagtgacctaccttaaaacaacacacgagaagagttaaactgggttcattttaatgatcaatttacctgcatataaaatttatttttaatcaagctgatcttaatgtatataatcattctatttgctttnnnnnnnnnnnnnnnnnnnnnnnaacaccacttcttttcatctgtaccacaccctggtgaaacctttgaagacataaaaaaaacctgtctgagatgttctttctaccaatctatatgtctttcggttnnnnnnnnnnnnnnnnnnnnnnnnnnnngtaaatgctgatattgatttcactggtccatctatatttaaaacgtgcaagaaaaaaataaaatactctgctctagcaagttttgtg

SEQ ID NO: 3123 - DNA, 465 bp, Homo sapiens
  misc_feature (194)..(195): n includes a, c, g, or t, or contains no nucleotide
  misc_feature (197)..(226): n includes a, c, g, or t, or contains no nucleotide
  misc_feature (237)..(237): n includes a, c, g, or t, or contains no nucleotide
  misc_feature (239)..(239): n includes a, c, g, or t, or contains no nucleotide
  misc_feature (247)..(247): n includes a, c, g, or t, or contains no nucleotide
  misc_feature (255)..(255): n includes a, c, g, or t, or contains no nucleotide
  misc_feature (277)..(277): n includes a, c, g, or t, or contains no nucleotide
  misc_feature (281)..(281): n includes a, c, g, or t, or contains no nucleotide
  misc_feature (287)..(287): n includes a, c, g, or t, or contains no nucleotide
  misc_feature (295)..(295): n includes a, c, g, or t, or contains no nucleotide
  misc_feature (305)..(305): n includes a, c, g, or t, or contains no nucleotide
  misc_feature (308)..(308): n includes a, c, g, or t, or contains no nucleotide
  misc_feature (315)..(315): n includes a, c, g, or t, or contains no nucleotide
  misc_feature (321)..(321): n includes a, c, g, or t, or contains no nucleotide
  misc_feature (329)..(329): n includes a, c, g, or t, or contains no nucleotide
  misc_feature (346)..(346): n includes a, c, g, or t, or contains no nucleotide
  misc_feature (384)..(384): n includes a, c, g, or t, or contains no nucleotide
atgacaatgtatacagctagaagacaatttctcagcctcccttggagagctaggttccagccaatgagatgtaaacagaaatgtatgcaatgttcaagtaggctgcttaaaagaagttgactccacttgaaaggtgtgcttggtttggcctgccttctcccttcctctggttgaatgtcatcttgatgactggnncnnnnnnnnnnnnnnnnnnnnnnnnnnnnnngagggtggaancncacaggcntaatatgnatagaaggatgaggaagaggcntgangtaccnagatggcntgagaagccnacntataccnagcccntagtttcngagtttacactgcttcntgtgaaagaaaagtcaatcacaataaaaccttttatcnttgtttaaaccaccttaaaaagtcagttttcttttatatgcagcctactaatcctatccaaacaaggcttgaataaggttt

SEQ ID NO: 3124 - DNA, 564 bp, Homo sapiens
  misc_feature (27)..(52): n includes a, c, g, or t, or contains no nucleotide
  misc_feature (151)..(152): n includes a, c, g, or t, or contains no nucleotide
  misc_feature (214)..(214): n includes a, c, g, or t, or contains no nucleotide
  misc_feature (320)..(354): n includes a, c, g, or t, or contains no nucleotide
  misc_feature (519)..(519): n includes a, c, g, or t, or contains no nucleotide
gttagcaacagttgcattaactatttnnnnnnnnnnnnnnnnnnnnnnnnnnaacctcaagctatatttgtattcataattgacatctggattgggtttatgtttgatgcattgtttggaaaatttgcaatacaaactggcataagaattnnttattctgatgatgcacttttatgtatttttcattagaaagtagaactaattttagattttncagcttgatggattttcagtttttcctgaagaattttctttaccattagtcttcaaattggatactgttgtgcagtggtgtactgttatacttcagagaaagggtnnnnnnnnnnnnnnnnnnnnnnnnnnnnnnnnnnngtaacccttaaaaatgaaacgtcaactctagggtacatttgacattgaaagaatagttaggaaataacttggttttgatagggtcatgattaagaaatgatatattggttttatttatggaattgttttatagtgcatacaaatcagcgatcagccagcaaatantttttctttgagcttgtgaaagctctgtgttcttttgccttcaat

SEQ ID NO: 3125 - DNA, 216 bp, Homo sapiens
  misc_feature (76)..(76): n includes a, c, g, or t, or contains no nucleotide
  misc_feature (92)..(92): n includes a, c, g, or t, or contains no nucleotide
atgaaagggtccacgaagttggctggctctctgaaagaagactttcctagggctggagatttctcatgggtggctnctgggtagggctttgnctctttctttcttcattctgaactcacaccatttcttgaaatcatttaaacctctatatccttctctagaagaattaggtctgtggtttacttcatctttttttcagggcctctaacaattttg

SEQ ID NO: 3126 - DNA, 419 bp, Homo sapiens
  misc_feature (81)..(81): n includes a, c, g, or t, or contains no nucleotide
  misc_feature (84)..(111): n includes a, c, g, or t, or contains no nucleotide
  misc_feature (113)..(113): n includes a, c, g, or t, or contains no nucleotide
tgacaccctgcgagaagtcactgttactgtcctaagtcgaaaactttgcaacagccaaagttactacaacggcgacccttntannnnnnnnnnnnnnnnnnnnnnnnnnnntnccaaaggccagaaggattcctgtaagggtgactcagggggccccttgatctgtaaaggtgtcttccacgctatagtctctggaggtcatgaatgtggtgttgccacaaagcctggaatctacaccctgttaaccaagaaataccagacttggatcaaaagcaaccttgtcccgcctcatacaaattaagttacaaataattttattggatgcacttgcttcttttttcctaatatgctcgcaggttagagttgggtgtaagtaaagcagagcacatatggggtccatttttgcacttgtaagtcat

SEQ ID NO: 3127 - DNA, 586 bp, Homo sapiens
  misc_feature (86)..(216): n includes a, c, g, or t, or contains no nucleotide
  misc_feature (518)..(532): n includes a, c, g, or t, or contains no nucleotide
tggctctgagactccccggggtacccacccagggaccggccaccggaatcggactatcttctccccaagccaagcagaggcactgnnnnnnnnnnnnnnnnnnnnnnnnnnnnnnnnnnnnnnnnnnnnnnnnnnnnnnnnnnnnnnnnnnnnnnnnnnnnnnnnnnnnnnnnnnnnnnnnnnnnnnnnnnnnnnnnnnnnnnnnnnnnnnnnnnngaagctcaagtgggaaatgcagctgccaggtgcttcccaggggctgactgtaccaagggttgccccaggaatcatctctgcacagcagtcccctggcagtgtgcccacagcagccctgcctgccctggaaccactgggtccctcctgctatcagctgtgctgggcaacagcaccagaaaggtgtctgagtgacaccccacctaaagcctgtctcaagccctgctgggactgtggctccttcctccttcctgtgattgctccctcctgtgtggacgttgcctggccctgcctcgatgcctctnnnnnnnnnnnnnnnattggaggggctggtaaagcaacacccacccacttctcacactggccttaagag

SEQ ID NO: 3128 - DNA, 228 bp, Homo sapiens
catggccatggaagacgaatttgggtttgaaattcctgatatagatgctgaaaagttaatgtgtccacaagaaattgtagattacattgcagataagaaggatgtatatgaataaagtatcagaccctttggctttgctgagagaggactcagatgatagtgacgaatgtctggcagtgaggacacattttggcattcttgctgactctgacagagtgattctgatgg

SEQ ID NO: 3129 - DNA, 469 bp, Homo sapiens
  misc_feature (69)..(121): n includes a, c, g, or t, or contains no nucleotide
  misc_feature (124)..(128): n includes a, c, g, or t, or contains no nucleotide
  misc_feature (130)..(133): n includes a, c, g, or t, or contains no nucleotide
  misc_feature (136)..(136): n includes a, c, g, or t, or contains no nucleotide
  misc_feature (199)..(213): n includes a, c, g, or t, or contains no nucleotide
  misc_feature (261)..(284): n includes a, c, g, or t, or contains no nucleotide
  misc_feature (302)..(317): n includes a, c, g, or t, or contains no nucleotide
cttcttcaagcagaatgagaaagaaaaaccacaggctaatgttccttcagctctgccatcactccctgnnnnnnnnnnnnnnnnnnnnnnnnnnnnnnnnnnnnnnnnnnnnnnnnnnnnnggnnnnnannnncanaaaatgagcacccttgagaagtccaaactggactgggagagcttcaaggaggaagaggggatnnnnnnnnnnnnnnncatccataatcgagggaaagaggggtacattgaacggaaagccttccnnnnnnnnnnnnnnnnnnnnnnnnttgaaattgagcgagatnnnnnnnnnnnnnnnntgaaaccttgatgttacgggctaaatcaagagcagcttaatcctgtttacaatgtgagctttttgtgcgtctgtgaaatgttttacagtgtttctcatcatctgtttcccagcaaggtcttttttttttctacattgaagttctgtctatgt

SEQ ID NO: 3130 - DNA, 358 bp, Homo sapiens
  misc_feature (308)..(308): n includes a, c, g, or t, or contains no nucleotide
  misc_feature (310)..(310): n includes a, c, g, or t, or contains no nucleotide
  misc_feature (312)..(312): n includes a, c, g, or t, or contains no nucleotide
  misc_feature (314)..(333): n includes a, c, g, or t, or contains no nucleotide
caaaggctggtggatgtagtgcctttcctctactgctctctcagctgggggcaagaatgacaggacgtgaacatgcacacaagggcccggaactcacgacccccgacagcggtctcccccgcccccccaaccccgcgcttgcaggatttagggcactagcacagcacagtccaccccttgggactagcaccccctccgcagttctgctctctgcagcaacatagagtacaaatattgttccttttgtttcttttttccctttggatacatttttaattacaaaaatagagcttgattgttgcacctanananannnnnnnnnnnnnnnnnnnncattgggcctcctctcagagcctgg

SEQ ID NO: 3131 - DNA, 129 bp, Homo sapiens
ttattaacccttgctccttgcatggctcattaggttcaaattataactgatttacattttcagctatatttactttttaaatgcttgagtttcccattttaaaatctaaactagacatcttaattggtg

SEQ ID NO: 3132 - DNA, 435 bp, Homo sapiens
  misc_feature (82)..(82): n includes a, c, g, or t, or contains no nucleotide
  misc_feature (190)..(190): n includes a, c, g, or t, or contains no nucleotide
  misc_feature (192)..(192): n includes a, c, g, or t, or contains no nucleotide
  misc_feature (196)..(196): n includes a, c, g, or t, or contains no nucleotide
  misc_feature (201)..(201): n includes a, c, g, or t, or contains no nucleotide
  misc_feature (206)..(206): n includes a, c, g, or t, or contains no nucleotide
  misc_feature (219)..(219): n includes a, c, g, or t, or contains no nucleotide
  misc_feature (232)..(232): n includes a, c, g, or t, or contains no nucleotide
  misc_feature (248)..(248): n includes a, c, g, or t, or contains no nucleotide
  misc_feature (264)..(265): n includes a, c, g, or t, or contains no nucleotide
  misc_feature (277)..(277): n includes a, c, g, or t, or contains no nucleotide
  misc_feature (281)..(281): n includes a, c, g, or t, or contains no nucleotide
  misc_feature (309)..(309): n includes a, c, g, or t, or contains no nucleotide
  misc_feature (314)..(314): n includes a, c, g, or t, or contains no nucleotide
tacaaacaacccttcgctgacgtgattggttatgtcacaaacataaaccatccttgctacagcctagaacaggcagcagaangaagcctttgtaaatgacattgacgagtcgtccccaggcactgagtgggaacgggtggcccggctgtgtgactttaaccccaagtctagcaagcaggccaaagatgtntncccncatgncgctncagtcctcatctnccctcaagcaggnccccgctggtgcactngaagagccaccctgtnnggaaacactacntctngcaatatcttaatcctactcagtgaagntcttnacagtcattggattaattatgttgagttcttttggaccaaacctttttgtctttagagttgttcattgtttgtgattgcatgtttccttccttcaactgtgttctccctggcattcagaga

SEQ ID NO: 3133 - DNA, 486 bp, Homo sapiens
  misc_feature (130)..(130): n includes a, c, g, or t, or contains no nucleotide
  misc_feature (149)..(149): n includes a, c, g, or t, or contains no nucleotide
ggcctactcaagaggccctaagactggtagaaattaaaaggatttcaaaaactttctattcctttcttaaacctaccagcaaactaggattgtgatagcaatgaatggtatgatgaagaaagtttgaccnaaatttgtttttttgttgnttgttgttgttttgaatttgaaatcattcttattccctttaagaatgtttatgtatgagtgtgaagatgctagcgaacctatgctcagatattcatcgtaagtctcccttcacctgttacagagtttcagatcggtcactgatagtatgtatttctttagtaagaatgtgttaaaattacaatgatcttttaaaaagatgatgcagttctgtatttattgtgctgtgtctggtcctaagtggagccaattaaacaagtttcatatgtatttttccagtgttgaatctcacacactgtactttgaaaatttccttccatcctgaataacgaatagaag

SEQ ID NO: 3134 - DNA, 126 bp, Homo sapiens
cctggagccacggtctctcagtatctaaagtcctacacaaggcctttgtggaggtcactgaggagggagtggaagctgcagctgccaccgctgtagtagtagtcgaattatcatctccttcaacta

SEQ ID NO: 3135 - DNA, 482 bp, Homo sapiens
  misc_feature (32)..(32): n includes a, c, g, or t, or contains no nucleotide
  misc_feature (47)..(47): n includes a, c, g, or t, or contains no nucleotide
  misc_feature (54)..(54): n includes a, c, g, or t, or contains no nucleotide
  misc_feature (62)..(62): n includes a, c, g, or t, or contains no nucleotide
  misc_feature (66)..(66): n includes a, c, g, or t, or contains no nucleotide
  misc_feature (93)..(93): n includes a, c, g, or t, or contains no nucleotide
  misc_feature (120)..(120): n includes a, c, g, or t, or contains no nucleotide
  misc_feature (222)..(226): n includes a, c, g, or t, or contains no nucleotide
atatccacgacaggtggacagagcatcacggncggtacccttccacngggatgntggtgctnttcnttgccctgcatgtgtgtgatgaggtgnaacgtgtacgggttcggggccgacagnccggggcaactggcaccactactgggagaacaaccggtacgcgggcgagttccggaagactggcgtgcacgacgcggacttcgaggcccacatcatcgacannnnngccaaggccagcaagatcgaagtctaccggggcaactgagccgggcctcgccgcgacccttccggcccatctatcgggcaccggggctccggcccgggacccaggaccagcaacccgcgaccaatcatgctgcagcccaggggcgtctgctgtgccccgccaatcacgagactgggggaccggccgggcctggcaccaatctgcgctgcggtcgggcggagcttctgtttctcccagccaatcatgtgactcaagg

SEQ ID NO: 3136 - DNA, 475 bp, Homo sapiens
  misc_feature (210)..(227): n includes a, c, g, or t, or contains no nucleotide
  misc_feature (281)..(322): n includes a, c, g, or t, or contains no nucleotide
cttgtatattttgctagctatgagcttttaaataaaattgaaagttctggaaaagtttgaaataatgacataaaaagaagccttctttttctgagacagcttgtctggtaagtggcttctctgtgaattgcctgtaacacatagtggcttctccgcccttgtaaggtgttcagtagagctaaataaatgtaatagccaaacccactctgnnnnnnnnnnnnnnnnnncctatttcagtttattttttcttctgttttcttcttttctttttttaaacagtnnnnnnnnnnnnnnnnnnnnnnnnnnnnnnnnnnnnnnnnnntttcatttctttccttatcacccccttgttgtaaaaagcccagcacttgaattgttattactttaaatgttctgtatttgtatctgtttttattagccaattagtgggattttatgccagttgttaaaatgagcattgatgtacccatttttt

SEQ ID NO: 3137 - DNA, 504 bp, Homo sapiens
  misc_feature (29)..(58): n includes a, c, g, or t, or contains no nucleotide
  misc_feature (284)..(287): n includes a, c, g, or t, or contains no nucleotide
tgtctattgaagattctgtgatctcactnnnnnnnnnnnnnnnnnnnnnnnnnnnnnncgcacactggtggtccatgaaaaagcagatgacttgggcaaaggtggaaatgaagaaagtacaaagacaggaaacgctggaagtcgtttggcttgtggtgtaattgggatcgcccaataaacattcccttggatgtagtctgaggccccttaactcatctgttatcctgctagctgtagaaatgtatcctgataaacattaaacactgtaatcttaaaagtgtaannnngtgactttttcagagttgctttaaagtacctgtagtgagaaactgatttatgatcacttggaagatttgtatagttttataaaactcagttaaaatgtctgtttcaatgacctgtattttgccagacttaaatcacagatgggtattaaacttgtcagaatttctttgtcattcaagcctgtgaataaaaaccctgtatggcacttattatgaggct

SEQ ID NO: 3138 - DNA, 564 bp, Homo sapiens
  misc_feature (48)..(98): n includes a, c, g, or t, or contains no nucleotide
  misc_feature (281)..(335): n includes a, c, g, or t, or contains no nucleotide
ctttggggaccagaggaacattaggggccggtcagacacgtagggggnnnnnnnnnnnnnnnnnnnnnnnnnnnnnnnnnnnnnnnnnnnnnnnnnnntgggctggccggggttgctgggtggccccttccccatgggcctccacaagcactcgggcctccacaagcactcaggccactggcacgttgggccaggcagaaggtccacatggcagggctgcctggaacaccgctgccactgtggctccaggaggcccttgggagcatgaggagagctggacnnnnnnnnnnnnnnnnnnnnnnnnnnnnnnnnnnnnnnnnnnnnnnnnnnnnnnncagtccccagtctgaccagcaagtcccggggtcacccttgctgaaccttgtgctccaggggtcctcctcctctaggaccagcttgccacggtttctcagagcccaggtgccctctgacctgccatgcggaggtgggatttgatactgtacattgtcttgatgcctgtttttttatgttttcattaagggtttttagtttttggttgggttgacactaacttttcttaag

SEQ ID NO: 3139 - DNA, 403 bp, Homo sapiens
  misc_feature (29)..(29): n includes a, c, g, or t, or contains no nucleotide
  misc_feature (67)..(67): n includes a, c, g, or t, or contains no nucleotide
  misc_feature (78)..(79): n includes a, c, g, or t, or contains no nucleotide
  misc_feature (138)..(138): n includes a, c, g, or t, or contains no nucleotide
  misc_feature (216)..(238): n includes a, c, g, or t, or contains no nucleotide
  misc_feature (365)..(365): n includes a, c, g, or t, or contains no nucleotide
cctggggaccccagatgggctcagtgctnccacccagatcagatcacatgggaatgaggccctccgnaccattggcanntccgcctctgggcctttccgcctcctcaccactgtgcctcaagttcctcatctaagtgnccctggcctcctgggggcggggttgtgggggggctgagcgacactcagggacacctcagttgtcctcccgcgggcccnnnnnnnnnnnnnnnnnnnnnnngtgcgacaggcccttggtggggtctgtcttttccttgaggtcagaggtcaggagcagggctggggtcaggatgacgaggcctggggtcctggtgttgggcaggtggtggggctgggccatggagctngcccagaggcccctcagccctttgtaaagtctgatgaa

SEQ ID NO: 3140 - DNA, 333 bp, Homo sapiens
  misc_feature (107)..(162): n includes a, c, g, or t, or contains no nucleotide
aggcccagcacggcccgcactcggcagtggcgcgcatttcgcgggcgcagtacaacgcgctcaccctcaccttccagcgcgccatgcacgactacaaccaggccgannnnnnnnnnnnnnnnnnnnnnnnnnnnnnnnnnnnnnnnnnnnnnnnnnnnnnnngcaaggaagtctcgggcgaccagatcgaggacatgttcgagcagggtaagtgggacgtgttttccgagaacttgctggccgacgtgaagggcgcgcgggccgccctcaacgagatcgagagccgccaccgcgaactgctgcgcctggagagccgcatccgcgacgtacacg

SEQ ID NO: 3141 - DNA, 323 bp, Homo sapiens
  misc_feature (99)..(99): n includes a, c, g, or t, or contains no nucleotide
  misc_feature (101)..(101): n includes a, c, g, or t, or contains no nucleotide
  misc_feature (134)..(134): n includes a, c, g, or t, or contains no nucleotide
  misc_feature (211)..(245): n includes a, c, g, or t, or contains no nucleotide
  misc_feature (257)..(257): n includes a, c, g, or t, or contains no nucleotide
ctcaaccagggtcaagtctggattggaggcaggatcacaggctcgggtcgctgcagacgctttcagtgggttgacggcagccgctggaactttgcgtantngggctgctcaccagccctggtcccgcggtggtnactgcgtggccctgtgtacccgaggaggctactggcgtcgagcccactgcctcagaagacttcctttcatctgttcnnnnnnnnnnnnnnnnnnnnnnnnnnnnnnnnnnnccctctcctggncagctgcctcccctcctctgcttgccatccctccctccacctccctgcaataaaatgggttttact

SEQ ID NO: 3142 - DNA, 437 bp, Homo sapiens
  misc_feature (41)..(41): n includes a, c, g, or t, or contains no nucleotide
  misc_feature (51)..(51): n includes a, c, g, or t, or contains no nucleotide
  misc_feature (229)..(256): n includes a, c, g, or t, or contains no nucleotide
  misc_feature (293)..(293): n includes a, c, g, or t, or contains no nucleotide
tgaagccagggcagacatgcagtgtggccggctgggggcanacggcccccntgggaaaacactcacacacactacaagaggtgaagatgacagtgcaggaagatcgaaagtgcgaatctgacttacgccattattacgacagtaccattgagttgtgcgtgggggacccagagattaaaaagacttcctttaagggggactctggaggccctcttgtgtgtaacaaggnnnnnnnnnnnnnnnnnnnnnnnnnnnnaaacaatggcatgcctccacgagcctgcaccaaagtntcaagctttgtacactggataaagaaaaccatgaaacgctactaactacaggaagcaaactaagcccccgctgtaatgaaacaccttctctggagccaagtccagatttacactgggagaggtgccagcaactgaataaatacc

SEQ ID NO: 3143 - DNA, 576 bp, Homo sapiens
  misc_feature (28)..(28): n includes a, c, g, or t, or contains no nucleotide
  misc_feature (33)..(33): n includes a, c, g, or t, or contains no nucleotide
  misc_feature (109)..(126): n includes a, c, g, or t, or contains no nucleotide
  misc_feature (202)..(217): n includes a, c, g, or t, or contains no nucleotide
  misc_feature (247)..(284): n includes a, c, g, or t, or contains no nucleotide
gcgatggcatctctcggcgccctggcgnctgcntcctgctgtccagcctctcccgctgctcagccgaggcctgcctggagccccagatcaccccttcctactacaccannnnnnnnnnnnnnnnnnccactgagaccgtcttcattgtggagatctccctgacatgcaagaacagggtccagaacatggctctctatgctgnnnnnnnnnnnnnnnnaattccctgtcactcgaggccaggatgtgnnnnnnnnnnnnnnnnnnnnnnnnnnnnnnnnnnnnnngagcgcccacgcaggcacctatgaggttagattcttcgacgaggagtcctacagcctcctcaggaaggctcagaggaataacgaggacatttccatcatcccgcctctgtttacagtcagcgtggaccatcggggcacttggaacgggccctgggtgtccactgaggtgctggctgcggcgatcggccttgtgatctactacttggccttcagtgcgaagagccacatccaggcctgagggcggcaccccagccctgcccttgcttccttcaataaacatcacaggacctgg

SEQ ID NO: 3144 - DNA, 456 bp, Homo sapiens
  misc_feature (207)..(225): n includes a, c, g, or t, or contains no nucleotide
atgctggggcccaagtctccatcatgacctacgatgagtttgagtactgctgggacacctttgtgtaccgccagggatgtcccttccagccctgggatggactagaggagcacagccaagccctgagtgggaggctgcgggccattctccagaatcagggaaactgaaggatgggcctcagtctctaaggaaggcagagacctgggnnnnnnnnnnnnnnnnnnnatcttcttccaagaaatgcaaacagaccgttcaccaccatctccagctgctcacagacaccagcaaagcaatgtgctcctgatcaagtagattttttaaaaatcagagtcaattaattttaattgaaaatttctcttatgttccaagtgtacaagagtaagattatgctcaatattcccagaatagttttcaatgtattaatgaagtgattaattggctccatatttagac

SEQ ID NO: 3145 - DNA, 418 bp, Homo sapiens
  misc_feature (62)..(62): n includes a, c, g, or t, or contains no nucleotide
  misc_feature (70)..(71): n includes a, c, g, or t, or contains no nucleotide
  misc_feature (93)..(93): n includes a, c, g, or t, or contains no nucleotide
  misc_feature (103)..(103): n includes a, c, g, or t, or contains no nucleotide
  misc_feature (112)..(112): n includes a, c, g, or t, or contains no nucleotide
  misc_feature (198)..(223): n includes a, c, g, or t, or contains no nucleotide
aacagggctggataggtatgcagaggagataaaaaaattttaattccttagaatattttttnaaaaattnnttcttattttaccttctcatcntcttattttnccaaattancagcatatatatatatttttttaagttttgaaggtagtcgagcttgggcaatttatccaacccatttaaaccaaaaataaaacttnnnnnnnnnnnnnnnnnnnnnnnnnngcaaaaatattttgatcatgaaaaagaataccaatattcttttgttctaaaaatctcttatgggattacatgttatatttttggtttctctctactgatcaacagactacattttcacaactcttctttcctttacgttttaacacacagacccaagattcatactattaagattctagtagaactctagatggt

SEQ ID NO: 3146 - DNA, 529 bp, Homo sapiens
ctcagtggtttggtgttccctcgtctgcactggaaactacataaaacttggctttttactttgggtacatgggcgtataattcagccctgtttaaatatacttgcctttcaaattcttcaagtaacatgggaagtattcttgaaatgtcacattttctgccttccctctaagtatgctttctgaagaagtcagggaaagttagagtctgtggcctgaggtgtctgctctgggtggcgatagtgggcacctcaggcaggtcggtgacgtttagcacaggtgccagggctcctgcctgctcctcctgtgttagctctgtgaagttcatttaggaatttttttttcctatgcagtttaagaaataatcctaattgttttttcttattacctaagcaatatatttttattatagcaacctcagaaaagaaaaataaaaggataatttaaaaaactcattcatagtctcagttacccagataacctcggttgtcaccttggagtatcttgttgtagtccctttactatgtgtat

SEQ ID NO: 3147 - DNA, 396 bp, Homo sapiens
  misc_feature (207)..(207): n includes a, c, g, or t, or contains no nucleotide
gggctgctgctactcttgggactgctgggcttcctggccctccttgccctcatgtctcgcctaggccgggccgcagctgacagcgatcccaacctggacccactcatgaaccctcacatccgcgtgggcccctcctgagcccccttgcttgtggctaggccagcctaggatgtgggttctgtggaggagaggcggggtaatggggangctgagggcacctcttcactgcccctctccctcaagcctaagacactaagaccccagacccaaagccaagtccaccagagtggctgcaggccaggcctggagtccccgtgggtcaagcatttgtcttgacttgctttcctcccgggtctccagcctccgacccctcgccccatgaaggagctggcaggt

SEQ ID NO: 3148 - DNA, 97 bp, Homo sapiens
  misc_feature (49)..(64): n includes a, c, g, or t, or contains no nucleotide
gagggaaccagaggtggcagtgtgagaaaggctcaactggccattgctnnnnnnnnnnnnnnnngaaggggccacgagccaagccgcccacccaaag

SEQ ID NO: 3149 - DNA, 386 bp, Homo sapiens
  misc_feature (163)..(163): n includes a, c, g, or t, or contains no nucleotide
  misc_feature (169)..(169): n includes a, c, g, or t, or contains no nucleotide
gtgcccctgagtgtgcaactgaagcctgaggtctccccaacgcaggacatcagattcctcatggtgcaaaatggccattccagctccatccagccatcacatcacaggaggaagggaagaaagacacccctccacactcttctaaagagcatagctcaaaaanttgtanacacttcttccgttaattcctgtggaccagaactgattcccacagctacagttcagcttgaggggagactgtatagccaagatattcagctagaattcaggggttcgcttggtaagggaagggaagagaatggatactgtcggtctgtgctccaggagacttaaactcaatgctgaaacactttgcacaatgcctggcgtgttatgcactcaataat

SEQ ID NO: 3150 - DNA, 607 bp, Homo sapiens
caatcactgaatctctagttactactcttagaaacacctgtggcttcttggccctcctgttgcccgctctgaatctctctgcagtctacaaaatcgccccagtcaactctccacttggagggaattgtccagtgtggcccctagaattgagtcaccccctagataccaactgtctgaccccgaggagctctgtaagtccctgctcctcctcttccctttggggctggtgctgccactcagcaataatcctcttttctctgtgctttcttaggtccctgtcctctgtctttgaggctggttaggaagcaagagtcctgatctttcatgctgcacaatatgagcatgcaaaaagctttttccagcagaacatgttccctcgtctccagttgccggaaaggaatttggggatcaagaacttagctcgtcctacccccatgttgagttctgccctggaaaacccaaagcaagtagtgatcatagtacagaacccgaccaaagtaggctggtgaggaagtccaggctccaggggaacagacgctgcccagtgttcatagcttcctgcaacttgacagagcctgagtttgcctcttagtgggagaatgagaga

SEQ ID NO: 3151 - DNA, 427 bp, Homo sapiens
  misc_feature (125)..(158): n includes a, c, g, or t, or contains no nucleotide
  misc_feature (192)..(280): n includes a, c, g, or t, or contains no nucleotide
  misc_feature (292)..(308): n includes a, c, g, or t, or contains no nucleotide
gccacataattactccaggtgttatacttgccaagtcagcaattctgtgagcagcaagaatggcacggtctgcctcagtccaccctgtaccctggcccggtcctttggagtagaatggattgcannnnnnnnnnnnnnnnnnnnnnnnnnnnnnnnnngcctgttacttacctgagatgagctcttttaacnnnnnnnnnnnnnnnnnnnnnnnnnnnnnnnnnnnnnnnnnnnnnnnnnnnnnnnnnnnnnnnnnnnnnnnnnnnnnnnnnnnnnnnnngctgctgaattnnnnnnnnnnnnnnnnnagttaacttttaaatactggttattatttaattttatatccctttgttgttttctagtacacagagatatagagatacacatgcttttttcccacccaaaattgtgacaacattatgtg

SEQ ID NO: 3152 - DNA, 333 bp, Homo sapiens
ctctggtctggtcagcctggctctcgggaaattcagccatgagcagggaaagaactctcccaaccctggggcctagctgtataggaggaattgcctaagggtggcccactcttgtgattgccccatttcctctggcaacaaaagccagagtgttgtgggccaagtccccccacagggcctctgcagggcatggccctgatttccctggtttgagactcacttcctcatctccctgtcctctgagataatatgagtgagcacttaggtatcatatcagatgctcaaggctggcagctacccccttcttgagagtccaagaacctggagcagaaa

SEQ ID NO: 3153 - DNA, 205 bp, Homo sapiens
ctctgtcagtctagagggccctattctatagtgtcacctaaatgctagagctcgctgatcagcctcgactgtgccttctagttgccagccatctgttgtttgcccctcccccgtgccttccttgaccctggaaggtgccactcccactgtcctttcctaataaaatgaggaaattgcatcgcattgtctgagtaggtgtcattct

SEQ ID NO: 3154 - DNA, 536 bp, Homo sapiens
  misc_feature (160)..(160): n includes a, c, g, or t, or contains no nucleotide
ttttcctcgctccttctggtatatgcatgtcactgcatgataattgagttttcctttgttttaataaaactgttctcagacattaagctaaactaagagaaaaataactttgttgccaaaaggttgtgctatccagattttttatatgtctgcatgtttnaaaaaaaaaaagcaacaaaagaaaatgcactctaacttatgtgaactgagagaaaaaaatcaggttttaaacaggaaaacctatggggaatgatattttttgaaagacttttgtataaagttgagtacttagaaaaaagacaaaccagatgtaatatattttgtggatgtttttatttcttggatttatagtaccttatactaaggttaaaaaaatatgcttgatattgtgaaaaggtgaaattcttcaccaacatttcatttgctcctttgtcatattgtaatgccaatataatatagttaatgaaaacagcatttttaaaaaccgaaatattgaaatggtgtaatgttgtaccatttgcactgtgagcaaatgc

SEQ ID NO: 3155 - DNA, 325 bp, Homo sapiens
  misc_feature (52)..(52): n includes a, c, g, or t, or contains no nucleotide
atttttgttgatatatcatgaaaatgaacagaattctttttccatacttatntctaagaaaaggcatcataggtttctgaaagagataactatataacagctttttaactatccagtcaactttcagcttttctacatttaggtaaaatggttaggatataactcatggtgtggctaatctacatttatcaataaaatgtaaattatctgaaaggacagaatataagatttaaccatgtttgacgtattttaatttagttaatgaagcaaaattcagtttatatttcactagaactgtgtacttgattgattttcagagaaatat

SEQ ID NO: 3156 - DNA, 550 bp, Homo sapiens
  misc_feature (85)..(85): n includes a, c, g, or t, or contains no nucleotide
  misc_feature (133)..(133): n includes a, c, g, or t, or contains no nucleotide
  misc_feature (140)..(140): n includes a, c, g, or t, or contains no nucleotide
  misc_feature (158)..(158): n includes a, c, g, or t, or contains no nucleotide
  misc_feature (167)..(167): n includes a, c, g, or t, or contains no nucleotide
  misc_feature (176)..(176): n includes a, c, g, or t, or contains no nucleotide
  misc_feature (178)..(178): n includes a, c, g, or t, or contains no nucleotide
  misc_feature (184)..(184): n includes a, c, g, or t, or contains no nucleotide
  misc_feature (190)..(190): n includes a, c, g, or t, or contains no nucleotide
  misc_feature (197)..(197): n includes a, c, g, or t, or contains no nucleotide
  misc_feature (203)..(203): n includes a, c, g, or t, or contains no nucleotide
  misc_feature (208)..(208): n includes a, c, g, or t, or contains no nucleotide
  misc_feature (219)..(219): n includes a, c, g, or t, or contains no nucleotide
  misc_feature (239)..(239): n includes a, c, g, or t, or contains no nucleotide
  misc_feature (270)..(270): n includes a, c, g, or t, or contains no nucleotide
  misc_feature (285)..(285): n includes a, c, g, or t, or contains no nucleotide
  misc_feature (471)..(491): n includes a, c, g, or t, or contains no nucleotide
tttaacgttctgctgcttgagttgcctgatgctcagagctttttggtttggattactattgcaaaagggaacttggtctggcttnaagaatgtcctcttggagaaaataacaagagttttaacacttctagancttagtnctagatggagaaagtaancacaaacancattttacncnttatgnatcaantgttaantgtaanttgcnatgacaaaccnttatggaaaaggggtgaccntagtagagtgtaatggggaagggaggattcnttttctggttttccntttgtgcggtgaaactttgtgttgctgttgctttggctgtctgtgctgtagtggagtatttgtcagtctggggtggggaagatattgatgtatctgctactgctttatgagttcatttgttacattatcttttaagaataacatccatttaaacagttgacttacagtttgttaatgctgagatgnnnnnnnnnnnnnnnnnnnnnttcctgcttctgattttattgtgagggaaatatacaattgtggttaccttcaaattttg

SEQ ID NO: 3157 - DNA, 253 bp, Homo sapiens
atcaatcgggacctgttcgacttctccacgcgcttcatcacgcggccggccaagtgaggcccggagaccccggcccgaggcgcccaggcctgagccccatgcctcccagcaaccagggcccgcgggtgtggcccccaccagcccaggcctggactctcctcagttctgtgtcgtgttcgggtttttcctctgtgactgggccgtcttggtgtctcgtggcacgcgtcacagtggtgctagtctgtttttaaca

SEQ ID NO: 3158 - DNA, 516 bp, Homo sapiens
  misc_feature (37)..(37): n includes a, c, g, or t, or contains no nucleotide
  misc_feature (43)..(43): n includes a, c, g, or t, or contains no nucleotide
  misc_feature (45)..(45): n includes a, c, g, or t, or contains no nucleotide
  misc_feature (55)..(55): n includes a, c, g, or t, or contains no nucleotide
  misc_feature (58)..(85): n includes a, c, g, or t, or contains no nucleotide
  misc_feature (87)..(87): n includes a, c, g, or t, or contains no nucleotide
  misc_feature (204)..(204): n includes a, c, g, or t, or contains no nucleotide
  misc_feature (210)..(210): n includes a, c, g, or t, or contains no nucleotide
  misc_feature (215)..(223): n includes a, c, g, or t, or contains no nucleotide
  misc_feature (289)..(336): n includes a, c, g, or t, or contains no nucleotide
  misc_feature (422)..(422): n includes a, c, g, or t, or contains no nucleotide
  misc_feature (432)..(432): n includes a, c, g, or t, or contains no nucleotide
tccttgtgatcttctctggaatgttccttgttttcancctggncnggggccctgntcnnnnnnnnnnnnnnnnnnnnnnnnnnnnancaaaggagaaagtcctgtggagcctgcagagccttgtcgttacagctgccccagggaggaggagggcagcaccatccccatccaggaggattaccgaaaaccggagcctgcctgctncccctnagccnnnnnnnnncgggagctgcactacagccctggcctccacccccaccccgccgaccatccaagggagagtgagacnnnnnnnnnnnnnnnnnnnnnnnnnnnnnnnnnnnnnnnnnnnnnnnntgtacacgtgacagagtgccttttcgagactggcagggacgaggacaaatatggatgaggtggagagtgggaagcaggagcccagnccagctgcgnctgcgctgcaggagggcgggggctctggttgtaaaacacacttcctgctgcgaaagacccacatgctacaagacgggcaaaata

SEQ ID NO: 3159 - DNA, 465 bp, Homo sapiens
  misc_feature (26)..(42): n includes a, c, g, or t, or contains no nucleotide
  misc_feature (102)..(102): n includes a, c, g, or t, or contains no nucleotide
  misc_feature (158)..(158): n includes a, c, g, or t, or contains no nucleotide
  misc_feature (181)..(181): n includes a, c, g, or t, or contains no nucleotide
  misc_feature (398)..(398): n includes a, c, g, or t, or contains no nucleotide
  misc_feature (428)..(428): n includes a, c, g, or t, or contains no nucleotide
tttggagccaacatttgttccttgtnnnnnnnnnnnnnnnnncacattccatgatccctggctgagaattctgcctctagtctttcttacccagctgttgtntatccttgttcaattataaatactgctaagggcatttttaaaatacgatcttgtantccttaaatttgaatccgtcagnacggtcactcataggaaaatgatcaaacaagcaagccagtcatgatttgactccttcccatctcatttcttactgccttacgctcatcctgaggtccaccttggtctctaaaaacaccatgtgttctcatgcctccatgtcttttcacacactgttccatttgctcttcctcccacattacattgaaactttcaagcctcagtcgaaacattgcttnttctggatagcagccttcttgacatccctnctcactccccagtccctacagggcttccatagctctt

SEQ ID NO: 3160 - DNA, 292 bp, Homo sapiens
  misc_feature (228)..(242): n includes a, c, g, or t, or contains no nucleotide
ttggattccaagacctcctttccagcttgttgtaatgattaaatgagaccatgcatgtggaaattgcattaactaatgtaaggcattataaaaatgcaagcatgttgacatagcggctttattgataaaatacaacacgtgtgtaaatgcaacagataagtgggcgtttactcccctccatgaagcagcccagaaaggaaggacgcagctgtgcgccctcctcctagnnnnnnnnnnnnnnnccaccatgaagaaccaggaaggccagacgcctctggatctggcaacagct

SEQ ID NO: 3161 - DNA, 124 bp, Homo sapiens
gagaaaagtactctttcaggagggactagaaagagaagggggtgatatgttacacaaattaaagaaggatgtcttaggcatttagtaaaaattcagtggttccccgctatcctcgggggatgtg

SEQ ID NO: 3162 - DNA, 558 bp, Homo sapiens
  misc_feature (64)..(64): n includes a, c, g, or t, or contains no nucleotide
  misc_feature (73)..(73): n includes a, c, g, or t, or contains no nucleotide
  misc_feature (151)..(152): n includes a, c, g, or t, or contains no nucleotide
  misc_feature (299)..(299): n includes a, c, g, or t, or contains no nucleotide
  misc_feature (330)..(330): n includes a, c, g, or t, or contains no nucleotide
  misc_feature (358)..(358): n includes a, c, g, or t, or contains no nucleotide
caagagaccctcaacagataccagcgtgtgtatagaacttccaaatgctgagcccagagcgttntctcctgcncatgagcaccacagtcaggccttgatgggatcttctagggagacaacagccctgtctcaaacccagcttgccagctcnnatgtaccagcagctggaatctgaaggcgtgagtctccatcttagagcatcactcttcctcacaccacaaatctggtgcctgtctcttgcttaccaatgtctaaggtccccactgcctgctgcagagaaaacacactcctttgcttancccacaattctctatttcacttgacccctgncccacctctccaacctaactggcttacntcctagtctacttgaggctgcaatcacactgaggaactcacaattccaaacatacaagaggctctctcttaacacggcacttagacacgtgctgttccaccttccctcgtgctgttccacctttcctcagactatttttcagccttctggcatcagcaaaccttataaaatttttttgatttcagtgtagttctctcctc

SEQ ID NO: 3163 - DNA, 569 bp, Homo sapiens
  misc_feature (159)..(159): n includes a, c, g, or t, or contains no nucleotide
  misc_feature (458)..(458): n includes a, c, g, or t, or contains no nucleotide
  misc_feature (460)..(461): n includes a, c, g, or t, or contains no nucleotide
  misc_feature (463)..(471): n includes a, c, g, or t, or contains no nucleotide
cgaattgcacagctcatttgcgaacggattttttatccagaaatagaagaagttcaagccttggatgacaccgaaaggggttcaggaggttttggttccactggaaagaattaaaatttatgccaagaacagaaaacaagaagtcatacctttttcttnaaaaaaaaaaaaaaagtttttgcttcaagtgttttggtgttttgcacttctgtaaacttactagctttaccttctaaaagtactgcattttttacttttttttatgatcaaggaaaagatcattaaaaaaaaacacaaagaagtttttctttgtgtttggatcaaaaagaaactttgtttttccgcaattgaaggttgtatgtaaatctgctttgtggtgacctgatgtaaacagtgtcttcttaaaatcaaatgtaaatcaattacagattaaaaaaaaaagcctgtatttaactcanannannnnnnnnnagcaacttattttgctttaattgctttaaatcttaagcaatattttttattcagtaaacaaattctttcacaaggtacaaaatcttgcataagctgaa

SEQ ID NO: 3164 - DNA, 501 bp, Homo sapiens
  misc_feature (332)..(346): n includes a, c, g, or t, or contains no nucleotide
tttcataattcagcaagtacagatgcaagcgcattgcacactttttcctttctaaacttaaagacaagtcaaaaagccattcttagaactagaggatttaagagggtaggaattagggtttgtatatatgtatatatgggacattttatcttctggcccaaagtcagaactttataaaaatcttgagtttgttcactaatgtgaaataagctatgtgtccagggtattgctcccctgagtgtatatgagtgctgagtagtattgcagagaatgtgatgagttattcactgtcacaactttttctatagaaaacaggggctgctttttaaacnnnnnnnnnnnnnnntttaccaaaatacttccatatcaattatttgaactcggtagttgtttgacctagttagatgtggtgtttattcaagtttgtatgaaatcatgtttgacaatactgtaaattaggttaattttgtaagtcttagcatcatcatattgtgctgtttt

SEQ ID NO: 3165 - DNA, 443 bp, Homo sapiens
  misc_feature (33)..(33): n includes a, c, g, or t, or contains no nucleotide
  misc_feature (40)..(66): n includes a, c, g, or t, or contains no nucleotide
  misc_feature (131)..(131): n includes a, c, g, or t, or contains no nucleotide
  misc_feature (138)..(138): n includes a, c, g, or t, or contains no nucleotide
  misc_feature (194)..(194): n includes a, c, g, or t, or contains no nucleotide
  misc_feature (204)..(248): n includes a, c, g, or t, or contains no nucleotide
  misc_feature (276)..(276): n includes a, c, g, or t, or contains no nucleotide
  misc_feature (401)..(404): n includes a, c, g, or t, or contains no nucleotide
cttgaaggtcttcatcacgggcggcggcacacncaggtcnnnnnnnnnnnnnnnnnnnnnnnnnnncctggataggcaggacatggtgctgcatgatgtggacgtcagggtggccccagggctgagggggnccataanttgggcccccaccccccccagcatagggcatctcatagccactgtggtatgggtcnagagctgtgnnnnnnnnnnnnnnnnnnnnnnnnnnnnnnnnnnnnnnnnnnnnngagttcgtggcgaggtggcgagaagcgntctcgccgattccggtcatagtcccgatattcaccccgactacggcgctcacggccacggtcccactctctgtcattccaatcgtcccctcgacgtctttcatctctctcgcgggaacggtcgtnnnngctgcgctctcttctgaacttgtccctgcgccttcgatc

SEQ ID NO: 3166 - DNA, 333 bp, Homo sapiens
tgttatcccaagtgctcttattctggtgagaagaaccttaattccataatttgggaaggaatggaagatggacaccaccggacaccaccagacaataggatgggatggatggttttttgggggatgggctaggggaaataaggcttgctgtttgttttcctggggcgctccctccaattttgcagatttttgcaacctcctcctgagccgggattgtccaattactaaaatgtaaataatcacgtattgtggggaggggagttccaagtgtgccctccttttttttcctgcctggattatttaaaaagccatgtgtggaaacccactatttaa

SEQ ID NO: 3167 - DNA, 307 bp, Homo sapiens
agtatcagacacagccccagaagggggcattatgggccctgcctccccataggccatttggactctgccttcaaacaaaggcagttcagtccacaggcatggaagctgtgaggggacaggcctgtgcgtgccatccagagtcatctcagccctgcctttctctggagcattctgaaaacagatattctggcccagggaatccagccatgacccccacccctctgccaaagtactcttaggtgccagtctggtaactgaactccctctggaggcaggcttgagggaggattcctcagggttcccttga

SEQ ID NO: 3168 - DNA, 592 bp, Homo sapiens
  misc_feature (48)..(48): n includes a, c, g, or t, or contains no nucleotide
  misc_feature (90)..(90): n includes a, c, g, or t, or contains no nucleotide
  misc_feature (93)..(93): n includes a, c, g, or t, or contains no nucleotide
  misc_feature (109)..(144): n includes a, c, g, or t, or contains no nucleotide
  misc_feature (556)..(557): n includes a, c, g, or t, or contains no nucleotide
cacgattctttctgggtgaagaatgaattattgccaaacctagagaangaaggtatgcagatttgccttcatgagagaaactttgttccnggnaagagcattgtggaannnnnnnnnnnnnnnnnnnnnnnnnnnnnnnnnnnnatctttgttttgtctcccaactttgtccagagtgaatggtgccattatgaactctactttgcccatcacaatctctttcatgaaggatctaatagcttaatcctgatcttgctggaacccattccgcagtactccattcctagcagttatcacaagctcaaaagtctcatggccaggaggacttatttggaatggcccaaggaaaagagcaaacgtggccttttttgggctaacttaagggcagccattaatattaagctgacagagcaagcaaagaaatagattacacatcaagtgaaaaatattcctcctgttgatattgctgcttttggaagttccaacaatgactttattttgcatcagcatagatgtaaacacaattgtgagtgtatgatgtaggtaaaaatatatnncttcgggtcgcagttcaccatttatatgtggtatt

SEQ ID NO: 3169 - DNA, 495 bp, Homo sapiens
  misc_feature (54)..(54): n includes a, c, g, or t, or contains no nucleotide
  misc_feature (71)..(71): n includes a, c, g, or t, or contains no nucleotide
  misc_feature (158)..(158): n includes a, c, g, or t, or contains no nucleotide
  misc_feature (168)..(168): n includes a, c, g, or t, or contains no nucleotide
tatcccctgaaagtggttttggaggaaccgggatggaggaggccttcccctgtnggaatagaatcgtccantcctagccctggttgcttctgatacacagccactgcacacacacactcacactcacactcccttgtctgatgccccaaagccaattncctggggcanccctaccctctcttatttggagtttccgttggtttacctgagttttctctggggtctgcacagaggcagcagcatggacatcatggcctctcaggtcccttttggttctcagtttcattggttcctctttctgttcccccattgacttctgtgccccaccctagccttttccataaccttaggtattcagtttggaggggttttttgtatttttgaggattcctgtattctgtatcctctcctcgcatctcctcacatggaaagaaataatgtatttgtgccttctgtgaggaatggggggaacaagtggtcccaggtatccccatt

SEQ ID NO: 3170 - DNA, 555 bp, Homo sapiens
  misc_feature (139)..(139): n includes a, c, g, or t, or contains no nucleotide
  misc_feature (181)..(182): n includes a, c, g, or t, or contains no nucleotide
gaaatgcaaaaatgcccggggccaggtgggcctcgtccccaaaaactacgtggtggtcctcagtgacgggcctgccctgcaccctgcgcacgccccacagataagctacaccgggccctcgtccagcgggcgcttcgcnggcagagagtggtactacgggaacgtgacgcggcaccaggcnnagtgcgccctcaacgagcggggcgtggagggcgacttcctcattagggacagcgagtcctcgcccagcgacttctccgtgtcccttaaagcgtcagggaagaacaaacacttcaaggtgcagctcgtggacaatgtctactgcattgggcagcggcgcttccacaccatggacgagctggtggaacactacaaaaaggcgcccatcttcaccagcgagcacggggagaagctctacctcgtcagggccctgcagtgacggcgccccggccccacactcgcctcccgggccccacggtggagctgcccgcccggccttgtggcagaggctcctcccgcggggacggccccgacggcttctctgcgagtctctct

SEQ ID NO: 3171 - DNA, 553 bp, Homo sapiens
gcagcctttgtagtgtgcttccttgcttcctatcagagggtgctgatccagaggctcagtaaccccatcaacttggtggccctggtgtctcacacttgtatccttctgccctcgagacctggcacagcagtatcccttgaagaaatcctgaggctttgtagagtgctccttgaccatgtttaataattcttccctcccctgcttgtctattttcttctcttcacggctcttcctataccttaggccagtctcaagcactcactggagacccttgggccttgggcgaccattgagtcctagtctcccttgtttgtgcccctgtaggaggtaggtccttttctcctccggcctagtaggggaccttgggtaacatcccatttttcggccaaggtgagttgttttaggataaaaaaatttaccacaaattctcatttaaatttccacagaaatcctgttcgtatccccattttgatttccctaagttccttgttctccctctaaaaagagaatgattgcaccctgcctgtttacctcaggattgttgtgattgtag

SEQ ID NO: 3172 - DNA, 128 bp, Homo sapiens
ctctctcttgcctgaggggaaagagagatgggccaggcagagaacagaactggaggcagtccatctagggaatgggactgtgaggccatacttgtgaaacgtctggactgctattctagagcttttat

SEQ ID NO: 3173 - DNA, 562 bp, Homo sapiens
ctttggcagtgttttggttcagacacctgttcacagaaaaagcatgatgggaaaatatttcctgacttgagtgttcctttttaaatgtgaattttttttttttttaattattttaaaatatttaaacctttttcttgatcttaaagatcgtgtagattggggttggggagggatgaagggcgagtgaatctaaggataatgaaataatcagtgactgaaaccattttcccatcatcctttgttctgagcattcgctgtaccctttaagatatccatctttttctttttaaccctaatctttcacttgaaagattttattgtataaaaagtttcacaggtcaataaacttagaggaaaatgagtatttggtccaaaaaaaggaaaaataatcaagattttagggcttttattttttcttttgtaattgtgtaaaaaatggaaaaaaacataaaaagcagaattttaatgtgaagacattttttgctataatcattagttttagaggcattgttagtttagtgtgtgtgcagagtccatttcccacatctttcctcaagtatct

SEQ ID NO: 3174 - DNA, 446 bp, Homo sapiens
  misc_feature (60)..(79): n includes a, c, g, or t, or contains no nucleotide
  misc_feature (351)..(365): n includes a, c, g, or t, or contains no nucleotide
aactgcatatgtttcgctgatatatgtgtttttcacatttgcgaatggttccattctctnnnnnnnnnnnnnnnnnnnnacttttttgagtggatgatgtttcgtgaagtatactgtatttttacctttttccttccttatcactgacacaaaaagtagattaagagatgggtttgacaaggttcttcccttttacatactgctgtctatgtggctgtatcttgtttttccactactgctaccacaactatattatcatgcaaatgctgtattcttctttggtggagataaagatttcttgagttttgttttaaaattaaagctaaagtatctgtattgcattaaatatannnnnnnnnnnnnnntttccgtggcactgcatacaatctgaggcctcctctctcagtttttatatagatggcgagaacctaagtttcagttgattt

SEQ ID NO: 3175 - DNA, 537 bp, Homo sapiens
  misc_feature (254)..(281): n includes a, c, g, or t, or contains no nucleotide
  misc_feature (496)..(512): n includes a, c, g, or t, or contains no nucleotide
gcagacaccttctgtgaacatttttcaacatcatctacatgagtgagagacccgttcgacatgtaagaatactgcttgactttggacctgcctttgtcgtggttcctgcctttctcatagatcccctgccaggcccaggatgataggaggcaatgaagtcaagggccgagccccattcattgaaagctgactctggggtctcgggtataattccatcacataaaatcccctcaacaactcaccagactatattnnnnnnnnnnnnnnnnnnnnnnnnnnnncacagcctctttcaggaatggagtcagaagagcagtcttcagagaccacctcagtttggaaaagcctcctccttcagtggttcccagccatggagtcatcgtgaaggggctccatggtcaataattttacggtactgcacttggttatcacagacagactttttcatgatagcatgccatctctgtctatatcattttcctctgcttaggcaggnnnnnnnnnnnnnnnnncaggggcccgaatctacctggcaaa

SEQ ID NO: 3176 - DNA, 268 bp, Homo sapiens
atcaagccaatgagagatcaaattgtcagagtgaagagatatgaaaaagtcccactaatcctagtaggaaataaagtggatctggaaccagaaagagaggttatgtcttcagaaggcagagctctggctcaagaatggggctgtcctttcatggagacatcggcaaaaagtaaatcaatggtggatgaactttttgctgagatcgtcaggcaaatgaactattcatccctgccggagaagcaagatcagtgttgtacaacttgtgtcg

SEQ ID NO: 3177 - DNA, 370 bp, Homo sapiens
  misc_feature (110)..(110): n includes a, c, g, or t, or contains no nucleotide
  misc_feature (276)..(276): n includes a, c, g, or t, or contains no nucleotide
gcgaacgtatttctccagacccagaggccctgaagcctccgtggaacattctggatctgaccctcccagtctcatctcctgaccctcccactcccatctccttacctctnggaaccccccaggccctacaatgctcatgtccctgtccccaggcccagccctccttcaggggagttgaggtctttctcctcaggacaaggccttgctcactcactcactccaagaccaccagggtcccaggaagccggtgcctgggtggccatcctacccagcgtngcccaggccgggaagagccacctggcagggctcacactcctgggctctgaacacacacgccagctcctctctgaagcgactctcctgtttggaa

SEQ ID NO: 3178 - DNA, 399 bp, Homo sapiens
  misc_feature (119)..(147): n includes a, c, g, or t, or contains no nucleotide
  misc_feature (280)..(280): n includes a, c, g, or t, or contains no nucleotide
tgaggactcagactctggctcggactcagactatgagcactatgacttcagcgcccagcctcctgtggccctgaccaccttctacaattcccagcggcatcgggtcacagatgaggagnnnnnnnnnnnnnnnnnnnnnnnnnnnnncttggaggaaggacttgaagagttgcatgcctcccacatcccaactgccaaccctggacactgcattacagacccgccatccctgggccctcagtatcacccgaggagcaacagtgagtcgagcacctcttcnggggaggattactgcaatagtcccaaaagcaagctgcctccatggaacccccaggtgttttcttcagagaggagttccttcctggagcagcccccaaacttggagctggccggcaccca

SEQ ID NO: 3179 - DNA, 526 bp, Homo sapiens
  misc_feature (147)..(147): n includes a, c, g, or t, or contains no nucleotide
  misc_feature (294)..(294): n includes a, c, g, or t, or contains no nucleotide
  misc_feature (402)..(422): n includes a, c, g, or t, or contains no nucleotide
gaagatcctagaacagatagacaagagtggcgagctcataagccttagagaggaggtgacccaccttacccgctcacttcggcgtgcggagacagagaccaaagtgctccaggaggccctggcaggccagctggactccaactgccnagcctatggccaccaattggatccaggagaaagtgtggctctctcaggaggtggacaaactgagagtgatgttcctggagatgaaaaatgagaaggaaaaactcatgatcaagttccagagccatagaaatatcctagaggagaacnttcggcgctctgacaaggagttagaaaaactagatgacattgttcagcatatttataagaccctgctctctattccagaggtggtgaggggatgcaaagaactacagnnnnnnnnnnnnnnnnnnnnntaagaaactgaaagccagaatctgcttcacctctttttacctgcaatacccccttaccccaataccaagaccaactggcatagagccaactgagataaatgcta

SEQ ID NO: 3180 - DNA, 535 bp, Homo sapiens
atgtcatttgctgaaatcatcatgggctataagatcatggatgctaccaatatcctgttgtctccacttgtctatctctatcctgacattcccaaggaggaggcattcgggaagtattgtcggccagagagccaggagcatcctgaagctgacccaggtagcgctgccccatacctgaagaccaagtttatctgtgtgacaccaacgacctgcagcaataccattgacctgccgatgtccccccgcgctttagattcattgatgcagtttggaaataatggtgaaggtgctgaaccctcagcaggagggcagtttgagtccctcacctttgacatggagttgacctcggagtgcgctacctcccccatgtgaggagctgagaacggaagctgcagaaagatacgactgaggcgcctacctgcattctgccacccctcacacagccaaaccccagatcatctgaaactactaactttgtggttccagattttttttaatctcctacttctgctatctttgagcaatctgggcactt

SEQ ID NO: 3181 - DNA, 351 bp, Homo sapiens
  misc_feature (237)..(266): n includes a, c, g, or t, or contains no nucleotide
agacactgccacgtgcaaggcctgccagcccctcagacgcacaaaatgcgtaaaacaaatgcatcctttcctggctaagcgagtattactctcttagccctgcaccaaacctccaatctagccacatttaactcttcatttcttagacccgcagagtgtcttcctgcctctgagctgtgagtgttgttccctttgcccgggatgctcttgtttttaataccagttcaagtcccactnnnnnnnnnnnnnnnnnnnnnnnnnnnnnnagcctttagtgaaccctcgtttcttgcttctttattatctgtactgttgtccacttggcaattgttcaggcctctgtgttgttac

SEQ ID NO: 3182 - DNA, 568 bp, Homo sapiens
  misc_feature (328)..(353): n includes a, c, g, or t, or contains no nucleotide
  misc_feature (529)..(529): n includes a, c, g, or t, or contains no nucleotide
cccagcagttttgaaatgtgtttatggagtttaagaaatttattttccaggtgcagcccctgtctaactgaaatttctcttcaccttgtacacttgacagctgaaaaaaaacaacatgggagtaataatgggtcaaaatttgcaaaataaagtactgttttggtgtgggagttgtcatgaggctgtgttgaagtgacttatctatgtgggatattgagtatccattgaaatggatttgttcagccatttacattaatgagcatttaaatgcaacagatatcatttcaggtgacttaacatgaatgaataaaagtcaatgctattggannnnnnnnnnnnnnnnnnnnnnnnnntgtgccactgatttaacttctgtagtaacaagggcattaccattcttcacctttcctaattctgatcccatagttttacatttttcctgtttattttgattttgttcactgctttatttcttaaagttctagcacatctgtgactcctccacttccacatttttgcactgcttacncttacgtgcaatcttattccttgtctgcacacacatgtg

SEQ ID NO: 3183 - DNA, 527 bp, Homo sapiens
  misc_feature (26)..(26): n includes a, c, g, or t, or contains no nucleotide
  misc_feature (28)..(29): n includes a, c, g, or t, or contains no nucleotide
  misc_feature (43)..(44): n includes a, c, g, or t, or contains no nucleotide
  misc_feature (46)..(46): n includes a, c, g, or t, or contains no nucleotide
  misc_feature (49)..(49): n includes a, c, g, or t, or contains no nucleotide
  misc_feature (62)..(62): n includes a, c, g, or t, or contains no nucleotide
  misc_feature (68)..(68): n includes a, c, g, or t, or contains no nucleotide
  misc_feature (73)..(73): n includes a, c, g, or t, or contains no nucleotide
  misc_feature (78)..(78): n includes a, c, g, or t, or contains no nucleotide
  misc_feature (102)..(104): n includes a, c, g, or t, or contains no nucleotide
  misc_feature (111)..(111): n includes a, c, g, or t, or contains no nucleotide
  misc_feature (485)..(485): n includes a, c, g, or t, or contains no nucleotide
agcgtgctccaacaggctctgcaagntnncttccttcatctcnntncangtcctcgccgagnccaggnagccnagccnagggtccgggcccctagggccccnnncaccaanggactcagggaagcctctgcacatcaaaccacgtctgtgaggaccccagggaccggcctgcacctacctcagaccctcatccttggagaggaaagaggctctgtccaccactctaccccacaggagggccgcccgccaccaagcctcacctgggggccacagggacactgctctgcctgcctggccctcaaccttccatgaccagcgtgtgcgcagggcctggtcttcctcccccaagccaggcccctgtccccaccccaccaccttccagggtgccaggcagggctggcctccaggcctgtccccgactgccattggcaacagtggccctgcagcccccagccctccccacccaggttttcggcccagtgaanaggccactggccaggcctcccaggcaggtgttttatgttcag

SEQ ID NO: 3184 - DNA, 52 bp, Homo sapiens
tgcatctaaaattcaagcagtccagcctggaatactatcaccaaaaagtgaa

SEQ ID NO: 3185 - DNA, 488 bp, Homo sapiens
  misc_feature (26)..(27): n includes a, c, g, or t, or contains no nucleotide
  misc_feature (34)..(87): n includes a, c, g, or t, or contains no nucleotide
  misc_feature (395)..(395): n includes a, c, g, or t, or contains no nucleotide
caccggtacctgatggaaaacacctnntttgtcnnnnnnnnnnnnnnnnnnnnnnnnnnnnnnnnnnnnnnnnnnnnnnnnnnnnnncggggccagcgcaaggtcatctgcctgctcaaggagcagatcagcaatgagggtgaggacaaaatcttcttaatcaacaagcttcactccatctacgagaggaaggagagggaggagaggagcagggttgggacaaccgaggaggctgcggcaccccctgccctgctcacagatgaacaggatgcctagggggacggcgatgggcctcacgggcccgcccagcaccctgagaccacactgttgcctcccagtgaccctgctgggacaccaggacaaggaagacagtttcgcctctcgaaagccgcagntgcgcctaggctggagctggaagggtgggtgaatccggcttgggcatccccaatgaactctgccctgcctgggactctatttattctgattaa

SEQ ID NO: 3186 - DNA, 472 bp, Homo sapiens
  misc_feature (321)..(321): n includes a, c, g, or t, or contains no nucleotide
gccgtggcgtcttccccgagaacttcactgagagggtcccatgacggcggggcccaggcagcctccgggcgtgtgaagaacacctcctcccgaaaaatgtgtggttcttttttttgttttgttttcgtttttcatcttttgaagagcaaagggaaatcaagaggagacccccaggcagaggggcgttctcccaaagattaggtcgttttccaaagagccgcgtcccggcaagtccggcggaattcaccagtgttcctgaagctgctgtgtcctctagttgagtttctggcgcccctgcctgtgcccgcatgtgtgcctggncgcagggcggggctgggggctgccgagccaccatgcttgcctgaagcttcggccgcgccacccgggcaagggtcctcttttcctggcagctgctgtgggtggggcccagacaccagcctagcctggctctgccccgcagacggtctgtgtg

SEQ ID NO: 3187 - DNA, 489 bp, Homo sapiens
  misc_feature (218)..(244): n includes a, c, g, or t, or contains no nucleotide
caacctaaaaagtcaggatgatcgtgacaagtttttgggacgagttatgttcaaaatcacagcacgtgcatagtatgagtaggatatctccacagagtaaatgttgtgttgtctgtcttcattttgtaacagctggaccttccattctagaattatgagaccaccttggagaaaggtgtgtggtacatgacattgggttacatcataacgtgcttccnnnnnnnnnnnnnnnnnnnnnnnnnnnaagtaactgcctgttgcctctgctgccctttgaaccagtgtacagtcgccagatagggaccggtgaacacctgattccaaacatgtaggatgggggtcttgtcctctttttatgtggtttaattgccaagtgtctaaagcttaatatgccgtgctatgtaaatattttatggatataacaactgtcatattttgatgtcaacagagttttagggataaaatggtacccggccaacatcaagtgac

SEQ ID NO: 3188 - DNA, 239 bp, Homo sapiens
  misc_feature (44)..(44): n includes a, c, g, or t, or contains no nucleotide
  misc_feature (60)..(60): n includes a, c, g, or t, or contains no nucleotide
  misc_feature (84)..(84): n includes a, c, g, or t, or contains no nucleotide
ccttgcaaaagcagatggaacatgctaaccagcagactggcttntccgactcatcctctntgcgccccatgcacccccaggctntgcatccagcccctggactccttgcttccccccagctccctgtgcagatgcagccagcaggaaagtcgggctttgcagctaccagccaacctggccctcggctccccttcatccaacacagccagaacccgcgattctaccacaagtgaccatca

SEQ ID NO: 3189 - DNA, 531 bp, Homo sapiens
  misc_feature (26)..(117): n includes a, c, g, or t, or contains no nucleotide
  misc_feature (272)..(286): n includes a, c, g, or t, or contains no nucleotide
  misc_feature (378)..(392): n includes a, c, g, or t, or contains no nucleotide
  misc_feature (443)..(496): n includes a, c, g, or t, or contains no nucleotide
acaggacttcctcctcagtgtgcagnnnnnnnnnnnnnnnnnnnnnnnnnnnnnnnnnnnnnnnnnnnnnnnnnnnnnnnnnnnnnnnnnnnnnnnnnnnnnnnnnnnnnnnnnnnntggaggctggaggcccaaactaaggggtcacatgaagatgctctgtggtctctccccctgtacctagaaagctatttgagctggatccgtccctctgatcgtgacgccttccttgaagaatttcggacatctctgccaaagtcttgtgacctgtnnnnnnnnnnnnnnnaagagcttgagctgggtccccagtgggctgtctctctgtggggagggctttctgcttcaccatcattaggaatgtgaccattcctatataannnnnnnnnnnnnnngattggtggtaggcctgtgaaatttgccctagttactaccattctcgtttnnnnnnnnnnnnnnnnnnnnnnnnnnnnnnnnnnnnnnnnnnnnnnnnnnnnnnttttcctgtttctccttttctgttgtcgagtaaaa

SEQ ID NO: 3190 - DNA, 368 bp, Homo sapiens
  misc_feature (129)..(170): n includes a, c, g, or t, or contains no nucleotide
  misc_feature (181)..(181): n includes a, c, g, or t, or contains no nucleotide
  misc_feature (192)..(192): n includes a, c, g, or t, or contains no nucleotide
  misc_feature (196)..(196): n includes a, c, g, or t, or contains no nucleotide
  misc_feature (200)..(200): n includes a, c, g, or t, or contains no nucleotide
  misc_feature (202)..(202): n includes a, c, g, or t, or contains no nucleotide
  misc_feature (205)..(223): n includes a, c, g, or t, or contains no nucleotide
  misc_feature (301)..(316): n includes a, c, g, or t, or contains no nucleotide
cttagccaaatatgggatcttctcccacactcacatctatctgctggagaccatcccctccgagatccaggtcttcgtgaagaatcctgatggtgggagctacgcctatgccatcaaccccaacagctnnnnnnnnnnnnnnnnnnnnnnnnnnnnnnnnnnnnnnnnnnttcctaaaaangcagcagcagntggnattncnaannnnnnnnnnnnnnnnnnnggttgggtctggggatctatggcatccaagacagtgacactctcatcctctcgaagaagaaaggagaggctctgtttnnnnnnnnnnnnnnnnctctgggagacttctctgtacatttctgccatgtactccagaactcatcctg

SEQ ID NO: 3191 - DNA, 470 bp, Homo sapiens
  misc_feature (99)..(119): n includes a, c, g, or t, or contains no nucleotide
  misc_feature (157)..(186): n includes a, c, g, or t, or contains no nucleotide
  misc_feature (225)..(298): n includes a, c, g, or t, or contains no nucleotide
  misc_feature (419)..(442): n includes a, c, g, or t, or contains no nucleotide
cttatgtgcacagtgcggtgttggcaggaggcgtggctgtgggtacctcgtgtcacctgatcccttctccgtggcttgccatggtgctgggtcttgtgnnnnnnnnnnnnnnnnnnnnnggagccaagtgcctgccggtgtgttgtaaccgagtgcnnnnnnnnnnnnnnnnnnnnnnnnnnnnnnccatcttcagcttgctgggtctgcttggagagatcaccnnnnnnnnnnnnnnnnnnnnnnnnnnnnnnnnnnnnnnnnnnnnnnnnnnnnnnnnnnnnnnnnnnnnnnnnnnaagcacctcatgtggctaaatattttgatgaccaagttttctggaagtttcctcatttggctgttggattttaagcaaaagcatccaagaaaaacaaggcctgttcaaaaacaagacaacnnnnnnnnnnnnnnnnnnnnnnnngtacgtgagaaacgctcatgacagcaaa

SEQ ID NO: 3192 - DNA, 486 bp, Homo sapiens
  misc_feature (221)..(238): n includes a, c, g, or t, or contains no nucleotide
  misc_feature (293)..(312): n includes a, c, g, or t, or contains no nucleotide
  misc_feature (402)..(405): n includes a, c, g, or t, or contains no nucleotide
  misc_feature (409)..(412): n includes a, c, g, or t, or contains no nucleotide
  misc_feature (414)..(416): n includes a, c, g, or t, or contains no nucleotide
gcatgttcttctgtcttccatagttattacaactatgagagcctcccaagtcatcttatcaactcaactcccttttttttgtcttaatgttgcacataagtttatacagagtggatgaccacactagcacagaagagaacaacatgtattaaagcaggtgattcctccccttggcgggagagctctctcagtgtgaacatgccttctgtgggcggaaatcnnnnnnnnnnnnnnnnnnaatggagagtgccttgcttttatttcagacagcagagttttccaaagtttctctnnnnnnnnnnnnnnnnnnnnctttagtgtgtgttaacctgtggtttgaaagaaatgctcttgtacattaacaatgtaaatttaaatgattaaattacattttatcaatgnnnnaaannnnannnaataagcctgcttcatttaacagttttctcttaattattatgtaatagtatttgctgtgaactcttaagc

SEQ ID NO: 3193 - DNA, 526 bp, Homo sapiens
gcagttgttccacaggcgtgtggctgtgcacctggttaaatggctccccttcctctccgtggacaggctggagagggtcagctccacatctccctccacaggggagcatgaactctctgctgggttctgactcagaccataggaggccaacccaaaataagcaggcgtgacctgccaggcacactgaccagcagcctggctctcccagccaggttctgactcttggcacagcatggagtccgcctcttggatagagaggaatgtaatggtggcctggggcttctgaggcttctgggcttgagtcttttccatgaacttctcccctggtagaaaagaagatgaatgagcaaaaccaaatattccagagactgggactaagtgtaccagagaagggcttggactcaagcaagatttcagatttgtgaccattagcatttgtcaacaaagtcacccacttcccactattgcttgcacaaaccaattaaacccagtagtggtgactgtgggctccattcaaagtgagctc

SEQ ID NO: 3194 - DNA, 409 bp, Homo sapiens
tctcctttgctgaggcctccagcttcaggcaggccaaggccttctcctccccacccgccctccccacggggcctcgggagctcaggtggccccagttcaatctcccgctgctgctgctgctgcgcccttaccttccccagcgtcccagtctctggcagttctggaatggaagggttctggctgccccaacctgctgaagggcagaggtggagggtggggggcgctgagtagggactcagggccatgcctgcccccctcatctcattcaaaccccaccctagtttccctgaaggaacattccttagtctcaagggctagcatccctgaggagccaggccgggccgaatcccctccctgtcaaagctgtcacttcgcgtgccctcgctgcttctgtgtgtggtgagcagaa

SEQ ID NO: 3195 - DNA, 231 bp, Homo sapiens
  misc_feature (42)..(99): n includes a, c, g, or t, or contains no nucleotide
gtcctcgcagactcggttgaccttcaggagtccacagggatnnnnnnnnnnnnnnnnnnnnnnnnnnnnnnnnnnnnnnnnnnnnnnnnnnnnnnnnnngactcagagtgcgagtctggatccgagggcgatgggacagtgcaccgcaggaagaagaggaggacgtgcagcatggtgggaaacggggacaccacctcccaggacgactgtgtcagcaaagagcgcagctcc

SEQ ID NO: 3196 - DNA, 512 bp, Homo sapiens
  misc_feature (61)..(61): n includes a, c, g, or t, or contains no nucleotide
  misc_feature (63)..(64): n includes a, c, g, or t, or contains no nucleotide
  misc_feature (145)..(186): n includes a, c, g, or t, or contains no nucleotide
  misc_feature (220)..(220): n includes a, c, g, or t, or contains no nucleotide
  misc_feature (269)..(321): n includes a, c, g, or t, or contains no nucleotide
tctatggccaccagggctccatcgactgcatccacctaatcaatgaggagcacatggtgtncnnggcgcggacgatggctctgtggccttgtggggtctctccaagaagcgaccacttgccctgcagcgtgaagctcacgggctnnnnnnnnnnnnnnnnnnnnnnnnnnnnnnnnnnnnnnnnnnggtggcagccctcctcaacacagaccttgtggcnacaggctcccacagctcctgtgtgcggctttggcagtgtggggaaggcnnnnnnnnnnnnnnnnnnnnnnnnnnnnnnnnnnnnnnnnnnnnnnnnnnnnngcctcaagttctccagctctggggacttcctggtggctggggtagggcaggagcacaggcttggccgatggtggagaatcaaagaggctcggaattctgtctgcatcatcccactccgcagggtccctgtacccccagctgctggttcctgacactcttatcctccttatttaagtccttcccaggctatg

SEQ ID NO: 3197 - DNA, 282 bp, Homo sapiens
  misc_feature (115)..(188): n includes a, c, g, or t, or contains no nucleotide
ctctatggattctgacagagatttctttttgttttgttattcttttggttgtcagtttcattttaacgagtgtaactagtaacattttattctttggattttgtataattacagnnnnnnnnnnnnnnnnnnnnnnnnnnnnnnnnnnnnnnnnnnnnnnnnnnnnnnnnnnnnnnnnnnnnnnnnnncacttcctgataaataagaggtgatgacatggatatacaacagaaaacactttgagttgaaagtaaacacaagctggctgcttccctgtggcaa

SEQ ID NO: 3198 - DNA, 465 bp, Homo sapiens
  misc_feature (113)..(113): n includes a, c, g, or t, or contains no nucleotide
  misc_feature (117)..(117): n includes a, c, g, or t, or contains no nucleotide
  misc_feature (431)..(431): n includes a, c, g, or t, or contains no nucleotide
gtccatcctcctgcatttgttgataccactaacaaaatgctttgtaacagacttgcggttaattatgcaaatgatagtttgtgataattggtccagttttacgaacaacagantttntaaattagagaggttaacaagacagatgattactatgcctcatgtgctgtgtgctctttgaaaggaatgacagcagactacaaagcaaataagatatactgagcctcaacagattgcctgctcctcagagtctctcctatttttgtattacccagctttctttttaatacaaatgttatttatagtttacaatgaatgcactgcataaaaactttgtagcttcattattgtaaaacatattcaagatcctacagtaagagtgaaacattcacaaagatttgcgttaatgaagactacacagaaaacctttctanggatttgtgtggatcagatacatacttggcaaat

SEQ ID NO: 3199 - DNA, 545 bp, Homo sapiens
  misc_feature (26)..(26): n includes a, c, g, or t, or contains no nucleotide
  misc_feature (28)..(28): n includes a, c, g, or t, or contains no nucleotide
  misc_feature (59)..(59): n includes a, c, g, or t, or contains no nucleotide
  misc_feature (213)..(213): n includes a, c, g, or t, or contains no nucleotide
  misc_feature (217)..(217): n includes a, c, g, or t, or contains no nucleotide
  misc_feature (234)..(234): n includes a, c, g, or t, or contains no nucleotide
  misc_feature (514)..(515): n includes a, c, g, or t, or contains no nucleotide
ttaaatgtagcttgtcagatttaccntnaatcctactaatttctttgcagcttattaantttgtgaaatttgtatatatgaagaatttgcatgtatgtgtatttacaaatttttctaagtatcttgaattctcagactgcaaaaggcctattttaactattgattttttttaaaaaaaattgtctttgaatgtattggaagtagacatgcatnaacngtgacattattgcaccncagtttttttctttctttttttgggcaaactgatattatctataggatatttgtttatgtttgttttttgggggaaagaaactggaactcagtgttaccttaaagttacggaatactttgttttaaaggaaaagataataagtttagttatatctttttgttaatattcaaatgaacttgtttaagtatctatgtacagtaatgcctcattcatctagaggtaatctggcagtcttgtgaaaaccgaacacaactcagaaacttggaatcgttttttttnnaaaaatgcctctgagcaacccatataagtc

SEQ ID NO: 3200 - DNA, 438 bp, Homo sapiens
  misc_feature (30)..(53): n includes a, c, g, or t, or contains no nucleotide
  misc_feature (130)..(144): n includes a, c, g, or t, or contains no nucleotide
  misc_feature (240)..(258): n includes a, c, g, or t, or contains no nucleotide
  misc_feature (279)..(279): n includes a, c, g, or t, or contains no nucleotide
  misc_feature (358)..(358): n includes a, c, g, or t, or contains no nucleotide
  misc_feature (360)..(360): n includes a, c, g, or t, or contains no nucleotide
  misc_feature (410)..(410): n includes a, c, g, or t, or contains no nucleotide
  misc_feature (413)..(413): n includes a, c, g, or t, or contains no nucleotide
cgatcggtaatgcctttattaacgagaatnnnnnnnnnnnnnnnnnnnnnnnnccttctcgttggttttctggacacagctcacctgatcctgctagaaacgttgtcagtctgcttgtggcttccctccnnnnnnnnnnnnnnntgtgtgatgtctggagaagtatctatccacttcatgtgaatgagcactccaatatcagccaacatcaatcattcttaccatgtcacttcccatcannnnnnnnnnnnnnnnnnntggtggaacgccaggattagnttcataacctatgccaccaccacctcctagaggtggaaatttctggcctcctgaaccatagggatctcccatgttcatngntcctccgccgcccattcgggtgtaactttcctctcttggggggctcattnggntcttccatctcacgggggacgaatc

SEQ ID NO: 3201 - DNA, 426 bp, Homo sapiens
  misc_feature (36)..(37): n includes a, c, g, or t, or contains no nucleotide
  misc_feature (312)..(344): n includes a, c, g, or t, or contains no nucleotide
  misc_feature (383)..(401): n includes a, c, g, or t, or contains no nucleotide
ttgttgactgctgtctgttgatgacgtgtgtgcaanncaggctctagcaacatgatcactgtccttgccttcctggttctttctctcggttggttgccagggcttgcagatcgcagtgaattttccttggggaacatcgctgttttgtcctagagtgaacttgtggcttatggccagtgctgtttggtggtctgccttctttttaatggtattttcttcctcagagcagaagggctgcattttgcttatcagaagaaggtgcagatttaagggaattcatatgaggtggcatgtaattggcaggccaggtgnnnnnnnnnnnnnnnnnnnnnnnnnnnnnnnnngccccctccatctctgcccccctctggattttgcatacnnnnnnnnnnnnnnnnnnnaaggatgtgacttgctcagcttagt

SEQ ID NO: 3202 - DNA, 469 bp, Homo sapiens
  misc_feature (341)..(341): n includes a, c, g, or t, or contains no nucleotide
cagaaaatctgctcttagggctcaagggagagctgaagattgctgacttcggctggtctgtgcatgcgccctccctgaggaggaagacaatgtgtggcaccctggactacctgcccccagagatgattgaggggcgcatgcacaatgagaaggtggatctgtggtgcattggagtgctttgctatgagctgctggtggggaacccaccctttgagagtgcatcacacaacgagacctatcgccgcatcgtcaaggtggacctaaagttccccgcttctgtgcccacgggagcccaggacctcatctccaaactgctcaggcataacccctcggaacggctncccctggcccaggtctcagcccacccttgggtccgggccaactctcggagggtgctgcctccctctgcccttcaatctgtcgcctgatggtccctgtcattcactcgggtgcgtgtgtttgtatgtct

SEQ ID NO: 3203 - DNA, 529 bp, Homo sapiens
tcatctgtagatcctagtctatctaggtggagttgaaagagttaagaatgctcgataaaatcactctcagtgcttcttactattaagcagtaaaaactgttctctattagacttagaaataaatgtacctgatgtacctgatgctatgtcaggcttcatactccacgctcccccagcgtatctatatggaattgcttaccaaaggctagtgcgatgtttcaggaggctggaggaaggggggttgcagtggagagggacagcccactgagaagtcaaacatttcaaagtttggattgcatcaagtggcatgtgctgtgaccatttataatgttagaaattttacaataggtgcttattctcaaagcaggaattggtggcagattttacaaaagatgtatccttccaatttggaatcttctctttgacaattcctagataaaaagatggcctttgtcttatgaatatttataacagcattctgtcacaataaatgtattcaaataccaataacagatcttgaattgcttcc

SEQ ID NO: 3204 - DNA, 478 bp, Homo sapiens
  misc_feature (73)..(73): n includes a, c, g, or t, or contains no nucleotide
  misc_feature (120)..(120): n includes a, c, g, or t, or contains no nucleotide
  misc_feature (166)..(166): n includes a, c, g, or t, or contains no nucleotide
  misc_feature (204)..(204): n includes a, c, g, or t, or contains no nucleotide
  misc_feature (298)..(364): n includes a, c, g, or t, or contains no nucleotide
ctgatatgaccaaaaatcaagttgttttgttttttgtcaccttcactggcatgggctaaccacttctttttcnaaaccctctgaacacctttttctgatgggtaacttgcaggaatattnctattggaaaagataacaggaagtacaagtgcttcttgaccccttncctcaatgtttctagccttcactctccattgtcttttnctgggctgtattacagccctctgtggatcttcaactctgctgcctccactgtgatgcagcagtccaactgtaactgacagtggctgccttctcnnnnnnnnnnnnnnnnnnnnnnnnnnnnnnnnnnnnnnnnnnnnnnnnnnnnnnnnnnnnnnnnnnnatagttagtaagttgggtttagcttttgtgtgtgcatcagtgacttagagttctgtaataacttattgtaaatgcatgaagcactgtttttaaacccaagtaaagactgcttga

SEQ ID NO: 3205 - DNA, 594 bp, Homo sapiens
  misc_feature (49)..(80): n includes a, c, g, or t, or contains no nucleotide
  misc_feature (82)..(82): n includes a, c, g, or t, or contains no nucleotide
  misc_feature (169)..(169): n includes a, c, g, or t, or contains no nucleotide
  misc_feature (177)..(177): n includes a, c, g, or t, or contains no nucleotide
  misc_feature (179)..(182): n includes a, c, g, or t, or contains no nucleotide
  misc_feature (184)..(191): n includes a, c, g, or t, or contains no nucleotide
  misc_feature (197)..(198): n includes a, c, g, or t, or contains no nucleotide
  misc_feature (200)..(200): n includes a, c, g, or t, or contains no nucleotide
  misc_feature (202)..(207): n includes a, c, g, or t, or contains no nucleotide
  misc_feature (209)..(215): n includes a, c, g, or t, or contains no nucleotide
  misc_feature (217)..(226): n includes a, c, g, or t, or contains no nucleotide
  misc_feature (229)..(233): n includes a, c, g, or t, or contains no nucleotide
  misc_feature (236)..(236): n includes a, c, g, or t, or contains no nucleotide
  misc_feature (259)..(259): n includes a, c, g, or t, or contains no nucleotide
  misc_feature (264)..(264): n includes a, c, g, or t, or contains no nucleotide
  misc_feature (280)..(280): n includes a, c, g, or t, or contains no nucleotide
  misc_feature (290)..(336): n includes a, c, g, or t, or contains no nucleotide
  misc_feature (364)..(364): n includes a, c, g, or t, or contains no nucleotide
  misc_feature (425)..(425): n includes a, c, g, or t, or contains no nucleotide
  misc_feature (428)..(428): n includes a, c, g, or t, or contains no nucleotide
ccaaagcttccctgcgcatctgaatagacacaagtgaagcccgtgtgcnnnnnnnnnnnnnnnnnnnnnnnnnnnnnnnngntagacgtggactttattgactgtgaattcatttacatgtaacttctgacatttcactctgtgcaaataaagaacatgaggataaaanaaaaaaanannnnannnnnnnnacacanncncnnnnnncnnnnnnnannnnnnnnnntcnnnnnccnatgtgggcgctgggatgcttccntgtancagatgtctcatgccnttcagttacnnnnnnnnnnnnnnnnnnnnnnnnnnnnnnnnnnnnnnnnnnnnnnngcacgagagaagcaggcccgttcttccngtggcccacttcttcctttgaacaaaggctccttggacccagtggcgggaaactggccctnccnacaccccctgcctgttctgggggcagcagtctttggaggagtaatgccaggcagcccctcactgagggccccagtctcccctgcatttcttccctgattgattgataggaggtggctgggctgccactgaatttgtcaacttagactcattgacaacacattaagg

SEQ ID NO: 3206 - DNA, 436 bp, Homo sapiens
tctgtgttctttctaccgtcagcacctgtgtggtcaattctggacacttcccagagaagtctttgagtagagaatcctactcaaatttcactgtatattttaagcattcctctcctttccctttgcctcccctgttgccttttcttcccctgatttctcctctggtcatctcctctcccttctgcgtgtaagccatgggaaagggatgagggaggacagcttctggttaaacacaggtccctcttccacatcaaatgaacattggcttcctgggacagaaggccttcaaaggagggattgcaaagcaaggcaaagcgttctgtcttcattttccccatccccatgagacaagactgatggaaagggtggtggggcaacactgcttaatggatgccttttcacatcatttcagtttttagccctcatgactgtattt

SEQ ID NO: 3207 - DNA, 421 bp, Homo sapiens
  misc_feature (29)..(51): n includes a, c, g, or t, or contains no nucleotide
  misc_feature (185)..(185): n includes a, c, g, or t, or contains no nucleotide
  misc_feature (235)..(250): n includes a, c, g, or t, or contains no nucleotide
  misc_feature (252)..(252): n includes a, c, g, or t, or contains no nucleotide
  misc_feature (272)..(273): n includes a, c, g, or t, or contains no nucleotide
  misc_feature (287)..(301): n includes a, c, g, or t, or contains no nucleotide
  misc_feature (322)..(353): n includes a, c, g, or t, or contains no nucleotide
acagctaaatcaaggacctcagccttatnnnnnnnnnnnnnnnnnnnnnnncatggactggacaccttcactccagctggacaaagactctggagagagagccattggctggagttgagactgtccccagaacccttggtcttgccactcccccactccttcttccctctctccctttctcctcnccctgctttcttgaaaaggactgaatcgccactacagcctgggtgcaaannnnnnnnnnnnnnnngngtatttttttttctttgtanncctttggccttgcnnnnnnnnnnnnnnngcaaaagcagaagtggaccannnnnnnnnnnnnnnnnnnnnnnnnnnnnnnnttggaggtcagcccgttacccccataactgatttacctacttaccatactgggaggtagaagagatgc

SEQ ID NO: 3208 - DNA, 295 bp, Homo sapiens
  misc_feature (229)..(253): n includes a, c, g, or t, or contains no nucleotide
tggaagatttcttaccggacccttgaacctcaatgatccagatgcaaaatgcagattccccaaaatttttgtaaatacagatgacacttatgaagagctccatttaatcgtttataaggccatgagtgcggctgtgtgctttatgatcgacgcctctgtccacccaacgttggatttttgccgaagactggacagcatcgttggcccccagctcacagtgctgccctcnnnnnnnnnnnnnnnnnnnnnnnnnaacaagaggatgtccgggtctgagaaagaaccccagtttaag

SEQ ID NO: 3209 - DNA, 575 bp, Homo sapiens
  misc_feature (32)..(32): n includes a, c, g, or t, or contains no nucleotide
  misc_feature (37)..(42): n includes a, c, g, or t, or contains no nucleotide
  misc_feature (45)..(45): n includes a, c, g, or t, or contains no nucleotide
  misc_feature (51)..(51): n includes a, c, g, or t, or contains no nucleotide
  misc_feature (54)..(54): n includes a, c, g, or t, or contains no nucleotide
  misc_feature (59)..(59): n includes a, c, g, or t, or contains no nucleotide
  misc_feature (61)..(63): n includes a, c, g, or t, or contains no nucleotide
  misc_feature (68)..(68): n includes a, c, g, or t, or contains no nucleotide
  misc_feature (126)..(180): n includes a, c, g, or t, or contains no nucleotide
  misc_feature (208)..(208): n includes a, c, g, or t, or contains no nucleotide
  misc_feature (227)..(230): n includes a, c, g, or t, or contains no nucleotide
  misc_feature (233)..(233): n includes a, c, g, or t, or contains no nucleotide
  misc_feature (237)..(238): n includes a, c, g, or t, or contains no nucleotide
  misc_feature (242)..(245): n includes a, c, g, or t, or contains no nucleotide
  misc_feature (247)..(247): n includes a, c, g, or t, or contains no nucleotide
  misc_feature (252)..(252): n includes a, c, g, or t, or contains no nucleotide
  misc_feature (254)..(254): n includes a, c, g, or t, or contains no nucleotide
  misc_feature (258)..(258): n includes a, c, g, or t, or contains no nucleotide
  misc_feature (276)..(277): n includes a, c, g, or t, or contains no nucleotide
  misc_feature (279)..(280): n includes a, c, g, or t, or contains no nucleotide
  misc_feature (282)..(282): n includes a, c, g, or t, or contains no nucleotide
  misc_feature (288)..(290): n includes a, c, g, or t, or contains no nucleotide
  misc_feature (312)..(347): n includes a, c, g, or t, or contains no nucleotide
  misc_feature (367)..(367): n includes a, c, g, or t, or contains no nucleotide
  misc_feature (451)..(469): n includes a, c, g, or t, or contains no nucleotide
  misc_feature (476)..(476): n includes a, c, g, or t, or contains no nucleotide
ccatttgaggcaaaggcagcttcccgagctgntgctnnnnnnganagactntcncttcntnnnagcancagcagtgcagagcccgcctggagggatgtgggggctgtgcagggtgcagcgctcagnnnnnnnnnnnnnnnnnnnnnnnnnnnnnnnnnnnnnnnnnnnnnnnnnnnnnnncaaggcaccaaagcccctggagaaaccnccagggcgaggtgcgaccnnnntcnggannaaannnnanggggngngggnggggaaggggctctgggnncnnancccccnnnactactgcgtctttgtttctannnnnnnnnnnnnnnnnnnnnnnnnnnnnnnnnnnnagcaggtgggtcccgcagangccctgaggcctcacttttcggatcttctgtcccagatcctgctccctccctgctgagcctggggttcccctggcattggcccnnnnnnnnnnnnnnnnnnngctgcanccagaggccgcacgctgcactgtcgcgacgcagagaggcttctgtgcaggctgggatcgggccccatgtctgtgctgtctagtttgtgttcaaaatgtc

SEQ ID NO: 3210 - DNA, 521 bp, Homo sapiens
  misc_feature (41)..(41): n includes a, c, g, or t, or contains no nucleotide
  misc_feature (43)..(43): n includes a, c, g, or t, or contains no nucleotide
  misc_feature (45)..(45): n includes a, c, g, or t, or contains no nucleotide
  misc_feature (107)..(107): n includes a, c, g, or t, or contains no nucleotide
  misc_feature (123)..(123): n includes a, c, g, or t, or contains no nucleotide
  misc_feature (184)..(184): n includes a, c, g, or t, or contains no nucleotide
  misc_feature (197)..(197): n includes a, c, g, or t, or contains no nucleotide
  misc_feature (213)..(213): n includes a, c, g, or t, or contains no nucleotide
  misc_feature (268)..(268): n includes a, c, g, or t, or contains no nucleotide
cttcgagggcagagtgagtacaaagccgcgggaccgtctangngncggcccaatgctcggggtttcacgggaacaagcgcggtcgggcggggttgcgggtagtcccncgaggagcaacctctnggagccatcgcgattgattcctcccatcccaagatggcttctgggttccactccttccccnaaacaccacggantaacacccctcccccnttttttggaggctgactgatacctggacttctgggtcctcttccctccccgcccncgcattgcttcctcccttctccccacccctgaggcttccttatgtctgctccgaggtgtgggtccccgtcgcggttgggcgggaggaggcggcagggagctcccctccgtccggatagtggtaggtgcttcctgcggtggcatttctggcgaccccgagcatcgtagagggtctcgggatcgaaagtgcgcggggctgctttccgggcggggagaagctggcgtgggactagctggggcctgtgtctccttgg

SEQ ID NO: 3211 - DNA, 434 bp, Homo sapiens
  misc_feature (200)..(200): n includes a, c, g, or t, or contains no nucleotide
tatttgtccagaaggaagcttggctgagctggccttttaacataggaatgtatttcgttggaaacattctgaaaaatctcagagaactgaacccttacaaactttgttttccctcataaccaaagcttcaggttagaagtttagaaaaatagaatggttgggtacatgatctaaatgtttaatgctaaaggtatatcgtnaagggtagtgtttgtttttgaacgataatttagaagttctcatagaaagcgtataacataggtcttcagaaactataaaagaattttcatatagtattaaaatccatagactaaaatctgagaattttttaacatatgcaagtcagccaaacataagctaccaaaataaagagcaatgtgttctggctgttttatacttcaacaattttttccctaagtggtaagcaattactt

SEQ ID NO: 3212 - DNA, 460 bp, Homo sapiens
  misc_feature (27)..(27): n includes a, c, g, or t, or contains no nucleotide
  misc_feature (47)..(47): n includes a, c, g, or t, or contains no nucleotide
  misc_feature (62)..(62): n includes a, c, g, or t, or contains no nucleotide
  misc_feature (69)..(69): n includes a, c, g, or t, or contains no nucleotide
  misc_feature (76)..(100): n includes a, c, g, or t, or contains no nucleotide
taaataccagactgcaggttggacccnagagattcccaagccaaaanccttagctccctccngcacccngatgtgnnnnnnnnnnnnnnnnnnnnnnnnngacccacctcaccccgttacagctccccaagtggtttccacatgctctgagaagaggagccctcatcttgaagggcccaggagggtctatggggagaggaactccttggcctagcccaccctgctgccttctgacggccctgcaatgtatcccttctcacagcacatgctggccagcctggggcctggcagggaggtcaggccctggaactctatctgggcctgggctaggggacatcagaggttctttgagggactgcctctgccacactctgacgcaaaaccactttccttttctattccttctggcctttcctctctcctgtttcccttcccttccactgcctctgccttagaggag

SEQ ID NO: 3213 - DNA, 559 bp, Homo sapiens
gtcagtgtatcgatttctagtgctgtgaagtcagcccctgaagaaaattcacgtgaaatgacagaaacgcagatgatgatacattccaagtcttcaaatggaaagtgaaatggattgtattttggtttatagtgacgtaaactgtatgacaaactttgcaggacttcccttataaagcaaaataattgttcagcttccaattagtattcttttatatttctttcattgggcgctttcccatctccaactcggaagtaagcccaagagaacaacataaagcaaacaacataaagcacaataaaaatgcaaataaatattttcatttttatttgtaaacgaatacaccaaaaggaggcgctcttaataactcccaatgtaaaaagttttgttttaataaaaaattaattattattcttgccaacaaatggctagaaaggactgaatagattatatattgccagatgttaatactgtaacatactttttaaataacatatttcttaaatccaaatttctctcaatgttagatttaattccctcaataacaccaatgttttgt

SEQ ID NO: 3214 - DNA, 443 bp, Homo sapiens
  misc_feature (49)..(50): n includes a, c, g, or t, or contains no nucleotide
  misc_feature (53)..(113): n includes a, c, g, or t, or contains no nucleotide
  misc_feature (115)..(116): n includes a, c, g, or t, or contains no nucleotide
  misc_feature (119)..(119): n includes a, c, g, or t, or contains no nucleotide
  misc_feature (121)..(125): n includes a, c, g, or t, or contains no nucleotide
atctgagagcgtgctgtttgtggctgttgatgcatattcgtgatgtaannggnnnnnnnnnnnnnnnnnnnnnnnnnnnnnnnnnnnnnnnnnnnnnnnnnnnnnnnnnnnnncnncanannnnnttggtgaagcaaactgttaatcttcgaaaacgaccatttcacttcttggatatcaagtgctaacccagtatgttcttcttttttatgtaagggacagctttctccacagagtcctttctgctggtgaggacagcatttctgagcagggctttgttctctatgtgcattaggacttttatcatgcccttgttctgtgtgtagttacttgacagcatcaaatgccgcctcttcctaatgtccttcaagttttcatgaactagcaaccccaccttccaccatggttctgggcgcctgattttgctgtgactcccagaccca

SEQ ID NO: 3215 - DNA, 203 bp, Homo sapiens
  misc_feature (96)..(111): n includes a, c, g, or t, or contains no nucleotide
ccacatcagagaagatcttaaaatggtttattaaactcctaattgtctagaaattcaagtcagactgcttgaaatggggacagagaagtcacactnnnnnnnnnnnnnnnnggcttctgcacacctcctggctggaggatgtcttctctggggtcttcatttctttatgctctgtccctctttgcagagtcctcgaatgccac

SEQ ID NO: 3216 - DNA, 454 bp, Homo sapiens
  misc_feature (331)..(333): n includes a, c, g, or t, or contains no nucleotide
  misc_feature (337)..(343): n includes a, c, g, or t, or contains no nucleotide
  misc_feature (348)..(348): n includes a, c, g, or t, or contains no nucleotide
  misc_feature (351)..(351): n includes a, c, g, or t, or contains no nucleotide
  misc_feature (356)..(358): n includes a, c, g, or t, or contains no nucleotide
aggacaattctcttcattggtgagagcccaggccattaacacctacacagtgttattgaaagaagagaggtgggggtggaggggaattagtctgtcccagctagagggagataaagagggctagttagttcttggagcagctgcttttgaggagaaaatatatagctttggacacgaggaagatctagaaaattatcattgaacatattaatggttatttctttttcttggatttccagaaaagcctcttaattttatgctttctcatcgaagtaatgtaccctttttttctgaaactgaattaaatactcattttatctttgaaaaaaannnaaannnnnnnaaaanaanaaaannnctgttgggaaggaaccaatttcctcctcttccctcgggtctcaggcatttacatcctccctctccccgcaatctgacctttaccaggagggaaaca

SEQ ID NO: 3217 - DNA, 41 bp, Homo sapiens
gtgcccacttgtccatgtgcttactgtgaaccctgtgcctg

SEQ ID NO: 3218 - DNA, 448 bp, Homo sapiens
  misc_feature (383)..(383): n includes a, c, g, or t, or contains no nucleotide
  misc_feature (391)..(404): n includes a, c, g, or t, or contains no nucleotide
  misc_feature (406)..(409): n includes a, c, g, or t, or contains no nucleotide
ggaactatctgaaatctgctcagagcctatgtgcatagatgaaacttttttttaaaaaaagttatttaacagtaatctatttactaattatagtacctatctttaaagtatagtacattttacatatgtaaatggtatgtttcaataatttaagaactctgaaacaatctacatatacttattacccagtacagttttttttcccctgaaaagctgtgtataaaattatggtgaataaacttttatgtttccatttcaaagaccagggtggagaggaataagagactaagtatatgcttcaagttttaaattaatacctcaagtattaaataaatattccaagtttgtgggaatgggagattaaaatgcatgtttgagaatanaaaaaaannnnnnnnnnnnnnannnnaaagagtaaaacaaacatgttaaaacatcaactgaaggg

SEQ ID NO: 3219 - DNA, 263 bp, Homo sapiens
  misc_feature (81)..(81): n includes a, c, g, or t, or contains no nucleotide
  misc_feature (224)..(224): n includes a, c, g, or t, or contains no nucleotide
  misc_feature (227)..(227): n includes a, c, g, or t, or contains no nucleotide
gagctggacctccaagtgctggacacccgcatgtgtaacaacagccgcttctggaacggcagcctctcccccagcatggtntgcctggcggccgactccaaggaccaggctccctgcaagggtgactcgggcgggcccctggtgtgtggcaaaggccgggtgttggccggagtcctgtccttcagctccagggtctgcactgacatcttcaagcctcccgtggncancgctgtggcgccttacgtgtcctggatcaggaaggt

SEQ ID NO: 3220 - DNA, 301 bp, Homo sapiens
aacttgcctactgatcagttacacaaccaatgcatttcctggagaatatatccctactgtctttgacaattattctgccaatgttatggtagatggaaaaccggtgaatctgggcttatgggatacagctggacaagaagattatgacagattacgccccctatcctatccgcaaacagatgtgttcttaatttgcttttcccttgtgagtcctgcatcatttgaaaatgtccgtgcaaagtggtatcctgaggtgcggcaccactgtcccaacactcccatcatcctagtgggaactaaa

SEQ ID NO: 3221 - DNA, 489 bp, Homo sapiens
  misc_feature (252)..(252): n includes a, c, g, or t, or contains no nucleotide
  misc_feature (326)..(326): n includes a, c, g, or t, or contains no nucleotide
  misc_feature (425)..(453): n includes a, c, g, or t, or contains no nucleotide
caagaactaaatgtgcccgaaagtccagatcgaaagaaaagaaaaaggagaaagatatctgttcaagctcaaaaaggagatttcagaaaaatattcaccgaagaggaaaacccaaaagtgacactgtggattttcactgttctaagctccccgtgacctgtggtgaggcgaaagggattttatataagaagaaaatgaaacacggatcctcagtgaagtgcattcggaatgaggatggaacttggttaacanccaaatgaatttgaagtcgaaggaaaaggaaggaacgcaaagaactggaaacggaatatacgttgtgaaggaangaccctaggagagctgctgaagagtggacttttgctctgtcctccaagaataaatctcaagagagagttaaatagcaagtgaatttctactaccctctnnnnnnnnnnnnnnnnnnnnnnnnnnnnntggaggctcaccttagagcttctgagtttccaagct

SEQ ID NO: 3222 - DNA, 528 bp, Homo sapiens
  misc_feature (33)..(54): n includes a, c, g, or t, or contains no nucleotide
  misc_feature (142)..(142): n includes a, c, g, or t, or contains no nucleotide
  misc_feature (172)..(174): n includes a, c, g, or t, or contains no nucleotide
  misc_feature (177)..(177): n includes a, c, g, or t, or contains no nucleotide
  misc_feature (182)..(182): n includes a, c, g, or t, or contains no nucleotide
  misc_feature (189)..(189): n includes a, c, g, or t, or contains no nucleotide
  misc_feature (200)..(200): n includes a, c, g, or t, or contains no nucleotide
  misc_feature (211)..(211): n includes a, c, g, or t, or contains no nucleotide
  misc_feature (220)..(220): n includes a, c, g, or t, or contains no nucleotide
  misc_feature (224)..(225): n includes a, c, g, or t, or contains no nucleotide
  misc_feature (230)..(230): n includes a, c, g, or t, or contains no nucleotide
  misc_feature (238)..(238): n includes a, c, g, or t, or contains no nucleotide
  misc_feature (244)..(244): n includes a, c, g, or t, or contains no nucleotide
  misc_feature (249)..(252): n includes a, c, g, or t, or contains no nucleotide
  misc_feature (260)..(260): n includes a, c, g, or t, or contains no nucleotide
  misc_feature (266)..(266): n includes a, c, g, or t, or contains no nucleotide
  misc_feature (269)..(269): n includes a, c, g, or t, or contains no nucleotide
  misc_feature (271)..(271): n includes a, c, g, or t, or contains no nucleotide
  misc_feature (275)..(276): n includes a, c, g, or t, or contains no nucleotide
  misc_feature (278)..(279): n includes a, c, g, or t, or contains no nucleotide
  misc_feature (285)..(285): n includes a, c, g, or t, or contains no nucleotide
  misc_feature (317)..(317): n includes a, c, g, or t, or contains no nucleotide
  misc_feature (338)..(338): n includes a, c, g, or t, or contains no nucleotide
  misc_feature (348)..(348): n includes a, c, g, or t, or contains no nucleotide
atcagaggtcacaagatgagttcctcatttgtnnnnnnnnnnnnnnnnnnnnnnaagaagtcagacttttagagggctgttgaaaagacagtaagtcaggaggttttcagtacatgactgcaggggaatcagacacaggctnagtcacttaagttgcttaattgtccgtgtnnnccnttagncccacgnacttcagggcntcagcagcttncatccttcntggnncaccnaaaccttngacgtnagggnnnnttcaaagnacacantcntnaagnntnncgtgantttgtcctcatgcaaaatttgggggactggcntacaaaaccgaaacaaggagntcgtatcccntaagtgaaagggactttatattaattgtcagttataacaatatgtaaaatacataaaagagatagagcactgcaggccatcaaggtcaaacatttgaaacagaattaaactaaattataaggaggattaaatggcttttgtctttgtaaagaaaagaatatgcatgcattgattgcctat

SEQ ID NO: 3223 - DNA, 533 bp, Homo sapiens
  misc_feature (44)..(44): n includes a, c, g, or t, or contains no nucleotide
  misc_feature (68)..(68): n includes a, c, g, or t, or contains no nucleotide
  misc_feature (103)..(103): n includes a, c, g, or t, or contains no nucleotide
  misc_feature (162)..(256): n includes a, c, g, or t, or contains no nucleotide
  misc_feature (258)..(266): n includes a, c, g, or t, or contains no nucleotide
  misc_feature (268)..(270): n includes a, c, g, or t, or contains no nucleotide
  misc_feature (272)..(273): n includes a, c, g, or t, or contains no nucleotide
  misc_feature (275)..(275): n includes a, c, g, or t, or contains no nucleotide
  misc_feature (277)..(281): n includes a, c, g, or t, or contains no nucleotide
  misc_feature (283)..(288): n includes a, c, g, or t, or contains no nucleotide
  misc_feature (290)..(297): n includes a, c, g, or t, or contains no nucleotide
  misc_feature (299)..(303): n includes a, c, g, or t, or contains no nucleotide
  misc_feature (305)..(305): n includes a, c, g, or t, or contains no nucleotide
  misc_feature (307)..(358): n includes a, c, g, or t, or contains no nucleotide
  misc_feature (427)..(441): n includes a, c, g, or t, or contains no nucleotide
cgcccccatgatcctcgccccgtgaccctcgcccggcgaccggncccccacccctcctgcgacctctncccagcgaccccgccccccctcctcccgcgacccncgtcccgcgagccccgtttcgcgccgcctctgaccaacctctttcgcagctcggccgcnnnnnnnnnnnnnnnnnnnnnnnnnnnnnnnnnnnnnnnnnnnnnnnnnnnnnnnnnnnnnnnnnnnnnnnnnnnnnnnnnnnnnnnnnnnnnnngnnnnnnnnngnnncnncngnnnnngnnnnnncnnnnnnnnannnnngncnnnnnnnnnnnnnnnnnnnnnnnnnnnnnnnnnnnnnnnnnnnnnnnnnnnnacctaaaacctcgggcagaagaggagaggaggatagcagcagaagagaagaagaagcaggatgaactgnnnnnnnnnnnnnnngaattggcagaagatgacagcatattaaagtgagtgaccctgcgacccactctttggaccagcagcggatgaataaagcttcctgtgttgtg

SEQ ID NO: 3224 - DNA, 182 bp, Homo sapiens
  misc_feature (39)..(39): n includes a, c, g, or t, or contains no nucleotide
  misc_feature (88)..(89): n includes a, c, g, or t, or contains no nucleotide
  misc_feature (110)..(130): n includes a, c, g, or t, or contains no nucleotide
gcaaggtcatctcctcccgcgagcaggtccaccagaccnacccgctgaggactcagctaccccggccggccacccaggaggcaggganngcagccgccccatctgccccnnnnnnnnnnnnnnnnnnnnnctcagccccctgcttcagtcccttccccatgcttccttgcctgatgacaata

SEQ ID NO: 3225 - DNA, 533 bp, Homo sapiens
  misc_feature (490)..(504): n includes a, c, g, or t, or contains no nucleotide
ctggccaagagctcggccaacgtctaccaccaccccacccccgcagtctcgtccaatttctatagcaccgtgggcaggaacggcgtcctgccacaggctttcgaccagtttttcgagacagcctacggcaccccggaaaacctcgcctcctccgactaccccggggacaagagcgccgagaaggggcccccggcggccacggcgacctccgcggcggcggcggcggctgcaacgggcgcgccggcaacttcaagttcggacagcggcggcggcggcggctgccgggagacggcggcggcagcagaggagaaagagcggcggcggcgccccgagagcagcagcagccccgagtcgtcttccggccacactgaggacaaggccggcggctccagtggccaacgcacccgcaaaaagcgctgcccctataccaagtaccagatccgagagctggaacgggagttcttcttcagcgtctacattaacaaagagnnnnnnnnnnnnnnntcccgcatgctcaacctcactgatcgtca

SEQ ID NO: 3226 - DNA, 271 bp, Homo sapiens
ctctagtgccttctaaaggtgttgtcccttctagggttattgcatttggattggggtccctctaaaatttaatgcatgatagacacatatgagggggaatagtctagatggctcctctcagtactttggaggcccctatgtagtccgtgctgacagctgctcctagagggaggggcctaggcctcagccagagaagctataaattcctctttgctttgctttctgctcagcttctcctgtgtgattgacagctttgctgctgaaggctcat

SEQ ID NO: 3227 - DNA, 391 bp, Homo sapiens
cacaggagggccaggcatgtattcctcagaggcgaaactgccaaactctttctcctgtcttgggttggctggcactggggcgggcatctagggtacagcctctgctcatggcactgggcctccagttcttccacatgtgtgcacccccagcttggccaaccctcagccttgcggtggggcccgaagcatcttcccttccgcttggcgtctctgggattgggatgagtgcctggctcccatctcctcctcaccttttgttgctatcggcagctgctggctcaggggcatcccacctccgggctctgggttcctctgccctggaagggctccaggacccgtcccaataaccacccacggccaggagggccaaggccccgtgctggatatttaa

SEQ ID NO: 3228 - DNA, 533 bp, Homo sapiens
ttccagaaatttgtggccttttaggcgggagttaggcgaccaaaccagtgagagccccaatccctgcagttttgtggcttcaagtgtgggtggacagtcctaatggggatctccagctccttcctgtgggctgccacagacagctacccccagaagggtcaatgttgggagtggttgtggctctgagctgctctacagagcttcagtgtgagaggatcgagccattgaaagctcattaccagtaggacataatttttggctctccctattcacaaccagtgcacagtttgacagtggcctcaggttcacagtgcaccatgtcactgtgctatcctacgaaatcatttgtttctaagttgtgtttattcctggagtgacatgccaccccgaatggctcactttcactgaggatgctgtcctctgatttagctgctgcctccagcctctggcttgagaacttactaaaggcacttccttcctgttaaacccctgttaactctccataaatttggtgattctctgctaggcctaag

SEQ ID NO: 3229 - DNA, 221 bp, Homo sapiens
  misc_feature (30)..(44): n includes a, c, g, or t, or contains no nucleotide
  misc_feature (171)..(171): n includes a, c, g, or t, or contains no nucleotide
aaccagactgtgtcccacaatcagaaaccnnnnnnnnnnnnnnngggccttcaccgccaccagggtgtcccgccagacagggagagactccagccttctgaggccatcctgaggagttcctgtttgggggtgtgagggaaaatcagcgcggattttaaaaagatggctgtngcctgcccggcgtggtgggaggggagctggtttcctggtgaactttctaa

SEQ ID NO: 3230 - DNA, 240 bp, Homo sapiens
  misc_feature (78)..(142): n includes a, c, g, or t, or contains no nucleotide
tcccagaagtggttgtttcccttgcatgggacgaaagcttggctccaaagcatccaggctcaaggaaaaacatggacnnnnnnnnnnnnnnnnnnnnnnnnnnnnnnnnnnnnnnnnnnnnnnnnnnnnnnnnnnnnnnnnnaagactctgggcattctgctgctgagcttgcagaaaaagaaaaatgagctcaaaatttgctttgagagctacagggaattgctattactcctgtacct

SEQ ID NO: 3231 - DNA, 572 bp, Homo sapiens
  misc_feature (168)..(168): n includes a, c, g, or t, or contains no nucleotide
  misc_feature (278)..(278): n includes a, c, g, or t, or contains no nucleotide
  misc_feature (281)..(284): n includes a, c, g, or t, or contains no nucleotide
  misc_feature (292)..(295): n includes a, c, g, or t, or contains no nucleotide
  misc_feature (297)..(301): n includes a, c, g, or t, or contains no nucleotide
  misc_feature (407)..(421): n includes a, c, g, or t, or contains no nucleotide
  misc_feature (470)..(506): n includes a, c, g, or t, or contains no nucleotide
ctttactgccctatggtgaccatctaggagaggggagggcagagggggtgagggtactattctggattgagaaaacctatatccattctttatatcaatgtatagttttagtctcctaaattgatctgttattttccaaactattctcttgtagaaaattttccagtnggcacttaatggtgcccttgaagaacttcctaatccatgtacataaaatacatcatatgtacacttataaatgtatatagaatgctcaaaaataaaattcttaataatanaannnncaaaatannnnannnnncactagatgagtatcagacctagtccttacccttagggggatgcagtcctggttgttatccaggatacacacctgtcagtataaggcagaagatgcctaagggccnnnnnnnnnnnnnnnggaggagaatggaagagagagattgctgactggacattcagatgcaagnnnnnnnnnnnnnnnnnnnnnnnnnnnnnnnnnnnnngagctgatagtgatacttgtcccttctgtacattgcttcatgtagccttctcagcatccctaggag

SEQ ID NO: 3232 - DNA, 380 bp, Homo sapiens
  misc_feature (169)..(169): n includes a, c, g, or t, or contains no nucleotide
gggtgctatccatttctcatgttttccattgtttgaaacaaagaaggttaccaagaagcctttcctgtagccttctgtaggaattcttttggggaagtgaggaagccaggtccacggtctgttcttgaagcagtagcctaacacactccaagatatggacacacggganccgctggcagaagggacttcacgaagtgttgcatggatgttttagccattgttggctttcccttatcaaacttgggcccttcccttcttggtttccaaaggcattttattgcttgagttatatgttcactgtccccctaatattagggagtaaaacggataccaagttgatttagtgtttttacctctgtcttggctttcatgttattaaa

SEQ ID NO: 3233 - DNA, 492 bp, Homo sapiens
  misc_feature (360)..(375): n includes a, c, g, or t, or contains no nucleotide
caattatgctctgtgtttcatatgttgctttggcttattttttttcttaaaggaatgtgttgttcatgaaaaactgatagaagcaacagaagaattcgcaggaagaaaaatcatagtgttaatgaattattgagggcgaaaaaaaggtgttttcttctttgactacggagtccaaatccacttaaattctgttttcctgaaaagaggtacagcataagaaatagctctttattgatgttttaaaagcagcaacttggtggtgtactactggaactaatgactgcaaagtgttaaacgactgaaatatacaaacagtctcttagttactcatttccatcttctcttcaactttcacatcannnnnnnnnnnnnnnnatcaacatatcaggtggtcattgcctttctccattgtctagtagacatgtctaaagttcaaactttataggataaataaatgtataatagattatctgtcacttgtggttgaaaggc

SEQ ID NO: 3234 - DNA, 312 bp, Homo sapiens
  misc_feature (119)..(133): n includes a, c, g, or t, or contains no nucleotide
  misc_feature (164)..(166): n includes a, c, g, or t, or contains no nucleotide
  misc_feature (168)..(239): n includes a, c, g, or t, or contains no nucleotide
gaaaccttttgtgcttctcttcagccccttccctgtgtccacctttctctcctcttcccaagcctttttcctactacctttacccagtttgtgtgtttgagctctgcattcaggcagcnnnnnnnnnnnnnnntttgaactgtcactgattcttgcgccctagnnncnnnnnnnnnnnnnnnnnnnnnnnnnnnnnnnnnnnnnnnnnnnnnnnnnnnnnnnnnnnnnnnnnnnnnnnntttggtgtttggaatgttttctgactcttggggcgggattcctcgccttatcatcctcactgtggagtaatga

SEQ ID NO: 3235 - DNA, 381 bp, Homo sapiens
  misc_feature (69)..(84): n includes a, c, g, or t, or contains no nucleotide
aaggttatcagtgcttcccgagtgagcatggaacacttcgagttccagggttatagacagtcgttcccnnnnnnnnnnnnnnnncccagaggcagcagagcattcagactccaaacagacccctgttcatgccgatgcttgcacgaccgccccagttcctgtggctccctcggaatgctaaggggatcggacatgaaaggaccctgtgagccgattgtcctatctccagcggccctgtcatccagctcactcatcaatgggccagtcaggcccaggcactgggctccggaggactcaccactgccccctgctgccatgtggacctggtgcaagttgaggacttcttgctggtctagtcacgcatgcagtgttggggatgcc

SEQ ID NO: 3236 - DNA, 390 bp, Homo sapiens
  misc_feature (158)..(158): n includes a, c, g, or t, or contains no nucleotide
  misc_feature (163)..(164): n includes a, c, g, or t, or contains no nucleotide
  misc_feature (166)..(168): n includes a, c, g, or t, or contains no nucleotide
gggagcactccaccactatgggcatctggagggtcctcaccaggctcgggctgccaaactccacggtgagctccgtgccaacgtggtaggcaatgtatggcgccagtaccaggctacaggctttctttgggagcagtacagtgaccgcgatgggcganggcanngnnntgccgccctttccacggctggaccagccttgtcttactggccatggctgaagactactgaagggagggagaggaggggagccaagacactcatgccactctggctctgaagggacaaaggcttctggcttttgcccccagccccttggataccagtaattcaaaccttcctcatttcatctcaggtgtctccttgctgtcatcccacatagccctggggtga

SEQ ID NO: 3237 - DNA, 59 bp, Homo sapiens
cctggtccaggtctctcacatccagccccaggtgcccaggtggcaccctccctccctgg

SEQ ID NO: 3238 - DNA, 275 bp, Homo sapiens
  misc_feature (109)..(111): n includes a, c, g, or t, or contains no nucleotide
  misc_feature (115)..(124): n includes a, c, g, or t, or contains no nucleotide
  misc_feature (126)..(130): n includes a, c, g, or t, or contains no nucleotide
  misc_feature (133)..(133): n includes a, c, g, or t, or contains no nucleotide
  misc_feature (136)..(136): n includes a, c, g, or t, or contains no nucleotide
  misc_feature (140)..(140): n includes a, c, g, or t, or contains no nucleotide
  misc_feature (143)..(149): n includes a, c, g, or t, or contains no nucleotide
tgctggtgccttcattcatgaaaagcatgcccatacgattaaacctgcgagatcggagttctttaattaggaatggaatgcaacagatttggacaagtcaaggacaagnnntttnnnnnnnnnnannnnnttntcnctgntannnnnnncagtatgtagccgagaaccatatggagaacatcaaatacagtggaacaaatgtaactgctattgatgtcacactttgtgaagtagtctttgttgcttaaaaagggtgacatctagtggctaaacat

SEQ ID NO: 3239 - DNA, 128 bp, Homo sapiens
gtagcagcagcagtgcccaccagggagtccataaaagggtccctctctgtcctgctcgatgacctgcaggacctgagtgaagccatttccaaagaggaagctgtttgtcaaggagacaaccttgacag

SEQ ID NO: 3240 - DNA, 445 bp, Homo sapiens
cgtgaagccctccaatatgctagtaaacacaagaggacaggttaagctgtgtgattttggagttagcactcagctggtgaattctatagccaagacgtatgttggaacaaatgcttatatggcgcctgaaaggatttcaggggagcagtatggaattcattctgatgtctggagcttaggaatctcttttatggagcttgctcttgggaggtttccatatcctcagattcagaaaaaccagggatctttaatgcctctccagcttctgcagtgcattgttgatgaggattcgcccgtccttccagttggagagttctcggagccatttgtacatttcatcactcagtgtatgcgaaaacagccaaaagaaaggccagcacctgaagaattgatgggccacccgttcatcgtgcagttcaatgatggaaatgccgccgtggtgtcc

SEQ ID NO: 3241 - DNA, 490 bp, Homo sapiens
  misc_feature (154)..(155): n includes a, c, g, or t, or contains no nucleotide
  misc_feature (158)..(159): n includes a, c, g, or t, or contains no nucleotide
  misc_feature (168)..(168): n includes a, c, g, or t, or contains no nucleotide
  misc_feature (180)..(180): n includes a, c, g, or t, or contains no nucleotide
  misc_feature (185)..(186): n includes a, c, g, or t, or contains no nucleotide
  misc_feature (190)..(201): n includes a, c, g, or t, or contains no nucleotide
  misc_feature (203)..(203): n includes a, c, g, or t, or contains no nucleotide
  misc_feature (207)..(207): n includes a, c, g, or t, or contains no nucleotide
  misc_feature (210)..(212): n includes a, c, g, or t, or contains no nucleotide
  misc_feature (254)..(303): n includes a, c, g, or t, or contains no nucleotide
gattcattgtaatgcctctgcatttattctgttgcctcagctgttacttgaagatggcgtaatatataatttatcctgtggtatcagtgataaaaatgatacctttctgtaggaggggtttatcataatatgctgcttcttgaaggcttgcacnnccnnaattgtgtntccttctgctgngccanncatnnnnnnnnnnnnanatanatnnnatcttgaccagtcctggtcatttgctcccctccttgtctgtnnnnnnnnnnnnnnnnnnnnnnnnnnnnnnnnnnnnnnnnnnnnnnnnnnaagtgaaaagacctttacgtggagaatttgcatgcgtaatataggaaggtgttctttaggtatgttacaggattactttaaaccatttgactttcgctccaaagttatgttggtagtatagcaaattatgatgaatagctttaattgtatgtttaaaagtctcatatgttcacatgcttaaatctgg

SEQ ID NO: 3242 - DNA, 554 bp, Homo sapiens
  misc_feature (125)..(125): n includes a, c, g, or t, or contains no nucleotide
  misc_feature (131)..(131): n includes a, c, g, or t, or contains no nucleotide
  misc_feature (134)..(134): n includes a, c, g, or t, or contains no nucleotide
  misc_feature (145)..(145): n includes a, c, g, or t, or contains no nucleotide
  misc_feature (152)..(153): n includes a, c, g, or t, or contains no nucleotide
  misc_feature (162)..(162): n includes a, c, g, or t, or contains no nucleotide
  misc_feature (200)..(200): n includes a, c, g, or t, or contains no nucleotide
  misc_feature (205)..(205): n includes a, c, g, or t, or contains no nucleotide
  misc_feature (210)..(210): n includes a, c, g, or t, or contains no nucleotide
  misc_feature (214)..(214): n includes a, c, g, or t, or contains no nucleotide
  misc_feature (225)..(225): n includes a, c, g, or t, or contains no nucleotide
  misc_feature (239)..(239): n includes a, c, g, or t, or contains no nucleotide
  misc_feature (316)..(316): n includes a, c, g, or t, or contains no nucleotide
  misc_feature (347)..(347): n includes a, c, g, or t, or contains no nucleotide
  misc_feature (354)..(355): n includes a, c, g, or t, or contains no nucleotide
  misc_feature (358)..(358): n includes a, c, g, or t, or contains no nucleotide
  misc_feature (365)..(365): n includes a, c, g, or t, or contains no nucleotide
  misc_feature (372)..(372): n includes a, c, g, or t, or contains no nucleotide
  misc_feature (376)..(376): n includes a, c, g, or t, or contains no nucleotide
  misc_feature (439)..(439): n includes a, c, g, or t, or contains no nucleotide
tcaaaacaccatctggatatgtgggctctactccttgttctgcagctaggtagcctgttgagtcacttctctggacttccacaaacactttcactcctgtttacagcaccatccccgtgctatcnattacnagnctcctcttccntctcccnnagatgtctncaaagaaaggatgaggtaaagtccaatggacttacggnttccnactgnaccntaagatggccnacttgaaattatcnagaacaaaattctctgatgaacttttcttctaaaacaaaactgaaaataaatggaaaagaaatatgaaatgtatgangagtttgagggagggactctaaagtgcttanttgtttnnatncagcatnaatacantggntcaaactcaataatgtctttctcttccctgttttctctggcctcttccaagtagaagaaagcnatttaatatcagaagtctccatttttcataacagagttagggatatgttttttttttcagtttatacttggagtttaacaataatcataagcccaagatagcattttcagggata

SEQ ID NO: 3243 - DNA, 590 bp, Homo sapiens
  misc_feature (426)..(467): n includes a, c, g, or t, or contains no nucleotide
gcttggagcagagacggcagccccatccttcccgcagcaccagcctgagccacagtggggcccatggccccagctggctgggtcgcccctcctcgggcgcctgcgctcctctgcagcctgagctccaccctcccctcttcttgcggcaccgcccacccacaccccgtctgccccttgaccccacacgccggggctggccctgccctcccccacggccgtccctgacttcccagctggcagcgcctcccgccgcctcgggccgcctcctccagactcgagagggctgagcccctcctctcctcgtccggcctgcagcccagaacgggcctccccgggggtccccggacgctggctcgggactgtcttcaaccctgccctgcaccttgggcacgggagagcgccacccgcccgcccccgccctcgctnnnnnnnnnnnnnnnnnnnnnnnnnnnnnnnnnnnnnnnnnntcccagggcccgagcgcgtgccttccccgtgcggcccgtgcgcagccgcgctctgcccctccgtccccagggtgcaggcgcgcaccgcccaacccccacctcccggtgtatgcagtggtgatg

SEQ ID NO: 3244 - DNA, 258 bp, Homo sapiens
  misc_feature (30)..(30): n includes a, c, g, or t, or contains no nucleotide
  misc_feature (32)..(32): n includes a, c, g, or t, or contains no nucleotide
  misc_feature (36)..(36): n includes a, c, g, or t, or contains no nucleotide
  misc_feature (44)..(72): n includes a, c, g, or t, or contains no nucleotide
  misc_feature (89)..(89): n includes a, c, g, or t, or contains no nucleotide
  misc_feature (94)..(94): n includes a, c, g, or t, or contains no nucleotide
  misc_feature (142)..(142): n includes a, c, g, or t, or contains no nucleotide
tgatgacgacagagacattgagtactatgngnaagntattgaannnnnnnnnnnnnnnnnnnnnnnnnnnnnggacgtgatagagatcntctcngacgaatcagtggaagaagagggcattgaggaaggcatccagcaagangaggacatctatgaggaaggaaactatgaggaggaaggaagtgaagatgtctgggaagaaggggaagattcggacgactctgacctagaggatgtgcttcaggtcccaaacggttg

SEQ ID NO: 3245 - DNA, 577 bp, Homo sapiens
tcttctgctttgagcagtttgatgagctcaccctgctgcaccttcgtgagtttgacaagaagaagctgatctctgtggagacggacatagtcgtggatcactacaaggaggagaagtttgaggacaggtccccagccgccgagtgcctatcagagaaggagacggaggagctcatggcctggatgagaaatgtgctggggtcgcgtgtcaccaacgtgaaggtgaccctccgactggacacccaccctgccatggtcaccgtgctggagatgggggctgcccgccacttcctgcgcatgcagcagctggccaagacccaggaggagcgcgcacagctcctgcagcccacgctggagatcaaccccaggcacgcgctcatcaagaagctgaatcactgcgcgcaagcgagcctggcctggctcagctgctggtggatcagatatacgagaacgccatgattgctgctggacttgttgacgaccctagggccatggtgggccgcttgaatgagctgcttgtcaaggccctggagcgacactgacagccagggggccagaaggactgacaccacagatga

SEQ ID NO: 3246 - DNA, 305 bp, Homo sapiens
  misc_feature (100)..(100): n includes a, c, g, or t, or contains no nucleotide
  misc_feature (113)..(113): n includes a, c, g, or t, or contains no nucleotide
  misc_feature (135)..(135): n includes a, c, g, or t, or contains no nucleotide
actgtatgtagctgcactacaacagattcttaccgtctccacaaaggtcagagattgtaaatggtcaatactgactttttttttattcccttgactcaangacagctaacttncattttcagaactgttttaaancctttgtgtgctggtttataaaataatgtgtgtaatccttgttgctttcctgataccagactgtttcccgtggttggttagaatatattttgttttgatgtttatattggcatgtttagatgtcaggtttagtcttctgaagatgaagttcagccattttgtatcaaaca

SEQ ID NO: 3247 - DNA, 514 bp, Homo sapiens
  misc_feature (62)..(62): n includes a, c, g, or t, or contains no nucleotide
  misc_feature (69)..(69): n includes a, c, g, or t, or contains no nucleotide
  misc_feature (162)..(162): n includes a, c, g, or t, or contains no nucleotide
  misc_feature (176)..(176): n includes a, c, g, or t, or contains no nucleotide
  misc_feature (422)..(447): n includes a, c, g, or t, or contains no nucleotide
acgtcattgtgagcaccacgggccccaaccccttcaccacactcacagaccgtgagctgganggagtanccgcagggaggtggagaggaagcagaagggctctgaagagaatctggacgaggctagagaacagaaagaaaagagtcctccagaccagcctgnggtcccccacccgnctcccagcactcccatcaagctggaggaaggagacggatgcgctagagagtacctgttaccctaaccttgtgccggagccgactactggagatgacagtgatgctgccacctttaagccaactctccccgatctgtcccctgatgaaccttcagaagcactcggcttcccaatgttagagaaggaggaggaagcccatagacccccaagccccactgaggcccctactgaggccagccccgagccnnnnnnnnnnnnnnnnnnnnnnnnnnaagaggctgccccctcagctgtcgaggagggggccgccgcggaccctggcagcgatgggtctccagg

SEQ ID NO: 3248 - DNA, 40 bp, Homo sapiens
tgaaggctcagaagcatcctcctgctcatctgctttggct

SEQ ID NO: 3249 - DNA, 298 bp, Homo sapiens
tgcttagaacatttttacggacctaagcgctggagacgttgctgcatgtcggctgggttttttttttcatacacccgagcacggaaaaactaacgcaaaattgtattttcttacctagtggaaatctgaaatgactgcaaattcctagtgaatgtacaggtttgctttcgtgtccctcttctggttgctttagaagtgacgtgtaatttctgaacccatgtttcatctgtataaaagaacatctgcaccagtttttctcctgcccctcagaagagccaaactttgagttttatgtctg

SEQ ID NO: 3250 - DNA, 308 bp, Homo sapiens
  misc_feature (68)..(82): n includes a, c, g, or t, or contains no nucleotide
gatagcccacgtatttcagaatatcctcttgatagaataatatcactcagtgtgatttttagaaaaannnnnnnnnnnnnnnctcatatcttttgacagttgtttgtgaataataccctccccaacaaccttcccagtactcaactgctatgtaagaatgctttcttatgtggtaaatgtctcagtattttgctgcctggtatttgttcagtttccttgtatatctcagggtcagaaagaatcaggctttctcccaactctgaaacattcagacttactttctttttggtcagccttttaacaagcaa

SEQ ID NO: 3251 - DNA, 561 bp, Homo sapiens
  misc_feature (26)..(109): n includes a, c, g, or t, or contains no nucleotide
  misc_feature (225)..(262): n includes a, c, g, or t, or contains no nucleotide
  misc_feature (298)..(332): n includes a, c, g, or t, or contains no nucleotide
  misc_feature (378)..(393): n includes a, c, g, or t, or contains no nucleotide
  misc_feature (456)..(472): n includes a, c, g, or t, or contains no nucleotide
  misc_feature (500)..(517): n includes a, c, g, or t, or contains no nucleotide
  misc_feature (529)..(529): n includes a, c, g, or t, or contains no nucleotide
atcccacattaggatggtgaaccagnnnnnnnnnnnnnnnnnnnnnnnnnnnnnnnnnnnnnnnnnnnnnnnnnnnnnnnnnnnnnnnnnnnnnnnnnnnnnnnnnnnncccctggccctccatgacacacccccgattcctggacaaccagaggagatacagctgcttagaaaggaggcgactcctagatccagggatagccccgtctggtgccagtgtggaannnnnnnnnnnnnnnnnnnnnnnnnnnnnnnnnnnnnnctggaggagctgtgctgccggaaaaagccgggggcnnnnnnnnnnnnnnnnnnnnnnnnnnnnnnnnnnntcctgtccagacacgtcctgcagttcctcctgctctaccaggagcnnnnnnnnnnnnnnnntgtggattccaccaacagccggctgcggcactgtgcctacaggtgctacgccacctggcgctnnnnnnnnnnnnnnnnngctgactttgccatcctgcccagctgcnnnnnnnnnnnnnnnnnnaaagagtttccnaagagtgaagggcagtacagtggcttcaagag

SEQ ID NO: 3252 - DNA, 321 bp, Homo sapiens
  misc_feature (30)..(47): n includes a, c, g, or t, or contains no nucleotide
  misc_feature (91)..(91): n includes a, c, g, or t, or contains no nucleotide
  misc_feature (111)..(111): n includes a, c, g, or t, or contains no nucleotide
  misc_feature (169)..(169): n includes a, c, g, or t, or contains no nucleotide
cccatgcctgaccaagggaggtcaaaaggnnnnnnnnnnnnnnnnnngacaataactgatgaatatagggcccagatggaccaagtggggnccggggagggatgaataaanaccctaccccgtgccctgtctttggtgagcagcagccctggggtcacagacatggaangggaccaccctggggctgactgcttttctgtgctgttggttcccaaaactagaaagaaggaagcagggagcggtgccccaagcatggctcctgccaacacctatttatttccttgtttgtgctatgctgggcaggccttctcttgtccctta

SEQ ID NO: 3253 - DNA, 389 bp, Homo sapiens
taaacatttttggaggctcataatcaacaggacagaataactacttagtgatgatttacagagtgaaatattttactgttttgtagtaagcacattttagtaactgtacactagtacaatgtttttaagattttatctcatttttgtcatattagcctaaaatgtttatttttatttaaaaagtagccaataggaaggtaagattggggagaaaggtcagtaaatgtcacaaaagagactcctagtaacacaatctgagggagctttttcttttgaaataaagatggtgcatctgtccctttacagatttctctcctgtcccctgggactggggaaggtgaatctcctgcctgacaccttgtagagattagtgtatccagctattctat

SEQ ID NO: 3254 - DNA, 468 bp, Homo sapiens
  misc_feature (79)..(94): n includes a, c, g, or t, or contains no nucleotide
cttgatcttacagatcgtgtagattggggttggggaaggatgaagggcgagtgagtctatggataatgaaataatcagnnnnnnnnnnnnnnnncccatcatcctttgttctgagcattcgctgtactttaagatacccatctttttctttttaaccctaatctttcacttgaaagattttattgtataaaaagttccacaggtcaataaatttagaggaaaatgagtatttggtccaaaaaaaggaaaaataatcaagatttagggctttatttttctttgtagttgtgtaaaaaatggggaaaaaaacaaaaaaagcagaattttaatgtgaagacattttttgctataattattagttttagaggcattgttagtttagtgtgtgtgcagagtccatttcccacatctttcctcaagttacctctatttttatcatgaattcccttttagtcaactgtaggttat

SEQ ID NO: 3255 - DNA, 77 bp, Homo sapiens
ggtgccagtaccagtaccaataacagtgccagtgccagtgccagcaccagtggtggcttcagtgctggtgccagcct

SEQ ID NO: 3256 - DNA, 432 bp, Homo sapiens
  misc_feature (212)..(229): n includes a, c, g, or t, or contains no nucleotide
  misc_feature (241)..(245): n includes a, c, g, or t, or contains no nucleotide
  misc_feature (247)..(247): n includes a, c, g, or t, or contains no nucleotide
  misc_feature (250)..(258): n includes a, c, g, or t, or contains no nucleotide
  misc_feature (273)..(306): n includes a, c, g, or t, or contains no nucleotide
gtgggagcctttagcgctaccgactccttcgaccacaaaaagttcttccaaatggtcggcctgaagaaaaagagtgcggatgatgtgaagaaggtgtttcacatgctggacaaggacaaaagtggcttcatcgaggaggatgagctgggattcatcctaaaaggcttctccccagatgccagagacctgtctgctaaagaaaccaagatgcnnnnnnnnnnnnnnnnnnaagatggggacnnnnnanttnnnnnnnnngaattctccactctnnnnnnnnnnnnnnnnnnnnnnnnnnnnnnnnnnggtcttccacctctctgccctgaacacccaatctcggcccctctcgccaccctcctgcatttctgttcagttcgtttatgttattttttactcccccatcccctgtggccctctaatgacaccatt

SEQ ID NO: 3257 - DNA, 200 bp, Homo sapiens
agttattggcctatcctaaccccatagatcctctcaatggtgacgctgcagccatgtacctccaccgaccagaagaatacaagcagaaaattaaagagtacatccagaaatacgccacggaggaggcgctgaaagaacaggaagagggtaccggggacagctcatcggagagctctatgtctgacttttccgaagatgag

SEQ ID NO: 3258 - DNA, 426 bp, Homo sapiens
  misc_feature (40)..(40): n includes a, c, g, or t, or contains no nucleotide
  misc_feature (75)..(100): n includes a, c, g, or t, or contains no nucleotide
  misc_feature (112)..(112): n includes a, c, g, or t, or contains no nucleotide
  misc_feature (118)..(118): n includes a, c, g, or t, or contains no nucleotide
  misc_feature (133)..(166): n includes a, c, g, or t, or contains no nucleotide
  misc_feature (252)..(272): n includes a, c, g, or t, or contains no nucleotide
  misc_feature (315)..(331): n includes a, c, g, or t, or contains no nucleotide
gttgccaggaatttgctttgtttactgctagtatattagnaatcctagatctcagaatcacaatagtaataaacnnnnnnnnnnnnnnnnnnnnnnnnnnctctgtgttcanggtgtnggaatttctgtctcnnnnnnnnnnnnnnnnnnnnnnnnnnnnnnnnnnggacagaaaattctacctgtgctacataggagaagtttggaatgcacttaatagctggtttttacaccttgatttcgaggtggaannnnnnnnnnnnnnnnnnnnnaataaatttaaatctcttaaaccagtaggtgcttaatattttnnnnnnnnnnnnnnnnncatttaaatctcatgggttctattaaaaatatatatatatagggccccaatccattgccatcaaattgcccttggacttttccaaggtatattat

SEQ ID NO: 3259 - DNA, 573 bp, Homo sapiens
  misc_feature (200)..(239): n includes a, c, g, or t, or contains no nucleotide
  misc_feature (268)..(268): n includes a, c, g, or t, or contains no nucleotide
  misc_feature (270)..(271): n includes a, c, g, or t, or contains no nucleotide
  misc_feature (273)..(274): n includes a, c, g, or t, or contains no nucleotide
  misc_feature (276)..(276): n includes a, c, g, or t, or contains no nucleotide
  misc_feature (279)..(279): n includes a, c, g, or t, or contains no nucleotide
  misc_feature (290)..(296): n includes a, c, g, or t, or contains no nucleotide
  misc_feature (299)..(313): n includes a, c, g, or t, or contains no nucleotide
  misc_feature (315)..(317): n includes a, c, g, or t, or contains no nucleotide
  misc_feature (319)..(319): n includes a, c, g, or t, or contains no nucleotide
  misc_feature (457)..(457): n includes a, c, g, or t, or contains no nucleotide
  misc_feature (472)..(495): n includes a, c, g, or t, or contains no nucleotide
  misc_feature (526)..(526): n includes a, c, g, or t, or contains no nucleotide
  misc_feature (541)..(541): n includes a, c, g, or t, or contains no nucleotide
ctgcagaatcagctctgtctcatgtggaagtggagaatcagccttgcctggcctttaggaacttttgtggggaagagagctttgaagagaggagggggactttagagagggatgaaaatgagccctgggagggaggaagggacgaggaggggtggctgcatgttaccgtcccctacctctccccacgtggagggtggagnnnnnnnnnnnnnnnnnnnnnnnnnnnnnnnnnnnnnnnnataaaggtgccgttcactggctcagttanannannanaanaaaaaaaaaannnnnnnaannnnnnnnnnnnnnnannnancaaggaccacccctacaaaaagagtaatggttgggtgatactccctcaagccaaagaggagctccccaacctgttctagggacccaggtaacctagaagggtgggagagaatacaatgggccagatgtggtggaagcncagctctggggctcnnnnnnnnnnnnnnnnnnnnnnnncctccctcctcaaggcctggatacagactanatttgtataagtcangcaggggacctagtcagggtcttgggagctac

SEQ ID NO: 3260 - DNA, 342 bp, Homo sapiens
  misc_feature (136)..(151): n includes a, c, g, or t, or contains no nucleotide
  misc_feature (257)..(276): n includes a, c, g, or t, or contains no nucleotide
cggcattggcaatgtagctgtaattttctgacaaaatttaagacaaaattgtcaacttgaaactaaaacatgccaaggttttgatatacttgtcttaagatattaatgaaacacttctgaacactgataggaagtnnnnnnnnnnnnnnnntttctcttgagttttgttatgtgttttgttgtgtttgattttcagtgattgtctggtatatttacagtcctcaaacatggttatttctgtcagtgacttaacattnnnnnnnnnnnnnnnnnnnnattcttcagtaaataaagaatggaattgctgaatgtaatcattgaacctcgagtcactgtaaaagt

SEQ ID NO: 3261 - DNA, 560 bp, Homo sapiens
tgaccatagccaaacaaccagccggcccaccagtagcattcagcccctcagctggccctgagggtttggagacaggtcgagggtcatgcctgtctgtccaggagacagtcacaggcccccgaaagctctgccccacttggtgtgtgggagaagaggccggcaggtgaccgaagcatctctgttctgataaccgggacccgccctgtctctgccaaccccagcagggacggcacctctgggcagctccacatggcacgtttggatttcaggttcgatccgaccgggacaagttcgtcatcttcctcgatgtgaagcacttctccccggaggacctcaccgtgaaggtgcaggacgactttgtggagatccacggaaagcacaacgagcgccaggtgagcccaggcactgagaggtgggacaggggggcgagttgggcgcgaggacaagggggtcacggcgggcacgaccgggcctgcacacctgcaccaatgccttcaaccctgggagagggaacgctctccaggggaccccgaatcaggcctggcttttccccaagggag

SEQ ID NO: 3262 - DNA, 199 bp, Homo sapiens
  misc_feature (86)..(86): n includes a, c, g, or t, or contains no nucleotide
catctttgaagatgggccttatgaagttggtggagagactgagcatgatgaaagtctcgttcctgttcctgctaacagttacttanggcctgctgtttttgaccagcgtttcctatacagatcctgatcagtttgtttataaaacacggcctccccgggagcagcctgacacattccctgatgtgatgatgaatagcta

SEQ ID NO: 3263 - DNA, 450 bp, Homo sapiens
  misc_feature (131)..(148): n includes a, c, g, or t, or contains no nucleotide
  misc_feature (299)..(340): n includes a, c, g, or t, or contains no nucleotide
  misc_feature (394)..(394): n includes a, c, g, or t, or contains no nucleotide
acacgcaggtgactcgacaggccttaaatgagatctcggcccggcacagtgagatccagcagcttgaacgcagtattcgtgagctgcacgacatattcacttttctggctaccgaagtggagatgcagggnnnnnnnnnnnnnnnnnntgagaagaacatcctgagctcagcggactacgtggaacgtgggcaggagcacgtcaagacggccctggagaaccagaagaaggcgaggaagaagaaagtcttgattgccatctgtgtgtccatcaccgtcgtcctcctagcagtcatcatnnnnnnnnnnnnnnnnnnnnnnnnnnnnnnnnnnnnnnnnnnaggagcaccaggaacccagggcctggccttctctcccagcagcctggggggcanggcagagcctccagtcggaccccttcctcacactggcccctatgcagaagggcaga

SEQ ID NO: 3264 - DNA, 493 bp, Homo sapiens
  misc_feature (26)..(115): n includes a, c, g, or t, or contains no nucleotide
  misc_feature (183)..(183): n includes a, c, g, or t, or contains no nucleotide
  misc_feature (286)..(352): n includes a, c, g, or t, or contains no nucleotide
  misc_feature (422)..(422): n includes a, c, g, or t, or contains no nucleotide
  misc_feature (445)..(445): n includes a, c, g, or t, or contains no nucleotide
gctgctcgagcagtgggttgccttcnnnnnnnnnnnnnnnnnnnnnnnnnnnnnnnnnnnnnnnnnnnnnnnnnnnnnnnnnnnnnnnnnnnnnnnnnnnnnnnnnnnnnnnnnnttcagctcctcaatctgggtcttcagctctgcgttcatgagttccagccgctcggattcccgctgcangaaactccgtgcgctccttcttcttgttccggcatcgggctgctgcgactttgttcttctcccggcgccttttccttcgctcctcttcctcatctagctcacnnnnnnnnnnnnnnnnnnnnnnnnnnnnnnnnnnnnnnnnnnnnnnnnnnnnnnnnnnnnnnnnnnngaggttgcggatgtcagcgtatttcagctcctccacagtcagggccgagctggggagcccggtcaggggnccaagccctggcagggagcctgnggtcaccgaagggtccgggatctgcccaggcatcatagcaggaggagt

SEQ ID NO: 3265 - DNA, 609 bp, Homo sapiens
  misc_feature (100)..(124): n includes a, c, g, or t, or contains no nucleotide
  misc_feature (218)..(324): n includes a, c, g, or t, or contains no nucleotide
  misc_feature (359)..(361): n includes a, c, g, or t, or contains no nucleotide
  misc_feature (512)..(526): n includes a, c, g, or t, or contains no nucleotide
gacttcaacactatccgatgtcaagatctgagtgctttactccatgaactgtctaatgacggtgctcataagcagtttgatcactacctcgaagagctcnnnnnnnnnnnnnnnnnnnnnnnnnccaagaaaggagaacgagagtgccacattgttgtgctgacggatgaggattctgtggactgggatgaagaccaccctccaccaatgggggaggnnnnnnnnnnnnnnnnnnnnnnnnnnnnnnnnnnnnnnnnnnnnnnnnnnnnnnnnnnnnnnnnnnnnnnnnnnnnnnnnnnnnnnnnnnnnnnnnnnnnnnnnnnncgcattggaattgaaggttaccctacctgtaaagnnnaaattaagagaaggcctggcggccggtctgaagtcatctataattatgtacaacgccccttcatccagatgtcatgggaaaaggaagaagggaagagtcgccatgtggatttccagtgtgttcgaagcaaatccctcacgaatctggtagnnnnnnnnnnnnnnntcttggaggaccaggagatattaatgcatcacccaccccaagtggatgaacttgaccggctaaatgccccactttctcagatg

SEQ ID NO: 3266 - DNA, 511 bp, Homo sapiens
  misc_feature (27)..(27): n includes a, c, g, or t, or contains no nucleotide
  misc_feature (129)..(129): n includes a, c, g, or t, or contains no nucleotide
  misc_feature (131)..(153): n includes a, c, g, or t, or contains no nucleotide
  misc_feature (255)..(255): n includes a, c, g, or t, or contains no nucleotide
  misc_feature (280)..(280): n includes a, c, g, or t, or contains no nucleotide
  misc_feature (315)..(315): n includes a, c, g, or t, or contains no nucleotide
  misc_feature (453)..(454): n includes a, c, g, or t, or contains no nucleotide
ttctgtcctgtggagttccctggacancttggtctggctcttgtgccaagggctgaaggaggtaccctcttggcagatgggggcatcacttgcttcctttgggaagctctaaggttgctgcagtcaccntnnnnnnnnnnnnnnnnnnnnnnncaacatcatcagtttctattctaatcaggccccttcccaatctccatttctctgccaagcccatttacccccacctcatgcatcccaaggctctactgggtnccctggacctaaccctgctttcatncctggtggccttaactacagtggaggtggaacttncccaggaggggaagggacagaccagccccagccgctgggccaacttccaatcattccagctagaagagcttccccctgacaccctgtgactgagcctgtgtcctgtctgcctgcccagccatgctccatcggctgtgnnggcagtgcccggagaggccagagggttggagctgcagggacccgtttggacccacag

SEQ ID NO: 3267 - DNA, 266 bp, Homo sapiens
  misc_feature (87)..(87): n includes a, c, g, or t, or contains no nucleotide
  misc_feature (92)..(92): n includes a, c, g, or t, or contains no nucleotide
  misc_feature (122)..(122): n includes a, c, g, or t, or contains no nucleotide
  misc_feature (167)..(167): n includes a, c, g, or t, or contains no nucleotide
  misc_feature (180)..(180): n includes a, c, g, or t, or contains no nucleotide
gacgctgctcagctgctgctctgctcctgtctcctgtcccctcccccggtcatgacagagacccgtgagccagctgagactgggggntacgncagcttggaagaagatgatgaagacctttncccaggccccgagcattcctctgattcagaatacactctctcagnagccggactccgnaagaggaagaagatgaggaggaggaggaagaggagaccactgacgatcctgaatatgatcctggctacaaggtgaagcagcgcctt

SEQ ID NO: 3268 - DNA, 493 bp, Homo sapiens
  misc_feature (26)..(26): n includes a, c, g, or t, or contains no nucleotide
  misc_feature (46)..(46): n includes a, c, g, or t, or contains no nucleotide
  misc_feature (258)..(293): n includes a, c, g, or t, or contains no nucleotide
  misc_feature (322)..(342): n includes a, c, g, or t, or contains no nucleotide
cgacatcactgatgagcagaaaaagnttcgggaggctgacctagtnatatttcagttcccgctgtactggttcagcgtgccggccatcctgaagggctggatggatagggtgctgtgccagggctttgcctttgacatcccaggattctacgattccggtttgctccagggtaaactagcgctcctttccgtaaccacgggaggcacggccgagatgtacacgaagacaggagtcaatggagattctcgatacttccnnnnnnnnnnnnnnnnnnnnnnnnnnnnnnnnnnnnggatttaaagtccttgcccctcagatcannnnnnnnnnnnnnnnnnnnnccgaagaagaaagaaaggggatggtggctgcgtggtcccagaggctgcagaccatctggaaggaagagcccatcccctgcacagcccactggcacttcgggcaataactctgtggcacgtgggcatcacgtaagcagcacactaggaggcc

SEQ ID NO: 3269 - DNA, 273 bp, Homo sapiens
  misc_feature (72)..(72): n includes a, c, g, or t, or contains no nucleotide
  misc_feature (89)..(93): n includes a, c, g, or t, or contains no nucleotide
  misc_feature (104)..(104): n includes a, c, g, or t, or contains no nucleotide
  misc_feature (107)..(107): n includes a, c, g, or t, or contains no nucleotide
  misc_feature (111)..(111): n includes a, c, g, or t, or contains no nucleotide
  misc_feature (118)..(118): n includes a, c, g, or t, or contains no nucleotide
  misc_feature (121)..(121): n includes a, c, g, or t, or contains no nucleotide
  misc_feature (139)..(208): n includes a, c, g, or t, or contains no nucleotide
  misc_feature (215)..(215): n includes a, c, g, or t, or contains no nucleotide
  misc_feature (239)..(239): n includes a, c, g, or t, or contains no nucleotide
accggggcctgcggcggaagcagcactccctgctgaagcgcctgcgcaaggccaagaaggaggcgccgcccnatggagaagccggaagnnnnntggtgaagacngcnaccntgcgggnacnatgatcatcctacccgannnnnnnnnnnnnnnnnnnnnnnnnnnnnnnnnnnnnnnnnnnnnnnnnnnnnnnnnnnnnnnnnnnnnnaagcccngagatgatcggccactacctgggncgagttctccatcacctacaagcccgtaaagcat

SEQ ID NO: 3270 - DNA, 438 bp, Homo sapiens
  misc_feature (98)..(112): n includes a, c, g, or t, or contains no nucleotide
cttcctgggatgacaatcagctacatttgtgaccccggctacctgttagtgggaaagggcttcattttctgtacagaccagggaatctggagccaatnnnnnnnnnnnnnnnaagaagtaaattgtagcttcccactgtttatgaatggaatctcgaaggagttagaaatgaaaaaagtatatcactatggagattatgtgactttgaagtgtgaagatgggtatactctggaaggcagtccctggagccagtgccaggcggatgacagatgggaccctcctctggccaaatgtacctctcgtgcacatgatgctctcatagttggcactttatctggtacgatcttctttattttactcatcattttcctctcttggataattctaaagcacagaaaaggcaataatgcacatgaaaaccctaaagaagtggctatc

SEQ ID NO: 3271 - DNA, 540 bp, Homo sapiens
  misc_feature (153)..(188): n includes a, c, g, or t, or contains no nucleotide
  misc_feature (333)..(483): n includes a, c, g, or t, or contains no nucleotide
  misc_feature (501)..(501): n includes a, c, g, or t, or contains no nucleotide
aggtttgggctatttcaataaccatcattcattatgtagttcaaatgtgaaatatgttcatgtgacttcttaggtgaaagtcacactggttccccccccctttatctctcaaatcaaccagatttgtgcaaagacaacctaaatatccttttnnnnnnnnnnnnnnnnnnnnnnnnnnnnnnnnnnnngctctggtctccttcagagactcagaagtgttgcgttgggaagtgttgattagaaatggatccagctgtttttcttgacagggagcgagcaggacttggcagactgcgtgctggcctgatttgtcctgccaccgaaggttatgcnnnnnnnnnnnnnnnnnnnnnnnnnnnnnnnnnnnnnnnnnnnnnnnnnnnnnnnnnnnnnnnnnnnnnnnnnnnnnnnnnnnnnnnnnnnnnnnnnnnnnnnnnnnnnnnnnnnnnnnnnnnnnnnnnnnnnnnnnnnnnnnnnnnnnnnttccttccttctgggtgntgggcagggccctctctggactgagagtcttaggacctg

SEQ ID NO: 3272 - DNA, 595 bp, Homo sapiens
  misc_feature (27)..(41): n includes a, c, g, or t, or contains no nucleotide
  misc_feature (86)..(88): n includes a, c, g, or t, or contains no nucleotide
  misc_feature (124)..(124): n includes a, c, g, or t, or contains no nucleotide
  misc_feature (221)..(222): n includes a, c, g, or t, or contains no nucleotide
  misc_feature (245)..(245): n includes a, c, g, or t, or contains no nucleotide
  misc_feature (252)..(252): n includes a, c, g, or t, or contains no nucleotide
  misc_feature (260)..(260): n includes a, c, g, or t, or contains no nucleotide
  misc_feature (269)..(269): n includes a, c, g, or t, or contains no nucleotide
  misc_feature (370)..(386): n includes a, c, g, or t, or contains no nucleotide
cattcattcggagaaaacgttttgatnnnnnnnnnnnnnnntgtagtcgtttcaaaagagcacctgagtcatgtgtattcccggcnnnctttataaatgacccggtcaagttggtttcaaagtncgacaggcttgtctgtttactagctgcgtggccttggacgggtggctgacatctgtaaagaatcctcctgtgatgaaactgaggaatcgggtggccnngggcaagctgggaagagcaaagnccagagntgcgctgncctcaatancccacaaaagaccattcccagtatacataagcacaggatgtttttctcaagagggatgtatttatcacttggacatctgtttataatataaacagacatgnnnnnnnnnnnnnnnnnctgccaaaagaatcctaggcagtggctcattgtatgtgaggttgaaccacgtgaaattgccaatattaggctggcttttatctacaaagaaggagtttcatggggttcagcctaacagttatggaaactacagtccttataaaccattggcatggtaataaacagatcttaagtataaaaattttgtaattgggcctttactctctcaa

SEQ ID NO: 3273 - DNA, 559 bp, Homo sapiens
  misc_feature (392)..(395): n includes a, c, g, or t, or contains no nucleotide
  misc_feature (397)..(401): n includes a, c, g, or t, or contains no nucleotide
  misc_feature (403)..(404): n includes a, c, g, or t, or contains no nucleotide
  misc_feature (480)..(480): n includes a, c, g, or t, or contains no nucleotide
tttttgtctaggtagtcagtctgcacttaaatatcaatcattttccttttttgcttcttcccttaaaatttatatgtatccagtacatttaattgagaagcgtatgttttttattatgctgtattttctttttattttttaattattgtttatattttcaattcaaaaatgtacaaaataaagttacattgctggtcttgtaagagctatacagttttcctaaatgtatacctgtaactgcagcagttcacctatttcaaaaatttggaattctgttcatttgttattcttaagaccacctcaaatttaaaggctaccttattgtacgtttaaagtgtattataacagtgtggtagttaataaaacactatttttttttcttttgaaaaaannnnannnnnanncataaaaaatattgcagtggtatggggtaagaattggtggtttatttttcttcaacttggctttttatttttagantcttgattttagacactgaattgtaaacaggcatttatttgaagaagagatatatagagacactggtcatttactaatt

SEQ ID NO: 3274 - DNA, 484 bp, Homo sapiens
  misc_feature (72)..(72): n includes a, c, g, or t, or contains no nucleotide
  misc_feature (154)..(177): n includes a, c, g, or t, or contains no nucleotide
cctggtgatgcctctggccatcattgcccaggtcctcagctacaaggaagctgtgcttcgtgctatagatgncatcaaccagcggtcctcggatgctaacctctaccgcctcctggacctggaccccaggcccacgatggatggggacccagannnnnnnnnnnnnnnnnnnnnnnnagtgaaggagacagtgtgccccaggacgacacagcagtcaccagaggattgtgacttcaagaaggacgggctggtgaagcggtgtatggggacagtgaccctcaaccaggccaggggctcctttgacatcagttgtgataaggataacaagagatttgccctgctgggtgatttcttccggaaatctaaagagaagattggcaaagagtttaaaagaattgtccagagaatcaaggattttttgcggaatcttgtacccaggacagagtcctagtgtgtgccctaccctggctcaggcttctgggct

SEQ ID NO: 3275 - DNA, 485 bp, Homo sapiens
  misc_feature (179)..(179): n includes a, c, g, or t, or contains no nucleotide
  misc_feature (359)..(360): n includes a, c, g, or t, or contains no nucleotide
  misc_feature (362)..(367): n includes a, c, g, or t, or contains no nucleotide
  misc_feature (370)..(379): n includes a, c, g, or t, or contains no nucleotide
  misc_feature (382)..(383): n includes a, c, g, or t, or contains no nucleotide
  misc_feature (395)..(395): n includes a, c, g, or t, or contains no nucleotide
  misc_feature (400)..(401): n includes a, c, g, or t, or contains no nucleotide
  misc_feature (413)..(419): n includes a, c, g, or t, or contains no nucleotide
  misc_feature (421)..(425): n includes a, c, g, or t, or contains no nucleotide
  misc_feature (428)..(428): n includes a, c, g, or t, or contains no nucleotide
  misc_feature (430)..(431): n includes a, c, g, or t, or contains no nucleotide
  misc_feature (433)..(434): n includes a, c, g, or t, or contains no nucleotide
  misc_feature (436)..(438): n includes a, c, g, or t, or contains no nucleotide
ctgggatcgcaccttttataccagagacctgaggcagatgaaatttatttccatctaggactagaaaaacttgggtctcttaccgcgagactgagaggcagaagtcagcccgaatgcctgtcagtttcatggaggggaaacgcaaaacctgcagttcctgagtaccttctacaggcccngcccagcctaggcccggggtggccacaccacagcaagccggccccccctcttttggccttgtggataagggagagttgaccgttttcatcctggcctccttttgctgtttggatgtttccacgggtctcacttataccaaagggaaaactcttcattaaagtccgtatttcttctaaaannannnnnnaannnnnnnnnnaannctattgtgtacnccgcnngccctcagcggnnnnnnngnnnnnggnanntnncnnncctaggcctgtgaggtaactgggatcgcaccttttataccagagacc

SEQ ID NO: 3276 - DNA, 308 bp, Homo sapiens
  misc_feature (28)..(42): n includes a, c, g, or t, or contains no nucleotide
  misc_feature (60)..(89): n includes a, c, g, or t, or contains no nucleotide
  misc_feature (232)..(232): n includes a, c, g, or t, or contains no nucleotide
gaggggcaccaattcacctacactccannnnnnnnnnnnnnnttaaaaatatttataaannnnnnnnnnnnnnnnnnnnnnnnnnnnnnaatccaagcctgtgtaaatgggaatcactgataagtatcatcatctgtatcagcttggcttggacatgaaaaattgattctctttatgtcactccttgcacctggacaaattcaatccccggtacttaagtcacactgccaanccctcggccctgactattgtcttgattgctgttcctttctggttcaaaataaaatcatttttgtggcaccaagaaa

SEQ ID NO: 3277 - DNA, 217 bp, Homo sapiens
gctgtccttcggtgtcagggccaggatgtccaggaggctggcagctgtgtgcaggatgggcagaggtataatgataaggatgtgtggaagccggagccctgccggatctgtgtctgtgacactgggactgtcctctgcgacgacataatctgtgaagacgtgaaagactgcctcagccctgagatccccttcggagagtgctgccccatctgcccaa

SEQ ID NO: 3278 - DNA, 491 bp, Homo sapiens
  misc_feature (48)..(48): n includes a, c, g, or t, or contains no nucleotide
  misc_feature (67)..(109): n includes a, c, g, or t, or contains no nucleotide
  misc_feature (385)..(402): n includes a, c, g, or t, or contains no nucleotide
tggatgacaccaaattccgctctcatgagggtgaaacttcctacatcngagtttatcctgagagaannnnnnnnnnnnnnnnnnnnnnnnnnnnnnnnnnnnnnnnnnnggggccgtgactctccataccaaagcaggggttccccacactacttctctcctttcaggccctactgagacaggtgatgggaattttttctttattttttaggttaactgagctgctttgtgctcagaatctacattccagattgaggatttagtgtcttaggaaatttttttaattttttttttttaaagaagaaaaaaaactacataatttctaccagggccatattagcagtgaaacattttaaactgcagaaattgtggttttggttcagannnnnnnnnnnnnnnnnncacccctgattatgggaaaaaaatcagttctgtctttgtgggttgctctactatggagatcaacagttactgtgactgagtcggcccat

SEQ ID NO: 3279 - DNA, 376 bp, Homo sapiens
gtggacccctgggctggctgtgttcatccccgctgcaggtcgggcgtctccccccgtgccactcctgagactccaccgttacccccaggagatcctggactgcctgactcccctccccagactggcttgggagcctgggccccatggtagatgcaagggaaacctcaaggccagctcaatgcctggtatctgcccccagtccaggccaggcggaggggaggggctgtccggctgcctctcccttctcggtggcttcccctgcgccctgggagtttgatctcttaagggaacttgcctctccctcttgttttgctcctgccctgcccctaggtctgggtggcagtggccccatagcctctggaactgtgcgttctgc

SEQ ID NO: 3280 - DNA, 611 bp, Homo sapiens
tttgtcaagagctttaacctgcctatgctgatgctgggaggcggtggttacaccattcgtaacgttgcccggtgctggacatatgagacagctgtggccctggatacggagatccctaatgagcttccatacaatgactactttgaatactttggaccagatttcaagctccacatcagtccttccaatatgactaaccagaacacgaatgagtacctggagaagatcaaacagcgactgtttgagaaccttagaatgctgccgcacgcacctggggtccaaatgcaggcgattcctgaggacgccatccctgaggagagtggcgatgaggacgaagacgaccctgacaagcgcatctcgatctgctcctctgacaaacgaattgcctgtgaggaagagttctccgattctgaagaggagggagaggggggccgcaagaactcttccaacttcaaaaaagccaagagagtcaaaacagaggatgaaaaagagaaagacccagaggagaagaaagaagtcaccgaagaggagaaaaccaaggaggagaagccagaagccaaaggggtcaaggaggaggtcaagttggcctgaatggacctctccagctctgg

SEQ ID NO: 3281 - DNA, 499 bp, Homo sapiens
  misc_feature (342)..(342): n includes a, c, g, or t, or contains no nucleotide
  misc_feature (350)..(350): n includes a, c, g, or t, or contains no nucleotide
  misc_feature (415)..(415): n includes a, c, g, or t, or contains no nucleotide
  misc_feature (419)..(419): n includes a, c, g, or t, or contains no nucleotide
taaccctgcacaggtggacctgggggctgccacagcagagggaggagcccctgaggctatcagtggggtccccactcccccagctatcccccctcagccccgccccaggagccttgcctcagagaccaactgagtggctggtttctccctaagcagccctcagcaccccctccctccccacctggccctcccaggacagctctcgccccccacaaaggggcatgggcctccagcctttgcccacaagtgcctcagtgcccactgggtcggcccccatggccaggagggctcaggacaatcctctatttcctgaccttttcctcgtccaccctgggcttgggnaccccccnaccggactctccactctccggcaggtcctaggggagccaccggaaggaaggagaggtttgcctgnctcntacgggactgattcttctcttgccgacatgttttttgtaaggctggtaaataaattattttggacaaaactggagcagct

SEQ ID NO: 3282 - DNA, 208 bp, Homo sapiens
  misc_feature (131)..(145): n includes a, c, g, or t, or contains no nucleotide
cagaccccaagccgggccatccccgccactcgccgggtggtgctcggcgacggcgtgcagctcccgcccggggactacagcacgacccccggcggcacgctcttcagcaccaccccgggaggtaccaggannnnnnnnnnnnnnnaattcctgatggagtgtcggaactcacctgtgaccaaaacacccccaagggatctgcccacca

SEQ ID NO: 3283 - DNA, 416 bp, Homo sapiens
  misc_feature (26)..(26): n includes a, c, g, or t, or contains no nucleotide
  misc_feature (107)..(107): n includes a, c, g, or t, or contains no nucleotide
  misc_feature (181)..(181): n includes a, c, g, or t, or contains no nucleotide
  misc_feature (192)..(192): n includes a, c, g, or t, or contains no nucleotide
  misc_feature (203)..(217): n includes a, c, g, or t, or contains no nucleotide
  misc_feature (225)..(225): n includes a, c, g, or t, or contains no nucleotide
gtggacaacattgtcttcaatatggnctgctggctctgccccgatgcagctccaccttcgtgctaccatccgcatgaaagatgggctctgtgtgccccggaaatggnatctaccacctgactgaagggagcacagatctcagaactgaaggccgccctgacatgaagactgagctcttttnccagctcatgncccaggtggannnnnnnnnnnnnnnacaggccnagggttaccagcgctttctcctctacaatcgctcaccacatcctcccgaaaagtgtgtggaggaattcaagtccctgacttcctgcctggactccaaagccttcttattgactcctaggaatcaagaggcctgtgagctgtccaataactgacctgtaacttcatctaagtccccagatgggtacaatggg

SEQ ID NO: 3284 - DNA, 510 bp, Homo sapiens
  misc_feature (305)..(327): n includes a, c, g, or t, or contains no nucleotide
gtatactctcagatatggcctcttacagtatttaagatatagcaaggacatggctgatttttttttataaaaattggcactaataagtgggtttattggtcttttctaattgtataatttaatttagtacaaagtttgtaaaatatcagaggatatatatatattgtttctacgacatggtattgcatttatatctttttactacagtgatctgtgacagcagcagcttcatgttgtattttttttactgaaattgtaaaatatccatcttaaagacatcaactattctaaaaattgtgtacagnnnnnnnnnnnnnnnnnnnnnnnaaaatgtacgaatacttgctttttcaaaaaaatgtattttctgttaaaagtttaaagatttttgctatatattatggaagaaaaatgtaatcgtaaatattaattttgtacctatattgtgcaatacttgaaaaaaacggtataaaagtattttgagtcagtgtcttacatgttaagagggac

SEQ ID NO: 3285 - DNA, 463 bp, Homo sapiens
  misc_feature (179)..(179): n includes a, c, g, or t, or contains no nucleotide
  misc_feature (189)..(206): n includes a, c, g, or t, or contains no nucleotide
  misc_feature (377)..(377): n includes a, c, g, or t, or contains no nucleotide
gagcagtgaccttcctcactttctcttgtcccagcttctcccctgggggcctgagagaccctcaccttccttctgcccatcttccatgttgtaaaggaacagccccagtgcactgggggaggggagggagtgaggggcagtggtgcccttcctgcagaagagacatgcagcagtagcgntggcgccatnnnnnnnnnnnnnnnnnntggccttctggaccctggcttctccccactgtaacgcctgttacacacaaactgttgtgggttcctgccaggcttgaagaaaatgatctgaattttttcctccttttggttttattttgttggtttattttgtgttttcttttctcctttttggggggtattcagagtggnctgggcccctgggcgagacacagctacctctgttggcatctttttaataccaggaacccagcggctctagccactgagcggctaaa

SEQ ID NO: 3286 - DNA, 476 bp, Homo sapiens
  misc_feature (38)..(38): n includes a, c, g, or t, or contains no nucleotide
  misc_feature (50)..(50): n includes a, c, g, or t, or contains no nucleotide
  misc_feature (99)..(99): n includes a, c, g, or t, or contains no nucleotide
  misc_feature (152)..(152): n includes a, c, g, or t, or contains no nucleotide
  misc_feature (158)..(158): n includes a, c, g, or t, or contains no nucleotide
  misc_feature (325)..(325): n includes a, c, g, or t, or contains no nucleotide
  misc_feature (384)..(384): n includes a, c, g, or t, or contains no nucleotide
  misc_feature (414)..(414): n includes a, c, g, or t, or contains no nucleotide
ggacagggtaccatgcccacctttccttcagaaccctnggggcccagggncacccagaggtaagaggacatttagcattagctctgtgtgagctcctgnccggtttcttggctgtcagtcagtcccagagtggggaggaagatatgggtgancccccnccccccatctgtgagccaagcctcccttgtccctggcctttggacccaggcaaaggcttctgagccctgggcaggggtggtgggtaccagagaatgctgccttcccccaagcctgcccctctgcctcattttcctgtagctcctctggttctgtttgctcattggcngctgtgttcatccaagggggttctcccagaagtgaggggcctttccctccatcccttgnggcacggggcagctgtgcctgccctgcctntgcctgaggcagccgctcctgcctgagcctggacatggggcccttccttgtgttgccaattt

SEQ ID NO: 3287 - DNA, 69 bp, Homo sapiens
gacctatcggcctagaccaagacgctacgtagagcctcctgaaatgattgggcctatgcggcccgagca

SEQ ID NO: 3288 - DNA, 124 bp, Homo sapiens
tccctggagcgcccaacgatgatcaaatatggcatcaacaatatccgggagctggtgggccacaaggtgaacctgcagatggtgtatgacagtcccctgtgccgcctggatgccgagccgaggc

SEQ ID NO: 3289 - DNA, 488 bp, Homo sapiens
caatcgcttaggaagtaaagccttgtctccctccctgttctctgcctcttgtacccctctgacccacccgctctgccccactcccagccctcctcagccccagccctgcctgccctgcccctccagggggccatgagtgcctaggtttctcataccccacaaggtcacagcaggggagggagggacaattttataatgaaccaaaaattccatgtgttggggggtggggggcggaggagggtgaggggtgccgcccatgggccacaaatctctacaagtgcctgctatccctctcccactccccaccccagcaccggtccaaccccttcatccccagctgctcctaggactggcccatgggcaggcgggtggggggatgggaagggggtgccctgaaaccaaactggaagccccctctgcctcccagctggggcctctggggtggggtggggggctgtggtcaagccttattctgtattggggactga

SEQ ID NO: 3290 - DNA, 471 bp, Homo sapiens
  misc_feature (335)..(354): n includes a, c, g, or t, or contains no nucleotide
  misc_feature (356)..(356): n includes a, c, g, or t, or contains no nucleotide
cgagtggcatatctatcaggactggcattcttttctcctgtgggagtttgccagccggatcacattacatggcttcatctacctccaggcttctccccaggtttgtttgaagagactgtaccagagggccagggaggaggagaaaggaattgagctggcctatctagagcagctgcatggccaacacgaagcctggcttattcacaagacaacgaagctccactttgaggctctgatgaacattccagtgctggtgttggatgtcaatgatgatttttctgaggaagtaaccaaacaagaagacctcatgagagaggtaaacacctttgtaaagnnnnnnnnnnnnnnnnnnnnangttcaggctgtgatctgggctccctgactttctgaagctagaaaaatgttgtgtctcccaaccacctttccatccccagcccctctcatccctggagcactctgccgctcaagag

SEQ ID NO: 3291 - DNA, 347 bp, Homo sapiens
  misc_feature (129)..(155): n includes a, c, g, or t, or contains no nucleotide
tgggtgagtcttggagagaaccaacgactaaggtagcttagctctctgctttgttcttgggagccaagagaatgcaagatcctggtgggtgagcagtggtatgaagaggggacactggtgggtgaacannnnnnnnnnnnnnnnnnnnnnnnnnnctggccctcagtctccctatcggcaaagtggggggctcttcctatctctaaagagtttcatccctgacaggtggatgggtgaaagatccagagagtgggggtgaggggtgggccctgaagactttttgtctgtagctcttgcatattgagtgtataaacccggcttctggaccaacccaagatgaataaact

SEQ ID NO: 3292 - DNA, 268 bp, Homo sapiens
tctcctggggttctgggagttccctgaacatctgtgtgtgtccccctatgctccagtatggaagaatggggtggagggtcgccacacccggctccccctgcttctcagccccgggcctgcctctgactcacacttgggcgctctgccctccctggcctcacgcccagcctggtcccaccaccctcccaccatgcgctgctcaacctctctccttctggcgcaagagaacatttctagaaaaaactacttttgtaccagtgtgaataaa

SEQ ID NO: 3293 - DNA, 361 bp, Homo sapiens
  misc_feature (38)..(38): n includes a, c, g, or t, or contains no nucleotide
  misc_feature (52)..(52): n includes a, c, g, or t, or contains no nucleotide
  misc_feature (55)..(55): n includes a, c, g, or t, or contains no nucleotide
acgtgggatcctcagggcgctctcccagcaaagcagtngccgcccgggcggnggnatccactgtccggcagaggaaaaatgccagctgtgggacaaggagtgcaggccgcacaacctcggcaggcaccggggggatgtggcgattctacacagaagattcacctgggctcaaagttggccctgttccagtattggttatgagtcttctgttcatcgcttctgtatttatgttgcacatttggggcaagtacactcgttcgtagattcagttacatccatctgtcatctgaagaaggaggaaaaaacccaacatttcttggaccaaaagtatagtgactatctgttcatgagagaaattttc

SEQ ID NO: 3294 - DNA, 238 bp, Homo sapiens
  misc_feature (174)..(176): n includes a, c, g, or t, or contains no nucleotide
  misc_feature (201)..(201): n includes a, c, g, or t, or contains no nucleotide
  misc_feature (212)..(212): n includes a, c, g, or t, or contains no nucleotide
tgtaaaaatcactggcattcgtggggccactccccacccaagctccacgtgtgtccgtctgtgctcctggcctctgggggaccagctgggacatgaacttgtctgccaggcccccgtcgcgtgctgaacggtgttagtttgtaggtaacgcacacaccccacacctaaggtgtnnntgcatcctcctgccaacgcatgggnctccacgtggntgtgctcgctggctgtcgtgactgtc

SEQ ID NO: 3295 - DNA, 350 bp, Homo sapiens
  misc_feature (45)..(45): n includes a, c, g, or t, or contains no nucleotide
  misc_feature (319)..(320): n includes a, c, g, or t, or contains no nucleotide
gacaggtgcctggagcccccggaaccctgtttctggaaggccctngctcaggtggcttcagggcctccggaccccccctgggaggggtggccacgtgctggctgcggaacccagggcaggggtgggaggggcctccagcactttttatatttacgtattctccaaagcagtgttcacacgggagccagcctgtggcccccagcctcctggaaaacaggttggcgctggaggagccgggtcttggcatcctggaggtggccccactggtcctggtgctccaggcggggccgtggacccctcacctacattccatagtggnnccgtggggctcctggtgcatcttaataaag

SEQ ID NO: 3296 - DNA, 278 bp, Homo sapiens
atggattggaagtgccccggtgccatcaggcacgttgacatcagccccgtgctccactaggaccttcagggtgtccaggaatccagtgcgggctgcgtcatggactggactggtaccggaggtgtcctggacattggggctggcaccttgcttcagcagctccagggcgatggcggtgctgccaaacatcatgacctgcagcgccgtcttgccgaagcggttgagggcgtcgggatgcaccagctcgcggtgcagaaggcggcgcacctcctgcacgt

SEQ ID NO: 3297 - DNA, 485 bp, Homo sapiens
  misc_feature (55)..(55): n includes a, c, g, or t, or contains no nucleotide
  misc_feature (57)..(83): n includes a, c, g, or t, or contains no nucleotide
  misc_feature (123)..(123): n includes a, c, g, or t, or contains no nucleotide
  misc_feature (173)..(173): n includes a, c, g, or t, or contains no nucleotide
  misc_feature (213)..(231): n includes a, c, g, or t, or contains no nucleotide
  misc_feature (380)..(380): n includes a, c, g, or t, or contains no nucleotide
  misc_feature (382)..(383): n includes a, c, g, or t, or contains no nucleotide
  misc_feature (417)..(417): n includes a, c, g, or t, or contains no nucleotide
tccgagctaaaatcccagggaccggagccctggcctctgcagcagccgcagtctncnnnnnnnnnnnnnnnnnnnnnnnnnnnacggtgtctctgcccgcaggacgcctgcccccagcccccngcagccctctggccccctccatctcttgtccgttcccacccacccccctncctcggcccgagccttttcccggtgggtgtcaggatcacnnnnnnnnnnnnnnnnnnnctaattacctgagcgaccaggactacatttcccaagaggctctgctccaggagtccaggaaagacgaggcaccttggccgcggggcctgctgggacttgtagttgcctagacagggcaccaccctgcacttccggacccgccgctggangnnccgtgaggcgttggtgtctcctggatgctactanccccaacgccggggctttgcatggggcccaggggaggcctgagcttggatttacactgtaataaagac

SEQ ID NO: 3298 - DNA, 432 bp, Homo sapiens
  misc_feature (32)..(32): n includes a, c, g, or t, or contains no nucleotide
  misc_feature (34)..(89): n includes a, c, g, or t, or contains no nucleotide
  misc_feature (152)..(179): n includes a, c, g, or t, or contains no nucleotide
  misc_feature (181)..(181): n includes a, c, g, or t, or contains no nucleotide
  misc_feature (188)..(207): n includes a, c, g, or t, or contains no nucleotide
  misc_feature (248)..(315): n includes a, c, g, or t, or contains no nucleotide
ttactgtgggagtgaagggaatccctcacctngnnnnnnnnnnnnnnnnnnnnnnnnnnnnnnnnnnnnnnnnnnnnnnnnnnnnnnnntactgtgcagattgatttagggactggcaagataatcaactttatcaaatttgatacaggcannnnnnnnnnnnnnnnnnnnnnnnnnnnancctcggnnnnnnnnnnnnnnnnnnnnaacagggaaagacatcctggttcttttgatgtggtgcatgnnnnnnnnnnnnnnnnnnnnnnnnnnnnnnnnnnnnnnnnnnnnnnnnnnnnnnnnnnnnnnnnnnnnaaaccttggatttccctgcccaggggaaagggcattcgacttactgttgctgaagagagagataagaggctggccaccaaacagagcagtggctaaattgcagtagcagcatatctt

SEQ ID NO: 3299 - DNA, 537 bp, Homo sapiens
  misc_feature (153)..(153): n includes a, c, g, or t, or contains no nucleotide
  misc_feature (257)..(257): n includes a, c, g, or t, or contains no nucleotide
  misc_feature (263)..(264): n includes a, c, g, or t, or contains no nucleotide
  misc_feature (269)..(269): n includes a, c, g, or t, or contains no nucleotide
  misc_feature (272)..(272): n includes a, c, g, or t, or contains no nucleotide
  misc_feature (276)..(276): n includes a, c, g, or t, or contains no nucleotide
  misc_feature (305)..(305): n includes a, c, g, or t, or contains no nucleotide
  misc_feature (307)..(323): n includes a, c, g, or t, or contains no nucleotide
  misc_feature (456)..(456): n includes a, c, g, or t, or contains no nucleotide
cagaggacggcagcagctcaaaggagggcacctctgtctgagtttcctctttggaaaaagaagttactgttcaacttaccaaaatgccttacacattccttacaaataaaccaaccaacctacacagcgttatccaggcccaacttccggtanctccgagagaagccatgagagacaagtctcttagagccacagaagtagaccttccagagccccagtttgtaaatgaacctgtgtcacatttgataaacactatncctggnncgcanccncggnccaccgccgagtgacgccaaagccctggntnnnnnnnnnnnnnnnnntgggtgtgtgggaggccgggcgctctggggtctgtctgtcagtgcaatcgtttagtgttttttcagtggggcggggcgggaagcgggtgggaccgggcagccagttctcaaaggctgtggggccgactggagnccacagcccctcacccctagacgttgccaaccagaactgacgtgtgacctcctgggtgttgatgccattaaaaccaacgtt

SEQ ID NO: 3300 - DNA, 83 bp, Homo sapiens
ggctgtggacttcagcacaaccatcaacattgctgttcaaagaaattacagtttacgtccattccaagttgtaaatgctagtc

SEQ ID NO: 3301 - DNA, 471 bp, Homo sapiens
  misc_feature (100)..(101): n includes a, c, g, or t, or contains no nucleotide
  misc_feature (127)..(127): n includes a, c, g, or t, or contains no nucleotide
  misc_feature (212)..(212): n includes a, c, g, or t, or contains no nucleotide
  misc_feature (374)..(374): n includes a, c, g, or t, or contains no nucleotide
gaacccgttcctggtgcccctggagcttctgggtcgggcagccacccctgccaggtgaggggcatggcgggcaggaggccacaccaggccccccgccctnncccctcggttctgctcggctggcccntggctctttctgaggatcccgtcatgggggaaggtccttgagatgatgctcagctgtggggcgggcctctaagatgccccatacnttgggggtctcagaaatggaacccccgttgtacaggggttgggtgggggttgcaggactccactcacaagcctcctgatgtcaaggacaggcggacagggctggcctcccccagtccccaagccccactgtgccttgttgtctgctggggggccatagctgncactgcccaccgtaaaggccctcgcacattttcccccttcctgtacacctcggggccagcatcctcaccttcttcaactgaccagtcgtggttactc

SEQ ID NO: 3302 - DNA, 50 bp, Homo sapiens
ccttgctatagaagacctgggacagaggactgctgtctgccctctctggt

SEQ ID NO: 3303 - DNA, 364 bp, Homo sapiens
  misc_feature (279)..(298): n includes a, c, g, or t, or contains no nucleotide
  misc_feature (300)..(314): n includes a, c, g, or t, or contains no nucleotide
  misc_feature (323)..(339): n includes a, c, g, or t, or contains no nucleotide
tagggtgtctgaaatgctggccatgttcagagaggcaggagaagggggttgctttcatttgaatattaaaagtgaatttttgtaaactctggtttttacctttttttcatccccacgttgagttggaggaatagtctcttctcttcacctcaatatagctttagaaaatctttatccttcctaataagtttggatggttgtgggtaacattgttcaaacaatctttcagggatcacgtcaatggcctacaaccaagctatttgtcccctactttgagtnnnnnnnnnnnnnnnnnnnnannnnnnnnnnnnnnnggcttcaannnnnnnnnnnnnnnnnttaatattcatacttggggccaggc

SEQ ID NO: 3304 - DNA, 216 bp, Homo sapiens
tcatcatcacgctgctggtgcaggtgctcgtctgctttatgcccttccacatctgtttcgctttcctgatgctgggaacgggggagaacagttacaatccctggggagcctttaccaccttcctcatgaacctcagcacgtgtctggatgtgattctctactacatcgtttcaaaacaatttcaggctcgagtcattagtgtcatgctataccgta

SEQ ID NO: 3305 - DNA, 489 bp, Homo sapiens
  misc_feature (26)..(26): n includes a, c, g, or t, or contains no nucleotide
  misc_feature (34)..(34): n includes a, c, g, or t, or contains no nucleotide
  misc_feature (54)..(60): n includes a, c, g, or t, or contains no nucleotide
  misc_feature (79)..(79): n includes a, c, g, or t, or contains no nucleotide
  misc_feature (333)..(347): n includes a, c, g, or t, or contains no nucleotide
  misc_feature (359)..(359): n includes a, c, g, or t, or contains no nucleotide
tgtgtgtgccatgtcacagcatggcntctcggcnttgggaaggaaggcagtgcnnnnnnntctgctgtgagccgccagnaaccctcctcctgtcaatgggggtgtagtatttttgccaaaatatcatgttcaatttcagtagtttgatcagttgaaggctagaagtgtgaagtgcagatgagtgtgtgttcttccccaaggtccccccacagctccaggacaccgctgtcctggcatttgtggccactcactttgtaggaaactcatctccttcctgaggagccgggaggctggaccagtcccgtcgtgcagtcaggtgggcggtgtgtcttnnnnnnnnnnnnnnnggaaatgtctcngggacttgggtcccggagtgcccgtgaagcgtgtttttgctcctgaggtgcattttctcatcatccttgctttaccacaatgagcaatgaggtcgggttttatatgcaacttattgtatctgaattcctg

SEQ ID NO: 3306 - DNA, 324 bp, Homo sapiens
aacctgtatcccaagcagcggtcattcaagacacagatatgcacttatacccataccattagcagtaattacaacatgtattgtgctgtatatgaatggtattctgaaatgtgacagaaaaccagacagaaccaactccaattgattggtaacagaagatgaagacaacagcataactaaattattttaaaaactaaaaagccatctgatttctcatttgagtattacaatttttgaacaactgttggaaatgtaacttgaagcagctgctttaagaagaaatacccactaacaaagaacaagcattagttttggctgtcatca

SEQ ID NO: 3307 - DNA, 483 bp, Homo sapiens
  misc_feature (220)..(241): n includes a, c, g, or t, or contains no nucleotide
  misc_feature (403)..(417): n includes a, c, g, or t, or contains no nucleotide
gtgctacccttctcttgtaaccttgcagccaacacccctgcccggcccctgagctgcctcctccagcccatgctcttacaggccctgcacagagtagcactcattaattcttggttaaggaatgaatcaacgaatgaatggctatgcatggacctctgggcagggagacctgggtcttctctggctgagaggggaaggctaaggcatggctgagattcannnnnnnnnnnnnnnnnnnnnngcccaagaaagaaacttctgtcacccttgcactctcctgtgttctgagtccctggccaatagcacagccttccatgccccgacccccaccccaagcctctccactaggcctctgccaggatctaagcccatgagcacagggactggctatcccaagacctgnnnnnnnnnnnnnnnccaaaggaagatcctcaaatgtagagtatattttttctctttctaccatgacaggaagcaagaaag

SEQ ID NO: 3308 - DNA, 564 bp, Homo sapiens
tatttctgactggtgcctttcccctttttaggagcaacgaaagctactctcttagttatgttcttgtgatgtgacaaaatgtcaagaagataggagaagagaatattttatttcgttgatgcttttgttcccaagtgtgaccctaaacttaagctttgtaggagttgacattctttcatgtcccttccctttactcatgccgaaactatcaactgggacattttgtgcttttggtttaaaagttaattgatattatactttggttttatctaaaaagtaaatgtatttgcctttgacaaaagactgacacaagagcaaataagctttaaaatcgggtgttatgtgctttcctccatttttgagcatattatccaaaatggtctgtataatataaatgagaatgatgcagtttaagtaagccttgttataccattgtcatggacccctgtcataaagccatttcttggtttgtttgggaaagaggcatatgggatttatacagattcacttgtaaatgttggattggggatttttgtgtaaattttctcaaataaaggctagcag

SEQ ID NO: 3309 - DNA, 520 bp, Homo sapiens
  misc_feature (105)..(121): n includes a, c, g, or t, or contains no nucleotide
gtccaacgaggagttcaagacatacaactaccccaagtaccgagccgaggcccttttgagccacgcaccccgacttgatagcgacggggccgacctcctcaccannnnnnnnnnnnnnnnnggtcgaaatcggatctccgcagaggatgccatgaaacatccattcttcctcagtctgggggagcggatccacaaacttcctgacactacttccatatttgcactaaaggagattcagctacaaaaggaggccagccttcggtcttcgtcgatgcctgactcaggcaggccagctttccgcgtggtggacaccgagttctaagccacagaccgaggccccagcaggcagcggctggagggatgccacacccctcacagggcagcccccaactacatcttccctgcttactctctgcctacctgcctgagccatgttcacctgcccacttgtcccctgctgcctgcccaaacaccccaccattggcctgtcaacccacccattggcctgtctgctgggtgc

SEQ ID NO: 3310 - DNA, 499 bp, Homo sapiens
gattctcaaatatccttgattttggatgttcagtatgtttgtgagagaggtttctgggaagactctctttttgccctcgggaaaaagcaaaatatcaatgtttgggtgactgtgtaaagctcagtgtgtaagaacatctttttgtctaggttttctttctgctctttattgaagacaaacactcaccaaaaagaaaaataaaagttttcagagaaactaattttctttggcaagagtattacttaatattttggcctcctaaagtttccctagttagtactcggactcctgtgctaattgtcagcttacatatcattgtatagagactgtttattctgtaccaaactgatttcaaaagtactacattgaaaataaaccggtgactgtttttcttcataaagttctgcgtttggcatcttcactctttccaaaatgtatctgtacatcagaaatgtcactattccaagtgtctttttagtgtggcctttagtatggcttc

SEQ ID NO: 3311 - DNA, 146 bp, Homo sapiens
ggaaatccaactaatgagaccgcactccttggcttgttcctgcgtgtttcacccaaaggagaaaatgctaggatgaagtcaatcttcttgcaggaacatgttactatggtgatttctacgcaacactaattaaagcttgtacctgg

SEQ ID NO: 3312 - DNA, 338 bp, Homo sapiens
  misc_feature (76)..(92): n includes a, c, g, or t, or contains no nucleotide
  misc_feature (118)..(133): n includes a, c, g, or t, or contains no nucleotide
  misc_feature (147)..(161): n includes a, c, g, or t, or contains no nucleotide
  misc_feature (242)..(256): n includes a, c, g, or t, or contains no nucleotide
  misc_feature (258)..(259): n includes a, c, g, or t, or contains no nucleotide
ccaacttcatctttgaagtgccctggtgcttcttcccgaagtctgtggaagactgccattactaagagaggctggnnnnnnnnnnnnnnnnnggctcaccgggtgttccgaaaccaannnnnnnnnnnnnnnntatcagcttcatannnnnnnnnnnnnnnggttttcttaaccatcttttcctcattttcaatggtttaacatataatttctttaaataaaacccttaaaatctgctaaannnnnnnnnnnnnnnannaacacagaggtggtaatggtggtgtgcgtgtgtacacatgtatgggtgtgtgtacccatgtatgggtgtgtgtacccat

SEQ ID NO: 3313 - DNA, 480 bp, Homo sapiens
  misc_feature (34)..(48): n includes a, c, g, or t, or contains no nucleotide
  misc_feature (123)..(137): n includes a, c, g, or t, or contains no nucleotide
  misc_feature (347)..(347): n includes a, c, g, or t, or contains no nucleotide
  misc_feature (353)..(353): n includes a, c, g, or t, or contains no nucleotide
  misc_feature (434)..(434): n includes a, c, g, or t, or contains no nucleotide
  misc_feature (450)..(450): n includes a, c, g, or t, or contains no nucleotide
gtgtgcaaccgcagcttctcgcgctctgaccacnnnnnnnnnnnnnnnaagaggcaccagaactgagcactgcccgtgtgacccgttccaggtcccctgggctccctcaaatgacagacctannnnnnnnnnnnnnnaaacaacaaaaacaaaaaaaaacaagaaaaccacaactaaaactggaaatgtatattttgtatatttgagaaaacagggaatacattgtattaataccaaagtgtttggtcattttaagaatctggaatgcttgctgtaatgtatatggctttactcaagcagatctcatctcatgacaggcagccacgtctcaacatgggtaagggggnggggtntggaaggggagtgtgtgcagcgtttttacctaggcaccatcatttaattgttgaccagtgttcagtaaacaaatccagttnggcaggcaccagaagnagaattggatttgtatgtccagattttacc

SEQ ID NO: 3314 - DNA, 450 bp, Homo sapiens
  misc_feature (398)..(412): n includes a, c, g, or t, or contains no nucleotide
tcaaaacgctgattaaaagaagcacggtatgatgaccaaacataaaaagtgttttataattgttggtgttttaataacaactaatattattactctgatagttaaactaactcgagattctcagagtttatgcccctatgattggattggtttccaaaacaaatgctattatttctctaaagaagaaggagattggaattcaagtaaatacaactgttccactcaacatgccgacctaactataattgacaacatagaagaaatgaattttcttaggcggtataaatgcagttctgatcactggattggactgaagatggcaaaaaatcgaacaggacaatgggtagatggagctacatttaccaaatcgtttggcatgagagggagtgaaggatgtnnnnnnnnnnnnnnngatggtgcagcaacagctagatgttacaccgaaagaaa

SEQ ID NO: 3315 - DNA, 449 bp, Homo sapiens
  misc_feature (211)..(211): n includes a, c, g, or t, or contains no nucleotide
  misc_feature (261)..(261): n includes a, c, g, or t, or contains no nucleotide
  misc_feature (298)..(298): n includes a, c, g, or t, or contains no nucleotide
  misc_feature (306)..(306): n includes a, c, g, or t, or contains no nucleotide
  misc_feature (309)..(337): n includes a, c, g, or t, or contains no nucleotide
  misc_feature (348)..(348): n includes a, c, g, or t, or contains no nucleotide
gttactctcttccacatgttactggataaattgtttagtggaaaataggctttttaatcatgaatatgatgacaatcagttatacagttataaaattaaaagtttgaaaagcaatattgtatatttttatctatataaaataactaaaatgtatctaagaataataaaatcacgttaaaccaaatacacgtttgtctgtattgttaagtgnccaaacaaaggatacttagtgcactgctacattgtgggatttatttctangatgatgtgcacatctaaggatatggatgtgtctaantttagtcnttnnnnnnnnnnnnnnnnnnnnnnnnnnnnntgaagacttanccagtattctagtgtattatgaagctttcaacattactatgcacaaactagtgtttttcgatgttactaaattttaggtaaatgctttcatggcttttttc

SEQ ID NO: 3316 - DNA, 594 bp, Homo sapiens
  misc_feature (221)..(236): n includes a, c, g, or t, or contains no nucleotide
  misc_feature (362)..(384): n includes a, c, g, or t, or contains no nucleotide
  misc_feature (470)..(486): n includes a, c, g, or t, or contains no nucleotide
  misc_feature (536)..(560): n includes a, c, g, or t, or contains no nucleotide
tgaacttcatcagttaaaggccaataattggaaacagatggatcctcttgacaagaaggagagaagggcccctcctccagtgccaaagaagccggcgaagggccccgcgccgctgatccgggagcgctcgctggagagctcgcagcgccaggaggcccgcaagcgcctgatggccgccaagcgcgccgcgtccgtccgccagaactcggccaccgagagcnnnnnnnnnnnnnnnntctacatccccgaggcgcagacccggctctgagcgccccgcagcccggccgccgccgccaagcatctgtcccctcctcccccggccgctcctctgccggctgcctctccccctccgagcccgtccnnnnnnnnnnnnnnnnnnnnnnnctgtcgcggtgtagttgtccacctcgcaggagccgccccccgggcccccctcagccccccacttcccgtacccgtttgcccatctnnnnnnnnnnnnnnnnncgccccctgtcctgatgccgtcgccctgcctcatactgagatccaacccnnnnnnnnnnnnnnnnnnnnnnnnncacctgtgtagaagtgatgcctttaggtcacccg

SEQ ID NO: 3317 - DNA, 479 bp, Homo sapiens
  misc_feature (48)..(48): n includes a, c, g, or t, or contains no nucleotide
  misc_feature (50)..(50): n includes a, c, g, or t, or contains no nucleotide
  misc_feature (55)..(55): n includes a, c, g, or t, or contains no nucleotide
  misc_feature (92)..(92): n includes a, c, g, or t, or contains no nucleotide
  misc_feature (135)..(135): n includes a, c, g, or t, or contains no nucleotide
  misc_feature (226)..(241): n includes a, c, g, or t, or contains no nucleotide
agcttgggcacagcagactggcctggccctgagactggggagtggctncnacagncctcctgccacccacacaccactctccctagactctncctagggttcaggagctgctgggcccagaggtgacatttgacnttttttccaggaaaaatgtaagtgtgaggaaaccctttttattttattacctttcactctctggctgctgggtctgccgtcggtcctgctnnnnnnnnnnnnnnnngagcctctgcccggggagcctcaggcagtcctctcctgctgtcacagctgccatccacttctcagtcccagggccatctcttggagtgacaaagctgggatcaaggacagggagttgtaacagagcagtgccagagcatgggcccaggtcccaggggagaggttggggctggcaggccactggcatgtgctgagtagcgcagagctacccagtgagaggccttgtctaactgcctttc

SEQ ID NO: 3318 - DNA, 522 bp, Homo sapiens
  misc_feature (28)..(28): n includes a, c, g, or t, or contains no nucleotide
  misc_feature (44)..(45): n includes a, c, g, or t, or contains no nucleotide
  misc_feature (204)..(247): n includes a, c, g, or t, or contains no nucleotide
  misc_feature (387)..(420): n includes a, c, g, or t, or contains no nucleotide
caggaactctactggcagattggcattnaagagttcctcatcgnnggccaggcctccggctggtgttctgagggttgccaggccatcgtggacacaggcacctctctgctcactgtgccccagcagtacatgagtgctcttctgcaggccacaggggcccaggaggatgagtatggacagtttctcgtgaactgtaacagcatnnnnnnnnnnnnnnnnnnnnnnnnnnnnnnnnnnnnnnnnnnnntccctctgccaccttcctcctatatcctcagtaacaacggctactgcaccgtgggagtcgagcccacctacctgtcctcccagaacggccagcccctgtggatcctcggggatgtcttcctcaggtcctactattccgtnnnnnnnnnnnnnnnnnnnnnnnnnnnnnnnnnnactgccgcctagacttgctgcctcgacacgtgggctcccctcttcctcttgaccctgcaccctcctagggcattgtatctgtctttccactctggattcagc

SEQ ID NO: 3319 - DNA, 433 bp, Homo sapiens
  misc_feature (68)..(68): n includes a, c, g, or t, or contains no nucleotide
  misc_feature (71)..(71): n includes a, c, g, or t, or contains no nucleotide
  misc_feature (73)..(87): n includes a, c, g, or t, or contains no nucleotide
tctttgtctgcaggtgggctgctgagggtctgggatctgttttctggaagtgtgcaggtataaacacnccntnnnnnnnnnnnnnnnactggcaggtaccgtgctcattgctaaccactgtctgtccctgaactcccagaaccactacatctggctttgggcaggtctgagataaaacgatctaaaggtaggcagaccctggacccagcctcagatccaggcaggagcacgaggtctggccaaggtggacggggttgtcgagatctcaggagccccttgctgttttttggagggtgaaagaagaaaccttaaacatagtcagctctgatcacatcccctgtctactcatccagaccccatgcctgtaggcttatcagggagttacagttacaattgttacagtactgttcccaactcagctgccacgggtgag

SEQ ID NO: 3320 - DNA, 156 bp, Homo sapiens
tggctcggggataagacccagcctttccacacattagtttgtgatgctgggtcatagtgcgtctgtttgctccctgtcaagggaccagtaacatgaggggtcagagaagggatcagaactctcgtgggcctccagtgtgtcgcaagtttttgctgt

SEQ ID NO: 3321 - DNA, 418 bp, Homo sapiens
  misc_feature (252)..(254): n includes a, c, g, or t, or contains no nucleotide
  misc_feature (256)..(295): n includes a, c, g, or t, or contains no nucleotide
  misc_feature (393)..(393): n includes a, c, g, or t, or contains no nucleotide
ctcactgatgcaaagctttaaggcttctctgactgttctgaaactcttcgtattcttgtcaagtctaaagagactgaagaaaagatttaaatactaataaaaatcagtagataatttctgtaggttctgctggaggaatacaaactgtttggtgttttaaatttaagtgtagaaattgtagaatgtggaattagcacagatccttcctggctttctgtttcacttgatcatttagcccagaccacccaggannntnnnnnnnnnnnnnnnnnnnnnnnnnnnnnnnnnnnnnnnntttgtccttgtcacttggagaaaggccagtccctgtgacggggcagccctctctgtccctcggtcagctcgtgtgaatcctgggacctcttccggtcngctctgcccgctgttctggggtcga

SEQ ID NO: 3322 - DNA, 559 bp, Homo sapiens
  misc_feature (30)..(45): n includes a, c, g, or t, or contains no nucleotide
  misc_feature (227)..(246): n includes a, c, g, or t, or contains no nucleotide
  misc_feature (303)..(321): n includes a, c, g, or t, or contains no nucleotide
  misc_feature (325)..(406): n includes a, c, g, or t, or contains no nucleotide
acgtgtgtgctatgggaactcagtgtgtcnnnnnnnnnnnnnnnnaaacaaggaagggacagagatcagggaaataaaggcagaaggcagtgagagggaggctatgcctgctgcttggattctctgggctcactcccacagtgagctgcacactgtgatggagactcctctggagaaggccctgaccactatggtgaccacgtttcacaaatattcggggagagagnnnnnnnnnnnnnnnnnnnntaggaaggaactcaaggagctgatcaagaaagagctgtgtcttggggagatgaaggnnnnnnnnnnnnnnnnnnngatnnnnnnnnnnnnnnnnnnnnnnnnnnnnnnnnnnnnnnnnnnnnnnnnnnnnnnnnnnnnnnnnnnnnnnnnnnnnnnnnnnaacgacttctttctagaggacaacaagtgaccagggctgccctccaccctcaccctccaccctttgctgctgacctcggctgctcctctcacagaccctctttggccccctgccctcctctccctcccagatggacccttccatgggaggaaa

SEQ ID NO: 3323 - DNA, 587 bp, Homo sapiens
  misc_feature (90)..(140): n includes a, c, g, or t, or contains no nucleotide
  misc_feature (322)..(343): n includes a, c, g, or t, or contains no nucleotide
  misc_feature (445)..(460): n includes a, c, g, or t, or contains no nucleotide
gaacaggcctgttcgccctggggtccgggcctggcacaggaagcagctagactaggggagtccttggagcatctgagaggggttttcttnnnnnnnnnnnnnnnnnnnnnnnnnnnnnnnnnnnnnnnnnnnnnnnnnnnacccgtggccctggggaccttcctagtgccccccaaaaccaaggaagcattcacgtgagatggggagtcagccttccagctggtgtgtaggaaagccaggtccctgggcccttgtcccatgtggggttgagatccagatctccatgagatattcccatcctccgccgagcggtgatgcgtgnnnnnnnnnnnnnnnnnnnnnnctcccaagctcggggccatgccgtgccaccgtcaccagagccagctgcagcactggggcagccactgtcgccggacttggggaagcccagggtgaagacagnnnnnnnnnnnnnnnngctctccagaagggatgcaagctctccagaaggggtgtgatctctgagcagtggggagtggagtcaccactcgggacatagagggtggacagttcaggcctgtgtctgcctccttgggactgtggag

SEQ ID NO: 3324 - DNA, 135 bp, Homo sapiens
tagaccccacagagttaaaacttgggattcccctggcccccccagaacacttgtatattgtttgtttgaggttcgtgccgcagtaacagacacagtatttaattgcacatacagatgtttgctgggtatattcac

SEQ ID NO: 3325 - DNA, 532 bp, Homo sapiens
  misc_feature (26)..(26): n includes a, c, g, or t, or contains no nucleotide
  misc_feature (41)..(41): n includes a, c, g, or t, or contains no nucleotide
  misc_feature (59)..(59): n includes a, c, g, or t, or contains no nucleotide
  misc_feature (75)..(75): n includes a, c, g, or t, or contains no nucleotide
  misc_feature (135)..(135): n includes a, c, g, or t, or contains no nucleotide
  misc_feature (301)..(326): n includes a, c, g, or t, or contains no nucleotide
tggagacaggtggtcctgtaaaagcntttattcctaatgtngggcacattccactcccntgagtcttcaaaaacntttttttttgaatatatttttttcagttgatacataatagaacaacgtttatgaacctgnccgtttgctttgtaacgtaactaaataatgtaatggcatctatattcagttgaagtgttttgatgtgcatgtgtacttcctaaggtgaaatgcatctatatacagacagcctctaaatcaagtccttcagtataattgatatatgtttttataatttcctcactgnnnnnnnnnnnnnnnnnnnnnnnnnnttatctctgggtattgcataaaaggcttcatcttataaagtgaaatcattgttattgaattttaggaaggattaatggttaagtgtatataaaatactaatattaagtaaacttcatattggccaacaccagggttgtattctatggatgtcattattttgaattaagaattagtgtttaacattcctaaattgttttgagtgctt

SEQ ID NO: 3326 - DNA, 484 bp, Homo sapiens
  misc_feature (231)..(231): n includes a, c, g, or t, or contains no nucleotide
  misc_feature (233)..(233): n includes a, c, g, or t, or contains no nucleotide
  misc_feature (244)..(244): n includes a, c, g, or t, or contains no nucleotide
  misc_feature (262)..(262): n includes a, c, g, or t, or contains no nucleotide
  misc_feature (271)..(271): n includes a, c, g, or t, or contains no nucleotide
  misc_feature (289)..(289): n includes a, c, g, or t, or contains no nucleotide
  misc_feature (356)..(356): n includes a, c, g, or t, or contains no nucleotide
cctactggttgaatttgggctatagatattttgtctggcttacaccttgttaaaatacagaattagtagtcgttgcttaataactgagctattacatatgaaaacgtatatgtctagtatccctggaaaaaatcagatgcaacattgggtttttggtggatgctaaataacagccactgccttatgatggggcaggaactcttccattttgttccagtcctcacctggccncntcgttgtgtcncctgtttggttcggttcnttgaaggcncttccggtttgcaatccnttagaacaagctccctacttttctgcctcccttttgtgttaaataacagatatgaatattgaaaccntgggatgggaagtgacttgtacacagtggcaaggcgggtactcaagtcaagactcctgactcccagttccccacaaggagttagtcagcctagagaaaataacgtctccactgcctgaaacacagtgt

SEQ ID NO: 3327 - DNA, 507 bp, Homo sapiens
atccgagaggccaacaagctggcggagaagcggaaagcccacgatgaggcggtgaggtctgagaagaaggccaagaaggcaaggccggagtgagtgcctgcggcccctcacagggctgaggccagcccctagcagctggatgtggcagaggcaggccagaggacctaagtgtgatggaccagagtcacttctcctcctcctttctccagccagccctgacccctcatgctctctggctgggccagtgggcagccctcgcttcccttggatggagctgccctgctggtgcctggtcagagaagaggcctctgtgcccagcctgattctctgctcccaggagccagtgacatgaggtgcagaggcccacccagccccctacctactgcccccattcatcctggctttccacagccccctcccacacagttggacccgtgattctcagggtgctgtgatggggtgagggtagggggagcatttgttattaaatgactggacttttgtgcc

SEQ ID NO: 3328 - DNA, 437 bp, Homo sapiens
  misc_feature (123)..(142): n includes a, c, g, or t, or contains no nucleotide
  misc_feature (205)..(220): n includes a, c, g, or t, or contains no nucleotide
  misc_feature (297)..(328): n includes a, c, g, or t, or contains no nucleotide
gataatctgtcatcagaagaaattcaacagagagctcaccagattactgatgagtctctggaaagtacgaggagaatcctgggtttagccattgagtctcaggatgcaggaatcaagaccatnnnnnnnnnnnnnnnnnnnnaggaacaactaaaccgcatagaagaaggcttggaccaaataaataaggacatgagagagacannnnnnnnnnnnnnnnaactcaacaaatgctgtggcctttgtgtctgcccatgtaatagcataactaatgatgccagagaagatgaaatggannnnnnnnnnnnnnnnnnnnnnnnnnnnnnnngaaatctaaaagacatggccctgaacataggcaatgagattgatgctcaaaatccacaaataaaacgaatcacagacaaggctgacaccaacagagatcgtattgatat

SEQ ID NO: 3329 - DNA, 349 bp, Homo sapiens
gggtgctttttctaaagacgcagaaacgacgtcgccgtaaagcagcgtggcgtgttgcacatttaactgtgtgatgtcccgttagtgagaccgagccatcgatgccctgaaaaggaaaggaaaagggaagcttcggatgcattttccttgatccctgttgggggtggggggcgggggttgcatactcagatagtcacggttattttgcttcttgcgaatgtataacagccaaggggaaaacatggctcttctgctccaaaaaactgagggggtcctggtgtgcatttgcaccctaaagctgcttacggtgaaaaggcaaataggtatagctattttgcaggcaccttta

SEQ ID NO: 3330 - DNA, 597 bp, Homo sapiens
  misc_feature (170)..(210): n includes a, c, g, or t, or contains no nucleotide
  misc_feature (358)..(376): n includes a, c, g, or t, or contains no nucleotide
  misc_feature (432)..(451): n includes a, c, g, or t, or contains no nucleotide
  misc_feature (525)..(557): n includes a, c, g, or t, or contains no nucleotide
ggcttcatctccatcaatcactgagatctcctcatccatcatcatcaagggatcaccctcatcatcttggtcctttgggggaccttggagtggtttatatcaggatcttcacaatctttatcaagtcaacccttctactatgtcagagaagttatccaacactcgatgtnnnnnnnnnnnnnnnnnnnnnnnnnnnnnnnnnnnnnnnnntaggaaacataaggctgggtctgccctcatggtattatatttctcatagccatgtttaaagactccaatgagcagcgacttgtcagcctcatctgtcccaccaagttgttggaacctccagttgatccactactgggaaccatatgtnnnnnnnnnnnnnnnnnnnaccccctaacaccttttctgcttggtctccataacctcctgcctcaggtagatagnnnnnnnnnnnnnnnnnnnncctggttacactgatgtttcaagtgcttcttataactttcatcttggaacaaagtgtcagggttatatttccgnnnnnnnnnnnnnnnnnnnnnnnnnnnnnnnnnttatgactttactttttttcctttgcgtccacgaggcaca

SEQ ID NO: 3331 - DNA, 307 bp, Homo sapiens
  misc_feature (214)..(214): n includes a, c, g, or t, or contains no nucleotide
aagcctgtggtatgatgtgcacacttgctagactcagaaaaaatactactctcataaatgggtgggagtattttggtgacaacctactttgcttggctgagtgaaggaatgatattcatatattcatttattccatggacatttagttagtgctttttatataccaggcatgatgctgagtgacactcttgtgtatatttccaaatttttgtanagtcgctgcacatatttgaaatcatatattaagactttccaaagatgaggtccctggtttttcatggcaacttgatcagtaaggatttcacct

SEQ ID NO: 3332 - DNA, 80 bp, Homo sapiens
tcgcccacggcgcctcagatttcaggaccctcctcctcgcccacggcgcctcagacctcaggaccctgccgtctcacgcc

SEQ ID NO: 3333 - DNA, 538 bp, Homo sapiens
tggacaccgtgttcagcaccagcctcagaagaggcctcctgctccgtcgggcacacaagttcaccagcagaaaggcccgcccctccccagacctcgagttcagccaaaacctccccatggggcagcagaaaactcattgtccccttcctctaattaaaaaagatagaaactgtctttttcaataaaaagcactgtggatttctgccctcctgatgtgcatatccgtacttccatgaggtgttttctgtgtgcagaacattgtcacctcctgaggctgtgggccacagccacctctgcatcttcgaactcagccatgtggtcaacatctggagtttttggtctcctcagagagctccatcacaccagtaaggagaagcaatataagtgtgattgcaagaatggtagaggaccgagcacagaaatcttagagatttcttgtcccctctcaggtcatgtgtagatgcgataaatcaagtgattggtgtgcctgggtctcactacaagcagcctatctgcttaagagactctggagtttctt

SEQ ID NO: 3334 - DNA, 534 bp, Homo sapiens
  misc_feature (35)..(51): n includes a, c, g, or t, or contains no nucleotide
  misc_feature (87)..(87): n includes a, c, g, or t, or contains no nucleotide
  misc_feature (93)..(93): n includes a, c, g, or t, or contains no nucleotide
  misc_feature (140)..(140): n includes a, c, g, or t, or contains no nucleotide
  misc_feature (176)..(176): n includes a, c, g, or t, or contains no nucleotide
  misc_feature (480)..(480): n includes a, c, g, or t, or contains no nucleotide
  misc_feature (482)..(484): n includes a, c, g, or t, or contains no nucleotide
ggctgccccaggaaccataaggggtgacttcagcnnnnnnnnnnnnnnnnntgtcatccacgccagcgactccgtggagggggcccnagcggnagatccagctgtggttccagagcagtgagctggtgagctgggcagangggggccagcacagcagcatccacccagcctgaggntcaagctgcccttaccaccccatcccccacgcaggaccaactacctccgtcagcaagaacccaagcccacatccaaacctgcctgtcccaaaccacttacttccctgttcacctctgccccaccccagcccagaggagtttgagccaccaacttcagtgcctttctgtaccccaagccagcacaagattggaccaatcctttttgcaccaaagtgccggacaacctttgtggtgggggggggtcttcacattatcataacctctcctctaaaggggaggcattaaaattcactgtgcccagcanannngtggtacactaattatgacttcccccagctctgaggtagaaatgacgcct

SEQ ID NO: 3335 - DNA, 456 bp, Homo sapiens
  misc_feature (97)..(97): n includes a, c, g, or t, or contains no nucleotide
  misc_feature (105)..(111): n includes a, c, g, or t, or contains no nucleotide
  misc_feature (114)..(114): n includes a, c, g, or t, or contains no nucleotide
  misc_feature (117)..(117): n includes a, c, g, or t, or contains no nucleotide
  misc_feature (119)..(122): n includes a, c, g, or t, or contains no nucleotide
  misc_feature (124)..(124): n includes a, c, g, or t, or contains no nucleotide
  misc_feature (135)..(135): n includes a, c, g, or t, or contains no nucleotide
  misc_feature (137)..(137): n includes a, c, g, or t, or contains no nucleotide
  misc_feature (139)..(140): n includes a, c, g, or t, or contains no nucleotide
  misc_feature (153)..(153): n includes a, c, g, or t, or contains no nucleotide
  misc_feature (176)..(219): n includes a, c, g, or t, or contains no nucleotide
  misc_feature (244)..(244): n includes a, c, g, or t, or contains no nucleotide
  misc_feature (273)..(321): n includes a, c, g, or t, or contains no nucleotide
gaacaaagcacctcaagtgcaaggaccaaagggggccctggcttggagtgggttggcttgctgatggctgctggaggggacgctggctaaagtgggnaggccttnnnnnnngcncancnnnngncccaggtgggnananngtcacccccactntgcataccctcatcaaaaacacnnnnnnnnnnnnnnnnnnnnnnnnnnnnnnnnnnnnnnnnnnnntgcaggcgactggaggcaggactcntgggtccctgggaaagagggtactagggnnnnnnnnnnnnnnnnnnnnnnnnnnnnnnnnnnnnnnnnnnnnnnnnnagaactgggtatgaggctggggcggggctggaggtggcgccccctggtgggacaacaaagaggacaccatttttccagagctgcagagagcacctggtggggaggaagaagtgtaactcaccagcctctgctctt

SEQ ID NO: 3336 - DNA, 415 bp, Homo sapiens
tcttggccaaaattcgcagtccccaacctccaatcactcaccaacctcctgtcctccaatttgtcctggttatcgctggatgtgtctgcggcgttttatcatattcctcttcatcctgctgctatgcctcatcttcttattggttcttctggactatcaaggtatgttgcccgtttgtcctctaattccaggatccacaacaaccagtacgggaccctgcaaaacctgcacgactcctgctcaaggcaactctatgtttccctcatgttgctgtacaaaacctacggatggaaattgcacctgtattcccatcccatcatcttgggctttcgcaaaattactgccagatgcaactcaattaaacccaccaggtgtctcccctcaggttagagtacctcatagaatccttgctacg

SEQ ID NO: 3337 - DNA, 451 bp, Homo sapiens
  misc_feature (247)..(247): n includes a, c, g, or t, or contains no nucleotide
  misc_feature (325)..(339): n includes a, c, g, or t, or contains no nucleotide
tgcaaccttaattcagctgaagtactttatatttcaaaagaatgaataacattgataataaaatcgctactttaaggggtttgtccaaaataaatattgtggccttatatatcacactattgtagaaagtattatttaatttaaatggatgcaggttgtctactaaagaaagattatatataactatgctaattgttcataatcaacagaaaccaagatagagctacaaactcagctgtacagttcntacactaaactcttcttgcttttgcattataaggaattaagtctccgattattaggtgatcaccctggatgatcagtnnnnnnnnnnnnnnncctactcagtatcttttcctctttatcactctgcattggtgaatttaatcctctcctttgtgttcaacttttgtgtgcttttaaaatcagctttattctaagcaaatctgtg

SEQ ID NO: 3338 - DNA, 164 bp, Homo sapiens
gacccactcagcgatgggaaatgaattggcttgtctagcccccctgctgggtgcttgttcagcccccactctgggctgtggagtgggtgggcaacgggcctgggtagctgggcccaggcaacccacccctccacctctggaggtcccaccaggctattaaaggg

SEQ ID NO: 3339 - DNA, 292 bp, Homo sapiens
  misc_feature (65)..(65): n includes a, c, g, or t, or contains no nucleotide
  misc_feature (106)..(106): n includes a, c, g, or t, or contains no nucleotide
  misc_feature (124)..(124): n includes a, c, g, or t, or contains no nucleotide
  misc_feature (162)..(162): n includes a, c, g, or t, or contains no nucleotide
  misc_feature (164)..(164): n includes a, c, g, or t, or contains no nucleotide
  misc_feature (174)..(210): n includes a, c, g, or t, or contains no nucleotide
  misc_feature (223)..(223): n includes a, c, g, or t, or contains no nucleotide
ccgacagtcctcaggtgctggggctgagcacctgttccttgagaatgatgttgcagaagcacttntgcaagagtctgaggaggcctctgagctcaagcctgtgganctggacacttcggaaggnaaacatcacaaagcagctggtcaagaggctcacatctncnagaggtgccnnnnnnnnnnnnnnnnnnnnnnnnnnnnnnnnnnnnnggtggagaatctnaaggctgcagatcctttctagatggaagcttagaggatgcttttaatgggcttttacttgcattagaac

SEQ ID NO: 3340 - DNA, 322 bp, Homo sapiens
ggaccacttacgtctgctccgtctgcccagcaaagtttgaccaaatcgagcagttcaacgaccacatgaggatgcatgtgtctgacggataagtagtatctttctctctttcttatgaacaaaacaaaacaacaacaaaaaacaaacaaacaaaaaagctatggcactagaatttaagaaatgttttggtttcatttttactttctgtttttgtttttgtttcgtttcattttgtactacatgaagaactgttttttgcctgctggtacattacatttccggaggcttgggtgaataatagttttcccagtctccctcggat

SEQ ID NO: 3341 - DNA, 584 bp, Homo sapiens
  misc_feature (41)..(41): n includes a, c, g, or t, or contains no nucleotide
  misc_feature (80)..(80): n includes a, c, g, or t, or contains no nucleotide
  misc_feature (109)..(109): n includes a, c, g, or t, or contains no nucleotide
  misc_feature (142)..(143): n includes a, c, g, or t, or contains no nucleotide
  misc_feature (145)..(145): n includes a, c, g, or t, or contains no nucleotide
  misc_feature (148)..(148): n includes a, c, g, or t, or contains no nucleotide
  misc_feature (151)..(166): n includes a, c, g, or t, or contains no nucleotide
  misc_feature (170)..(173): n includes a, c, g, or t, or contains no nucleotide
  misc_feature (177)..(178): n includes a, c, g, or t, or contains no nucleotide
  misc_feature (182)..(183): n includes a, c, g, or t, or contains no nucleotide
  misc_feature (185)..(190): n includes a, c, g, or t, or contains no nucleotide
  misc_feature (192)..(194): n includes a, c, g, or t, or contains no nucleotide
  misc_feature (196)..(200): n includes a, c, g, or t, or contains no nucleotide
  misc_feature (203)..(206): n includes a, c, g, or t, or contains no nucleotide
  misc_feature (208)..(211): n includes a, c, g, or t, or contains no nucleotide
  misc_feature (213)..(249): n includes a, c, g, or t, or contains no nucleotide
  misc_feature (527)..(541): n includes a, c, g, or t, or contains no nucleotide
tgggacctttcctccatccctgttgtccggagccagctcanctgtcttccacactggtgctaactggcccaggcactggnagtggaatagaatgcagctggaggctacncatggcctctgcagcacacgcagctggagaggnntnctntcnnnnnnnnnnnnnnnnggcnnnngggnnggcnngnnnnnncnnntnnnnnctnnnntnnnncnnnnnnnnnnnnnnnnnnnnnnnnnnnnnnnnnnnnngtggctgtggccctccctcgtggaggtgccgtgctttaaagaggccttagtgcccgggatgggcacagtgttttgaagggaggtgggagctcttgctctcctggtcactgcagaatgacagagaaggtgaagctccatgcatgtgtgcgcgggtgtatgtgcgctcagggtctctgtttaagtatcagctaaagatgtgcttcctccgtgtctgtcatacactgagaccaacaggctacagtgtccctgattcttggaaaagcctggagaagctgggnnnnnnnnnnnnnnnatgcctcggtataggaggctgtgttgagctgacattcaaatgg

SEQ ID NO: 3342 - DNA, 536 bp, Homo sapiens
  misc_feature (192)..(192): n includes a, c, g, or t, or contains no nucleotide
  misc_feature (210)..(210): n includes a, c, g, or t, or contains no nucleotide
  misc_feature (418)..(421): n includes a, c, g, or t, or contains no nucleotide
  misc_feature (425)..(432): n includes a, c, g, or t, or contains no nucleotide
  misc_feature (436)..(436): n includes a, c, g, or t, or contains no nucleotide
  misc_feature (471)..(471): n includes a, c, g, or t, or contains no nucleotide
  misc_feature (490)..(490): n includes a, c, g, or t, or contains no nucleotide
  misc_feature (494)..(494): n includes a, c, g, or t, or contains no nucleotide
aatcaaagggcattgtcctgttttggattaacaaaacaggaaaaataaccaatccttgtaaaattatttgaaattttcttgtttttatcagttgagtgcctatagatgcacatacaaaaacaactgccatttttgtatataatagtcttccaagatagagatttacattaggagagaattaaacatccaggngggatgaacagtatttcntgtgtgctatgtagtgttttgcttcattgagagtcattttcatgaattatttttactactgcagtcatcttaaatttataatcatctcaaaaaagatgtcacaatgaacagacaaccatctgtgaggtcagtcattttgcatgatgtatgtaatcaaaaagtttgaaatgtctgcttactaataaagaatgttttcactgaaacttannnnaaannnnnnnnaaantttctttgatttgtagttttgagtcctgaatagantgttttaacatgaataacntttncctgtgggtttaaatttcccttgggcggcacctttgtacagg

SEQ ID NO: 3343 - DNA, 297 bp, Homo sapiens
  misc_feature (85)..(137): n includes a, c, g, or t, or contains no nucleotide
gcagacctggctgtggccgccttcaccatcacagctgagcgggagaaggtcatcgacttttccaagccctttatgaccctggggnnnnnnnnnnnnnnnnnnnnnnnnnnnnnnnnnnnnnnnnnnnnnnnnnnnnncctggaccccttctcccctgctgtgtggctcttcatgcttcttgcctacctggctgtcagctgcgtcctgtttctggctgccagctgagcccctatgagtggtataacccacacccattgcctgcggcacgcccccacatcctggagaaccagtacacgc

SEQ ID NO: 3344 - DNA, 532 bp, Homo sapiens
  misc_feature (154)..(240): n includes a, c, g, or t, or contains no nucleotide
  misc_feature (247)..(247): n includes a, c, g, or t, or contains no nucleotide
  misc_feature (254)..(254): n includes a, c, g, or t, or contains no nucleotide
tccccaggcaggtttcagctgattggcagcaggctccctgagtgatgagcttgaacctgtggtgtttctgggcagaagcttatcttttttgagagtgtccgaagatgaaggcatggcgatgcccgtcctctggcttgggttaattcttcggtgnnnnnnnnnnnnnnnnnnnnnnnnnnnnnnnnnnnnnnnnnnnnnnnnnnnnnnnnnnnnnnnnnnnnnnnnnnnnnnnnnnnnnnncctctgncttgggntaattcttcggtgacactggcgttgctgggtggcgatgcccgtcctctggcttgggttaattcttggatgacgtcggcgttgctgggagaatgtgccgttcctgccctgcctccacccacctcgggagcagaagcccggcctggacacccctcggcctggacacccctcgaaggagagggcgcttccttgagtaggtgggctccccttgcccttccctccctatcactccatactggggtgggctggaggaggccacaggccagctattgtaaaagct

SEQ ID NO: 3345 - DNA, 311 bp, Homo sapiens
  misc_feature (131)..(145): n includes a, c, g, or t, or contains no nucleotide
  misc_feature (204)..(229): n includes a, c, g, or t, or contains no nucleotide
cagaagtgcctctccgcagggacctgcccctgctcctattccggactcagacctctgaccctgcaatgctgcctaccatgattggcctcctggcagaggcaggcgtgcggctgctgtcctaccagacttcnnnnnnnnnnnnnnnggagacctggcacgtcatgggcatctcctccttgctgcccagcctggaagcgtggaagnnnnnnnnnnnnnnnnnnnnnnnnnnccacttctaaccttggagctcactggtccctgcctctggggcttttctgaagaaacccacccactgtgatcaatagggagag

SEQ ID NO: 3346 - DNA, 418 bp, Homo sapiens
tgaaactccttgtgctagctgtgctgctcacagtggccgccgccgacagcggcatcagccctcgggccgtgtggcagttccgcaaaatgatcaagtgcgtgatcccggggagtgaccccttcttggaatacaacaactacggctgctactgtggcttggggggctcaggcacccccgtggatgaactggacaagtgctgccagacacatgacaactgctacgaccaggccaagaagctggacagctgtaaatttctgctggacaacccgtacacccacacctattcatactcgtgctctggctcggcaatcacctgtagcagcaaaaacaaagagtgtgaggccttcatttgcaactgcgaccgcaacgctgccatctgcttttcaaaagctccatataacaaggcacacaagaacct

SEQ ID NO: 3347 - DNA, 285 bp, Homo sapiens
caaaggactctcataacagtctgattcttatgagttgggcatcctgtgtttccctttaggggcctgcttccttcaaatagaggagatgggtgctatgaaacctattcactctggacttgggatggctcttctccatcttcccaagtctgagctggagcctccatgcccaactctgctctgctcttctatttcctgacagcagctaaggcatgttcctgttctgcccccaaattgaccttactaacagtgagaacttggaggagtcttcgggtcttgggaaatcca

SEQ ID NO: 3348 - DNA, 406 bp, Homo sapiens
  misc_feature (26)..(61): n includes a, c, g, or t, or contains no nucleotide
  misc_feature (234)..(248): n includes a, c, g, or t, or contains no nucleotide
acaccaagaagattaaccctgagaannnnnnnnnnnnnnnnnnnnnnnnnnnnnnnnnnnncatggtggaaaagatgatgtatgaccagcgacagaagtccatggggctgccaacttcagacgaacagaagaaacaggagattctgaagaagttcatggatcaacatccggagatggatttttccaaggctaaattcaactagcccctgttttttcctccctgaactcttgggnnnnnnnnnnnnnnncccaactttctttcccactcttctctgggacttgtgggcctcagggcttggggcaggcatgggactggcccaggcacacaggtcccggggcatcaggagaaaggctgggtcttgggaccttgtcctccccagttggcctactgttacacattaaaacg

SEQ ID NO: 3349 - DNA, 432 bp, Homo sapiens
  misc_feature (57)..(57): n includes a, c, g, or t, or contains no nucleotide
  misc_feature (62)..(62): n includes a, c, g, or t, or contains no nucleotide
  misc_feature (64)..(64): n includes a, c, g, or t, or contains no nucleotide
  misc_feature (74)..(74): n includes a, c, g, or t, or contains no nucleotide
  misc_feature (82)..(82): n includes a, c, g, or t, or contains no nucleotide
  misc_feature (91)..(91): n includes a, c, g, or t, or contains no nucleotide
  misc_feature (108)..(108): n includes a, c, g, or t, or contains no nucleotide
  misc_feature (155)..(155): n includes a, c, g, or t, or contains no nucleotide
  misc_feature (161)..(161): n includes a, c, g, or t, or contains no nucleotide
gaatgaattctggtggtttaccccaagtcacagttaggacggtagatggtgagatcncagangncgctattatnctagattncagtgttancattttcgatgtttatncactcagtgggtttttattaatatgctgattaagttatttactgggnccagtncattgtgctaaatagttgctcttttgtgtttcattgccttgatgtttgagtgtaatctagcattttaatacagtgtttattttgcatgatctttaacaaatgttttaagcaattttaaaaaggcaggatgttattgacattatacactgaagtcttaacattttaacatttatagtgcttatttgcaaaattgtataattaggaattatttcagagacaatgttttctttttcaggtgagtagttgccgcgtaatatcattggagtacatt

SEQ ID NO: 3350 - DNA, 578 bp, Homo sapiens
  misc_feature (44)..(44): n includes a, c, g, or t, or contains no nucleotide
  misc_feature (49)..(49): n includes a, c, g, or t, or contains no nucleotide
  misc_feature (73)..(73): n includes a, c, g, or t, or contains no nucleotide
  misc_feature (77)..(77): n includes a, c, g, or t, or contains no nucleotide
  misc_feature (79)..(79): n includes a, c, g, or t, or contains no nucleotide
  misc_feature (105)..(105): n includes a, c, g, or t, or contains no nucleotide
  misc_feature (122)..(122): n includes a, c, g, or t, or contains no nucleotide
  misc_feature (124)..(124): n includes a, c, g, or t, or contains no nucleotide
  misc_feature (128)..(143): n includes a, c, g, or t, or contains no nucleotide
  misc_feature (203)..(203): n includes a, c, g, or t, or contains no nucleotide
  misc_feature (219)..(219): n includes a, c, g, or t, or contains no nucleotide
  misc_feature (491)..(553): n includes a, c, g, or t, or contains no nucleotide
agcctctgcactcaatgcctggcgagggcaacgggacaatgctnggggntgccactgaggagttcatcaagcngggntnaggtgaatgggcttgcagcccagggnaagtatgaaggcagtgnanaagnnnnnnnnnnnnnnnnacagtcactctacattgccaaccatgcctactgagtatccactccataccacagcccttngcccagccatctgcancccacttttgcttgtagtcatggccagggccaaatagctatgcagagcagagatgccttcacctggcaccaacttgtcttcctttctctcttcccttcccctctctcattgctgcacctgggaccataggatgggaggatagggagcccctcatgactgagggcagaagaaattgctagaagtcagaacaggatggctgggtctccccctacctcttccagctcccacaattttcccatgatgaggtagcttctccctgggctctccttctnnnnnnnnnnnnnnnnnnnnnnnnnnnnnnnnnnnnnnnnnnnnnnnnnnnnnnnnnnnnnnntaccatacagcaaataaatggtagc

SEQ ID NO: 3351 - DNA, 547 bp, Homo sapiens
  misc_feature (86)..(87): n includes a, c, g, or t, or contains no nucleotide
  misc_feature (122)..(122): n includes a, c, g, or t, or contains no nucleotide
  misc_feature (192)..(192): n includes a, c, g, or t, or contains no nucleotide
  misc_feature (366)..(367): n includes a, c, g, or t, or contains no nucleotide
  misc_feature (404)..(442): n includes a, c, g, or t, or contains no nucleotide
  misc_feature (489)..(489): n includes a, c, g, or t, or contains no nucleotide
  misc_feature (491)..(491): n includes a, c, g, or t, or contains no nucleotide
  misc_feature (503)..(503): n includes a, c, g, or t, or contains no nucleotide
cagccaagttcactgtcacgggggaaggagccaccagccagtcctcagatttcagagactgcggaggggcttggcagacggtcttnnccaagggctgtggtggcattggccgagggtcttcnggtgcttcccagcacaagctgcccttgctgtcctgtgcagtgaagggagaggccctgggtgggggacacntcagagtgggagcacatcccagcagtgcccatgtagcaggagcacagtggatggccttgtgtccctcgggcatgacaggcagaaacgagggctgctccaggagaagggcctcctgctggccagagcaaggaaggctgagcagcttggttctcccctctggcccctggagagaanngggagcattcctagacccctgggtgcttgtctgcacnnnnnnnnnnnnnnnnnnnnnnnnnnnnnnnnnnnnnnnggagggtctggtcccacgccgcctctgctcagaccactgtgtgggangngcacagcacagnctgcgggtaaagtgtgagagcttgccatccagctcacgaagaca

SEQ ID NO: 3352 - DNA, 511 bp, Homo sapiens
  misc_feature (27)..(51): n includes a, c, g, or t, or contains no nucleotide
  misc_feature (136)..(136): n includes a, c, g, or t, or contains no nucleotide
  misc_feature (146)..(168): n includes a, c, g, or t, or contains no nucleotide
  misc_feature (173)..(173): n includes a, c, g, or t, or contains no nucleotide
  misc_feature (175)..(187): n includes a, c, g, or t, or contains no nucleotide
  misc_feature (189)..(189): n includes a, c, g, or t, or contains no nucleotide
ccacaggtgtattgtacgagcattgannnnnnnnnnnnnnnnnnnnnnnnnccaccttcttactttaaaaccagtcaagtttttggaaggcgagcttattcatgatcttttaaccatttttgtgagtgctaaattnggcatcatannnnnnnnnnnnnnnnnnnnnnntaaanannnnnnnnnnnnntncacttggcctgttacatgaacagaatatggcaaaaatgagactacttacttttatgggaatggcagtagaaaataaggaaatttcttttgacacaatgcagcaagaacttcagattggagctgatgatgttgaagcatttgttattgacgccgtaagaactaaaatggtctactgcaaaattgatcagacccagagaaaagtagttgtcagtcatagcacacatcggacatttggaaaacagcagtggcaacaactgtatgacacacttaatgcctggaaacaaaatctgaacaaagtgaaaaacagccttttgagtctttc

SEQ ID NO: 3353 - DNA, 298 bp, Homo sapiens
  misc_feature (28)..(55): n includes a, c, g, or t, or contains no nucleotide
  misc_feature (175)..(175): n includes a, c, g, or t, or contains no nucleotide
gctttgtgtctagttttctagacccttnnnnnnnnnnnnnnnnnnnnnnnnnnnnaaatgtgaagactagaccaattgtcatgcttgacacaactgctgtggctggttggtgctttgtttatggtagtagtttttctgtaacacagaatataggataagaaataagaataaagtnccttgactttgttcacagcatgtagggtgatgagcactcacaattgttgactaaaatgctgcttttaaaacataggaaagtagaatggttgagtgcaaatccatagcacaagataaattgagc

SEQ ID NO: 3354 - DNA, 337 bp, Homo sapiens
tcccgtactgaagttcgtgcgcaacgtgccctgggaatttggcgacgtaattcccgactatgtgctgggccagagcacctgtgccctgttcctcagcctccgctaccacaacctgcacccagactacatccatgggcggctgcagagcctggggaagaacttcgccttgcgggtcctgcttgtccaggtggatgtgaaagatccccagcaggccctcaaggagctggctaagatgtgtatcctggccgactgcacattgatcctcgcctggagccccgaggaagctgggcggtacctggagacctacaaggcctatgagcagaaaccagcggacctc

SEQ ID NO: 3355 - DNA, 357 bp, Homo sapiens
  misc_feature (141)..(167): n includes a, c, g, or t, or contains no nucleotide
aaaggctgaacatcaatgcggccaaatctagtttcctcccagaagatgaaaagagggagcttctcgacctgctctataaagcctatgggatgccaccttcagcctctgcagggcagaacctctgaagacgccactcctccnnnnnnnnnnnnnnnnnnnnnnnnnnnactctgtggggctgagcaacatttttacatttattccttccaagaagaccatgatctcaatagtcagttactgatgctcctgaaccctatgtgtccatttctgcacacacgtatacctcggcatggccgcgtcacttctctgattatgtgccctggccagggaccagcgcccttgcacatgggcatggtt

SEQ ID NO: 3356 - DNA, 483 bp, Homo sapiens
  misc_feature (178)..(178): n includes a, c, g, or t, or contains no nucleotide
  misc_feature (188)..(212): n includes a, c, g, or t, or contains no nucleotide
gacaagggcttctgaggccagccatgcccacgcccctccccagcccccacccatgccagcgcagcgccagggctcagatggggcctgggctgttgtgtctggagcctgcaggcaggtgggggctgcgtccctgctcagcccatcccctgcctctatccctggccacctgccaggcctnccctccggcnnnnnnnnnnnnnnnnnnnnnnnnnggccctccagcaggaggacagagtgccctggggcatccaccttcctgcccaggggacgtggcgctgtcggtgtttggaggctgctgccccctggctttggcgccccatgggccctcagcgtctccccatgctgggctcactacatgggccagcccttgctctacctggccggtaggctgctggcgcctaggttgtgttgagagggggatgcccctggccctgcctcactgtgacctgctcctgcccacgtgcagcacctgtcaccttttct

SEQ ID NO: 3357 - DNA, 413 bp, Homo sapiens
  misc_feature (26)..(26): n includes a, c, g, or t, or contains no nucleotide
  misc_feature (230)..(231): n includes a, c, g, or t, or contains no nucleotide
taacagggaccagctctccgctttgnccccacggggttcctctaaccagaaccagcttcctagcctcgtagagaccaaaggccgcccccgcctgctggggttcctcccagcaccccagcttgctggctgccctctttgccttctggcctccagctgggtgtgggggggcggagcaaggcgggggacagacgcagcaccttcttagcgatctaggcctggcaagagctctnngccccaaggcctcctcttcccaggggctgccaagtcctggccctggccctggcatatcaccccgcactgtggggccaggcaccactagcctggctcaaatattccccagggagactgctgtgtgctgcccgcctgcctgctggctctcccccagccccacatcccctctggaagagaatgta

SEQ ID NO: 3358 - DNA, 566 bp, Homo sapiens
  misc_feature (37)..(37): n includes a, c, g, or t, or contains no nucleotide
  misc_feature (51)..(51): n includes a, c, g, or t, or contains no nucleotide
  misc_feature (73)..(73): n includes a, c, g, or t, or contains no nucleotide
  misc_feature (80)..(80): n includes a, c, g, or t, or contains no nucleotide
  misc_feature (83)..(83): n includes a, c, g, or t, or contains no nucleotide
  misc_feature (91)..(91): n includes a, c, g, or t, or contains no nucleotide
  misc_feature (102)..(102): n includes a, c, g, or t, or contains no nucleotide
  misc_feature (132)..(132): n includes a, c, g, or t, or contains no nucleotide
  misc_feature (151)..(152): n includes a, c, g, or t, or contains no nucleotide
  misc_feature (156)..(156): n includes a, c, g, or t, or contains no nucleotide
  misc_feature (161)..(161): n includes a, c, g, or t, or contains no nucleotide
  misc_feature (166)..(166): n includes a, c, g, or t, or contains no nucleotide
  misc_feature (173)..(174): n includes a, c, g, or t, or contains no nucleotide
  misc_feature (178)..(178): n includes a, c, g, or t, or contains no nucleotide
  misc_feature (182)..(182): n includes a, c, g, or t, or contains no nucleotide
  misc_feature (187)..(187): n includes a, c, g, or t, or contains no nucleotide
  misc_feature (192)..(192): n includes a, c, g, or t, or contains no nucleotide
  misc_feature (202)..(202): n includes a, c, g, or t, or contains no nucleotide
  misc_feature (219)..(219): n includes a, c, g, or t, or contains no nucleotide
  misc_feature (230)..(230): n includes a, c, g, or t, or contains no nucleotide
  misc_feature (246)..(246): n includes a, c, g, or t, or contains no nucleotide
  misc_feature (289)..(289): n includes a, c, g, or t, or contains no nucleotide
  misc_feature (352)..(352): n includes a, c, g, or t, or contains no nucleotide
  misc_feature (411)..(441): n includes a, c, g, or t, or contains no nucleotide
  misc_feature (443)..(443): n includes a, c, g, or t, or contains no nucleotide
  misc_feature (449)..(458): n includes a, c, g, or t, or contains no nucleotide
  misc_feature (460)..(460): n includes a, c, g, or t, or contains no nucleotide
  misc_feature (462)..(475): n includes a, c, g, or t, or contains no nucleotide
  misc_feature (477)..(477): n includes a, c, g, or t, or contains no nucleotide
  misc_feature (479)..(479): n includes a, c, g, or t, or contains no nucleotide
  misc_feature (481)..(485): n includes a, c, g, or t, or contains no nucleotide
  misc_feature (487)..(488): n includes a, c, g, or t, or contains no nucleotide
  misc_feature (490)..(493): n includes a, c, g, or t, or contains no nucleotide
  misc_feature (496)..(496): n includes a, c, g, or t, or contains no nucleotide
  misc_feature (500)..(500): n includes a, c, g, or t, or contains no nucleotide
  misc_feature (508)..(528): n includes a, c, g, or t, or contains no nucleotide
  misc_feature (530)..(534): n includes a, c, g, or t, or contains no nucleotide
gctgcgggcaggtgtgcatatcaagctgcccaacctngggcaagcatgagnaagttctcggaggtgcttaagncggctgncgnacttcagnaagcgaggcancaggcggtgtggacacggctgcggtgggcnggggtcttcgacgtctccnnaacngctgnaccgncctgggnncttnctcnagagngtggnagctggtgcnagatggtggtggacggnagtgaagctgnctcatcgagatggaancagcggctggagcagggccaggccatcgacgacctcatgcctngcccagaaatgaagcccggcccacacccgacaccagccctgctgcttcctaacttattgcctnggcagtgcccaccatgcacccctgatgttcgccgtctggcgagcccttagccttgctgnnnnnnnnnnnnnnnnnnnnnnnnnnnnnnntntttttnnnnnnnnnnanannnnnnnnnnnnnnananannnnngnntnnnngcntgcnaaaaaaannnnnnnnnnnnnnnnnnnnnannnnngagggggaagggcagcagccaggccccaggag

SEQ ID NO: 3359 - DNA, 457 bp, Homo sapiens
  misc_feature (264)..(264): n includes a, c, g, or t, or contains no nucleotide
gttgtgccctctgagtgtctggctgatcacatcagagaggtctgcgtggcagtttggggctgtcacgtgaccagtgacccacactctctgctgcccagtactgccaagtggggagggtcctgcctttttctctgccccaggtctgggacgcaggtgatgccagccaggcccaggagtgcccagcatcccccaactgatgacacagtagcactgattctgtcttttcctcagaatctggcctttttccatggcaatgaggtgggncccagcctcctctaaagtgactttgtttctgcacagttgtaactgctcttggggatgtcagtgaggctgggagcagggagccacgggatgctgagagaggaggcccgagaggacaccccaccctccagcgtggcctttgatccagacttagggacgaggctgtcactggtgggcaccctctgttcctgtttgt

SEQ ID NO: 3360 - DNA, 353 bp, Homo sapiens
ttcacagttctgtaatgtaggcacttttattttcattgtgatttatatataaggtaatgtagggttatatttgggagtgactgcaagcatttttccatctgtgtgcaactaactgactctgttattgatcccttctcctgccctttcccaggtaatttaaattggtcatggtagatttttttcatagatttgaaaaacttttaggttgttaccaagtatgaagtataaatctggggaagaggttttatttacattttagggtgggtaagaaagccaccttgttacaaattttttaatttccaaaataatctatattaaatgagggtttctgatctgtactttgtgtttagcta

SEQ ID NO: 3361 - DNA, 419 bp, Homo sapiens
  misc_feature (36)..(36): n includes a, c, g, or t, or contains no nucleotide
  misc_feature (41)..(41): n includes a, c, g, or t, or contains no nucleotide
  misc_feature (53)..(53): n includes a, c, g, or t, or contains no nucleotide
  misc_feature (215)..(215): n includes a, c, g, or t, or contains no nucleotide
  misc_feature (369)..(384): n includes a, c, g, or t, or contains no nucleotide
agtcattttagtgatgagctgccagtccattcccanggccnaggctgtcgctnggccatccattcagtcgattcagtcataggcgaatctgttctgcccgaggcttgtggtcaagcaaaaattcagccctgaaatcaggcacatctgttcgttggactaaacccacaggttagttcagtcaaagcaggcaacccccttgtgggcactgaccctgnccactggggtcatggcggttgtggcagctggggaggtttggccccaacagccctcctgtgcctgcttccctgtgtgtcggggtcctccagggagctgacccagaggtggaggccacggaggcagggtctctggggactgtcggggggtacagannnnnnnnnnnnnnnnagagctccctggcaatacccccttgtgtaattgct

SEQ ID NO: 3362 - DNA, 308 bp, Homo sapiens
caacaaaagtgacagtcctgcatagcctcccaaagggaccccctctgaaggggctaggctcatctggacataccttagtctcataaccccagcttggcactggggaagtgctttatgatgaaaaccagacgtagtcccgtgaactagatatttcgttactcctgacttcacctacttactgtccaccaccaccttcacttcttattaacctcgacatatagccctcatcaaagctgggcagatttgctgtctcagacccgtcccatcttctgcctctcctatgcctttgcttggctgcgcccctttgt

SEQ ID NO: 3363 - DNA, 561 bp, Homo sapiens
  misc_feature (32)..(93): n includes a, c, g, or t, or contains no nucleotide
  misc_feature (109)..(109): n includes a, c, g, or t, or contains no nucleotide
  misc_feature (190)..(248): n includes a, c, g, or t, or contains no nucleotide
cactgtgggtgaagcgcctcagttacacaggnnnnnnnnnnnnnnnnnnnnnnnnnnnnnnnnnnnnnnnnnnnnnnnnnnnnnnnnnnnnnnggtctgagctggacgntcgcggtgtgtcctctgtgcccacggtctgagctagctagcgcaccgccgagttaaagaggagaaggaaaacatgctgctnnnnnnnnnnnnnnnnnnnnnnnnnnnnnnnnnnnnnnnnnnnnnnnnnnnnnnnnnnntcaccaggcccacgaggagcagcagcgctcggcccggagcagcaggaaggcccctctgtggagcgcccgccgtctgctccggggtggttcagtcactgcttgttgacatcaacatggcaattgcactcatgtggactgggaccgtgcgagctgccgtgtgggttagtcgggtgccaggacaatgaaatactccagcacgtgtggctgacgaatttgtttctacagaaataacagctggggacaactgcggtgatgatgtaaaaaccttcccataaaatgtaagaaaagctgatgaggctggtgacgttcagcc

SEQ ID NO: 3364 - DNA, 486 bp, Homo sapiens
  misc_feature (27)..(29): n includes a, c, g, or t, or contains no nucleotide
  misc_feature (33)..(33): n includes a, c, g, or t, or contains no nucleotide
  misc_feature (118)..(170): n includes a, c, g, or t, or contains no nucleotide
  misc_feature (321)..(339): n includes a, c, g, or t, or contains no nucleotide
  misc_feature (368)..(368): n includes a, c, g, or t, or contains no nucleotide
acatggtgtctgagaacatgctgtgtnnnggcntcctcggggaccggcaggatgcctgcgagggcgacagtggggggcccatggtcgcctccttccacggcacctggttcctggtggnnnnnnnnnnnnnnnnnnnnnnnnnnnnnnnnnnnnnnnnnnnnnnnnnnnnnaccaaagtcagccgctacctcgactggatccatgggcacatcagagacaaggaagccccccagaagagctgggcaccttagcgaccctccctgcagggctgggcttttgcatggcaatggatgggacattaaagggacatgtaacaagcannnnnnnnnnnnnnnnnnnccttccatccctcttttgggctcttctgnagggaagtaacatttactgagcacctgttgtatgtcacatgccttatgaatagaatcttaactcctagagcaactctgtggggtggggaggagcagatccaagttttgcggggtctaa

SEQ ID NO: 3365 - DNA, 137 bp, Homo sapiens
  misc_feature (44)..(44): n includes a, c, g, or t, or contains no nucleotide
  misc_feature (75)..(75): n includes a, c, g, or t, or contains no nucleotide
cgcctgccaaggaggccaccagagggcagtgcaggcttctgccngggccccaggccctgcctgtgttgaaagctntggggactgggccagggaagctcctcctcagctttgagctgtggctgccacccatggggctc

SEQ ID NO: 3366 - DNA, 548 bp, Homo sapiens
  misc_feature (51)..(51): n includes a, c, g, or t, or contains no nucleotide
  misc_feature (60)..(82): n includes a, c, g, or t, or contains no nucleotide
  misc_feature (390)..(390): n includes a, c, g, or t, or contains no nucleotide
  misc_feature (458)..(458): n includes a, c, g, or t, or contains no nucleotide
  misc_feature (467)..(467): n includes a, c, g, or t, or contains no nucleotide
  misc_feature (473)..(473): n includes a, c, g, or t, or contains no nucleotide
  misc_feature (488)..(488): n includes a, c, g, or t, or contains no nucleotide
agataaacagtaactcagcgtaagtgacctgtggatcatcagtagtacccnaagcatggnnnnnnnnnnnnnnnnnnnnnnngctttagtttatctcagtcctggatgggagagagagggaggagtaaaactgggcaagacaaagagccctggatcgttgaattgatagtttaatttctgctgttggctgttaataatttggattatttatgtttataaatgatacagatctgtttacaaggtttgtagatactttttttgttcctgttcatagatgggaagcttccttataactgatgcagagaaaaattagtccttcaaatactgctgtattttcaggaaaaaaaaaaaaaggggtgtttctattgaaactgtactaaatttttgccnacaatttaccttgttaaatattgtagataaattgctaatactaatagccaaatagataacactaatgnctttgtttnaaaaancgaaaaaaacaaaanaaaacaaaaaaacatgagcagtggtgttctaatgaagttatgacatctgtcctaattagt

SEQ ID NO: 3367 - DNA, 601 bp, Homo sapiens
  misc_feature (32)..(68): n includes a, c, g, or t, or contains no nucleotide
  misc_feature (73)..(73): n includes a, c, g, or t, or contains no nucleotide
  misc_feature (75)..(75): n includes a, c, g, or t, or contains no nucleotide
  misc_feature (78)..(79): n includes a, c, g, or t, or contains no nucleotide
  misc_feature (82)..(86): n includes a, c, g, or t, or contains no nucleotide
  misc_feature (89)..(89): n includes a, c, g, or t, or contains no nucleotide
  misc_feature (469)..(473): n includes a, c, g, or t, or contains no nucleotide
  misc_feature (475)..(475): n includes a, c, g, or t, or contains no nucleotide
  misc_feature (479)..(479): n includes a, c, g, or t, or contains no nucleotide
  misc_feature (481)..(483): n includes a, c, g, or t, or contains no nucleotide
ttgttctcacccaggccaataagctgggtgtnnnnnnnnnnnnnnnnnnnnnnnnnnnnnnnnnnnnnttttncnaannaannnnnttnaaaaaaaaaaattataagacatggactagtcctcattagcatgtttgcatagcaaccagtcaagagcatttacactatttctgctgatatactcaccttagaactgctcagaaccctggtgctttatttttgttttaatcttttgttgccagtgatgattttcctattctgcaaatagtgtatttcctggattacacatagtatggtttcctgaagtattctgataaatgtgttttttaaaacctcaatatactttttagaaaaggagcatctggttatgcataaagcagagctaaaactaaatttctttcatgtcctccctacttcctcagtgtcaatcagattaaagtgtgtaatcctaaaaaaaaaaaaaaaaaaannnnnanaaanannngcttaaaatttagtttattttttgtgtcttaggattcctgagtaaataactacatctcccaactgctacatgggttttaccagatattaataaaaatgggatccctggctttaactat

SEQ ID NO: 3368 - DNA, 494 bp, Homo sapiens
cttaggctgttaacccagtcactccacctttgacacattactagtaacaagaggggaccacatagtctctgttggcatttctttgtggtgtctgtctggacatgcttcctaaaaacagaccattttccttaacttgcatcagttttggtctgccttatgagttctgttttgaacaagtgtaacacactgatggttttaatgtatcttttccacttattatagttatattcctacaatacaattttaaaattgtctttttatattatatttatgcttctgtgtcatgattttttcaagctgttatattagttgtaaccagtagtattcacattaaatcttgctttttttccccttaaaaaaagaaaaaaattaccaaacaataaacttggctagaccttgttttgaggattttacaagacctttgtagcgattagattttttttctacattgaaaatagaaactgcttcctttcttctttccagtcagctattgg

SEQ ID NO: 3369 - DNA, 534 bp, Homo sapiens
  misc_feature (26)..(26): n includes a, c, g, or t, or contains no nucleotide
  misc_feature (135)..(135): n includes a, c, g, or t, or contains no nucleotide
  misc_feature (194)..(213): n includes a, c, g, or t, or contains no nucleotide
  misc_feature (227)..(241): n includes a, c, g, or t, or contains no nucleotide
  misc_feature (396)..(434): n includes a, c, g, or t, or contains no nucleotide
cattagtcctgtggtctagagtacantttccatttaaaacatttttaatagatcttctgtatggcatggacagcttctagtgggaattagtatatagtctgttcttgatgaagacaacactagacagatgttgcntgatgcctggataatgctgaatgtgacaaaaccagcgagacacattaagatatttctcnnnnnnnnnnnnnnnnnnnncaactataaagcgnnnnnnnnnnnnnnncaatagtatatctgctaatgtaaagttataccctgtaaggtagactttatcttcaagatatgaattaagatccttcaacagtgtgtggatgtcatttttactggagtgcccatctacttgagtgaccctgtattctaaccactgctgaacgattnnnnnnnnnnnnnnnnnnnnnnnnnnnnnnnnnnnnnnnttggcttgcttgactagatgagctgctatagtagtcaatcctgttagacttggaccattgtttgtctgaagaactggaatctgtcgctcgccctgagcac

SEQ ID NO: 3370 - DNA, 416 bp, Homo sapiens
  misc_feature (27)..(27): n includes a, c, g, or t, or contains no nucleotide
  misc_feature (110)..(110): n includes a, c, g, or t, or contains no nucleotide
  misc_feature (134)..(217): n includes a, c, g, or t, or contains no nucleotide
  misc_feature (222)..(222): n includes a, c, g, or t, or contains no nucleotide
  misc_feature (282)..(335): n includes a, c, g, or t, or contains no nucleotide
gccagcaagtggacctggccagtgtgntgacgccggagataatggctcccatcctcgccaacgcggatgtccaggagcgcctgcttccctacttgccatctggggagtcnctgccgcagaccgcggatgagatnnnnnnnnnnnnnnnnnnnnnnnnnnnnnnnnnnnnnnnnnnnnnnnnnnnnnnnnnnnnnnnnnnnnnnnnnnnnnnnnnnnnccccntcatgtgccagttcggtctgcctgcagaggctgtggaggccgccaacaagggcgatgtgnnnnnnnnnnnnnnnnnnnnnnnnnnnnnnnnnnnnnnnnnnnnnnnnnnnnnncgacacgaaggacaagaaggacgaagaggaggacatgagcctggactgagccacgcgccgtcctccgaggaactgggcgct

SEQ ID NO: 3371 - DNA, 488 bp, Homo sapiens
  misc_feature (87)..(87): n includes a, c, g, or t, or contains no nucleotide
  misc_feature (96)..(96): n includes a, c, g, or t, or contains no nucleotide
  misc_feature (110)..(110): n includes a, c, g, or t, or contains no nucleotide
  misc_feature (113)..(113): n includes a, c, g, or t, or contains no nucleotide
  misc_feature (119)..(119): n includes a, c, g, or t, or contains no nucleotide
  misc_feature (123)..(123): n includes a, c, g, or t, or contains no nucleotide
  misc_feature (135)..(221): n includes a, c, g, or t, or contains no nucleotide
  misc_feature (238)..(238): n includes a, c, g, or t, or contains no nucleotide
  misc_feature (282)..(306): n includes a, c, g, or t, or contains no nucleotide
  misc_feature (329)..(347): n includes a, c, g, or t, or contains no nucleotide
caagcaggagcttaagatgggcaagacctggggccctgggcagacgcatcaaagcaggcagaagcaggcatggccagcaggaagacnaagaagaanggaagggggtgccntcngggccnagangagcctcatccnnnnnnnnnnnnnnnnnnnnnnnnnnnnnnnnnnnnnnnnnnnnnnnnnnnnnnnnnnnnnnnnnnnnnnnnnnnnnnnnnnnnnnnacaaggaggacctgaanggacacctatgcctccctgggcaagaccaacgtcaaggacgacnnnnnnnnnnnnnnnnnnnnnnnnncctcggggcccatcaacttcacnnnnnnnnnnnnnnnnnnnggggagaagctgagcggtaccgacgccgaggagaccattcttaacgccttcaagatgctggacccggacgggaaagggaaaatcaacaaggagtacatcaagcgtctgctgatgtcccaggctgacaagatgacggcggaa

SEQ ID NO: 3372 - DNA, 433 bp, Homo sapiens
  misc_feature (235)..(235): n includes a, c, g, or t, or contains no nucleotide
  misc_feature (358)..(359): n includes a, c, g, or t, or contains no nucleotide
agctgtcccaaagagggaaagcggtgaggtttgaggaggggcagaagcagggccggcaaaggttgtaccttcataaggtggtatggggggttggggtcaggccctgaacatcgtcctacttgagaatctgtcaggggaaaaagtcaaggggagcaggaggaagagccaggagggccagaggcagagaagagatggagtcttaggggccagggtgagcgaggggtccagggcctanaggtgcttcctgggggcgggggaatgcagccagtgtccccctcccctcttccaccccagctccagccctggtcttgtcttttcatccctcttccccacgacagaagaagttgtggccctggcnntgtcatcgtgttcctgtgtcccctgcatgtaccccaccctccaccccttccttttgcgcggaccccattacaat

SEQ ID NO: 3373 - DNA, 581 bp, Homo sapiens
  misc_feature (80)..(82): n includes a, c, g, or t, or contains no nucleotide
  misc_feature (294)..(357): n includes a, c, g, or t, or contains no nucleotide
  misc_feature (391)..(394): n includes a, c, g, or t, or contains no nucleotide
  misc_feature (396)..(397): n includes a, c, g, or t, or contains no nucleotide
  misc_feature (403)..(404): n includes a, c, g, or t, or contains no nucleotide
  misc_feature (406)..(406): n includes a, c, g, or t, or contains no nucleotide
  misc_feature (411)..(411): n includes a, c, g, or t, or contains no nucleotide
ctcgttagtgtatttcttgagctgttttcatgttgtttatttcctgtctgtgaaatggtgtttttttttttgttgttggnnnttttttttttttttttttaacttgggaccaccaagttgtaaagatgtatgtttttacctgacagttataccacaggtagactgtcaagttgagaagagtgaatcaataacttgtatttgttttaaaaattaaattaatccttgataagagttgctttttttttttaggagttagtccttgaccactagtttgatgccatctccattttgggnnnnnnnnnnnnnnnnnnnnnnnnnnnnnnnnnnnnnnnnnnnnnnnnnnnnnnnnnnnnnnnntaaattgcttttctacataaaaaaaaaaaaaaannnnannaaaaannanaaaanatccatcaaacaccagtctctggcttctagaagagtccttcagatgacagttgttgtccatggtctttgactatcaagagcagaattaaatgtaatagtcccagagctgtagaaaagaactttactccttcccagggaaagtgaaagacataaaacactgaatcagaggt

SEQ ID NO: 3374 - DNA, 433 bp, Homo sapiens
  misc_feature (93)..(107): n includes a, c, g, or t, or contains no nucleotide
  misc_feature (233)..(321): n includes a, c, g, or t, or contains no nucleotide
cacaggcctccaggagccgctgggagctgccgccaggagctgtcaccatgacgggggaacttgaggttaagaacatggacatgaagccggggnnnnnnnnnnnnnnnacaggcagcatcgccgatggcactgatggctttgtaattaatctgggccaggggacagacaagctgaacctgcatttcaaccctcgcttcagcgaatccaccattgtctgcaactcattggacggnnnnnnnnnnnnnnnnnnnnnnnnnnnnnnnnnnnnnnnnnnnnnnnnnnnnnnnnnnnnnnnnnnnnnnnnnnnnnnnnnnnnnnnnnaattcaaggtgaagctgccagatgggcacgagctgacttttcccaacaggctgggtcacagccacctgagctacctgagcgtaaggggcgggttcaacatgtcctctttcaa

SEQ ID NO: 3375 - DNA, 327 bp, Homo sapiens
  misc_feature (189)..(189): n includes a, c, g, or t, or contains no nucleotide
  misc_feature (276)..(279): n includes a, c, g, or t, or contains no nucleotide
  misc_feature (284)..(284): n includes a, c, g, or t, or contains no nucleotide
ctcccgaggacctggagagcctgaggagcctccagcggcagctgcttttccgccagctgcagaagaactcgggctgggacacgatggggtcagagtcagaggggcccagtgcatgagggcggctccccagggaccgcccagatcccagctttgagagaggagtgtgtgtgcacgtattcatctgtgtgnacatgtctgcatgtgtatatgttcgtgtgtgaaatgtaggctttaaaatgtaaatgtctggattttaatcccaggcatccctcctannnnttctntgtgcagcggtctggttatcgtctatccccaggggaatccaca

SEQ ID NO: 3376 - DNA, 262 bp, Homo sapiens
  misc_feature (65)..(122): n includes a, c, g, or t, or contains no nucleotide
  misc_feature (130)..(130): n includes a, c, g, or t, or contains no nucleotide
  misc_feature (138)..(138): n includes a, c, g, or t, or contains no nucleotide
  misc_feature (156)..(156): n includes a, c, g, or t, or contains no nucleotide
  misc_feature (214)..(214): n includes a, c, g, or t, or contains no nucleotide
agtgccctcaggacacacagcatacagtgatcatgaaaagactgtgctcaataattttccataannnnnnnnnnnnnnnnnnnnnnnnnnnnnnnnnnnnnnnnnnnnnnnnnnnnnnnnnncctacagnaggttagnaaatgataaggggaggangaaatggaaacctaagtatctactgcaatgaaaaccaacagcaatgttagtaggaatnattcaggcttggttgaggagatgtaatcgataatgtcagcccgctctg

SEQ ID NO: 3377 - DNA, 584 bp, Homo sapiens
  misc_feature (309)..(313): n includes a, c, g, or t, or contains no nucleotide
  misc_feature (316)..(319): n includes a, c, g, or t, or contains no nucleotide
  misc_feature (321)..(324): n includes a, c, g, or t, or contains no nucleotide
  misc_feature (377)..(377): n includes a, c, g, or t, or contains no nucleotide
  misc_feature (380)..(380): n includes a, c, g, or t, or contains no nucleotide
  misc_feature (382)..(440): n includes a, c, g, or t, or contains no nucleotide
  misc_feature (521)..(537): n includes a, c, g, or t, or contains no nucleotide
attcaagtgcagctcaatactagcttcagtataaaaactgtacagatttttgtatagctgataagattctctgtagagaaaatacttttaaaaaatgcaggttgtagctttttgatgggctactcatacagttagattttacagcttctgatgttgaatgttcctaaatatttaatggtttttttaatttcttgtgtatggtagcacagcaaacttgtaggaattagtatcaatagtaaattttgggttttttaggatgttgcatttcgtttttttaaaaaaaattttgtaataaaattatgtatattnnnnnaannnnannnnctttgtcttaatatgctaagttaattttcactttaaaaaagccatttgaagancanannnnnnnnnnnnnnnnnnnnnnnnnnnnnnnnnnnnnnnnnnnnnnnnnnnnnnnnnnnaaaatgtttgagaattaaaaccaaacatgctcatatttgcaaaatgttctttaaaagttacatgttgaactcagtgaactnnnnnnnnnnnnnnnnngttttacagaacgttaagttttgtacttgacgtttctgtttattagc

SEQ ID NO: 3378 - DNA, 564 bp, Homo sapiens
gtcttactctgttttctggatctgaagactagtaataaactaggacactaactgggttccatgtgattgccctttcatatgatcttctaagttgatttttttcctcccaagtcttttttaaagaaagtatactgtattttaccaaccccctctcttttcttttagctcctctgtggtgaattaaacgtacttgagttaaaatatttcgattttttttttttttttaatggaaagtcctgcataacaacactgggccttcttaactaaaatgctcaccacttagcctgtttttttatcccttttttaaaatgacagatgattttgttcaggaattttgctgtttttcttagtgctaataccttgcctcttattcctgctacagcagggtggtaatattggcattctgattaaatactgtgccttaggagactggaagtttaaaaatgtacaagtcctttcagtgatgagggaattgattttttttaaaagtctttttcttagaaagccaaaatgtttgtttttttaagattctgaaatgtgttgtgacaacaatgacctatttat

SEQ ID NO: 3379 - DNA, 341 bp, Homo sapiens
  misc_feature (133)..(133): n includes a, c, g, or t, or contains no nucleotide
  misc_feature (170)..(170): n includes a, c, g, or t, or contains no nucleotide
  misc_feature (201)..(201): n includes a, c, g, or t, or contains no nucleotide
  misc_feature (208)..(208): n includes a, c, g, or t, or contains no nucleotide
  misc_feature (210)..(210): n includes a, c, g, or t, or contains no nucleotide
cttcatggcgcacctggcaggcgcggtggtgggggtgagcatgggcctgaccatcctgcggagctacgaggagcgcctgcgggaccagtgcggctggtgggtggtgctgctggcctacggcaccttcctgctnttcgccgtcttctggaacgtcttcgcctacgacctgntgggcgcccacatccccccaccgccctgacnggctacntnaggctgcacaggccagggctcgggcatgtggtggccgcccaccaggggccttcacgtctgccctttgtgaacggacgtctcagggctgctgtgccccttgggtgtgggtggcctcaaaggaggccctgtcc

SEQ ID NO: 3380 - DNA, 318 bp, Homo sapiens
  misc_feature (257)..(275): n includes a, c, g, or t, or contains no nucleotide
cattggtgacccataaccccaagtcccagcccagaacccctaacccccaatacttgaaggggttttgtttttttactaatgatggttttgtgggttttttttaagggatgagtggatgagaggagtaatagggaacagctatcctctcttgagaaggggaggataagtaggctgggaaacttcaaagccttcccagtccccagcacctgcctttctcactacttctctggagatggtaggagagtttcctaggtctnnnnnnnnnnnnnnnnnnntcatttggggatggaaggaatctgtcccgcatcgggaataaaa

SEQ ID NO: 3381 - DNA, 192 bp, Homo sapiens
gtcaaaatttccagattactggtaaaaattatttgaaaacaaacttatgggtaataaaggctagtcagaaccctataccataaagtgtagttaccatacagattaatatgtagcaaaaatgtatgcttgatatttctcaactgtgttaatttttctgctgtattccagctgaccaaaacaatattaagaatg

SEQ ID NO: 3382 - DNA, 49 bp, Homo sapiens
gcagtatggctgtgcaggagccttcatttcagcttcaattaatagggaa

SEQ ID NO: 3383 - DNA, 76 bp, Homo sapiens
tagaggggcaccttttcatggtctctgcacccagtgaacacattttactctagaggcatcacctgggaccttactc

SEQ ID NO: 3384 - DNA, 452 bp, Homo sapiens
  misc_feature (89)..(89): n includes a, c, g, or t, or contains no nucleotide
  misc_feature (94)..(113): n includes a, c, g, or t, or contains no nucleotide
ctcaccctaaaactaagcgtgctgcttctgcaaaagatttttgtagatgagctgtgtgcctcagaattgctatttcaaattgccaaaantttannnnnnnnnnnnnnnnnnnnctgctcttctgaacaacttctgctacccactaaataaaaacacagaaataattagacaattgtctattataacatgacaaccctattaatcatttggtcttctaaaatgggatcatgcccatttagattttccttactatcagtttatttttataacattaacttttactttgttatttattattttatataatggtgagtttttaaattattgctcactgcctatttaatgtagctaataaagttatagaagcagatgatctgttaatttcctatctaataaatgcctttaattgttctcataatgaagaataagtaggtatccctccatgcccttct

SEQ ID NO: 3385 - DNA, 394 bp, Homo sapiens
  misc_feature (210)..(210): n includes a, c, g, or t, or contains no nucleotide
  misc_feature (250)..(264): n includes a, c, g, or t, or contains no nucleotide
tccacgtttgtaatcatagaatggaccccattcttttgttaaatacacaagagaaagctttctgtgacagttccaggtcttgaagctaatcagcatctcaagaaagtatccagaaagaacatctgctagttggttataggcggtgggaggaataatatacctaattggttataggtggggggagcatgataagcaaagaaaaggcaaacncaaggaaagatcagatgaaacagaagatgatagtaaaagnnnnnnnnnnnnnnnacataatgtaaaattgtcagcagcctcatggggaggaaaaaggaagagtcaactcacttgaagaagagggtcttgagaaatccttagcataaagggctactggtgagattgagatctgagcaggcaaagc

SEQ ID NO: 3386 - DNA, 172 bp, Homo sapiens
  misc_feature (115)..(116): n includes a, c, g, or t, or contains no nucleotide
gtgaagtccctgttctcagctccgtcatctgcggggcttctgggtggctcctgccactgacctcaccggcatgctggcctgtggcaggcctaggacctcaggcggggaggagganntgccgcaaggccctgtcccagcagaagagggaggcttcctgactgacacaggccag

SEQ ID NO: 3387 - DNA, 492 bp, Homo sapiens
ccacgatgggcatgaagtgcacgcgctgtgggggagacgacaaagtgaagaaggcccgtatagccatgggtggaggcataattttcatcgtggcaggtcttgccgccttggtagcttgctcctggtatggccatcagattgtcacagacttttataaccctttgatccctaccaacattaagtatgagtttggccctgccatctttattggctgggcagggtctgccctagtcatcctgggaggtgcactgctctcctgttcctgtcctgggaatgagagcaaggctgggtaccgtgcaccccgctcttaccctaagtccaactcttccaaggagtatgtgtgacctgggatctccttgccccagcctgacaggctatgggagtgtctagatgcctgaaagggcctggggctgagctcagcctgtgggcagggtgccggacaaaggcctcctggtcactctgtccctgcactccatgtatagtcctcttggg

SEQ ID NO: 3388 - DNA, 347 bp, Homo sapiens
cagggcagtgcctgctcccagaatctggtgctctgaccaggccaggtggggaggctttggctggctgggcgtgtaggacggtgagagcacttctgtcttaaaggttttttctgattgaagctttaatggagcgttatttatttatcgaggcctctttggtgagcctggggaatcagcaaaaggggaggaggggtgtggggttgataccccaactccctctacccttgagcaagggcaggggtccctgagctgttcttctgccccatactgaaggaactgaggcctgggtgatttatttattgggaaagtgagggagggagacagactgactgacagccatgggtggt

SEQ ID NO: 3389 - DNA, 422 bp, Homo sapiens
  misc_feature (244)..(276): n includes a, c, g, or t, or contains no nucleotide
ctacccgtgccatacacagaggctgcctctttgtctactggttctactgtgacaatcaaagggcgaccacttgtctgtttcttgaatgaaccatatctgcaggtggatttccacactgagatgaaggaggaatcagacattgtcttccatttccaagtgtgctttggtcgtcgtgtggtcatgaacagccgtgagtatggggcctggaagcagcaggtggaatccaagaacatgccctttcagnnnnnnnnnnnnnnnnnnnnnnnnnnnnnnnnnctgccagataagtaccaggtaatggtcaatggccaatcctcttacacctttgaccatagaatcaagcctgaggctgtgaagatggtgcaagtgtggagagatatctccctgaccaaatttaatgtcagctatttaaagagataacc

SEQ ID NO: 3390 - DNA, 226 bp, Homo sapiens
  misc_feature (30)..(45): n includes a, c, g, or t, or contains no nucleotide
gcaatctgattcttagctcttgaaactatnnnnnnnnnnnnnnnnaataattaaaaatttaaaatttttaaattagaattgccaatacttctacatttgagaagggtttttttagaaatacatttagtaaagtccccaagacattagtcttacatttaaacttttttctttaaaacatggttttggtggttaacttttacacagttctgagtactgttaatatctg

SEQ ID NO: 3391 - DNA, 164 bp, Homo sapiens
tgactgagtggctgagttacttgctgccctgtgctcctccccgcaggacatggctccccctccacctgctctgtgcccaccctccactctcctcttccaggcccccaaccccccatttcttccccaccaacccctccaatgctgttatccctgcctggtcctca

SEQ ID NO: 3392 - DNA, 311 bp, Homo sapiens
  misc_feature (201)..(215): n includes a, c, g, or t, or contains no nucleotide
actgcagcgctactacgtctataactcagtcagctactctgctggggtctgcgacgaggcctgcagcatgcagcacgtgtgtgccatgcgccaggtggacattgacgcttacaccacctgtctgtatgcctctggcaccacgcccgtgccccagctcccgctgctgctgatggccctgctgggcctgtgcacgctcgtgcnnnnnnnnnnnnnnntcaccttcttcctggtaacgggtaacgggggcagcgcccaggatcacccagagctgggccttccaccatttcctccgcgcctgaggagtgaactga

SEQ ID NO: 3393 - DNA, 545 bp, Homo sapiens
  misc_feature (187)..(215): n includes a, c, g, or t, or contains no nucleotide
actgactgtcctagtacattggaagcttttgtttataggaacttgtagggctcattttggtttcattgaaacagtatctaattataaattagctgtagatatcaggtgcttctgatgaagtgaaaatgtatatctgactagtgggaaacttcatgggtttcctcatctgtcatgtcgatgattatannnnnnnnnnnnnnnnnnnnnnnnnnnnnggaattttcccttcgcttgaatattatccctgtatattgcatgaatgagagatttcccatatttccatcagagtaataaatatacttgctttaattcttaagcataagtaaacatgatataaaaatatatgctgaattacttgtgaagaatgcatttaaagctattttaaatgtgtttttatttgtaagacattacttattaagaaattggttattatgcttactgttctaatctggtggtaaaggtattcttaagaatttgcaggtactacagattttcaaaactgaatgagagaaaattgtataaccatcctgctgttcctttagtgc

SEQ ID NO: 3394 - DNA, 573 bp, Homo sapiens
  misc_feature (89)..(134): n includes a, c, g, or t, or contains no nucleotide
  misc_feature (200)..(218): n includes a, c, g, or t, or contains no nucleotide
  misc_feature (239)..(259): n includes a, c, g, or t, or contains no nucleotide
  misc_feature (445)..(473): n includes a, c, g, or t, or contains no nucleotide
agaggcttctacagccaggacctgcccccaggagcctctcagggggacaccgggtggggcgctgtggctgggggtcctgcggctgctgnnnnnnnnnnnnnnnnnnnnnnnnnnnnnnnnnnnnnnnnnnnnnntgtgcgaccccgcgggcccgctgccttcccccgcaaccaccacccgcctgcgagccctcggctccnnnnnnnnnnnnnnnnnnncggagactgggggacgagagnnnnnnnnnnnnnnnnnnnnncagcctcgggaccgccgctggggtgacacccctccgggtcggaagcccgggagcccagtatggggggaagggtcttacctcagcagttaccccacttgcccagcacaggcctggtgctcaagatctcgcctcagggctccttcctccagtcttggagcattttttgcaggtgacctgcctcctccnnnnnnnnnnnnnnnnnnnnnnnnnnnnngctctacctcccctgcgtcacactgtgtgaggctgtgtctctgccatccaaaagggggccccttgagaatggtgatccacccagttacaggggcatttag

SEQ ID NO: 3395 - DNA, 433 bp, Homo sapiens
  misc_feature (69)..(69): n includes a, c, g, or t, or contains no nucleotide
  misc_feature (155)..(155): n includes a, c, g, or t, or contains no nucleotide
  misc_feature (164)..(260): n includes a, c, g, or t, or contains no nucleotide
  misc_feature (266)..(266): n includes a, c, g, or t, or contains no nucleotide
  misc_feature (268)..(269): n includes a, c, g, or t, or contains no nucleotide
ggagctcactacacccctggtcaatcaatggccctcactgggaacgcttaatggggccgagggcgccancaactccaagctctaccggagacacagcttcatgagcacggagccgctgtcagctgaagccagtctgagctcggactcccagcgcntgggagagnnnnnnnnnnnnnnnnnnnnnnnnnnnnnnnnnnnnnnnnnnnnnnnnnnnnnnnnnnnnnnnnnnnnnnnnnnnnnnnnnnnnnnnnnnnnnnnnnttgtgntnncctcatccctggcttcaccttggtttttcccatcctagttctccctatgcctgaatatcctgtcttttcttttttataagcaaccacactgtattggatgaccctagatcttctttgagacaaggcaggctgtggccatgtagccccatcacactgtgtttgtg

SEQ ID NO: 3396 - DNA, 541 bp, Homo sapiens
agatctggcattaccagtacctgagctggcccgaccatggggtccccagtgagcctgggggtgtcctcagcttcctggaccagatcaaccagcggcaggaaagtctgcctcacgcagggcccatcatcgtgcactgcagcgccggcatcggccgcacaggcaccatcattgtcatcgacatgctcatggagaacatctccaccaagggcctggactgtgacattgacatccagaagaccatccagatggtgcgggcgcagcgctcgggcatggtgcagacggaggcgcagtacaagttcatctacgtggccatcgcccagttcattgaaaccactaagaagaagctggaggtcctgcagtcgcagaagggccaggagtcggagtacgggaacatcacctatcccccagccatgaagaatgcccatgccaaggcctcccgcacctcgtccaaacacaaggaggatgtgtatgagaacctgcacactaagaacaagagggaggagaaagtgaagaagcagcggtcagcagacaaggagaagag

SEQ ID NO: 3397 - DNA, 390 bp, Homo sapiens
  misc_feature (105)..(124): n includes a, c, g, or t, or contains no nucleotide
  misc_feature (126)..(126): n includes a, c, g, or t, or contains no nucleotide
  misc_feature (259)..(259): n includes a, c, g, or t, or contains no nucleotide
  misc_feature (264)..(264): n includes a, c, g, or t, or contains no nucleotide
gttcagttcaagttgcccgacgtgtatggtgtattccagtttaaagtggattacaaccggctaggctacacacacctgtactcttccactcaggtatccgtgcgnnnnnnnnnnnnnnnnnnnnantgagcgcttcatcccctcggcctacccctactacgccagcgccttctccatgatgctggggctcttcatcttcagcatcgtcttcttgcacatgaaggagaaggagaagtccgactgaggggctagagccctnctccncacagcgtggagacggggcagggaggggggttattaggattggtggttttgttttgctttgtttaaagccgtgggaaaatggcacaactttacctctgtgggagatgcaacactgagagccaaggg

SEQ ID NO: 3398 - DNA, 394 bp, Homo sapiens
  misc_feature (37)..(40): n includes a, c, g, or t, or contains no nucleotide
  misc_feature (46)..(46): n includes a, c, g, or t, or contains no nucleotide
  misc_feature (211)..(225): n includes a, c, g, or t, or contains no nucleotide
tcacttcaggaaacaaagtaaggctgtggaattcagnnnnaattcngagcgcaactcggtcctttggtggccgactctccacccactgcatgcaaatgctcctgactgcattagactcccacctgccagcctcaccaggcagacttccctcagcacatgctccgcgggctcctctgcattgggcctttggagccgcccgctggaagtctcnnnnnnnnnnnnnnncattctgaagacctagtgaacaatttctgctcatttcaggaaggttctgaagaagtgaactccgtcagaataaacaagtgtccagattccccccaacagacccaactcatcctctgttctcaccactatctcagaaccaagtgagaacagaatggctgtgccttagata

SEQ ID NO: 3399 - DNA, 495 bp, Homo sapiens
  misc_feature (58)..(74): n includes a, c, g, or t, or contains no nucleotide
  misc_feature (100)..(100): n includes a, c, g, or t, or contains no nucleotide
  misc_feature (115)..(115): n includes a, c, g, or t, or contains no nucleotide
  misc_feature (151)..(151): n includes a, c, g, or t, or contains no nucleotide
  misc_feature (187)..(187): n includes a, c, g, or t, or contains no nucleotide
  misc_feature (213)..(213): n includes a, c, g, or t, or contains no nucleotide
  misc_feature (251)..(252): n includes a, c, g, or t, or contains no nucleotide
  misc_feature (254)..(277): n includes a, c, g, or t, or contains no nucleotide
  misc_feature (282)..(282): n includes a, c, g, or t, or contains no nucleotide
  misc_feature (429)..(450): n includes a, c, g, or t, or contains no nucleotide
acatccaataagaacaagcttgaagatgaactgaaagatgatgcacaatcagtagaannnnnnnnnnnnnnnnnagcgaaacgaatcaggacgtcaaaancaaaacaagcaagcnaaaacacagaaaaagaaagtgcttggtcacctcctncccatagaaattcggctgatttcccccttggctagncccagctgacggagtcaagagcaaanccaagaaaaactacagaagtgacaggaacaggtcttgnngnnnnnnnnnnnnnnnnnnnnnnnnctatnccaaagcaaattttacgcagaaaaatgctgtaatttcttgggaagattttaatgtacacctatttgtaaagtcatcagaatagtgtggattattaaatatctagtttggaagaaaataatttatataaattattgtaaatttttatnnnnnnnnnnnnnnnnnnnnnngtaaagtaactccatatggagtgattgtttcagtccaggcaattt

SEQ ID NO: 3400 - DNA, 522 bp, Homo sapiens
  misc_feature (44)..(44): n includes a, c, g, or t, or contains no nucleotide
  misc_feature (326)..(344): n includes a, c, g, or t, or contains no nucleotide
tcctgcctggaatgttttctggctcagctgcagcaacatctgtnagcccagtgtctgccctgtgtccctgggctcgctccaagtgcaggaacatacatgcagggcccaacatgatgatggtgtgaagggcaggaaacagtcctctgaaggagtggggaggtgggcagtctgcccccgccaggtaccatcgcctcctgccagcttccttagaccaggcagggctgccatggtgctagctgcaagtccatcagtattgaccgtctcgctccatcttggtcctccggagtcccaagtttccttttcatcaaatctgacaagagagaagnnnnnnnnnnnnnnnnnnncacagggcctggtggtgatggacctccccgctccctcaagctctggatggctgcagtgttgtactagactttgttcaggctgttctcatctcagtattgccccttcctttcactttcacacttcatctcattcctgttgtcactttccccgaaacgaataaagtctccccagctcctg

SEQ ID NO: 3401 - DNA, 545 bp, Homo sapiens
  misc_feature (41)..(41): n includes a, c, g, or t, or contains no nucleotide
  misc_feature (79)..(79): n includes a, c, g, or t, or contains no nucleotide
  misc_feature (114)..(114): n includes a, c, g, or t, or contains no nucleotide
  misc_feature (122)..(122): n includes a, c, g, or t, or contains no nucleotide
  misc_feature (131)..(131): n includes a, c, g, or t, or contains no nucleotide
  misc_feature (134)..(134): n includes a, c, g, or t, or contains no nucleotide
  misc_feature (138)..(138): n includes a, c, g, or t, or contains no nucleotide
  misc_feature (231)..(234): n includes a, c, g, or t, or contains no nucleotide
  misc_feature (236)..(237): n includes a, c, g, or t, or contains no nucleotide
  misc_feature (239)..(244): n includes a, c, g, or t, or contains no nucleotide
  misc_feature (246)..(254): n includes a, c, g, or t, or contains no nucleotide
  misc_feature (256)..(260): n includes a, c, g, or t, or contains no nucleotide
  misc_feature (263)..(263): n includes a, c, g, or t, or contains no nucleotide
gggcgtcgaccacagtattccaaccctcctgtgcagggagnaagtgatggagggtgctgacaaccagggtgcaggagancaaggtagaccagtgaggcagatatgtatcggggntatagacnacgattccncangggncctcctcgccaaaagacagcctagagaggacggcaatgaagaagataaagaaaatcaaggagatgagacccaaggtcagcagccacctcaagnnnngnncnnnnnnannnnnnnnnannnnngcngacgcccagaaaaccctaaaccacaagatggcaaagagacaaaagcagccgatccaccagctgagaattcgtccgctcccgaggctgagcagggcggggctgagtaaatgccggcttaccatctctaccatcatccggtttagtcatccaacaagaagaaatatgaaattccagcaataagaaatgaacaaaagattggagctgaagacctaaagtgcttgctttttgcccgttgaccagataaatagaactatctgcattatctatgcagcatggggtttt

SEQ ID NO: 3402 - DNA, 560 bp, Homo sapiens
agcttcccggaccatggccaacctggagcgcaccttcatcgccatcaagccggacggcgtgcagcgcggcctggtgggcgagatcatcaagcgcttcgagcagaagggattccgcctcgtggccatgaagttcctccgggcctctgaagaacacctgaagcagcactacattgacctgaaagaccgaccattcttccctgggctggtgaagtacatgaactcagggccggttgtggccatggtctgggaggggctgaacgtggtgaagacaggccgagtgatgcttggggagaccaatccagcagattcaaagccaggcaccattcgtggggacttctgcattcaggttggcaggaacatcattcatggcagtgattcagtaaaaagtgctgaaaaagaaatcagcctatggtttaagcctgaagaactggttgactacaagtcttgtgctcatgactgggtctatgaataagaggtggacacaacagcagtctccttcagcacggcgtggtgtgtccctggacacagctcttcattccattgacttagaggcaacagga

SEQ ID NO: 3403 - DNA, 475 bp, Homo sapiens
  misc_feature (183)..(201): n includes a, c, g, or t, or contains no nucleotide
tcaaatatctttcaggctgctgagaaactaggtgaaactgagaaacttagtataatgattgaagaatgtggaggcttagacaaaattgaagctctacaaaaccatgaaaatgagtctgtgtataaggcttcgttaagcttaattgagaagtatttctctgtagaggaagaggaagatcaaaannnnnnnnnnnnnnnnnnntctgaaggctacactttccaagttcaggatggggctcctgggacctttaacttttagatcatgtagctgagacataaatttgttgtgtactacgtttggtattttgtcttattgtttctctactaagaactctttcttaaatgtggtttgttactgtagcactttttacactgaaactatacttgaacagttccaactgtacatacatactgtatgaagcttgtcctctgactaggtttctaatttctatgtggaatttcctatcttgcagcat

SEQ ID NO: 3404 - DNA, 426 bp, Homo sapiens
tatccttcatctacctaaaaagggggatgatgtgaaaccaggaaccatgtgccaagttgcagggtggggcaggactcacaatagtgcatcttggtccgatactctgagagaagtcaatatcaccatcatagacagaaaagtctgcaatgatcgaaatcactataattttaaccctgtgattggaatgaatatggtttgtgctggaagcctccgaggtggaagagactcgtgcaatggagattctggaagccctttgttgtgcgagggtgttttccgaggggtcacttcctttggccttgaaaataaatgcggagaccctcgtgggcctggtgtctatattcttctctcaaagaaacacctcaactggataattatgactatcaagggagcagtttaaataaccgtttcctttcatttactgtggct

SEQ ID NO: 3405 - DNA, 343 bp, Homo sapiens
tgggcttgagctgcagaatgactccaccttctcacctgctccaggaggtttgcagggagctcaagcccttggggagggggatgccttcatgggggtgaccccacgatttgtcttatcccccccagcctggccccggcctttatgttttttgtaagataaaccgtttttaacacatagcgccgtgctgtaaataagcccagtgctgctgtaaatacaggaagaaagagcttgaggtgggagcggggctgggaggaagggatgggccccgccttcctgggcagcctttccagcctcctgcctggctctctcttcctaccctccttccacatgtacataaactgtc

SEQ ID NO: 3406 - DNA, 567 bp, Homo sapiens
  misc_feature (108)..(153): n includes a, c, g, or t, or contains no nucleotide
gcttgtctttataaagggagctgacacgtttctcccagcacaaagttgggagtgacaccagagcctcctgcaagatgcttctgattctgctgtcagtggccctgctgnnnnnnnnnnnnnnnnnnnnnnnnnnnnnnnnnnnnnnnnnnnnnnatgttcccctcgtaatatcagatggaggagactctgagcagttcatagatgaggagcgtcagggaccacctttgggaggacagcaatctcaaccctctgctggtgatgggaaccaggatgatggccctcagcagggaccaccccaacaaggaggccagcagcaacaaggtccaccacctcctcagggaaagccacaaggaccaccccaacagggaggccatccccctcctcctcaaggaaggccacaaggaccaccccaacagggaggccatccccgtcctcctcgaggaaggccacaaggaccaccccaacagggaggccatcagcaaggtcctcccccacctcctcctggaaagccccagggaccacctccccaagggggccgcccacaaggacctccacaggggcagtctc

SEQ ID NO: 3407 - DNA, 365 bp, Homo sapiens
  misc_feature (191)..(191): n includes a, c, g, or t, or contains no nucleotide
cagccgagcgttcagggctgcgctccggccggctgagagggcacgtgccccgtcacagtctggactcctgggcctggattgatgtgtctcacagactcggaagggttctgctcctcctcctccccctgaacaatgctggcagttgctacaaatagatttattggaggcttatggctccggttcccccacanacccgctcatgagtctctgtttgttcttcccttttcttttgccctgtccctcaccttgggtcgggggtgctggagtggaccacaatgttgtgctgggggatgggggggtctctctttgccgattgtgcagtgcacaagatttgtgaaaaatgtaaataacagactcctattgcg

SEQ ID NO: 3408 - DNA, 31 bp, Homo sapiens
gatttgctcggcttttgactggaccgagtga

SEQ ID NO: 3409 - DNA, 534 bp, Homo sapiens
  misc_feature (292)..(333): n includes a, c, g, or t, or contains no nucleotide
  misc_feature (507)..(507): n includes a, c, g, or t, or contains no nucleotide
atttacaccgataacacacaggctgctgtaactgtcaggacagtgcgacggtatttttcctagcaagatgcaaactaatgagatgtattaaaataaacatggtatacctacctatgcatcatttcctaaatgtttctggctttgtgtttctcccttaccctgctttatttgttaatttaagccattttgaaagaactatgcgtcaaccaatcgtacgccgtccctgcggcacctgccccagagcccgtttgtggctgagtgacaacttgttccccgcagtgcacacctagannnnnnnnnnnnnnnnnnnnnnnnnnnnnnnnnnnnnnnnnntgtctgtgttgttggtgtgccctggtgccgtggtggcggtcactccctctgctgccagtgtttggacagaacccaaattctttatttttggtaagatattgtgctttacctgtattaacagaaatgtgtgtgtgtggtttgtttttttgtaaaggtgaagtttgtatgtttacntaatattacctgttttgtatacctgag

SEQ ID NO: 3410 - DNA, 459 bp, Homo sapiens
  misc_feature (35)..(62): n includes a, c, g, or t, or contains no nucleotide
gcgtgtctgcagtcaaggattcttcatttttagannnnnnnnnnnnnnnnnnnnnnnnnnnntggctcgagaagcattcatcattactgtggacatggcagttgttgctccacccaaaaaaacagactccaggtgaggctgctgtcatttctccacttgccagtttaattccagccttacccattgactcaaggggacataaaccacgagagtgacagtcatctttgcccacccagtgtaatgtcactgctcaaattacatttcattaccttaaaaagccagtctcttttcatactggctgttggcatttctgtaaactgcctgtccatgctctttgtttttaaacttgttcttattgatctctgtaagtgctttatatattatggcagtactgattgaggaataaccttgaatcctttttttgggtaggtaggttggaaacactgatacttcagccca

SEQ ID NO: 3411 - DNA, 558 bp, Homo sapiens
  misc_feature (37)..(37): n includes a, c, g, or t, or contains no nucleotide
  misc_feature (70)..(70): n includes a, c, g, or t, or contains no nucleotide
  misc_feature (81)..(81): n includes a, c, g, or t, or contains no nucleotide
  misc_feature (83)..(85): n includes a, c, g, or t, or contains no nucleotide
  misc_feature (90)..(91): n includes a, c, g, or t, or contains no nucleotide
  misc_feature (94)..(96): n includes a, c, g, or t, or contains no nucleotide
  misc_feature (99)..(101): n includes a, c, g, or t, or contains no nucleotide
  misc_feature (103)..(105): n includes a, c, g, or t, or contains no nucleotide
  misc_feature (107)..(110): n includes a, c, g, or t, or contains no nucleotide
  misc_feature (120)..(137): n includes a, c, g, or t, or contains no nucleotide
  misc_feature (151)..(152): n includes a, c, g, or t, or contains no nucleotide
  misc_feature (155)..(155): n includes a, c, g, or t, or contains no nucleotide
  misc_feature (158)..(159): n includes a, c, g, or t, or contains no nucleotide
  misc_feature (161)..(161): n includes a, c, g, or t, or contains no nucleotide
  misc_feature (163)..(165): n includes a, c, g, or t, or contains no nucleotide
  misc_feature (167)..(175): n includes a, c, g, or t, or contains no nucleotide
  misc_feature (178)..(178): n includes a, c, g, or t, or contains no nucleotide
  misc_feature (180)..(180): n includes a, c, g, or t, or contains no nucleotide
  misc_feature (182)..(191): n includes a, c, g, or t, or contains no nucleotide
  misc_feature (193)..(196): n includes a, c, g, or t, or contains no nucleotide
  misc_feature (198)..(214): n includes a, c, g, or t, or contains no nucleotide
  misc_feature (486)..(505): n includes a, c, g, or t, or contains no nucleotide
cttaaatgttctacggaaggttctggtgtggttgttnggagccggagggagcgtgtcagcacgtgctgangggcatggggncnnnccccnnggnnnccnnncnnnannnngggccacggnnnnnnnnnnnnnnnnnncaaagccccggggnnggngcnncntnnngnnnnnnnnnggngntnnnnnnnnnncnnnngnnnnnnnnnnnnnnnnnaagccctgcagtgcctccagatggaaaggcgggcccggcctccggttgggtctgcattttggagagtccacaccacggaccaggttttcccccaaggcttggctttgtgtagctactaacttcttggggcattctgagagtgtgggcagagagaattatgtggcctcatcctcccccaaggctgtgcttgcagcccgggcaccttcccactttctagctctggagaggttggattttgcttttgtaaacacatgaatccttatgataaaagnnnnnnnnnnnnnnnnnnnnttataaattatttaatgccagtcctcatgtaacctcaggtatcttcagcttgt

SEQ ID NO: 3412 - DNA, 330 bp, Homo sapiens
  misc_feature (49)..(55): n includes a, c, g, or t, or contains no nucleotide
  misc_feature (57)..(57): n includes a, c, g, or t, or contains no nucleotide
  misc_feature (59)..(65): n includes a, c, g, or t, or contains no nucleotide
  misc_feature (67)..(69): n includes a, c, g, or t, or contains no nucleotide
  misc_feature (71)..(72): n includes a, c, g, or t, or contains no nucleotide
  misc_feature (75)..(77): n includes a, c, g, or t, or contains no nucleotide
  misc_feature (79)..(79): n includes a, c, g, or t, or contains no nucleotide
  misc_feature (81)..(82): n includes a, c, g, or t, or contains no nucleotide
  misc_feature (84)..(87): n includes a, c, g, or t, or contains no nucleotide
  misc_feature (89)..(125): n includes a, c, g, or t, or contains no nucleotide
  misc_feature (244)..(304): n includes a, c, g, or t, or contains no nucleotide
tgctcagatgtcataagtggcagctatctttagccagactgttgcagtnnnnnnntngnnnnnnncnnntnntgnnntncnncnnnntnnnnnnnnnnnnnnnnnnnnnnnnnnnnnnnnnnnnncttactttggggtcaggaacttgaagggatgcttggagtgagtagatttgagggtccagttatggagtgctactaaaacattttcttctctcctggcctctggaagcatctttagcttnnnnnnnnnnnnnnnnnnnnnnnnnnnnnnnnnnnnnnnnnnnnnnnnnnnnnnnnnnnnncttcggcttgacctctgtgataaata

SEQ ID NO: 3413 - DNA, 571 bp, Homo sapiens
  misc_feature (30)..(30): n includes a, c, g, or t, or contains no nucleotide
  misc_feature (47)..(47): n includes a, c, g, or t, or contains no nucleotide
  misc_feature (87)..(116): n includes a, c, g, or t, or contains no nucleotide
  misc_feature (124)..(124): n includes a, c, g, or t, or contains no nucleotide
  misc_feature (214)..(214): n includes a, c, g, or t, or contains no nucleotide
  misc_feature (229)..(245): n includes a, c, g, or t, or contains no nucleotide
  misc_feature (306)..(322): n includes a, c, g, or t, or contains no nucleotide
gaggcagctttcatcacacccttttaacanttatctaaaagaatttnaattctttttcaaaaattacactacaagtttataagcccnnnnnnnnnnnnnnnnnnnnnnnnnnnnnngtgtgcanacttgtatctgaagacctaccagggacaagcaggtaagagctgatgtgagtgtgtgtgatgggatctgtaaggaactggaacacacatgncctatccaaaggaannnnnnnnnnnnnnnnngttgtcaagtataaagtcaggacctggcttggctttaaccgtttttcaagaaaactggaannnnnnnnnnnnnnnnnacatgcctgattttaaaaggttgactcaagtttttacaaaatactatgtgggacacctcaaatacatacctactgactgatgacaaacccaggagtttgtgtgtcttttataaaaagtttgccctggatgtcatattggcagttggaggacacagtttctattgtaaatttggatttacgactgaagaaggacattttctctttaaaagaaagttaggttataagaaacagaggcgtctcacattttta

SEQ ID NO: 3414 - DNA, 460 bp, Homo sapiens
  misc_feature (188)..(192): n includes a, c, g, or t, or contains no nucleotide
  misc_feature (194)..(212): n includes a, c, g, or t, or contains no nucleotide
  misc_feature (214)..(219): n includes a, c, g, or t, or contains no nucleotide
  misc_feature (221)..(221): n includes a, c, g, or t, or contains no nucleotide
  misc_feature (304)..(304): n includes a, c, g, or t, or contains no nucleotide
  misc_feature (326)..(326): n includes a, c, g, or t, or contains no nucleotide
  misc_feature (411)..(411): n includes a, c, g, or t, or contains no nucleotide
caatgacctgatggattgctcgaccaagacacagaagtgaagtctgtgtctgtgcacttcccacagactggagtttttggtgctgaatagagccagttgctaaaaaattgggggtttggtgaagaaatctgattgttgtgtgtattcaatgtgtgattttaaaaataaacagcaacaacaataaaaannnnnannnnnnnnnnnnnnnnnnnannnnnnanaactattttttgaccctctgaaaattattatacttcacctaaatggaagactgctgtgtttgtggaaattttgtaattttttnatttattttattctctctcccntttttattttgcctgcagaatcgttgagagactaataaggcttaatatttaattgatttgtttaatatgttatataaatgtaaangagtgtataaactgtagagatagcattggcaagacattgtacagatgca

SEQ ID NO: 3415 - DNA, 551 bp, Homo sapiens
cgcgcccagtcttctcagatgaggctgcgcccctgcgggcagctctaaggaccgtcctgcgagatcgccttccaaccccacttttttctggaaaggaggggtcctgcaggggcaagcaggagctagcagccgcctacttggtgctaacccctcgatgtacatagcttttctcagctgcctgcgcgccgccgacagtcagcgctgtgcgcgcggagagaggtgcgccgtgggctcaagagcctgagtgggtggtttgcgaggatgagggacgctatgcctcatgcccgttttgggtgtcctcaccagcaaggctgctcgggggcccctggttcgtccctgagcctttttcacagtgcataagcagttttttttgtttttgttttgttttgttttgtttttaaatcaatcatgttacactaatagaaacttggcactcctgtgccctctgcctggacaagcacatagcaagctgaactgtcctaaggcaggggcgagcacggaacaatggggccttcagctggagctgtggacttttgtacatacactaaaat

SEQ ID NO: 3416 - DNA, 329 bp, Homo sapiens
  misc_feature (239)..(239): n includes a, c, g, or t, or contains no nucleotide
cgacagacttggattctgtttgtgtgtgcatattttatccagccttaagttataaagctcatctgtcccgctgcattccctgtgtattttcaggacatggctcgtgggtgtgtgtgttcattgtgtgcgtctgtatgtatttttctgtcatcactgttccctctcctcccgagtgtgcattcagttaatataatcagttgcttgcttctttcaaagtgctttgaaggtcttgaactcangtgtgagcatctttatcaactatcccaattgcatgttctccatcacatattctcttatttgctctgtaccccctgagaatatgttttaga

SEQ ID NO: 3417 - DNA, 459 bp, Homo sapiens
  misc_feature (106)..(120): n includes a, c, g, or t, or contains no nucleotide
tgcttccaatcttgctttgtgtatctcatttaatttgttataaggtagtactgattttagcatattaatgcgatttcttccttgttgtttgctttggtctgtgttnnnnnnnnnnnnnnnaaattgtcattattttgggaagaaaacctgtatttttgttagtttacaatattatgaaatttcacttcaggagaaactgctgggcttcctgtggctttgttttcttagttactttttccgtgccgtgtattttttaattgatttttcttcttttacttgaaaagaaagtgttttattttcaaatctggtccatatttacattctagttcagagccaagccttaaactgtacagaatttccactgtaattaaaactatttagtgttagttataaatagccttcaaaaagagagattctccattacacgatcacctgcatcacagcccatggtgaatgtat

SEQ ID NO: 3418 - DNA, 540 bp, Homo sapiens
  misc_feature (495)..(495): n includes a, c, g, or t, or contains no nucleotide
accaagagacccagggagaagcggacggggtgcgatggaccccgcggcatccccggctccccgccctcctctgtccctgcgccgtccgtgggggggcactggggcgtattagggcccgttcacttctccgcctcgagactctgccccctcagcctggcccgcccttcctaagttatcggcctgcgagccggagagacaatggagagaactgcagaggccgagtggcgaccaggccccaagcggaaggccattttccctgcccttcctcagttgtccggggcgggggtggggggtgctgcgaggaatggagaaaccaggccctttagaggatcccagagagggaagagaaccaggggcccttttctcttttagaattttcttttaatcagcccaccttttgactccccgcccgccccaatccattatttttttctgccttccgggtcccatccttagagctcgagtcgttccttcccctcctggattccgggtagnagaggcagcgccgcaggaggcgggtgcccgtttgtcccaggcctg

SEQ ID NO: 3419 - DNA, 440 bp, Homo sapiens
ttttcaagtcatcttagcagctaggattctcaaatggaagtgttatatataatatgttaaaaacattttgctttcctggctaattatttgatccttttaaattcaaatttgaatcatttgtcatgtatgattatttctgttaaatgtacacagtatttaagatggatatttggtggctctatttgttctgatatcttttggtctaaattatgaggtaccaagattgtttctttgtttctttttttcaaattgtgtttagaaatactgtaataaatatgcagtagtgatataaagaattatatccaaggtaatataaaagccattacgtatgaactcatccgtgtctcattttgtgttttattttgtgatctcttgtccactaagtatcttgttaaatgccagtatctcagtctttctgaagccctgaaatggtaattgta

SEQ ID NO: 3420 - DNA, 445 bp, Homo sapiens
  misc_feature (380)..(382): n includes a, c, g, or t, or contains no nucleotide
  misc_feature (384)..(395): n includes a, c, g, or t, or contains no nucleotide
  misc_feature (404)..(405): n includes a, c, g, or t, or contains no nucleotide
  misc_feature (407)..(407): n includes a, c, g, or t, or contains no nucleotide
ccatgctcaggaagctgcaggaggacctgcagaaggagaaggcggacagggcggccctggaggaggaggtgcggagcctgagacacaacaaccggcggctgcaggcggagtctgagagtgcagccacacgcctcctcctggcctccaagcagctgggctcacccaccgccgacctggcctgagccgtctggaaccacctgggcccctgagggcactgtggtcacactgggccctcctcaggaactctccctgcgcagaggcgtgtcttagcactgcccccctccctagccccttatttggtggcggaagtggcctccaccccttccctgtttgtaaatattctgtggagaaaagaggacttcagggagtaaaaaagccannnannnnnnnnnnnnaaaaaaaannanaatggatctcgaggtcgagggatctctagggaattgct

SEQ ID NO: 3421 - DNA, 496 bp, Homo sapiens
gaatgataacttttccacttgagaactactttatgttttactgtaatttttaaagtttttttgtcctttttgttattttgcaaaagaaaatagtatttacaggtggcttcttttaaaatataaaaatataaagcaggaatgtatatgaaatgtcagattttattgtatttgcagagtattagctttgaaattgaataaagaaagctgtttgtagttttaaaatgccttattggtatcaattagaaatttcttctattttttgatgtacttagagctttttgagtgtagaattttaaatggcaggattttacagtgtttacatgcaagtgcattttataagtgttctatatgtgtaaaatagtattttcaactggaaagtgttggctagtgcaaaaggcctggccattttctggttcccatgatgttgcctacactgctagactacagtttagtatcgctttgtatcatgaggccaagaaattccatgttgtttgta

SEQ ID NO: 3422 - DNA, 514 bp, Homo sapiens
  misc_feature (158)..(159): n includes a, c, g, or t, or contains no nucleotide
  misc_feature (189)..(189): n includes a, c, g, or t, or contains no nucleotide
  misc_feature (261)..(263): n includes a, c, g, or t, or contains no nucleotide
  misc_feature (266)..(267): n includes a, c, g, or t, or contains no nucleotide
  misc_feature (270)..(270): n includes a, c, g, or t, or contains no nucleotide
  misc_feature (273)..(275): n includes a, c, g, or t, or contains no nucleotide
  misc_feature (277)..(278): n includes a, c, g, or t, or contains no nucleotide
  misc_feature (288)..(288): n includes a, c, g, or t, or contains no nucleotide
  misc_feature (331)..(335): n includes a, c, g, or t, or contains no nucleotide
  misc_feature (337)..(340): n includes a, c, g, or t, or contains no nucleotide
  misc_feature (342)..(354): n includes a, c, g, or t, or contains no nucleotide
  misc_feature (383)..(383): n includes a, c, g, or t, or contains no nucleotide
  misc_feature (440)..(440): n includes a, c, g, or t, or contains no nucleotide
  misc_feature (487)..(487): n includes a, c, g, or t, or contains no nucleotide
gatgacgccatgaaagagttacagaagaagactgacagcttgacgtctggggccaccgagaagtccagagagagaagcagagatgtgaaaaacagtgaaggagactgtgcctgaggaaagcggggggcgtggctgcagttctggacgggctggccganntgcgcgggatccttgtgcagggaagagctnccctgggcacctggcaccacaagaccatgttttctaagaaccattttgttcactgatacaaaaaaaaaaaannnaanncangannntnnacagaatttnatttttaaactgtcttttaaataatatattcttatacggaaannnnnannnnannnnnnnnnnnnnagagttgtgtatgctgcttccggtaagtnctctcatggagacgaaggacactgtgcttttcccccagatgtatcttagagcaattnaccagtgtgatgcggtgcgtacgtccctgtaaattcagcattaaatntcagcacggtgccctgagtgcaaggac

SEQ ID NO: 3423 - DNA, 436 bp, Homo sapiens
  misc_feature (127)..(128): n includes a, c, g, or t, or contains no nucleotide
  misc_feature (131)..(133): n includes a, c, g, or t, or contains no nucleotide
  misc_feature (135)..(135): n includes a, c, g, or t, or contains no nucleotide
  misc_feature (137)..(193): n includes a, c, g, or t, or contains no nucleotide
  misc_feature (195)..(216): n includes a, c, g, or t, or contains no nucleotide
  misc_feature (218)..(218): n includes a, c, g, or t, or contains no nucleotide
  misc_feature (220)..(227): n includes a, c, g, or t, or contains no nucleotide
  misc_feature (230)..(231): n includes a, c, g, or t, or contains no nucleotide
  misc_feature (233)..(250): n includes a, c, g, or t, or contains no nucleotide
  misc_feature (252)..(252): n includes a, c, g, or t, or contains no nucleotide
  misc_feature (254)..(262): n includes a, c, g, or t, or contains no nucleotide
  misc_feature (280)..(300): n includes a, c, g, or t, or contains no nucleotide
  misc_feature (356)..(399): n includes a, c, g, or t, or contains no nucleotide
tacacatcttggagcccttgcccagactgtgcaggggaggtggccgagttcctggccaggcacagcaacgtgaatctcaccatcttcaccgcccgcctctactacttccagtatccatgttaccagnnggnnncngnnnnnnnnnnnnnnnnnnnnnnnnnnnnnnnnnnnnnnnnnnnnnnnnnnnnnnnnntnnnnnnnnnnnnnnnnnnnnnntncnnnnnnnnttnntnnnnnnnnnnnnnnnnnnancnnnnnnnnnaatattcatagctcctcnnnnnnnnnnnnnnnnnnnnntgtttagccaacctcttcagcataaagctcctgcccaaacccctcctgctcctaannnnnnnnnnnnnnnnnnnnnnnnnnnnnnnnnnnnnnnnnnnnctggatggctaccttgcaggctgtcacccttaacaag

SEQ ID NO: 3424 - DNA, 410 bp, Homo sapiens
  misc_feature (77)..(97): n includes a, c, g, or t, or contains no nucleotide
aagcaagttgctccagaaaaacctgtaaagaaacaaaagacaggtgagacttcgagagccctgtcatcttctaaacnnnnnnnnnnnnnnnnnnnnnataacatgtttcagattgggaaaatgaggtacgttagtgttcgcgattttaaaggcaaagtgctaattgatattagagaatattggatggatcctgaaggtgaaatgaaaccaggaagaaaaggtatttctttaaatccagaacaatggagccagctgaaggaacagatttctgacattgatgatgcagtaagaaaactgtaaaattcgagccatataaataaaacctgtactgttctagttgttttaatctgtctttttacattggcttttgttttctaaatgttctccaagctattgtatgtttggattgc

SEQ ID NO: 3425 - DNA, 421 bp, Homo sapiens
gctttaatgcagaggccatgtccttgtctggtcctgcttctggctacagccaccctggaacggagaaggcagctgacggggattgccttcctcagccgcagcagcacctggggctccagctgctggaatcctaccatcccaggaggcaggcacagccagggagaggggaggagtgggcagtgaagatgaagccccatgctcagtcccctcccatcccccacgcagctccaccccagtcccaagccaccagctgtctgctcctggtgggaggtggcctcctcagcccctcctctctgacctttaacctcactctcaccttgcaccgtgcaccaacccttcacccctcctggaaagcaggcctgatggcttcccactggcctccaccacctgaccagagtgttctcttcagaggactggctcc

SEQ ID NO: 3426 - DNA, 551 bp, Homo sapiens
  misc_feature (63)..(96): n includes a, c, g, or t, or contains no nucleotide
  misc_feature (98)..(101): n includes a, c, g, or t, or contains no nucleotide
  misc_feature (104)..(104): n includes a, c, g, or t, or contains no nucleotide
  misc_feature (106)..(106): n includes a, c, g, or t, or contains no nucleotide
  misc_feature (110)..(173): n includes a, c, g, or t, or contains no nucleotide
  misc_feature (420)..(420): n includes a, c, g, or t, or contains no nucleotide
  misc_feature (523)..(523): n includes a, c, g, or t, or contains no nucleotide
gtggtcctagtctccgccgggtttgatgctgttgaaggacatctgtctcctctgggtggctannnnnnnnnnnnnnnnnnnnnnnnnnnnnnnnnnannnngcngntgannnnnnnnnnnnnnnnnnnnnnnnnnnnnnnnnnnnnnnnnnnnnnnnnnnnnnnnnnnnnnnntgatgcctctgaggcttgtgtctcggctctgctcagtgtagagctgcagcccttggatgaggcagtcttgcagcaaaagcccaacatcaacgcagtggccacgctagagaaagtcatcgagatccagagcaaacactggagctgtgtgcagaagttcgccgctggtctgggccggtccctgcgagaggcccaagcaggtgagaccgaggaggccgagactgtgagcgccatggccttgctgtcggtnggggccgagcaggcccaggctgcggcagcccgggaacacagccccaggccggcagaggagcccatggagcaggagcctgccctgtgacgccccggcccccatncctctgggcttcaccattgtgattttgt

SEQ ID NO: 3427 - DNA, 587 bp, Homo sapiens
  misc_feature (77)..(77): n includes a, c, g, or t, or contains no nucleotide
  misc_feature (96)..(96): n includes a, c, g, or t, or contains no nucleotide
  misc_feature (102)..(102): n includes a, c, g, or t, or contains no nucleotide
  misc_feature (112)..(112): n includes a, c, g, or t, or contains no nucleotide
  misc_feature (120)..(120): n includes a, c, g, or t, or contains no nucleotide
  misc_feature (140)..(140): n includes a, c, g, or t, or contains no nucleotide
  misc_feature (153)..(153): n includes a, c, g, or t, or contains no nucleotide
  misc_feature (170)..(170): n includes a, c, g, or t, or contains no nucleotide
  misc_feature (174)..(174): n includes a, c, g, or t, or contains no nucleotide
  misc_feature (184)..(184): n includes a, c, g, or t, or contains no nucleotide
  misc_feature (189)..(189): n includes a, c, g, or t, or contains no nucleotide
  misc_feature (201)..(201): n includes a, c, g, or t, or contains no nucleotide
  misc_feature (208)..(208): n includes a, c, g, or t, or contains no nucleotide
  misc_feature (217)..(217): n includes a, c, g, or t, or contains no nucleotide
  misc_feature (224)..(224): n includes a, c, g, or t, or contains no nucleotide
  misc_feature (237)..(237): n includes a, c, g, or t, or contains no nucleotide
  misc_feature (246)..(246): n includes a, c, g, or t, or contains no nucleotide
  misc_feature (248)..(248): n includes a, c, g, or t, or contains no nucleotide
  misc_feature (252)..(252): n includes a, c, g, or t, or contains no nucleotide
  misc_feature (266)..(266): n includes a, c, g, or t, or contains no nucleotide
  misc_feature (271)..(271): n includes a, c, g, or t, or contains no nucleotide
  misc_feature (275)..(275): n includes a, c, g, or t, or contains no nucleotide
  misc_feature (281)..(281): n includes a, c, g, or t, or contains no nucleotide
  misc_feature (286)..(286): n includes a, c, g, or t, or contains no nucleotide
  misc_feature (294)..(294): n includes a, c, g, or t, or contains no nucleotide
  misc_feature (312)..(312): n includes a, c, g, or t, or contains no nucleotide
  misc_feature (334)..(334): n includes a, c, g, or t, or contains no nucleotide
  misc_feature (339)..(339): n includes a, c, g, or t, or contains no nucleotide
  misc_feature (344)..(344): n includes a, c, g, or t, or contains no nucleotide
  misc_feature (364)..(364): n includes a, c, g, or t, or contains no nucleotide
  misc_feature (458)..(458): n includes a, c, g, or t, or contains no nucleotide
  misc_feature (468)..(468): n includes a, c, g, or t, or contains no nucleotide
gcatgagtatcatcttcttcctgcccctgaaagtgacccagaatttgaccttgatagaggagagcctcacctccgangttcattcatgacataganccgagnaactgaaganccgtgcanggcggtcctcactgtccccnaagctgaagctgnagttacgaaggcgaagntcanccaagtcccntgcanggagatgaagcntgcaatnccttgtttngattcanccagactttagcnaagatcacnanggcnaaacccatcaagcntgacntcanggtggnaacanccgggctnggctttgagtggaacganggatggggcgggaaccaccccnccagncccangggctgcagcctgcccaccntcaccttcccgctggactatcaccttaaccagcctttcatcttcgtactgagggacacagacacaggggcccttctcttcattggcaagattcntggaccccanggggcccctaatatcccagtttaatattccaataccctagaagaaaacccgagggacagcagattccacaggacacgaaggctgcccctgtaaggtttcaatgcatacaataaaagagc

SEQ ID NO: 3428 - DNA, 499 bp, Homo sapiens
  misc_feature (474)..(474): n includes a, c, g, or t, or contains no nucleotide
ccctagcaaggtatagatagcctctgtgtcttaggataccccgggtgctgttccctcggtcatcctgttgcccagttccccgtttctcttgctctcattcctgtatcctttccccttttgagcccgtccattcatcggttctgcccccgactcccccagccctaaataccccagctgctgttccccccatcaccctgctgcccaattctttattctccacccctttctctcacccctggagccctgcgggtgggggcagggcatgagttccccagtccccaaggaaaggcagccccctcagtctccctcctcctcattcccttccatctccctcccctctgccttttaaacccatcccctccgattcccctcctcccccctctctccctggtgtcacctggattcctgcagtaattctgagcccttgaaatcctcagtcgccttggcggggaagattggctttggggacaggangtcggcacatctccaggtcttcatg

SEQ ID NO: 3429 - DNA, 95 bp, Homo sapiens
aggcagagggcctttgctacactgctgacagctatagggagccccaggtaatggcatgagatagctggtgttagggctatctcaggcaatatggc

SEQ ID NO: 3430 - DNA, 543 bp, Homo sapiens
  misc_feature (26)..(26): n includes a, c, g, or t, or contains no nucleotide
  misc_feature (30)..(30): n includes a, c, g, or t, or contains no nucleotide
  misc_feature (38)..(38): n includes a, c, g, or t, or contains no nucleotide
  misc_feature (87)..(87): n includes a, c, g, or t, or contains no nucleotide
  misc_feature (122)..(122): n includes a, c, g, or t, or contains no nucleotide
  misc_feature (185)..(185): n includes a, c, g, or t, or contains no nucleotide
  misc_feature (227)..(244): n includes a, c, g, or t, or contains no nucleotide
  misc_feature (471)..(471): n includes a, c, g, or t, or contains no nucleotide
  misc_feature (476)..(477): n includes a, c, g, or t, or contains no nucleotide
  misc_feature (491)..(494): n includes a, c, g, or t, or contains no nucleotide
  misc_feature (496)..(501): n includes a, c, g, or t, or contains no nucleotide
actgagactgacctcctctggtgacnactnggcctagngcctgacactctcctaagaggttctctccaagcccccaaatagctccanggcgccctcggccgcccatcatggttaattctgtnccaacaaacacacacgggtagattgctggcctgttgtaggtggtagggacacagatgaccgancctggtcactcctcctgccaacattcagtctggtatgtgagnnnnnnnnnnnnnnnnnnctcctggagctacagggacagggagccatcattcctgcctgggaatcctggaagacttcctgcaggagtcagcgttcaatcttgaccttgaagatgggaaggatgttctttttacgtaccaattcttttgtcttttgatattaaaaagaagtacatgttcattgtagagaatttggaaactgtagaagagaatcaagaagaaaaataaaaatcagctgttgtaatcncctannaaaaaaaaaaaaannnnannnnnnatttccttctgagctttttcctgtgcttctattgaaagagtc

SEQ ID NO: 3431 - DNA, 543 bp, Homo sapiens
  misc_feature (189)..(189): n includes a, c, g, or t, or contains no nucleotide
  misc_feature (224)..(224): n includes a, c, g, or t, or contains no nucleotide
ccctgctgtgtgtggccaataaattttagtcttccccagccctcgaggcagtgtgtgtggatgtatgcgtgtggatatttatatatgtaccctgcactcatgaatgtatgaactggaggaagttactacagtggaagggttcttaataacaaggtctacctagcatgaagtatttaacattctcccatncccttaaaaaatatacatttttataaaatgaaaanccataataaatgttttgaatattaaaaaaaataataacctacagaggaaaattaatggagacagctatttgccttgtactttttccacaattgttgctgctagttgtacacatctctagttcagctcttgcccacgggacactcatcaattaggttttatttttatttctttcctctacccccagaaacaagcctgttaattttttttccttctcctctggcgactgtgtgatgaatcctttcttgcgtgatcaggttgcggatagacttgtaagggtgtttgctgcatacagtgtaagcattgtgaccgccaataaac

SEQ ID NO: 3432 - DNA, 399 bp, Homo sapiens
  misc_feature (133)..(133): n includes a, c, g, or t, or contains no nucleotide
  misc_feature (147)..(147): n includes a, c, g, or t, or contains no nucleotide
  misc_feature (154)..(155): n includes a, c, g, or t, or contains no nucleotide
  misc_feature (324)..(352): n includes a, c, g, or t, or contains no nucleotide
cagccagagaagaagcctggcagacaggcgggcaaacagtgagcgcccacccagaccggctgctgcgccccctcctgccagggtggcgattccgctccacagtctcggacggatctgctcagaaaggaagagncaggcgccaggggnaaccccnnttcgtgttttgtgaccctcccttttaggtgaagcccctttttcttgctaaaaccggcaattctccggttagaaatgttacttggtgttttttggttttgtgaaacggccgtcccaaagctggctggattcctagaagagtctgtgttgaaggcatctttcaagccctcnnnnnnnnnnnnnnnnnnnnnnnnnnnnngcgggtttgttttgcatttcttggagcctctccgagcagcaaccaga

SEQ ID NO: 3433 - DNA, 445 bp, Homo sapiens
ggaggcactcgaggagaacgagctcaccagcctggcagaggacttgctgggcctgaccgatcccaatggcggcctggcctagaccaggggtgcagccagcttttggagaacctggatggccttagggttccttctgcggctattgctgaacccctgtccatccacgggaccctgaaactccacttggcctatctgctggacctgctggggcagagttgattgccttccccaggagccagaccactgggggtgcatcattggggattctgcctcaggtactttgatagagtgtggggtgggggggacttgctttggagatcagcctcaccttctcccatcccagaagcggggcttacagccagcccttacagtttcactcatgaagcaccttgatctttggtgtcctggacttcatcctgggtgctgcagatactgcagtgaagta

SEQ ID NO: 3434 - DNA, 309 bp, Homo sapiens
aacacaatgccaacagctggccagtaattagtgttgtgcacttcatgtcattaatcaatttctcaatagttcttaaaattagtgagattaaaaatctaaaaattttgcatttcatgctatcagaaacagtattttcttcccaaatcaaaataaaagaaatatgatcagagcttgaacacaggcttatttttaaaataaaaatatttttaacatgggtttccttattgaaaaatcagtgtattagtcataaaacaccatcattaagaataattgaacaataaagtttgctttcagatgcagttttcaaat

SEQ ID NO: 3435 - DNA, 49 bp, Homo sapiens
ggcaacagcgttgaccgcatggcagctccgagagcagaggctctatttg

SEQ ID NO: 3436 - DNA, 498 bp, Homo sapiens
  misc_feature (473)..(473): n includes a, c, g, or t, or contains no nucleotide
ctgccttgcccaaggccacggagggcgtctgcagagaggcctgccttccggattccaggcgggcatgccctgcaaaccccgcctgggcctcccttggtctgcccagccctcggttagccctgcctgaatcagtagatacttgaacgagtccccagtctgcgggaggcagtggtggggccatggacccatgcggggggttccagggtcacacgccacataacagacaaaaatacacacacgtgtgtttttctttgcaatacttgaaatattgccactgtgcttggacttagaagaagaaaatccccgtgacttcttcctcatcaccttgatggctttattctcaccttgtggggcatgtttgtatttattgcttcatggccgactggaatcctgagtcctgggaagctggcactgcggggatcttgcccggtgtcctggtcctcttgcttccgtcgcggccgcatgtgcgtgtntccaagcaggtcctgggcgcctcaa

SEQ ID NO: 3437 - DNA, 535 bp, Homo sapiens
  misc_feature (30)..(49): n includes a, c, g, or t, or contains no nucleotide
  misc_feature (79)..(80): n includes a, c, g, or t, or contains no nucleotide
  misc_feature (83)..(83): n includes a, c, g, or t, or contains no nucleotide
  misc_feature (129)..(129): n includes a, c, g, or t, or contains no nucleotide
  misc_feature (136)..(136): n includes a, c, g, or t, or contains no nucleotide
  misc_feature (139)..(139): n includes a, c, g, or t, or contains no nucleotide
  misc_feature (142)..(142): n includes a, c, g, or t, or contains no nucleotide
  misc_feature (144)..(144): n includes a, c, g, or t, or contains no nucleotide
  misc_feature (248)..(248): n includes a, c, g, or t, or contains no nucleotide
  misc_feature (319)..(361): n includes a, c, g, or t, or contains no nucleotide
  misc_feature (443)..(469): n includes a, c, g, or t, or contains no nucleotide
cggaccagaagcagctgcgctacacggagnnnnnnnnnnnnnnnnnnnnccctgggttgcacctggagcttcgggggcnncanctgtgggcccggcgcatgggcaagtgcaaggtgtactgggaggtgngcggacnccncangntccgccagcccctccaccccagcctgcctgctgcctcggaactgtgacacccccatcttcgacttcagagtcttcttccaagagctggtggaattccgggcacngcagcgccgtggctccccacgctataccatctacctgggcttcgggcaggacctgtcagctgggaggcccnnnnnnnnnnnnnnnnnnnnnnnnnnnnnnnnnnnnnnnnnnntgccgagtgcacctagagggcacgcagcgtgagggtgtgtcttccctggatagcagcagcctcagcctctgcctgtccagcnnnnnnnnnnnnnnnnnnnnnnnnnnntgcttccttatggagctggagcagcccgcctagaacccagtctaatgagaactccagaaagctgga

SEQ ID NO: 3438 - DNA, 518 bp, Homo sapiens
  misc_feature (135)..(243): n includes a, c, g, or t, or contains no nucleotide
  misc_feature (284)..(334): n includes a, c, g, or t, or contains no nucleotide
atcttttggagacagacagaagctcccttaggtctcttccttccactctgggatgctatgaagaggagcctttagctgtctcctctaggcccttcagggccgtgctggctcatggagcaatcatgtgtggctctnnnnnnnnnnnnnnnnnnnnnnnnnnnnnnnnnnnnnnnnnnnnnnnnnnnnnnnnnnnnnnnnnnnnnnnnnnnnnnnnnnnnnnnnnnnnnnnnnnnnnnnnnnnnnggaacccacctgttaccagtacacctgccccagccccttcnnnnnnnnnnnnnnnnnnnnnnnnnnnnnnnnnnnnnnnnnnnnnnnnnnntgggataattgcctattcgctaaatgaaaatgagacacttcctgtccggggtaggcataaaagaaacagaaataaaagccaattaaataggaatgacaagatgatagtgcagattcaaaagaaataggtatgcacaagtgacttaaagcagagtcctcctctagcccaggacactcttcagtct

SEQ ID NO: 3439 - DNA, 604 bp, Homo sapiens
atgcggtgtactggaacagctccaaccagcacctgcggcgagagggctacaccgtgcaggtgaacgtgaacgactatctggatatttactgcccgcactacaacagctcgggggcgggaccggggcccggaggcggggcagagcagtacgtgctgtacatggtgagccgcaacggctaccgcacctgcaacgccagccagggcttcaagcgctgggagtgcaaccggccgcacgccccgcacagccccatcaagttctcggagaagttccagcgctacagcgccttctctctgggctacgagttccacgccggccacgagtactactacatctccacgcccactcacaacctgcactggaagtgtctgaggatgaaggtgttcgtctgctgcgcctccacatcgcactccggggagaagccggtccccactctcccccagttcaccatgggccccaatgtgaagatcaacgtgctggaagactttgagggagagaaccctcaggtgcccaagcttgagaagagcatcagcgggaccagccccaaacgggaacacctgcccctggccgtgggcatcgccttcttcctcatgacgttcttggcctc

SEQ ID NO: 3440 - DNA, 197 bp, Homo sapiens
gtccagcttttggattcaatgagtgggaaatacattgtgcctttctctagatgtgatacgttataccaaaatctttgtagtgtgcagagcggtggtttgagactaaatacaggcttagaacttgcagagtgtgtattcttggatggctgatgcatcgacttgcattcccacttaacactttgattagcatgaacttg

SEQ ID NO: 3441 - DNA, 477 bp, Homo sapiens
  misc_feature (29)..(29): n includes a, c, g, or t, or contains no nucleotide
  misc_feature (69)..(69): n includes a, c, g, or t, or contains no nucleotide
  misc_feature (285)..(315): n includes a, c, g, or t, or contains no nucleotide
  misc_feature (396)..(396): n includes a, c, g, or t, or contains no nucleotide
agacgtgtatcaggagatgcccgcccagntccgcaagcagcaggagtctctggcccgccacctgcaganctacggggagcactacccactggatcacttcgataagtgagacctgctcagcccacccccacccatcctcagctaccccgagaggtagccccactctaaggggagcagggggacctgacagcacaccactgtcttccccagtcagctccctctaaaatactcagcggccagggcggctgccactcttcacccctgctcctcccggctgttacattnnnnnnnnnnnnnnnnnnnnnnnnnnnnnnnggctccgtcagccccctcttcacctgttgttacagtgccttctcccaggggctgggtgagggcacattcaggactagaagnccctctgggcatggggtggacatggcaggtcagcctgtggaacttgcgcaggtgcgagtggccagcagaggtcacgaataa

SEQ ID NO: 3442 - DNA, 535 bp, Homo sapiens
  misc_feature (199)..(199): n includes a, c, g, or t, or contains no nucleotide
  misc_feature (338)..(338): n includes a, c, g, or t, or contains no nucleotide
  misc_feature (340)..(340): n includes a, c, g, or t, or contains no nucleotide
  misc_feature (382)..(387): n includes a, c, g, or t, or contains no nucleotide
  misc_feature (389)..(394): n includes a, c, g, or t, or contains no nucleotide
  misc_feature (415)..(415): n includes a, c, g, or t, or contains no nucleotide
  misc_feature (430)..(430): n includes a, c, g, or t, or contains no nucleotide
  misc_feature (450)..(450): n includes a, c, g, or t, or contains no nucleotide
  misc_feature (462)..(462): n includes a, c, g, or t, or contains no nucleotide
  misc_feature (469)..(469): n includes a, c, g, or t, or contains no nucleotide
  misc_feature (483)..(483): n includes a, c, g, or t, or contains no nucleotide
  misc_feature (485)..(485): n includes a, c, g, or t, or contains no nucleotide
  misc_feature (502)..(502): n includes a, c, g, or t, or contains no nucleotide
gatgccccttctgagggacataattaagatggcgaccgcacggcaggagaccaaggaaatggcccgcaaggtgattgagcactgcagtaactttaaagaggagaacatggacacgtctagatagaggcctccgtccccatggccgccaccgctctggaccacaggcggggaggaagcatgctcaagcagcccagcgggngggccccttccgagggagcctcccacggagtgaagagacatgggggacttttgcacaaccgacgcttttccttaatgttagtgagatatatatatattatatatatatattttttttttggttaggaagtgtgaagttntntgtgtatgatttctgtgcaaaaacaaaagcaacactcctgannnnnnannnnnnctctcgccattctcaaacccnctcagccttcatcgntgacacacacactcctaccnctaccagactanatgcctntaacgctgtgagtntncagtccttgtccagggnaactcagatcccggccgggcttcctttcatgag

SEQ ID NO: 3443 - DNA, 485 bp, Homo sapiens
  misc_feature (95)..(110): n includes a, c, g, or t, or contains no nucleotide
  misc_feature (151)..(171): n includes a, c, g, or t, or contains no nucleotide
ctgccttgagttttatcagaattattggcctagtaatccttcagaaacaccgtaattctaaataaacctcttcccatacacctttcccccataannnnnnnnnnnnnnnnctataaagcatttgtattgtgatttgattaagtatatattnnnnnnnnnnnnnnnnnnnnnaaatttaaatattatgtgcatttgtaaatacagtagctataaaattttccatacttctaatggcagaatagaggaggccatattaaataatactgatgaaaggcaggacactgcattgtaaataggattttctaggctcggtaggcagaaagaattatttttctttgaaggaaataactttttatcatggtaattttgaaggatgattcctatgatgtgttcaccaggggaatgtggcttttaaagaaaatcttctattggttgtaactgttcatatcttcttacttttctgtgttgacttcattattcccatg

SEQ ID NO: 3444 - DNA, 166 bp, Homo sapiens
cgccctgggctgtctgtcaccagctatctgtcatctctctggggccctgggcctcagttcaacctggtggcaccagatgcaacctcactatggtatgctggccagcaccctctcctgggggtggcaggcacacagcagccccccagcactaaggccgtgtctctga

SEQ ID NO: 3445 - DNA, 440 bp, Homo sapiens
  misc_feature (407)..(408): n includes a, c, g, or t, or contains no nucleotide
tcacttggcgaggagcccgcctgctccggcccctcctgcagttcaccttgatcatgatggccttctacacgggactgtctcgcgtatcagaccacaagcaccatcccagtgatgttctggcaggatttgctcaaggagccctggtggcctgctgcatagttttcttcgtgtctgacctcttcaagactaagacgacgctctccctgcctgcccctgctatccggaaggaaatcctttcacctgtggacattattgacaggaacaatcaccacaacatgatgtaggtgccacccacctcctgagctgtttttgtaaaatgactgctgacagcaagttcttgctgctctccaatctcatcagacagtagaatgtagggaaaaacttttgcccgactgatttttaaaaannaaaaaaaaaatgttttactatgtggccttcca

SEQ ID NO: 3446 - DNA, 555 bp, Homo sapiens
  misc_feature (108)..(136): n includes a, c, g, or t, or contains no nucleotide
  misc_feature (217)..(218): n includes a, c, g, or t, or contains no nucleotide
  misc_feature (234)..(252): n includes a, c, g, or t, or contains no nucleotide
  misc_feature (255)..(257): n includes a, c, g, or t, or contains no nucleotide
  misc_feature (467)..(482): n includes a, c, g, or t, or contains no nucleotide
gggactcatctagaagacctctaaggtccccttttggctctgaggggtctctaataatccccacttggaattcagcaccgcaaggaaattatgggtatgtgagccatnnnnnnnnnnnnnnnnnnnnnnnnnnnnnccacccatggtgatggatggtttggaaagggaatgttggtgccttttgtgccacaagttaagatgctactgttttaaaggnnaaaaaaaaaaaaaaannnnnnnnnnnnnnnnnnnaannncatgagcttttctcgcaggaaattttctttttcacagaactggtgtcaggaatcactgaagggctaaccgtgatagtccttgcaagtaagtcaaggttttatcctgattggaaatagaagacatttccggttgagagaacagattcgttggaagcttaacttttgttgcctcttaacgccaccaaattttagggtaatttgattatgaannnnnnnnnnnnnnnngacagaaaagggagagctaccaaattgtttttttctttttaaaaggaagtttaatgtccgttgtatcacaaat

SEQ ID NO: 3447 - DNA, 596 bp, Homo sapiens
  misc_feature (63)..(78): n includes a, c, g, or t, or contains no nucleotide
  misc_feature (471)..(479): n includes a, c, g, or t, or contains no nucleotide
  misc_feature (489)..(489): n includes a, c, g, or t, or contains no nucleotide
  misc_feature (494)..(510): n includes a, c, g, or t, or contains no nucleotide
caagcgggcagacatcctgtgaagcaggacctgctgaagaggagactttctatgcccttggtnnnnnnnnnnnnnnnnagacagtgcaacaactggtctccaccagtatttgtcactttattttttttaatgacaaaaccaaaaacagacatggggtgggtagctgggggcccggacacttgggaccctgacccctttgtccctgcactcagccctgtggccccttcctgtcctgtctcaggccaggctaaatatgtgccttcctcagggctgtggggcaggcactagggggcctttcccttcctttcctttctcaggccttgctcccccaggatgacccactcttaggggggtggtggcatctggacaaatgccaccacagcaggtggggtggcaaagctacctggaatggatttgtgtgctgatttttaaggattattacagataattaaacagaacggtcagccttcnnnnnnnnnaaaaaaaaanaaaannnnnnnnnnnnnnnnncatctactatcccaggcttgggcccaactggtcttccacgatgtcacctttgaccctcaaggcagtcttccccaggtggtgcctct

SEQ ID NO: 3448 - DNA, 551 bp, Homo sapiens
  misc_feature (91)..(91): n includes a, c, g, or t, or contains no nucleotide
  misc_feature (94)..(94): n includes a, c, g, or t, or contains no nucleotide
  misc_feature (118)..(118): n includes a, c, g, or t, or contains no nucleotide
  misc_feature (120)..(120): n includes a, c, g, or t, or contains no nucleotide
  misc_feature (137)..(137): n includes a, c, g, or t, or contains no nucleotide
  misc_feature (148)..(148): n includes a, c, g, or t, or contains no nucleotide
  misc_feature (164)..(164): n includes a, c, g, or t, or contains no nucleotide
  misc_feature (198)..(211): n includes a, c, g, or t, or contains no nucleotide
  misc_feature (362)..(411): n includes a, c, g, or t, or contains no nucleotide
  misc_feature (438)..(474): n includes a, c, g, or t, or contains no nucleotide
gcctgcaatactatttttagcagacaaaaaaaagaactaagtataaaatgtataaatatttttgacttgaacatttggatggcactgggtnaangtagagcatccatccttcggatgnantgtttggaaaaaagagncttttaaaaanggagacggttgttttnaaagagtctgtttaggggttaaagtactgtaacnnnnnnnnnnnnnnaaataaattttcctgtgctgtaaaggaaggtttcacagtaccactgagttagatttcagccacagatgcttagctttttttttttgtcttttttttaaggaggaagcctttgttttgttttcctgagccctcactctgtttttgtgctgtnnnnnnnnnnnnnnnnnnnnnnnnnnnnnnnnnnnnnnnnnnnnnnnnnncaataactaaaactgaaacattcaaannnnnnnnnnnnnnnnnnnnnnnnnnnnnnnnnnnnnagccgtttcagacagtggaaatccatgacaaacaaaaggatgtgatcattaattgtaaagcgctttgtaaaattcac

SEQ ID NO: 3449 - DNA, 591 bp, Homo sapiens
  misc_feature (30)..(30): n includes a, c, g, or t, or contains no nucleotide
  misc_feature (32)..(32): n includes a, c, g, or t, or contains no nucleotide
  misc_feature (37)..(37): n includes a, c, g, or t, or contains no nucleotide
  misc_feature (41)..(41): n includes a, c, g, or t, or contains no nucleotide
  misc_feature (47)..(47): n includes a, c, g, or t, or contains no nucleotide
  misc_feature (52)..(52): n includes a, c, g, or t, or contains no nucleotide
  misc_feature (58)..(58): n includes a, c, g, or t, or contains no nucleotide
  misc_feature (65)..(65): n includes a, c, g, or t, or contains no nucleotide
  misc_feature (91)..(91): n includes a, c, g, or t, or contains no nucleotide
  misc_feature (101)..(101): n includes a, c, g, or t, or contains no nucleotide
  misc_feature (312)..(312): n includes a, c, g, or t, or contains no nucleotide
  misc_feature (364)..(364): n includes a, c, g, or t, or contains no nucleotide
  misc_feature (423)..(423): n includes a, c, g, or t, or contains no nucleotide
ggacccctgagaagatgccaggacttatantnccccntcangacatngacantatgtnggggcangaaggttatctcctcccgggtaaagncatttcgtcntctccagtttggggcggaatgaggcctgctcctcttgtaaatacccccttccctcgaagctccctcccggtgctggggggcagctgaggggctgcaggggcagtctccctcctccaagcccctgtacataacctggagcgtgtgaccttcagagcttttcactttatgcaaaatggctcctgtgagggctgcaagctggagggtggtgcangccttgggccacagggaggcgcctgtggaatagggggagttcatgcaccccnttttttccccagaggggctggactcaggttagtttgggggtgggggctcctgcactttnccacaggcacggggagggttttctcctcaccccctctgccctcccaacttgggttgtactttctaagaaggtgattccccctgcccttgcccccttccccagaacaaaacatgttgatcatgtgcaatatttcttactgtgccgagaagccgcaatgagcgagattaa

SEQ ID NO: 3450 - DNA, 472 bp, Homo sapiens
cctgcggatctgcacgcggtacacgcccgagcaggacaccatgaccttctcggacgggctgaccctgaaccggacccagatgcacaacgctggcttcggccccctcaccgacctggtctttgccttcgccaaccagctgctgcccctggagatggatgatgcggagacggggctgctcagcgccatctgcctcatctgcggagaccgccaggacctggagcagccggaccgggtggacatgctgcaggagccgctgctggaggcgctaaaggtctacgtgcggaagcggaggcccagccgcccccacatgttccccaagatgctaatgaagattactgacctgcgaagcatcagcgccaagggggctgagcgggtgatcacgctgaagatggagatcccgggctccatgccgcctctcatccaggaaatgttggagaactcagagggcctggacactctgagcggacagccg

SEQ ID NO: 3451 - DNA, 196 bp, Homo sapiens
  misc_feature (48)..(48): n includes a, c, g, or t, or contains no nucleotide
caagggtggtcactgcctgtgatacattcctcagtgtcgcctctgagncccaggcctcctgccacaaagactgggccgagagatggggctgggtaagcgggtgcgcctcctgtttgggtttcttcggggtttctctgtagtgtctgctgccctcctcctggcctcccaggtttcagttgtgtctgacagagcatta

SEQ ID NO: 3452 - DNA, 436 bp, Homo sapiens
  misc_feature (41)..(41): n includes a, c, g, or t, or contains no nucleotide
  misc_feature (66)..(66): n includes a, c, g, or t, or contains no nucleotide
  misc_feature (114)..(114): n includes a, c, g, or t, or contains no nucleotide
  misc_feature (140)..(140): n includes a, c, g, or t, or contains no nucleotide
  misc_feature (164)..(164): n includes a, c, g, or t, or contains no nucleotide
  misc_feature (170)..(194): n includes a, c, g, or t, or contains no nucleotide
gtcttgcttcagtttctgtggtctcttttcatcctgcttgnaagattcggagtgtggaaggaggcntaggaagtctggtgcagtaggtgagcagacctcttgctgcccagcccnagggtgggtggggcgcacacctgtcntttgtgcatgcaaatctgatacancctggnnnnnnnnnnnnnnnnnnnnnnnnnatggaaaggtctggaagctctgtgtagccattccttctgcagtcatcctacccaagtaaaagtaaccttggctatgttaccaccgttttggtcacccaggaggacatcttagcaagggtgcctgcgagggagtgtgggactgggcctcatcctcgccggcgttggaaaccaaggccttgtatgccacgccttatgaagcactgtttcacagttactttcacttcccgaataaaggttaccag

SEQ ID NO: 3453 - DNA, 290 bp, Homo sapiens
  misc_feature (34)..(50): n includes a, c, g, or t, or contains no nucleotide
  misc_feature (131)..(192): n includes a, c, g, or t, or contains no nucleotide
  misc_feature (200)..(225): n includes a, c, g, or t, or contains no nucleotide
gggctccagaagcagaccagcaaaccagcagacnnnnnnnnnnnnnnnnnaacgatgcggcagagaaagaaggaagaggaggaacatctgaacaccgagaggagttcagctgggggtggttggagaggagnnnnnnnnnnnnnnnnnnnnnnnnnnnnnnnnnnnnnnnnnnnnnnnnnnnnnnnnnnnnnngggttccnnnnnnnnnnnnnnnnnnnnnnnnnnaccactctataaaacctcacattcatccttcaagactgtgtgtgacccaatttttctgggacact

SEQ ID NO: 3454 - DNA, 239 bp, Homo sapiens
  misc_feature (55)..(99): n includes a, c, g, or t, or contains no nucleotide
caggccgtttcagcatcaggcaagtggctggatggtattcgaaaatggtattacnnnnnnnnnnnnnnnnnnnnnnnnnnnnnnnnnnnnnnnnnnnnncaatatacgaggatgaagatgtaaaagaagccataagaagacttcctgagaacctttataatgacaggatgtttcgcattaagagggcactggacctgaacttgaagcatcagatcttgcctaaagagcagtggaccaaa

SEQ ID NO: 3455 - DNA, 382 bp, Homo sapiens
  misc_feature (40)..(40): n includes a, c, g, or t, or contains no nucleotide
  misc_feature (45)..(47): n includes a, c, g, or t, or contains no nucleotide
  misc_feature (58)..(70): n includes a, c, g, or t, or contains no nucleotide
  misc_feature (74)..(76): n includes a, c, g, or t, or contains no nucleotide
  misc_feature (159)..(175): n includes a, c, g, or t, or contains no nucleotide
ctgtgtcccgagttcctgaagggacatgggtggaatgatngcagnnnccagggtctgnnnnnnnnnnnnntgtnnncaaccagtctcccaaagctccttgctccccaccccttgcgaacaggaccagattttgtttggagcctcagcatgccggggccnnnnnnnnnnnnnnnnncgggtcccagccaattgtgatgatcctttttgctcatttcccagcctttcttgctgttaggggctaccatgggaccagctctggccagagggaactaagcaaatccaatagagatgtttctggggaaggttttgcagcccactccccatcttcctgctataaatgtgggtgtgatggctggatctggggcagccaccttgctaccat

SEQ ID NO: 3456 - DNA, 222 bp, Homo sapiens
cctgtctcagggaattgcctgctggggtgatgcagggaggaggggaggtgcagggaagaggggccggcctcagctgtcaccagcacttttgaccaagtcctgctactgcggcccctgccctagggcttagagcatggacctcctgccctgggggtcatctggggccagggctctctggatgccttcctgctgccccagccagggttggagtcttagcctcgg

SEQ ID NO: 3457 - DNA, 338 bp, Homo sapiens
  misc_feature (117)..(117): n includes a, c, g, or t, or contains no nucleotide
  misc_feature (126)..(126): n includes a, c, g, or t, or contains no nucleotide
  misc_feature (135)..(135): n includes a, c, g, or t, or contains no nucleotide
  misc_feature (201)..(201): n includes a, c, g, or t, or contains no nucleotide
  misc_feature (238)..(241): n includes a, c, g, or t, or contains no nucleotide
  misc_feature (243)..(244): n includes a, c, g, or t, or contains no nucleotide
aatagttaacggagccagaatgcttgagtcatataattgcaaagcagagttgggagcaacagatgctaaagagtagttgctgtagttcctctttgggtcgtaggagcagttgtcatnttactatanagctactgnatgaagaagagttcttagtgaggcctgggtgaacagctcttcttagtattctgtgtgaccccattngaccttttaacaaatccctaagtaaataaatagcccnnnngnnaaactaagtttttctctgctgtttttttgcttgagagagctataactgtaatagacttatatttctgaacattttagtgcttgccaatatttgg

SEQ ID NO: 3458 - DNA, 277 bp, Homo sapiens
  misc_feature (29)..(45): n includes a, c, g, or t, or contains no nucleotide
  misc_feature (159)..(173): n includes a, c, g, or t, or contains no nucleotide
  misc_feature (175)..(189): n includes a, c, g, or t, or contains no nucleotide
  misc_feature (238)..(238): n includes a, c, g, or t, or contains no nucleotide
acccagattggtgagataggacacttgtnnnnnnnnnnnnnnnnngggccatgtttattgtggattggtaagaatcaccaggaaaccattaagccccaatagctacaaggagggtggttaatctgctatatcaaactccttccctgaaaccagcaaacnnnnnnnnnnnnnnngnnnnnnnnnnnnnnngtgaacaatgcagtcaggcctgttataaccgctgagcagccacactcgnacctcctgggtgctgtagtctgtgttggtacaggcttct

SEQ ID NO: 3459 - DNA, 279 bp, Homo sapiens
  misc_feature (32)..(32): n includes a, c, g, or t, or contains no nucleotide
  misc_feature (41)..(41): n includes a, c, g, or t, or contains no nucleotide
  misc_feature (142)..(143): n includes a, c, g, or t, or contains no nucleotide
  misc_feature (145)..(145): n includes a, c, g, or t, or contains no nucleotide
  misc_feature (160)..(160): n includes a, c, g, or t, or contains no nucleotide
gttttaaaaggctcccatgtgagtccctgtgntggccaggncaggggacccctgccagttctctgtggaagcaaggctggggtcttgggttcctgtatggtggaagctgggtgagccaaggacagggctggctcctctgccnncnctgacgcttcccttnccgttggctttggatgtctttgctgcagtcttctctctggctcaggtgtgggtgggaggggcccacaggaagctcagccttctcctcccaaggtttgagtccctccaaagggcagtggg

SEQ ID NO: 3460 - DNA, 245 bp, Homo sapiens
  misc_feature (104)..(146): n includes a, c, g, or t, or contains no nucleotide
  misc_feature (153)..(156): n includes a, c, g, or t, or contains no nucleotide
gtattacatgttaggcccagaacaccatgggaaaaggtttatgtagtgtatcttagtggcctgcctagctgcctctgggccaggctgacttctgatgtccacannnnnnnnnnnnnnnnnnnnnnnnnnnnnnnnnnnnnnnnnnnccctgtnnnnctgtaactattatatacgccatggcctggggggcattgaaggaagtaagctctcagagatcctaacactggctgggaacctctgactca

SEQ ID NO: 3461 - DNA, 263 bp, Homo sapiens
ttagtacagcgattggattaacctccttcgtcattgccatattggttattcaggtgatagcctatatcctcgctgtggttggactgagtctctgtattgcggcgtgtataccaatgcatggccctcttctgatttcaggtttgagtatcttagctctagcacaattacttggactagtttatatgaaatttgtggcttccaatcagaagactatacaacctcctaggaaagctgtagaggaaccccttaatgcattcaaagaa

SEQ ID NO: 3462 - DNA, 180 bp, Homo sapiens
gggcctagcagtcttcacctctgagtcaggctaggggcctccccttctcatcctccccacccccccgccaaggttctcacactggcctgggcttgggtgcccatataggaggtctgtatgttcaccaacagtgcggaggggtcacacattgcaaaacactgcccagaacagtaaaaagag

SEQ ID NO: 3463 - DNA, 559 bp, Homo sapiens
  misc_feature (31)..(31): n includes a, c, g, or t, or contains no nucleotide
  misc_feature (34)..(34): n includes a, c, g, or t, or contains no nucleotide
  misc_feature (36)..(36): n includes a, c, g, or t, or contains no nucleotide
  misc_feature (132)..(132): n includes a, c, g, or t, or contains no nucleotide
  misc_feature (141)..(142): n includes a, c, g, or t, or contains no nucleotide
  misc_feature (144)..(144): n includes a, c, g, or t, or contains no nucleotide
  misc_feature (147)..(147): n includes a, c, g, or t, or contains no nucleotide
  misc_feature (163)..(163): n includes a, c, g, or t, or contains no nucleotide
  misc_feature (181)..(181): n includes a, c, g, or t, or contains no nucleotide
  misc_feature (184)..(184): n includes a, c, g, or t, or contains no nucleotide
  misc_feature (195)..(196): n includes a, c, g, or t, or contains no nucleotide
  misc_feature (200)..(200): n includes a, c, g, or t, or contains no nucleotide
  misc_feature (216)..(217): n includes a, c, g, or t, or contains no nucleotide
  misc_feature (230)..(230): n includes a, c, g, or t, or contains no nucleotide
  misc_feature (232)..(232): n includes a, c, g, or t, or contains no nucleotide
  misc_feature (242)..(242): n includes a, c, g, or t, or contains no nucleotide
  misc_feature (256)..(256): n includes a, c, g, or t, or contains no nucleotide
  misc_feature (260)..(260): n includes a, c, g, or t, or contains no nucleotide
  misc_feature (268)..(268): n includes a, c, g, or t, or contains no nucleotide
  misc_feature (272)..(272): n includes a, c, g, or t, or contains no nucleotide
  misc_feature (281)..(282): n includes a, c, g, or t, or contains no nucleotide
  misc_feature (288)..(288): n includes a, c, g, or t, or contains no nucleotide
  misc_feature (298)..(299): n includes a, c, g, or t, or contains no nucleotide
  misc_feature (310)..(310): n includes a, c, g, or t, or contains no nucleotide
  misc_feature (319)..(319): n includes a, c, g, or t, or contains no nucleotide
  misc_feature (334)..(334): n includes a, c, g, or t, or contains no nucleotide
  misc_feature (347)..(347): n includes a, c, g, or t, or contains no nucleotide
  misc_feature (424)..(424): n includes a, c, g, or t, or contains no nucleotide
  misc_feature (493)..(493): n includes a, c, g, or t, or contains no nucleotide
  misc_feature (495)..(496): n includes a, c, g, or t, or contains no nucleotide
gtcgctgaccggaccgaatgtttcatcactnggntnggggagaaacccaaggtacttttggagctggccttctcaaggaagcccagctccctgtgattgagaataaagtgtgcaatcgctatgagtttctgnatggaaganncnaanccaccgaactctgtgnctgggcatttggccggangcnctgacagttgnnccangggtgacagtggaggnncctctggtttgcntncgagaaggancaaatacattttancaanggagtcancttncttggggtnncttggnctgtgcacgnnccccaataagncctggtgtnctatgttcgtgtttncaaggtttgttancttggattgagggagtgatgagaaataattaattggacgggagacagagtgacgcactgactcacctagaggctggnacgtgggtagggatttagcatgctggaaataactggcagtaatcaaacgaagacactgtccccagctancnnctacgccaaacctcggcattttttgtgttattttctgactgctggattctgtagtaaggtgac

SEQ ID NO: 3464 - DNA, 383 bp, Homo sapiens
  misc_feature (70)..(141): n includes a, c, g, or t, or contains no nucleotide
gctctacactccagggcatcttgacccagccgaaaaagttgaagatgctcaccccaagttatggtgtgcnnnnnnnnnnnnnnnnnnnnnnnnnnnnnnnnnnnnnnnnnnnnnnnnnnnnnnnnnnnnnnnnnnnnnnnncactgcaaaagtgaactgcatggtgatggccgaccagaaccaggtgtgggttggctcggaagactccgtcatctacatcatcaacgtccacagcatgtcctgcaacaagcagctcacagcccactgctccagtgtcacggatttgattgtgcaggacggacaggaggcacccagcaacgtgtactcgtgcagcatggacggcatggtgctggtgtggaatgtgagcacactgcaggtgacca

SEQ ID NO: 3465 - DNA, 433 bp, Homo sapiens
atcttttggaactcctttgatctcactgttattattaacatttatttattatttttctaaatgtgaaagaaatacataatttagggaaaattggaaaatataggaaactttaaacgagaaaatgaaacctctcataatcccactgcatagaaataacaagcgttaacattttcatatttttttctttcagtcatttttgtatttgtggtatatgtatatatgtacctatatgtatttgcatttgaaattttggaatcctgctctatgtacagttttgtattatactttttaaatcttgaactttatgaacattttctgaaatcattgattattctacaaaaacatgattttaaacagctgtaaaatattctatgatatgaatgttttatgcattatttaagcctgtctctattgttggaatttcaggtcattt

SEQ ID NO: 3466 - DNA, 365 bp, Homo sapiens
  misc_feature (116)..(134): n includes a, c, g, or t, or contains no nucleotide
  misc_feature (273)..(288): n includes a, c, g, or t, or contains no nucleotide
atgtcccgctgcattcccctatgggtcggagcccggggcattgagtttgactggaagtacatccagatgagcatagactccaacatcagtctggtccattacatcgtcgcgtctgnnnnnnnnnnnnnnnnnnnacgctatgatctgtaccacaccttccggccagctgtcctcctgctgatgttcctcagtgtctacaaggcctttgttatggagaccttcgtccacctctgctcgctgggcagttgggcagctctactggcccgagcagtnnnnnnnnnnnnnnnngccctcagcactttggccctgtatgtcgccgttgtcaatgtgcactcctaggcttggtgtctcagacattgatgtac

SEQ ID NO: 3467 - DNA, 527 bp, Homo sapiens
  misc_feature (98)..(114): n includes a, c, g, or t, or contains no nucleotide
atggggacaagctgcgggtactcccctgtgctcatgcctaccacagccgctgcgtggacccctggctcactcagacccggaagacctgccccatttgnnnnnnnnnnnnnnnnntcggggtcctggggacgaagaccaagaggaagaaactcaagggcaagaggagggtgatgaaggggagccaagggaccaccctgcctcagaaaggaccccacttttgggttctagccccactcttcccacctcctttggttccttagccccagctccccttgtttttcctgggccttcaacagatcccccactgtcccctccctcttcccctgttatcctggtctaataaccccccacacatacacctctggtgacctatttgcacagaccgtcgtcttccctccagtcttctgagggataggggacattccatcccaagcttctcccttacccacacctatccttttgaggggctttggggtggggctggggcaagcagagggactgggtcttcacttcttgggctaataaaa

SEQ ID NO: 3468 - DNA, 595 bp, Homo sapiens
  misc_feature (213)..(213): n includes a, c, g, or t, or contains no nucleotide
  misc_feature (215)..(220): n includes a, c, g, or t, or contains no nucleotide
  misc_feature (223)..(224): n includes a, c, g, or t, or contains no nucleotide
  misc_feature (226)..(227): n includes a, c, g, or t, or contains no nucleotide
  misc_feature (229)..(234): n includes a, c, g, or t, or contains no nucleotide
  misc_feature (236)..(236): n includes a, c, g, or t, or contains no nucleotide
  misc_feature (282)..(282): n includes a, c, g, or t, or contains no nucleotide
  misc_feature (299)..(299): n includes a, c, g, or t, or contains no nucleotide
  misc_feature (309)..(309): n includes a, c, g, or t, or contains no nucleotide
  misc_feature (312)..(312): n includes a, c, g, or t, or contains no nucleotide
  misc_feature (315)..(315): n includes a, c, g, or t, or contains no nucleotide
  misc_feature (329)..(329): n includes a, c, g, or t, or contains no nucleotide
  misc_feature (386)..(386): n includes a, c, g, or t, or contains no nucleotide
  misc_feature (420)..(441): n includes a, c, g, or t, or contains no nucleotide
agtgtccctgagcagcttagacagcagggctctctgtatcagtctttcttgagcagatgattcccctagttgagtagccagatgaaattcaagcctaaagacaattcattcatttgcatccatgggcacagaaggttgctatatagtatctaccttttgctacttatttaatgataaaatttaatgacagtttgaaaaaaaaaaaaaaaaaanannnnnnggnngnnannnnnntntttgtacagttttttttcaagcttcacatttgcgtgtatctaattncagctgatgctcaagtnccaaggggtngtnctnccttcccaggctgncccccagggtttctgcactggtcccctcttttcccttcagtcttcttcacttccctntgctgctgcttcatgtgctacatctcagacttannnnnnnnnnnnnnnnnnnnnnaaacattctctagggtctttcatcaggcctttagttattttagggataaaaactattgataaaaaggacaaggatagaacagagaaaatttaaagtcctgttccgggttttttgttatgttttctttaaaaactcagagactgatgttcaatat

SEQ ID NO: 3469 - DNA, 444 bp, Homo sapiens
gtgaccaccgattccagctgcggttaatccagcttgggcctgtctgcactgcgatcctcttgggctctcctaggatccccccatgccccgtaagaggtggaagacgcttccttccaggacagcaggctttgagtccagcacccccagcctgcctttgccaccagccccaccctgcagagtatatgaggcttgacagagtctgccccctcccccactgcaccccaagagagagagccccagccagcggaacagtttctattaccccctccctgcccccagacccatgtgatttctgctttcttctttagcaagatattctggtttctagataaggaagagtctctaatgagcccccgagccccagtctcttcagactcatggattggtctgaggggtctgaacgtctcctagccaatcagaactggctgtggaccaccctagcac

SEQ ID NO: 3470 - DNA, 594 bp, Homo sapiens
  misc_feature (26)..(75): n includes a, c, g, or t, or contains no nucleotide
  misc_feature (91)..(116): n includes a, c, g, or t, or contains no nucleotide
  misc_feature (182)..(182): n includes a, c, g, or t, or contains no nucleotide
  misc_feature (195)..(195): n includes a, c, g, or t, or contains no nucleotide
  misc_feature (211)..(268): n includes a, c, g, or t, or contains no nucleotide
  misc_feature (391)..(405): n includes a, c, g, or t, or contains no nucleotide
  misc_feature (464)..(492): n includes a, c, g, or t, or contains no nucleotide
  misc_feature (523)..(523): n includes a, c, g, or t, or contains no nucleotide
aagtgccttctctgtctcacacttgnnnnnnnnnnnnnnnnnnnnnnnnnnnnnnnnnnnnnnnnnnnnnnnnnnatctgcagccagactnnnnnnnnnnnnnnnnnnnnnnnnnnccatgtagccaggcccggaatgggcctctctggacaagagccaccctttcactgtgcatatgatgntgatgcaattccnccatcatctctggacnnnnnnnnnnnnnnnnnnnnnnnnnnnnnnnnnnnnnnnnnnnnnnnnnnnnnnnnnngcacaggactgaggatcctctcctccagaaaagccccctcgaggaaataaattagtgcggttctctttgacctccaaagacaagacaagcacttatttttattttcagaagacaaaagaaccnnnnnnnnnnnnnnntgcgaatgctctatctccagtctgtctctgtgtactggtagaggctgggaggagtaggnnnnnnnnnnnnnnnnnnnnnnnnnnnnncttgctcttctgtctgtcatcttgcaggatncccgagggccagatgggcttagctaggccaaagtaacagactcaagagttattgtacattactgaccacgc

SEQ ID NO: 3471 - DNA, 377 bp, Homo sapiens
ccgtgttgcacaaacccgcgcgtctcggctgcccctttgtacaccgcgccgcaagggggctccgagggggcgcacgtcaaaccctgcctttcctttacttttactttttttttttctttggaagagagaagaacagagtgttcgattctgccctatttatgtttctactcggggaacaaacgttggttgtgtgtgtgtgtgttttcttgtgttggttttttaaagaaatgggaagaagaaaaaaaaattctccgcccctttcctcgatctcgctcccccttcggtctttcgaccgtccccccctcccctttttttgttctgttttgttttgttttgctacgagtccacattcctgtttgtaatccttggttcgcccg

SEQ ID NO: 3472 - DNA, 584 bp, Homo sapiens
  misc_feature (105)..(105): n includes a, c, g, or t, or contains no nucleotide
  misc_feature (135)..(135): n includes a, c, g, or t, or contains no nucleotide
  misc_feature (163)..(163): n includes a, c, g, or t, or contains no nucleotide
  misc_feature (273)..(374): n includes a, c, g, or t, or contains no nucleotide
  misc_feature (514)..(515): n includes a, c, g, or t, or contains no nucleotide
  misc_feature (522)..(525): n includes a, c, g, or t, or contains no nucleotide
  misc_feature (527)..(529): n includes a, c, g, or t, or contains no nucleotide
  misc_feature (531)..(532): n includes a, c, g, or t, or contains no nucleotide
  misc_feature (535)..(536): n includes a, c, g, or t, or contains no nucleotide
  misc_feature (541)..(545): n includes a, c, g, or t, or contains no nucleotide
  misc_feature (549)..(549): n includes a, c, g, or t, or contains no nucleotide
  misc_feature (554)..(555): n includes a, c, g, or t, or contains no nucleotide
ggcccagtccccatgtgagagcagcagaggcggtcttcaacatcctgccagccccacacagctacagctttcttgctcccttcagcccccagcccctcccccatntcccaccctgtacctcatcccatgagaccntggtgcctggctctttcgtcacccttgnacaagacaaaccaagtcggaacagcagataacaatgcagcaaggccctgctgcccaatctccatctgtcaacaggggcgtgaggtcccaggaagtggccaaaagctagannnnnnnnnnnnnnnnnnnnnnnnnnnnnnnnnnnnnnnnnnnnnnnnnnnnnnnnnnnnnnnnnnnnnnnnnnnnnnnnnnnnnnnnnnnnnnnnnnnnnncccagaccccaggctggacatgctgactgtcctctcccctccagcctttggccttggcttttctagcctatttacctgcaggctgagccactctcttccctttccccagcatcactccccaaggaagagccaatgttttnnacccatnnnncnnncnnccnnccccnnnnncccnctgcnnagccaagcttgttatcagctttcagggcc

SEQ ID NO: 3473 - DNA, 528 bp, Homo sapiens
  misc_feature (193)..(193): n includes a, c, g, or t, or contains no nucleotide
  misc_feature (236)..(236): n includes a, c, g, or t, or contains no nucleotide
  misc_feature (238)..(238): n includes a, c, g, or t, or contains no nucleotide
  misc_feature (293)..(293): n includes a, c, g, or t, or contains no nucleotide
  misc_feature (367)..(367): n includes a, c, g, or t, or contains no nucleotide
  misc_feature (469)..(484): n includes a, c, g, or t, or contains no nucleotide
ccaccaagggcttgggcctctcggggctggggcctcccaggggatggggacccagaggtgcagtggccgcccacatccatggcctaggagctactgggcaggttcccggccacacatctggtgggctgttttgtttttttttttcctcttcccccagatgtcttgacgggatcactggggctctttgtgagtnagggtggccaaactaccgccggaggagatggggtctcagagcnanagctgcggagggggaggggaagaagaaggcctcacttttgctgctgcggggcccnacacagccgctgctactttggggggtggggaaggggccaagctgcagacacacacagtcattcatttctgtccnacacccctgtgggtggcgggtgtgcgtgtgtgtgcttgtgtgtgcgcacgtgtcggcgctcacacacacatgctagcccactgatgcacccagcccagggcnnnnnnnnnnnnnnnngtggggccgtctcaccctggagcctggagaggatctatgcttgt

SEQ ID NO: 3474 - DNA, 553 bp, Homo sapiens
tcctctgtaacagaggtaatatatgagacaatcaacaccgttccaaaggcctgaaaataattttcagataaagagactccaaggttgactttagtttgtgagttactcatgtgactatttgaggattttgaaaacatcagatttgctgtggtatgggagaaaaggttatgtacttattattttagctctttctgtaatatttacattttttaccatatgtacatttgtacttttattttacacataagggaaaaaataagaccactttgagcagttgcctggaaggctgggcatttccatcatatagacctctgcccttcagagtagcctcaccattagtggcagcatcatgtaactgagtggactgtgcttgtcaacggatgtgtagcttttcagaaacttaattggggatgaatagaaaacctgtaagctttgatgttctggttacttctagtaaattcctgtcaaaatcaattcagaaattctaacttggagaatttaacattttactcttgtaaatcatagaagatgtatcataacagttcagaatttt

SEQ ID NO: 3475 - DNA, 307 bp, Homo sapiens
  misc_feature (153)..(153): n includes a, c, g, or t, or contains no nucleotide
ttgccagtctctgcagccagccaggcccaccaggcctcccaccagcccctctacctcaatcatccctgacctctgccattcacactgacttagaacggggggagggggtaccaggtggccaggtgggactgtttcaaatttccctgatccccnaggcttggggcaattggtaaaggaaagagcaggtgtgggggttaagcacttatttgaggtgggggtgttcacctctcttctcatcccttttcagaatatagggctcctctcattcctgtgaacccccagtcctggcttctttgtttgaggggat

SEQ ID NO: 3476 - DNA, 233 bp, Homo sapiens
acaatcccaggaagtcctaagaagtggggcagatggcagggctgaggatgggctctgcatcccccaaagccatcccttccctacttccccaaatgaagggacggctgtgggaccaggtctgtggaaagtggtgcatggtcagaatgggtgcagtttgaggggcctgtgtggaggcctcagggagatgttggactgtgcctggatccttactcctgcattgttctttgccagag

SEQ ID NO: 3477 - DNA, 208 bp, Homo sapiens
gcccacagcagaagggattcggcccaataatgcagacacctctgaaccagcctgggtgaagcgaaagatgttatcaataaatagcagtacatcttgaccttcttggtctctgaagtattcagccacagtcagcccagtcagagctacccgggcacgagcaccaggtggttcattcatttgaccatataccagcgctaccttagaggtg

SEQ ID NO: 3478 - DNA, 343 bp, Homo sapiens
acacacctgtgatgggaaagggcgaacgaggattaggggatggggaggaagagagagactgtggagctctggggggcaacctggaggtctgaaaagaggagccagagaaggtggtacccaggcttcctggtcagaaccggcctggagctccttcccttccccctggcctgagaggttgcttttaagtcttccaccccttgttccatctgcctgccaacccatcggaaaggaatccacatcatattggagatgaccccatcaaccccagggctccagcactaccaagttggaattccacgcccgggagtggggtagaggaagacgagacaggacgaggcagaaa

SEQ ID NO: 3479 - DNA, 239 bp, Homo sapiens
  misc_feature (37)..(37): n includes a, c, g, or t, or contains no nucleotide
  misc_feature (41)..(55): n includes a, c, g, or t, or contains no nucleotide
  misc_feature (125)..(126): n includes a, c, g, or t, or contains no nucleotide
  misc_feature (180)..(180): n includes a, c, g, or t, or contains no nucleotide
gatgtcctcaagttcttgtgcaaagacctgtgggtgncggnnnnnnnnnnnnnnntggacagcctgcgcaccaatcaccaggggacctacgtcctgcaagacaacagcttccccctcctcctccnnatggcctctggcctgcagtatctggaggaagcacccaagttcctggccttcacntgcggcctcctgcgcggcgccctctataccctgggcattgagagcgtggtcaccgcctc

SEQ ID NO: 3480 - DNA, 458 bp, Homo sapiens
  misc_feature (226)..(255): n includes a, c, g, or t, or contains no nucleotide
  misc_feature (313)..(313): n includes a, c, g, or t, or contains no nucleotide
  misc_feature (319)..(319): n includes a, c, g, or t, or contains no nucleotide
  misc_feature (321)..(321): n includes a, c, g, or t, or contains no nucleotide
  misc_feature (327)..(346): n includes a, c, g, or t, or contains no nucleotide
  misc_feature (396)..(416): n includes a, c, g, or t, or contains no nucleotide
tttgtttgtacaagatccgcagacgtgtaaatgttcctgcaaaaacacagactcgcgttgcaaggcgaggcagcttgagttaaacgaacgtacttgcagatgtgacaagccgaggcggtgagccgggcaggaggaaggagcctccctcagggtttcgggaaccagatctctcaccaggaaagactgatacagaacgatcgatacagaaaccacgctgccgccaccnnnnnnnnnnnnnnnnnnnnnnnnnnnnnnatccagaaacctgaaatgaaggaagaggagactctgcgcagagcactttgggtccggnagggcnanactccnnnnnnnnnnnnnnnnnnnnggtgacccagcacggtccctcttggaattggattcgccattttatttttnnnnnnnnnnnnnnnnnnnnnccggaagattagagagttttatttctgggattcctgtagaca

SEQ ID NO: 3481 - DNA, 454 bp, Homo sapiens
  misc_feature (76)..(93): n includes a, c, g, or t, or contains no nucleotide
tttgtgaattgcaataccagcatcacatgggtagagggaacggtgggaacactgctctcagacattacaagactgnnnnnnnnnnnnnnnnnnctggacccacgaggaatatataggtgtaatgggacagatatatacaaggacaaagaatctaccgtgcaagttcattatcgaatgtgccagagctgtgtggagctggatccagccaccgtggctggcatcattgtcactgatgtcattgccactctgctccttgctttgggagtcttctgctttgctggacatgagactggaaggctgtctggggctgccgacacacaagctctgttgaggaatgaccaggtctatcagcccctccgagatcgagatgatgctcagtacagccaccttggaggaaactgggctcggaacaagtgaacctgagactggtggcttctagaagcagccattacca

SEQ ID NO: 3482 - DNA, 422 bp, Homo sapiens
  misc_feature (46)..(62): n includes a, c, g, or t, or contains no nucleotide
  misc_feature (224)..(224): n includes a, c, g, or t, or contains no nucleotide
tgcatcacagttaacatgtcagctggccctccaggcccccgccccnnnnnnnnnnnnnnnnntgtgtcgtgaggtgcagcgggtcaccctgtggcccgtcctgtgacccatatttagccgtgtttgggactccgtgtcttcaatggtttgttagttgccattacaactttgtctgggtagagtttttgagtttttgcagttcagtatccctctgtctattcacncttcgtgttagtggtaactcagtttgtctttaaatagttacagaagggatacgtcatttgttaatgcttttgtgaagtgagttaaacgagctttctgtattttaatgctttagtgtttcagttttataagtgaagattttattttaaaaaccagtgggaaagagtggggggtttctttttatgtctgggtcattcagg

SEQ ID NO: 3483 - DNA, 471 bp, Homo sapiens
  misc_feature (140)..(140): n includes a, c, g, or t, or contains no nucleotide
  misc_feature (224)..(245): n includes a, c, g, or t, or contains no nucleotide
  misc_feature (280)..(280): n includes a, c, g, or t, or contains no nucleotide
  misc_feature (313)..(313): n includes a, c, g, or t, or contains no nucleotide
tcgaccttgtggttgccgtctgccccccaaaggagtatgacgatgagctgaccttcttctgaagtccaaaaggggaaaccaaattcaccgttaggaaacagtgagctccggccccacctcgtgaacacaaagcctcggancagccttgagagaggccacactacacacaccagatggcatccttgggacctgaatctatcacccaggaatctcaaactcccttnnnnnnnnnnnnnnnnnnnnnnaaggaacagctcgggccactcttctgaaggccaangtggaggaaagggagcagccagccgtttggganaagatctcaaggatccagactctcattcctttcctctggcccagtgaatttggtctctcccagctctgggggactccttccttgaaccctaataagaccccactggagtctctctctctccatccctctcctctgccctctgctctaattgctgccag

SEQ ID NO: 3484 - DNA, 289 bp, Homo sapiens
  misc_feature (171)..(187): n includes a, c, g, or t, or contains no nucleotide
ttctgggcctgctcacggcagtgccacctgccagctgtcagcaaggcctggggaaccttcagccctggatgcagggccttatcgcggtggccgtgttcctggtcctcgttgcaatcgcctttgcagtcaaccacttctggtgccaggaggagccggagcctgcacacatgnnnnnnnnnnnnnnnnncaaggcagatggagtcctggtgggaacagatggaaggtactcttcgatggcggccagtttcaggtccagtgagcatgagaatgcctatgagaatgtgcccga

SEQ ID NO: 3485 - DNA, 405 bp, Homo sapiens
  misc_feature (40)..(64): n includes a, c, g, or t, or contains no nucleotide
  misc_feature (67)..(67): n includes a, c, g, or t, or contains no nucleotide
  misc_feature (72)..(72): n includes a, c, g, or t, or contains no nucleotide
  misc_feature (75)..(113): n includes a, c, g, or t, or contains no nucleotide
  misc_feature (125)..(125): n includes a, c, g, or t, or contains no nucleotide
gaagccagggccatgccagcaggccccaccatggaaatcnnnnnnnnnnnnnnnnnnnnnnnnnggncattntgnnnnnnnnnnnnnnnnnnnnnnnnnnnnnnnnnnnnnnnaccgcgtgcctntgtggcgggactggagggcacagttgaggaaggagggtggttaagaaatacagtggggccctctcgctgtcccttgcccagggcacttgcattccagcctcgctgcatttgctctctcgattcccctttcctcctcactgcctcccaagcccaccctactccaaaataatgtgtcacttgatttggaactattcaagcagtaaaagtaaatgaatcccacctttactaaaacactttctctgaaccccccttgcccctcactgatcttgcttttccctgg

SEQ ID NO: 3486 - DNA, 529 bp, Homo sapiens
  misc_feature (53)..(67): n includes a, c, g, or t, or contains no nucleotide
  misc_feature (74)..(74): n includes a, c, g, or t, or contains no nucleotide
  misc_feature (79)..(79): n includes a, c, g, or t, or contains no nucleotide
  misc_feature (141)..(141): n includes a, c, g, or t, or contains no nucleotide
  misc_feature (286)..(286): n includes a, c, g, or t, or contains no nucleotide
  misc_feature (288)..(288): n includes a, c, g, or t, or contains no nucleotide
  misc_feature (307)..(308): n includes a, c, g, or t, or contains no nucleotide
  misc_feature (339)..(339): n includes a, c, g, or t, or contains no nucleotide
  misc_feature (443)..(443): n includes a, c, g, or t, or contains no nucleotide
agaatggagcctgctctccgcgcctacccttcccgcctccctctcagaggccnnnnnnnnnnnnnnncactggnttggnaacaccttggggtccctccaccccacagaaccttcaacccagtgggtctgggatatggctgncccaggagacagaccacttgccacgctgttgtaaaaacccaagtccctgtcatttgaacctggatccagcactggtgaactgagctgggcaggaagggagaacttgaaacagattcaggccagcccagccaggccaacagcaccntncccgctgggaagagaagannggcccagcccagagccacctggatctatccntgcggcctccacacctgaacttgcctaactaactggcaggggagacaggagcctagcggagcccagcctgggagcccagagggtggcaagaacagtgggcgttnggagcctagctcctgccacatggagccccctctgccggtcgggcagccagcagagggggagtagccaagctgcttgtcctgggcct

SEQ ID NO: 3487 - DNA, 550 bp, Homo sapiens
tatttcatatgattcgcctgattacacagatgaatcttgcactttcaagatatcattgcgaaatttccggtccatcttatcatgggaattaaaaaaccactccattgtaccaactcactatacattgctgtatacaatcatgagtaaaccagaagatttgaaggtggttaagaactgtgcaaataccacaagatcattttgtgacctcacagatgagtggagaagcacacacgaggcctatgtcaccgtcctagaaggattcagcgggaacacaacgttgttcagttgctcacacaatttctggctggccatagacatgtcttttgaaccaccagagtttgagattgttggttttaccaaccacattaatgtgatggtgaaatttccatctattgttgaggaagaattacagtttgatttatctctcgtcattgaagaacagtcagagggaattgttaagaagcataaacccgaaataaaaggaaacatgagtggaaatttcacctatatcattgacaagttaattccaaacacgaactactgtgtatct

SEQ ID NO: 3488 - DNA, 386 bp, Homo sapiens
ccacagggaccagaatgttttgttgttcttttgttttcttttttgtaccaaagtcaactgcacgtgttttatatttttaagagatcgtaggcaattagagatcgaagcctcctatctccacatctctgaagaagttgaggggtgggggagagaatgacttctgccttcatctgcagtaacggggggacctatactgacctcttccccagccatttagaaacaagttctagggtgggttggaaaatctccaagagccctgacctcatcttccacctcagcaaccatgacctgaaacctcagcgtgaatttgggggatttttcagtggaacccttgcccccaaatgtcgaccagcccccaaatgtcgaagaattttcttcttgccaat

SEQ ID NO: 3489 - DNA, 397 bp, Homo sapiens
ggcattactggtaggcaggaaaactgagggtcgaacaaatggaagaatgcggtgatcatagaccaaagacacacagataattaaccccatgtgtccacccaggccaaagttcttcctgctaccccacagtggatgtccaggcagatggtccccacatgatggggaagcagagggcatagtgtggttttgtgggacttgttcatgttttgtagtgtgggctcaacagtgccaaaggaaacactagggaaaagttggtgaaacatgccagctagcaggaccagtaaaggcataatcaggcatttggcaaagcttgcttttctaattcaatgataggttctaataggaaatttttgaagattttttaaaacaatgttatagtggcacttccccagtatgg

SEQ ID NO: 3490 - DNA, 504 bp, Homo sapiens
  misc_feature (43)..(43): n includes a, c, g, or t, or contains no nucleotide
  misc_feature (56)..(56): n includes a, c, g, or t, or contains no nucleotide
  misc_feature (70)..(70): n includes a, c, g, or t, or contains no nucleotide
  misc_feature (91)..(91): n includes a, c, g, or t, or contains no nucleotide
  misc_feature (110)..(110): n includes a, c, g, or t, or contains no nucleotide
gccatcaactaaagttgtactttaaaaatttactacaatatgntacatttctaagntcaaacacttgtgnacttttgctttaattccatgnaatgttcctgcctccttgnatatttgtatttattctttttttctctagagtagaggtataattgtgtgatatttcagaaatacagataaatgattcaaaaagtcacagttaaggagaatcatgtttctttgatcatgaataactgattagtaagtcttgcctatattttcctgatagcatatgacaaatgtttctaaggtaacaagatgagaacagataaagattgtgtggtgttttggatttggagagaaatattttaatttttaaatgcagttacaaattataatgtattcatatttgtactttctgttaaaatgcatgattgcagaattgtttagattttgtgtttattcttgatgaaaagctttgtttgttcttgtttttaagtttgcactcaaatcttaagaaataaa

SEQ ID NO: 3491 - DNA, 365 bp, Homo sapiens
  misc_feature (76)..(76): n includes a, c, g, or t, or contains no nucleotide
tcctggcttctcctgtagggcacctccctgcccctagcctcccaggaaatggtgctctcctggccctgcctctggnccttcccgggccgctgcccctcagccatgtggcacttctgagctcctgacctaggccaaggggaggtctctgcccccttccccggccctgggctacccttgggtcctgctcctcaggccgctcccctgtccctggccatgggtaggagactgccctggtcatggccgcctgcctgtcattcctgactcaccaccgtccccaggtgaaccattcctcccttctcctcagctgcagtcgaaggctttaactttgcacacttgggatcacagttgcgtcattgtgtattaaa

SEQ ID NO: 3492 - DNA, 305 bp, Homo sapiens
  misc_feature (45)..(46): n includes a, c, g, or t, or contains no nucleotide
  misc_feature (48)..(49): n includes a, c, g, or t, or contains no nucleotide
  misc_feature (52)..(52): n includes a, c, g, or t, or contains no nucleotide
  misc_feature (55)..(55): n includes a, c, g, or t, or contains no nucleotide
  misc_feature (58)..(69): n includes a, c, g, or t, or contains no nucleotide
  misc_feature (72)..(74): n includes a, c, g, or t, or contains no nucleotide
  misc_feature (76)..(76): n includes a, c, g, or t, or contains no nucleotide
  misc_feature (79)..(80): n includes a, c, g, or t, or contains no nucleotide
  misc_feature (82)..(121): n includes a, c, g, or t, or contains no nucleotide
  misc_feature (190)..(190): n includes a, c, g, or t, or contains no nucleotide
ggagacacacagacccagtgcagctccaggcggcagggcgagtgnngnnggnccnggnnnnnnnnnnnnttnnngnccnngnnnnnnnnnnnnnnnnnnnnnnnnnnnnnnnnnnnnnnnnaggtcctggatagctccaacccatcctggtggaccggccgcctgcacaacaagctgggcctcttccctnccaactacgtggcacccatgacccgataaactcttcaggggacagaagctttttgtctggagctgcccacaagaaagagggcaaggaaaaaaggctggactccatgactatatat

SEQ ID NO: 3493 - DNA, 493 bp, Homo sapiens
  misc_feature (30)..(50): n includes a, c, g, or t, or contains no nucleotide
  misc_feature (71)..(129): n includes a, c, g, or t, or contains no nucleotide
  misc_feature (183)..(199): n includes a, c, g, or t, or contains no nucleotide
  misc_feature (223)..(239): n includes a, c, g, or t, or contains no nucleotide
  misc_feature (247)..(261): n includes a, c, g, or t, or contains no nucleotide
caagctgtgtgaccatcagctcgcacggtnnnnnnnnnnnnnnnnnnnnncaggccacttctggtccaagnnnnnnnnnnnnnnnnnnnnnnnnnnnnnnnnnnnnnnnnnnnnnnnnnnnnnnnnnnncccaagattccatccctctggcgggaagacgcgttgaacccagggaagaacctnnnnnnnnnnnnnnnnncccagcattgaaatggactctgannnnnnnnnnnnnnnnnagtgtcannnnnnnnnnnnnnnatgatatgcactgatcacacaagactgccctttcctgagaagctgcgggcttcggtgtggaggggtggagtgctgtgatctcgacaacttactttcaaagacataaagcacagatctccgcacaggggatgtgtgtgttcctgatgtaatttgcataacttttctgtagtttgaaatgtttccaaataaatattggcaaggggagtggaaatgacaccaagaagcccctcat

SEQ ID NO: 3494 - DNA, 64 bp, Homo sapiens
tgaggactactttccagaatttgctcgctacactactcctgaggatgctactcccgagcccgga

SEQ ID NO: 3495 - DNA, 289 bp, Homo sapiens
ctcagctccaggaaagatggggagtccaagtggattaatgatgtcatgcataattttaagagacaagggagaaaacacaatgtatagccagagaaggagaagctcccatccaaatcctactaggaagagagtgggctgcagatgaatctgtgactcatgtttccctgtttcaaagggatcctggggaaggaggggaacatgcttgcagtatctctccctgtctgtctgctcacataagcattccgtccatctaagctcatcgtgctactggtatgtgtatgtgcagtta

SEQ ID NO: 3496 - DNA, 307 bp, Homo sapiens
  misc_feature (116)..(130): n includes a, c, g, or t, or contains no nucleotide
  misc_feature (137)..(162): n includes a, c, g, or t, or contains no nucleotide
accatccaggccaaataagcgccggctatgcccctgtattggattgccacacggctcacattgcatgcaagtttgctgagctgaaggaaaagattgatcgccgttctggtaaaaannnnnnnnnnnnnnntaaattnnnnnnnnnnnnnnnnnnnnnnnnnnttgatatggttcctggcaagcccatgtgtgttgagagcttctcagactatccacctttgggtcgctttgctgttcgtgatatgagacagacagttgcggtgggtgtcatcaaagcagtggacaagaaggctgctggagctggcaa

SEQ ID NO: 3497 - DNA, 79 bp, Homo sapiens
actcctgcaagaagagctgctgctcctgctgccccatgagctgtgccaagtgtgcccagggctgcatatgcaaaggggc

SEQ ID NO: 3498 - DNA, 364 bp, Homo sapiens
  misc_feature (299)..(299): n includes a, c, g, or t, or contains no nucleotide
gctgacgtccagtgtacagtgaatctggtaggcggggacccttacctgaaccagcctggtccactgggaactcaaaagcccacgtcaggaccacagaccccccaggcccagcagaagagcctccttcagcagctactgactgaataaccacttttaaaggaatgtgaaatttaaataatagacatacagagatatacaaatatattatatatttttctgagatttttgatatctcaatctgcagccattcttcaggtcgtagcatttggagcaaaaaaaaaaaaaaaaaaaaaaaaaanggagtttgcttttgtcgggagattgaaagatgtttttgtttctttctttgtaaaggccttggata

SEQ ID NO: 3499 - DNA, 304 bp, Homo sapiens
  misc_feature (186)..(206): n includes a, c, g, or t, or contains no nucleotide
taggtcgcggcgacatggccaaacgtaccaagaaagtcgggatcgtcggtaaatacgggacccgctatggggcctccctccggaaaatggtgaagaaaattgaaatcagccagcacgccaagtacacttgctctttctgtggcaaaaccaagatgaagagacgagctgtggggatctggcactgtnnnnnnnnnnnnnnnnnnnnngctggcggtgcctggacgtacaataccacttccgctgtcacggtaaagtccgccatcagaagactgaaggagttgaaagaccagtagacgctcctcta

SEQ ID NO: 3500 - DNA, 571 bp, Homo sapiens
  misc_feature (26)..(48): n includes a, c, g, or t, or contains no nucleotide
  misc_feature (199)..(200): n includes a, c, g, or t, or contains no nucleotide
  misc_feature (230)..(247): n includes a, c, g, or t, or contains no nucleotide
  misc_feature (249)..(249): n includes a, c, g, or t, or contains no nucleotide
  misc_feature (258)..(260): n includes a, c, g, or t, or contains no nucleotide
  misc_feature (267)..(267): n includes a, c, g, or t, or contains no nucleotide
  misc_feature (274)..(274): n includes a, c, g, or t, or contains no nucleotide
  misc_feature (284)..(284): n includes a, c, g, or t, or contains no nucleotide
  misc_feature (288)..(288): n includes a, c, g, or t, or contains no nucleotide
  misc_feature (294)..(294): n includes a, c, g, or t, or contains no nucleotide
  misc_feature (298)..(298): n includes a, c, g, or t, or contains no nucleotide
  misc_feature (305)..(305): n includes a, c, g, or t, or contains no nucleotide
  misc_feature (309)..(309): n includes a, c, g, or t, or contains no nucleotide
  misc_feature (311)..(311): n includes a, c, g, or t, or contains no nucleotide
  misc_feature (315)..(315): n includes a, c, g, or t, or contains no nucleotide
  misc_feature (318)..(318): n includes a, c, g, or t, or contains no nucleotide
cacccgtgagaagctgcccatggtcnnnnnnnnnnnnnnnnnnnnnnnctcacctctggccctgtgtgaccggcccttctccctcctgggtttcggagacattttggtgccagggctgctggtggcctactgccacaggtttgacatccaggtacagtcctccagggtatacttcgtggcctgcaccatcgcctatggnnttggcctccttgtgacattcgtggcactgnnnnnnnnnnnnnnnnnncnagcccgctnnntcctctnacctggntgccctgcangctnggtgancgangctgcgntgtngngctnctngcgccgggagctgggcgtgttctggacgggcagcggctttgcgaaagtcctacctccatctccgtgggccccagcaccagccgacggcccgcagcctcccaaagactctgccacgccactctccccgcagccgcccagcgaagaaccagccacatccccctggcctgctgagcagtccccaaaatcacgcacgtccgaggagatgggggctggagcccccatgcgggagcctgggagcccagctgaatccgag

SEQ ID NO: 3501 - DNA, 576 bp, Homo sapiens
  misc_feature (355)..(377): n includes a, c, g, or t, or contains no nucleotide
  misc_feature (379)..(386): n includes a, c, g, or t, or contains no nucleotide
  misc_feature (388)..(390): n includes a, c, g, or t, or contains no nucleotide
  misc_feature (393)..(402): n includes a, c, g, or t, or contains no nucleotide
  misc_feature (485)..(486): n includes a, c, g, or t, or contains no nucleotide
  misc_feature (497)..(497): n includes a, c, g, or t, or contains no nucleotide
  misc_feature (500)..(500): n includes a, c, g, or t, or contains no nucleotide
  misc_feature (502)..(504): n includes a, c, g, or t, or contains no nucleotide
cactaaaactctagaaggtgttacaagggggagggaaggggggcaaagtccttgaacattttctttggctcgtgccatgttatgatcatataccttttaaataaggggaaatagtatctttaaagttaatgtctagccaagagtttagtaaacgaagaattaaactgcactgttgatcggtgctttgtgtaaatacatctttaacatttgggtggagaggggccttaagaaggacagttcattgtaggaaagcaattctgtacatgagtttaagcattcttgttgcattgtctctgcagattctatttttgtttacaatattaaaatgtatgttagcaaaatgggtggattttcnnnnnnnnnnnnnnnnnnnnnnnannnnnnnnannntannnnnnnnnnagatgcattttcatttttcctttctctttttattatcaatattgtcatttttccctaataaaatatacccaggtgattatatnngttgatctaanaanannnaaggtttgttttatatgaattttcaaaaagatgtctctttacactttttgttaccttgtagactcttattga

SEQ ID NO: 3502 - DNA, 318 bp, Homo sapiens
  misc_feature (92)..(111): n includes a, c, g, or t, or contains no nucleotide
cctcatctgaggtaagaatgtacatcagctggcagccccaagcaagtggctgcagggacactgatgccacagctcctgggccggccctcacnnnnnnnnnnnnnnnnnnnnagccctgagccaaggcaaggatttgccaaaaatgttctgggggcccagcaaatgcaggagccgacctggggctgcacatccctgcccatccccagaaagactgttcctgtcaggatttgtttccctctgctgtggcggtgactgcttctggaccagaacagctccagctcccaggtattttctacaggaccacttgagtgggcagcc

SEQ ID NO: 3503 - DNA, 551 bp, Homo sapiens
  misc_feature (78)..(154): n includes a, c, g, or t, or contains no nucleotide
  misc_feature (156)..(157): n includes a, c, g, or t, or contains no nucleotide
  misc_feature (159)..(162): n includes a, c, g, or t, or contains no nucleotide
  misc_feature (164)..(169): n includes a, c, g, or t, or contains no nucleotide
  misc_feature (171)..(171): n includes a, c, g, or t, or contains no nucleotide
  misc_feature (173)..(174): n includes a, c, g, or t, or contains no nucleotide
  misc_feature (176)..(184): n includes a, c, g, or t, or contains no nucleotide
  misc_feature (186)..(188): n includes a, c, g, or t, or contains no nucleotide
  misc_feature (190)..(204): n includes a, c, g, or t, or contains no nucleotide
  misc_feature (206)..(206): n includes a, c, g, or t, or contains no nucleotide
  misc_feature (208)..(390): n includes a, c, g, or t, or contains no nucleotide
  misc_feature (525)..(526): n includes a, c, g, or t, or contains no nucleotide
acctgaatggggactggtactgtaggtattgggtcagctttcatgccgttccctgctggccatctcccaatgctgaannnnnnnnnnnnnnnnnnnnnnnnnnnnnnnnnnnnnnnnnnnnnnnnnnnnnnnnnnnnnnnnnnnnnnnnnnnnngnngnnnnannnnnnanannannnnnnnnncnnnannnnnnnnnnnnnnngnannnnnnnnnnnnnnnnnnnnnnnnnnnnnnnnnnnnnnnnnnnnnnnnnnnnnnnnnnnnnnnnnnnnnnnnnnnnnnnnnnnnnnnnnnnnnnnnnnnnnnnnnnnnnnnnnnnnnnnnnnnnnnnnnnnnnnnnnnnnnnnnnnnnnnnnnnnnnnnnnnnnnnnnnnnnnnnnnnnnnnnaccatcacgttgaaggttgcttccttcctggtcgtttgctctggtgagaccaaatgacctgcaaagtgtcacttgattccattctctccatcccttccatcccaggcaatctttatctagctacaccaacctgtnncccaggggcttcaagagttgttgtt

SEQ ID NO: 3504 - DNA, 595 bp, Homo sapiens
  misc_feature (26)..(26): n includes a, c, g, or t, or contains no nucleotide
  misc_feature (106)..(106): n includes a, c, g, or t, or contains no nucleotide
  misc_feature (305)..(328): n includes a, c, g, or t, or contains no nucleotide
  misc_feature (343)..(361): n includes a, c, g, or t, or contains no nucleotide
  misc_feature (371)..(420): n includes a, c, g, or t, or contains no nucleotide
  misc_feature (539)..(570): n includes a, c, g, or t, or contains no nucleotide
gcacttgggctctggcaggtcacttntctgcacggacgaaggaggcgaagacgctgtccttccggctgagcagcttctctggcttatcgaactcaaggatggcacnccgcttcaggacgatcaccaggtctgcactcaggatggtgtgcactcgatgcgcgatggtgaccacagtgcggtctgcgaaggctgtcatcaccaccttttggaggatgttttccgtggccatgtcaatggaagccgtggcctcgtccatgatgaagatgctggtcttcctcacgaaggcccgggccaggcagaacagnnnnnnnnnnnnnnnnnnnnnnnnctccccgccttctgnnnnnnnnnnnnnnnnnnntcctggcagnnnnnnnnnnnnnnnnnnnnnnnnnnnnnnnnnnnnnnnnnnnnnnnnnntgctatctgagcacttcctctcagggtccaggttaaatcggatggtgccgctgaagaggacggggtcctgcaggatgatggagaggcgtgagcgcagggtgtgcagcggcagtttggcnnnnnnnnnnnnnnnnnnnnnnnnnnnnnnnncgaacgtgtccaccatgcggaagaa

SEQ ID NO: 3505 - DNA, 279 bp, Homo sapiens
tgatgagcctatgtccctgcctaacgctggtgtctcactcatctcttttacctaaattgtcctgaactttgttaagtgttctggacaaggccaagcttttctttattaaaacctcagcatgtctccctgatctgaactatttgctttctcttcaagataagttgtattttaccatggaaaaatacagtatctaacattaccattcacgttaaatgaagtttcctcataacatttatctttagttttatgaagtcatcgtgaccaatgttacagtaattt

SEQ ID NO: 3506 - DNA, 263 bp, Homo sapiens
  misc_feature (65)..(67): n includes a, c, g, or t, or contains no nucleotide
  misc_feature (76)..(76): n includes a, c, g, or t, or contains no nucleotide
  misc_feature (163)..(163): n includes a, c, g, or t, or contains no nucleotide
gatggtttgggctccttcctctttttagaaatatacaagcagaaatctcattctctcaagttttnnnaaaatgtgnaaaatacaagcctcctttgcccagaggcgccatttacatctggcattcacctttgctaagagatagagatctatatatactctccgnactcacgcacgcgtgcactcgcacccaagctcacacaattgatactggtggcgattggcgcaggaaccagaaggttccattgctggctggctctctaagc

SEQ ID NO: 3507 - DNA, 304 bp, Homo sapiens
  misc_feature (174)..(189): n includes a, c, g, or t, or contains no nucleotide
ccgacgagctggtgcgtttccgcttctgcagcggctcctgccgccgcgcgcgctctccacacgacctcagcctggccagcctactgggcgccggggccctgcgaccgcccccgggctcccggcccgtcagccagccctgctgccgacccacgcgctacgaagcggtctccttcnnnnnnnnnnnnnnnncctggagaaccgtggaccgcctctccgccaccgcctgcggctgcctgggctgagggctcgctccagggctttgcagactggacccttaccggtggctcttcctgcctgggaccct

SEQ ID NO: 3508 - DNA, 501 bp, Homo sapiens
  misc_feature (69)..(93): n includes a, c, g, or t, or contains no nucleotide
  misc_feature (97)..(97): n includes a, c, g, or t, or contains no nucleotide
  misc_feature (99)..(101): n includes a, c, g, or t, or contains no nucleotide
  misc_feature (105)..(105): n includes a, c, g, or t, or contains no nucleotide
  misc_feature (120)..(120): n includes a, c, g, or t, or contains no nucleotide
  misc_feature (132)..(132): n includes a, c, g, or t, or contains no nucleotide
  misc_feature (134)..(134): n includes a, c, g, or t, or contains no nucleotide
  misc_feature (234)..(288): n includes a, c, g, or t, or contains no nucleotide
  misc_feature (346)..(371): n includes a, c, g, or t, or contains no nucleotide
ctgtggctgctttgtgtcaagaaaagagcagtcactctcagaatcttgattccccatcagccaaagcannnnnnnnnnnnnnnnnnnnnnnnntgtncnnncaantgggaccttgctggncattatatgccntntgggggtttcagagaccctgaaagaggagggaggacccgcctccttgtctgcacaactgcatgcacttctctccccatcgctccacaacctgaaaccgannnnnnnnnnnnnnnnnnnnnnnnnnnnnnnnnnnnnnnnnnnnnnnnnnnnnnntcctttcccttcacgtggtctgcagagagcagggtgagctgccagctgcccctctccnnnnnnnnnnnnnnnnnnnnnnnnnnggggccacttttcctttgaggctctagtggaggtggatgtccttctctgccaggcttggcacatgatgtgaagaataaatgcccaattcttactgttcaggtttgatgtggaatcacagctgcagtgata

SEQ ID NO: 3509 - DNA, 477 bp, Homo sapiens
  misc_feature (91)..(91): n includes a, c, g, or t, or contains no nucleotide
  misc_feature (103)..(155): n includes a, c, g, or t, or contains no nucleotide
  misc_feature (157)..(157): n includes a, c, g, or t, or contains no nucleotide
  misc_feature (159)..(159): n includes a, c, g, or t, or contains no nucleotide
  misc_feature (161)..(165): n includes a, c, g, or t, or contains no nucleotide
  misc_feature (167)..(169): n includes a, c, g, or t, or contains no nucleotide
  misc_feature (171)..(175): n includes a, c, g, or t, or contains no nucleotide
  misc_feature (177)..(179): n includes a, c, g, or t, or contains no nucleotide
  misc_feature (181)..(186): n includes a, c, g, or t, or contains no nucleotide
  misc_feature (188)..(216): n includes a, c, g, or t, or contains no nucleotide
  misc_feature (227)..(227): n includes a, c, g, or t, or contains no nucleotide
  misc_feature (291)..(342): n includes a, c, g, or t, or contains no nucleotide
  misc_feature (452)..(452): n includes a, c, g, or t, or contains no nucleotide
tgggctcctgttacacactggacagaccacccactgccgccgctgccaagccctctcctccccaccagactgccagacgactacatcattntgcccacagacnnnnnnnnnnnnnnnnnnnnnnnnnnnnnnnnnnnnnnnnnnnnnnnnnnnnngntncnnnnngnnntnnnnncnnncnnnnnngnnnnnnnnnnnnnnnnnnnnnnnnnnnnngtgatccaganagctggccgccccccaagggatctgtcaccttcagcgagacctatttcctccccacccccagannnnnnnnnnnnnnnnnnnnnnnnnnnnnnnnnnnnnnnnnnnnnnnnnnnnctctcattttctcttgtggaccagttagttttgcccataacgcagtattctgagtttgcaactgtctctctgatgtgtgccttttgttcaacacagtaacccctgcattntgctctgctctaatacactacctgg

SEQ ID NO: 3510 - DNA, 480 bp, Homo sapiens
  misc_feature (129)..(129): n includes a, c, g, or t, or contains no nucleotide
gcaatatggatcaggcagtgtttctgataggatgtgaaatggactctcctcgggtgggtccagcaggggccctgcccaccagaacacagtccgtgctgtgctgcgctaaggagctggccctcaactctnccttggtgcagggttcccacaaccgagttctagttccctgaggtctttaaaaacaaaaacagaatgttgtacgtgaagattctaggaggggagggaccagcaaatctgagagaaccgtcctggggcctcccttcgaggagccctctgatgtgaggagggacttgagttgagtgacgctgtggtgtgaggtgttctgagctcactgaccggaaggtccaggtgaatctcgtcataagtgatctcaggctctcacaggatccggagggaaatgtgttagagggtctggaaaattcagtgcttttgagttacttgtttttattaaaaatttcctcacaaaagagagtcctcaag

SEQ ID NO: 3511 - DNA, 594 bp, Homo sapiens
  misc_feature (85)..(85): n includes a, c, g, or t, or contains no nucleotide
  misc_feature (92)..(92): n includes a, c, g, or t, or contains no nucleotide
  misc_feature (181)..(214): n includes a, c, g, or t, or contains no nucleotide
  misc_feature (354)..(354): n includes a, c, g, or t, or contains no nucleotide
  misc_feature (356)..(357): n includes a, c, g, or t, or contains no nucleotide
  misc_feature (511)..(512): n includes a, c, g, or t, or contains no nucleotide
ctgagccaaccttgctcttggggaaggggacagattatgaaatttcatggatgaattttccagacctatatctggagtgagaggncccccancccttgggcagagtcctgccttcttccttgaggggcagtttgggaaggtgatgggtattagtgggggactgagttcaggttaccagaannnnnnnnnnnnnnnnnnnnnnnnnnnnnnnnnncaagaggatgaaggaaggggctatcctgggacctccccagcccaggaaaaactggaagccttcccccagcaaggcagaagcttggaggagggttgtaaaagcatattgtaccccctcatttgtttatctgatttttttantnntccgcatactgagaatctaggccaccccaacctctgttccccacccagttcttcatttggaggaatcaccccatttcagagttatcaagagacactcccccctccattcccacccctcatacctacacccaaggttgtcagctttggattgctnnggccaggccccatggagggtatactgaggggtctataggtttgtgattaaaataataaaagctaggcgtgtttgatgcgctt

SEQ ID NO: 3512 - DNA, 448 bp, Homo sapiens
  misc_feature (26)..(26): n includes a, c, g, or t, or contains no nucleotide
  misc_feature (74)..(120): n includes a, c, g, or t, or contains no nucleotide
  misc_feature (128)..(128): n includes a, c, g, or t, or contains no nucleotide
  misc_feature (131)..(131): n includes a, c, g, or t, or contains no nucleotide
  misc_feature (199)..(199): n includes a, c, g, or t, or contains no nucleotide
acctcacaaaatgtattatggtgccnatggctgttagtttttagtgagtgctgtaggattaattcgaaaatagnnnnnnnnnnnnnnnnnnnnnnnnnnnnnnnnnnnnnnnnnnnnnnnatgtaatngtnatttacctgggtatgaattccctgacacacattcatgtcaacatatgtagcaaattttgtgaaaacanaacaatttgaagcttctgtaattttgagcactgctctaacaacaagcataatataaaattagttagattttgcaagtctacaaatgagctcttgcaacagaactcacagcctttttacttttttcccctaactttagcaatgtagtatcttgagccattaatttttgggtttttttaaaatccagaaggtatatagaaaccttttcagatttttcatctgatttgttcttgcagatgttcttctatcaa

SEQ ID NO: 3513 - DNA, 502 bp, Homo sapiens
gtacatcctcctttgtggcttcccacccttctactccaacacgggccaggccatctccccggggatgaagaggaggattcgcctgggccagtacggcttccccaatcctgagtggtcagaagtctctgaggatgccaagcagctgatccgcctcctgttgaagacagaccccacagagaggctgaccatcactcagttcatgaaccacccctggatcaaccaatcgatggtagtgccacagaccccactccacacggcccgagtgctgcaggaggacaaagaccactgggacgaagtcaaggaggagatgaccagtgccttggccactatgcgggtagactacgaccaggtgaagatcaaggacctgaagacctctaacaaccggctcctcaacaagaggagaaaaaagcaggcaggcagctcctctgcctcacagggctgcaacaaccagtagctcatggggccttggaggagcctggcctctcagcctgcataacagact

SEQ ID NO: 3514 - DNA, 354 bp, Homo sapiens
  misc_feature (75)..(75): n includes a, c, g, or t, or contains no nucleotide
  misc_feature (221)..(221): n includes a, c, g, or t, or contains no nucleotide
  misc_feature (223)..(226): n includes a, c, g, or t, or contains no nucleotide
  misc_feature (305)..(306): n includes a, c, g, or t, or contains no nucleotide
agtgagaagtcctcccgggcagcatccagcctcctggccaacctgtggcagtacaacaagctccaccgtgacttncgggcgaagggctatcggaaggaggacttcctgggcccataggtgaagccttctggaggagaaggtgacgtggcccagcgtccaagggacagactcagctccaggctgcttggcagcccagcctggaggagaaggctaatgacggngnnnnccctcgctggggcccctgtgtgcatctttgagggtcctgggccaccaggaggggcagggtcttatagctggggacttgnnttccgcagggcagggggtggggcagggctcaaggctgctctggtgtat

SEQ ID NO: 3515 - DNA, 253 bp, Homo sapiens
agttgtctcaggaccccgtcactgcgacgttgacactcctctcccttcccttcctccccaactccccaaacactgtggaaggggagaaggaagtgatccacagcattcaggccacttggggtctagaccatggtggtgccagcctggggggggcagtggccctcagctctgcccgctggagcggttgagtgcagaagggtgcgcctcttccctctacccccgcaccacctgctgtgtgccagcctgagacggt

SEQ ID NO: 3516 - DNA, 581 bp, Homo sapiens
  misc_feature (35)..(35): n includes a, c, g, or t, or contains no nucleotide
  misc_feature (37)..(38): n includes a, c, g, or t, or contains no nucleotide
  misc_feature (120)..(120): n includes a, c, g, or t, or contains no nucleotide
  misc_feature (173)..(173): n includes a, c, g, or t, or contains no nucleotide
  misc_feature (175)..(175): n includes a, c, g, or t, or contains no nucleotide
  misc_feature (182)..(182): n includes a, c, g, or t, or contains no nucleotide
  misc_feature (215)..(215): n includes a, c, g, or t, or contains no nucleotide
  misc_feature (226)..(227): n includes a, c, g, or t, or contains no nucleotide
  misc_feature (237)..(237): n includes a, c, g, or t, or contains no nucleotide
  misc_feature (272)..(272): n includes a, c, g, or t, or contains no nucleotide
  misc_feature (277)..(277): n includes a, c, g, or t, or contains no nucleotide
  misc_feature (290)..(290): n includes a, c, g, or t, or contains no nucleotide
  misc_feature (305)..(305): n includes a, c, g, or t, or contains no nucleotide
  misc_feature (313)..(383): n includes a, c, g, or t, or contains no nucleotide
aagacctggcagctctggacagccccaccctggtngnncaacaaagaacactaactatgcatggtgccccaggaccagctcaggacagatgccacacaaggatagatgctggcccagggnccagagcccagctccaaggggaatcagaactcaaatggggccagatccagccntnggggtcntggagttgatctggaacccagactcagacattnggcacctaatnnccaggcagantccaggactatatttgggcctgctccagacctgantcctnggaagggcccagnttcaccctgatttanggagaagnnnnnnnnnnnnnnnnnnnnnnnnnnnnnnnnnnnnnnnnnnnnnnnnnnnnnnnnnnnnnnnnnnnnnnntggccagacacaggccctccctgttccccagagaaaggggagcccactgtcctgggcctgcagaatttgggttctgcctgccagctgcactgatgctgcccctcatctctctgcccaacccttccctcaccttggcaccagacacccaggacttatttaaactctgttgcaagtgcaataaatctgacccagtgcccc

SEQ ID NO: 3517 - DNA, 614 bp, Homo sapiens
cctactattcagagacaacagtgacacggacctatgtgatgctggccttagtgtggggaggtgccctgggcctggggctgctgcctgtgctggcctggaactgcctggatggcctgaccacatgtggcgtggtttatccactctccaagaaccatctggtagttctggccattgccttcttcatggtgtttggcatcatgctgcagctctacgcccaaatctgccgcatcgtctgccgccatgcccagcagattgcccttcagcggcacctgctgcctgcctcccactatgtggccacccgcaagggcattgccacactggccgtggtgcttggagcctttgccgcctgctggttgcccttcactgtctactgcctgctgggtgatgcccactctccacctctctacacctatcttaccttgctccctgccacctacaactccatgatcaaccctatcatctacgccttccgcaaccaggatgtgcagaaagtgctgtgggctgtctgctgctgctgttcctcttccaagatccccttccgatcccgctcccccagtgatgtctagctgagtcttcatgacccttcaaccctgattactacagaattccagaat

SEQ ID NO: 3518 - DNA, 501 bp, Homo sapiens
  misc_feature (48)..(49): n includes a, c, g, or t, or contains no nucleotide
  misc_feature (54)..(54): n includes a, c, g, or t, or contains no nucleotide
  misc_feature (260)..(260): n includes a, c, g, or t, or contains no nucleotide
  misc_feature (262)..(262): n includes a, c, g, or t, or contains no nucleotide
  misc_feature (272)..(286): n includes a, c, g, or t, or contains no nucleotide
  misc_feature (322)..(339): n includes a, c, g, or t, or contains no nucleotide
  misc_feature (394)..(396): n includes a, c, g, or t, or contains no nucleotide
tcatcagcatggttgtgggccagcttaaggcggatgaagaccccatcnnggggnttccaccagatgttcctattaaagaacatcaacgatgcttgggtttgcaccaatgacatgttcaggctcgccctgcacaactttggctgacctcctctcagctaggcactcacgctgtttcctcctccctcctcttcccaatactattcccactcctccagatgctccaaatatcatgcacaaatgagcagggccgcggtgggagntnggcgcagtgnnnnnnnnnnnnnnnggtgttgtgcatgatgtttggatgctagactagttnnnnnnnnnnnnnnnnnnttgtgttgtaccagcgcatgccttggaaagacttaagtaatgcaaaaggttgtcnnnttttttttttttttttttttaatctactgacaagttgctctagtaacccaaagaagtgaaggagaaagcagctgcctcaccgcccagacattgatttgttcagat

SEQ ID NO: 3519 - DNA, 526 bp, Homo sapiens
  misc_feature (30)..(30): n includes a, c, g, or t, or contains no nucleotide
  misc_feature (37)..(38): n includes a, c, g, or t, or contains no nucleotide
  misc_feature (87)..(88): n includes a, c, g, or t, or contains no nucleotide
  misc_feature (224)..(224): n includes a, c, g, or t, or contains no nucleotide
  misc_feature (333)..(333): n includes a, c, g, or t, or contains no nucleotide
  misc_feature (381)..(381): n includes a, c, g, or t, or contains no nucleotide
  misc_feature (383)..(383): n includes a, c, g, or t, or contains no nucleotide
  misc_feature (385)..(402): n includes a, c, g, or t, or contains no nucleotide
tccctgcagggcattggcacggacgtctancctgcgnntccgccacatcgatggccgggaggaaagcttccggatctgaccccacannctttggcctgctcacccgaccagcctgggccgcattccctgcaggacctcccgggtcaggcagggcggccccctgctccacacactgctgcatcttgggtctcagggacccagacagatggacttacatggagctnggcactgccctgcctcaacagggtccattgcctcctcgcctccagaacttggagcagggaagtgggcaccctgaggcctccagcaccagttccgtcattctcgttcctngggaacccccactctgacctgttattaaagttcacattttgaatgccnanannnnnnnnnnnnnnnnnnagggcaggtgaacttttgtttctgcccccattcaggttcactgagcccttgggttgaactggttcgtgtcccagtctcttacctgccctgagagcctggcaggccaggagtagaatgggtccca

SEQ ID NO: 3520 - DNA, 489 bp, Homo sapiens
  misc_feature (26)..(30): n includes a, c, g, or t, or contains no nucleotide
  misc_feature (33)..(36): n includes a, c, g, or t, or contains no nucleotide
  misc_feature (220)..(436): n includes a, c, g, or t, or contains no nucleotide
gttgtttctcccattgtgcatgtccnnnnntcnnnnccccatacccatcaccccattcttcaccctcatgcttccatcccaaggcaaacatgtgtcttcatcggaatctatgggtgttgaagttaaatgtgggggcagagatttaacaccatgacactaatacaaatcaaccattcttcactttcaaatggttaatcactacaggaaggcgaactctttnnnnnnnnnnnnnnnnnnnnnnnnnnnnnnnnnnnnnnnnnnnnnnnnnnnnnnnnnnnnnnnnnnnnnnnnnnnnnnnnnnnnnnnnnnnnnnnnnnnnnnnnnnnnnnnnnnnnnnnnnnnnnnnnnnnnnnnnnnnnnnnnnnnnnnnnnnnnnnnnnnnnnnnnnnnnnnnnnnnnnnnnnnnnnnnnnnnnnnnnnnnnnnnnnnnnnnnnntgattgatgaaatcgtgtgtagacctgtatcctcctgacatagtttatgtagg

SEQ ID NO: 3521 - DNA, 511 bp, Homo sapiens
gcttggcacagggcctgacacatttagggaagggcacccttaccctctgcccctaccacagcgaccggcagcttatgagccaggtggccgtggctggactgctcactgtgcttgtctctttcctggatgttcgaaacattattctaggcaaatcacactatgtattgtatgggctggtggctgccatgcagccccgaatgctggttacgtttgatgaggagctgcggccattgccagtgtctgtccgtgtgggccaggcagtggatgtggtgggccaggctggcaagccgaagactatcacagggttccagacgcatacaaccccagtgttgttggcccacggggaacgggcagaattggccactgaggagtttcttcctgttacccccattctggaaggttttgttatccttcggaagaaccccaattatgatctctaagtgaccaccaggggctctgaactgcagctgatgttatcagcaggccatgcatcctgctgccaagggtggac

SEQ ID NO: 3522 - DNA, 511 bp, Homo sapiens
gctccatcaagccccattctagtcatgtgcccctttcctgtccctaacagtccacaggcaaacaaatggtacagtcataagagccatctgtcacggacccacgcccagaggaacgtgcagaaaaaagcagagctacatggctgtgggcaactataagccaaatatttggctcagaacaggtgtccatgggacaaaaaagaacgatcctccacttgaccaagaaaaaagtgattctcccagaagcacaaagcatactcttgcccctcaggtgttgcttgtgtacatcgtacccatccattcggcttcacctgcagccaacggcctggaatcgcaaagagacaccactctgggcagagcagagcagggtatggggtggggagagggtggagggttttataaacaaacttaacagcaatattgaaaggaggtgggggattgagggagggacagagtgttggagggccagagactagtcctgagatggaaacagcaacttgtacagtggctgaga

SEQ ID NO: 3523 - DNA, 473 bp, Homo sapiens
  misc_feature (128)..(129): n includes a, c, g, or t, or contains no nucleotide
  misc_feature (131)..(168): n includes a, c, g, or t, or contains no nucleotide
  misc_feature (249)..(249): n includes a, c, g, or t, or contains no nucleotide
  misc_feature (400)..(422): n includes a, c, g, or t, or contains no nucleotide
  misc_feature (431)..(431): n includes a, c, g, or t, or contains no nucleotide
  misc_feature (438)..(438): n includes a, c, g, or t, or contains no nucleotide
gtataacacagcactacatattggaaattttttatttttctaaataccaatgcagttttgctacggttacaattttgaaatattaactgagcctcaaaatcaccctttctgtcaagcatatcttggcnncnnnnnnnnnnnnnnnnnnnnnnnnnnnnnnnnnnnnnncttgggggtggggtgaaaagcgtacaaaagatacttaaaagggctcctggggtacacaagcccagcaggtcctgagtgaanccgtgggccctccaaatgctcgttttatagcaacctctctctaccctagttctccaaattcacttctgccttcctcaggtttgatatctggcaggtttgactatccagaggaaattaaatatttttatataaaattaaattataataaatnnnnnnnnnnnnnnnnnnnnnnnaaaaaaaanaaaaaanaaatgttaacctcaagctactgaatttagacaatg

SEQ ID NO: 3524 - DNA, 176 bp, Homo sapiens
ttgaagaccccactaaccgccaacatcacaaaatccggaaacacattccggcccgaggtccacctgctgccgccgccgtcggaggagctggccctgaacgagctggtgacgctgacgtgcctggcacgtggcttcagccccaaggatgtgctggttcgctggctgcaggggtcaca

SEQ ID NO: 3525 - DNA, 70 bp, Homo sapiens
tcaggtgtccgctatccaccaaaagggctccctgagggtctgggcaagggacctgcttctattagccctt

SEQ ID NO: 3526 - DNA, 351 bp, Homo sapiens
  misc_feature (259)..(280): n includes a, c, g, or t, or contains no nucleotide
aagggcaacacagcagtatccgtgctcatgctgctggtcgccctgctcttcactggcattgctgtgctaggaattgtcatgctgaaacggatccactccttataccgccgcacaggtgccagctttcagaaggcccagcaagaatttgctgctggtgtcttctccaaccctgcggtgcgaaccgcagctgccaatgcagccgctggggctgctgaaaatgccttccgggccccgtgacccctgactgggatgccctggnnnnnnnnnnnnnnnnnnnnnncttagctcccgtccctaaggtctctgggacttggagagacatcactaactgatggctcctccgtagtgctc

SEQ ID NO: 3527 - DNA, 532 bp, Homo sapiens
  misc_feature (80)..(80): n includes a, c, g, or t, or contains no nucleotide
  misc_feature (152)..(152): n includes a, c, g, or t, or contains no nucleotide
  misc_feature (206)..(221): n includes a, c, g, or t, or contains no nucleotide
  misc_feature (223)..(223): n includes a, c, g, or t, or contains no nucleotide
tcgcaaatacactcatggccaaggcgctgcaggagtgccccaactccggtatcctgtggtctgaggccatcttcctcgangcaaggccccagaggaggaccaagagcgtggatgccctgaagaagtgtgagcatgacccccatgtgctcctngccgtggccaagctgttttggagtcagcggaagatcaccaaggccagggagtgnnnnnnnnnnnnnnnngnaagattgactcggacctgggggatgcctgggccttcttctacaagtttgagctgcagcatggcactgaggagcagcaggaggaggtgaggaagcgctgtgagagtgcagagcctcggcatggggagctgtggtgcgccgtgtccaaggacatcgccaactggcagaagaagatcggggacatccttaggctggtggccggccgcatcaagaacaccttctgattgagcggttgccatggccggtctccgtggggcagggttgggccgcatgtggaagggctctgagctgtgtcctccttcattaaaagt

SEQ ID NO: 3528 - DNA, 503 bp, Homo sapiens
  misc_feature (258)..(266): n includes a, c, g, or t, or contains no nucleotide
  misc_feature (268)..(269): n includes a, c, g, or t, or contains no nucleotide
  misc_feature (271)..(272): n includes a, c, g, or t, or contains no nucleotide
  misc_feature (274)..(274): n includes a, c, g, or t, or contains no nucleotide
  misc_feature (389)..(449): n includes a, c, g, or t, or contains no nucleotide
  misc_feature (454)..(456): n includes a, c, g, or t, or contains no nucleotide
  misc_feature (474)..(474): n includes a, c, g, or t, or contains no nucleotide
ttctcttaagtggtctagtcaaggaacctcaagtcatgcttttgctatcaccaatcatagtgtacccatctttaatttatatcaggtgtataaatgtacatttccaaatgaacttgcacttgttatattataattggaagtgcagtcagcagatgctgttgtgaagctaatgtcacaattatgtgcaaaggtgtgcttcctgctgtatgtgagctgtaaaaatgttacgtgaagaaataaatgaaacttggccagttnnnnnnnnnannannanatttaattttgacataagtaacttttaaaatttgtcttaaaaatttatacaccagcaatttagacaaagccttaagcaaattttgtattattgttctcacttattattaataatnnnnnnnnnnnnnnnnnnnnnnnnnnnnnnnnnnnnnnnnnnnnnnnnnnnnnnnnnnnnnacccnnngggtcaggaaattactgncccacttgtcaagttcagcccaccatctg

SEQ ID NO: 3529 - DNA, 392 bp, Homo sapiens
  misc_feature (196)..(196): n includes a, c, g, or t, or contains no nucleotide
  misc_feature (200)..(209): n includes a, c, g, or t, or contains no nucleotide
  misc_feature (211)..(212): n includes a, c, g, or t, or contains no nucleotide
  misc_feature (214)..(214): n includes a, c, g, or t, or contains no nucleotide
  misc_feature (216)..(216): n includes a, c, g, or t, or contains no nucleotide
  misc_feature (218)..(219): n includes a, c, g, or t, or contains no nucleotide
  misc_feature (287)..(287): n includes a, c, g, or t, or contains no nucleotide
  misc_feature (297)..(297): n includes a, c, g, or t, or contains no nucleotide
ttctactcttatatgctggactgcattcacacatggcatgaaataagtcaggttctttacaaatggtattttgatagatactggattgtgtttgtgccatatttgtgccattcttttaagaacaatgttgcaacacattcatttggataagttgtgatttgacgactgatttaaataaaatatttgcttcacttanaaannnnnnnnnnannananannaggaagcctgggacatatgtgtaccacattagaattctaaagataatgattgataagctagaactttntgatgtagtnattacatgaaaccccttgtcactggtttgtgtgttcagaggaagccatggccgagatagctttcctgaaataaaccagtagcttttcagattgac

SEQ ID NO: 3530 - DNA, 177 bp, Homo sapiens
catctccgacgactgaggcaagagggcgccagtgaggaggaagggaaggcggttcagagatgttggaggacacccctcgccatctcgcccttgctgggggcacgggagtggggggggtgacatgggccctaggcagactgcaagcccgaccgagcacttggactcgaactctgtgcc

SEQ ID NO: 3531 - DNA, 524 bp, Homo sapiens
  misc_feature (298)..(313): n includes a, c, g, or t, or contains no nucleotide
  misc_feature (419)..(419): n includes a, c, g, or t, or contains no nucleotide
  misc_feature (421)..(422): n includes a, c, g, or t, or contains no nucleotide
tctgaccctgagtggaaaggggtttttgttctgtttttattttacctacatgtactatttagcttcagtgtactagtcctgccacctgtgtatttttagggtgctatggaaataatgaaaagaaacggggatttcagaagaaaattgtaaccaaattcatactttgtataatttttgatatcatgatcacaggtgattcacacgtacacacataaacacacccaccagtgcagcctgaagtaactcccacagaaaccatcatcgtctttgtacatcgtatgtacaatgcaatcatttnnnnnnnnnnnnnnnncaaaaaactaattgtgatttctagtcttgcaaagctgtatgtagttagatgatgtgacaacctctaatatttatctaataaatatgtattcagatgaaacctgtanannaggtgttcatgtggttattttgtatttaaagatcaaattatttgactattgctagacatttctatactctgttgtaacactgaggtatctcatttgcccatg

SEQ ID NO: 3532 - DNA, 571 bp, Homo sapiens
  misc_feature (152)..(152): n includes a, c, g, or t, or contains no nucleotide
  misc_feature (156)..(200): n includes a, c, g, or t, or contains no nucleotide
tgtttgacacatcagtaggtactttaaagacctgaattttatagtagctttaggagttatattttataaaaatcagttatgactttatatttccagacaatagagagttcagtacatcatgctcttgtgcctctgcctgcttttcctgcgtncccnnnnnnnnnnnnnnnnnnnnnnnnnnnnnnnnnnnnnnnnnnnnncttgatcttttgaaagttttattctattaaatttttgctatatcttctggttttctgaaaaagctttagaatggtttctataccctttgtatcactgcatttttccatatcatctccggttcgatcgcgtccagatggaaaacggaagcagaggcttctaatcgtcgcatttactggctccagtgcaacacatccatctgaaaacactcggaagtctggtgcttggagagggtgccattgtctcttgtacataaggtcatgacgtgtctatgtcaaaagttcttatatatttcttttataagctgaaagaaggtctatttttatgtttttaggtctatgaatggaacgttgtaaatgcttgtcaaacaata

SEQ ID NO: 3533 - DNA, 57 bp, Homo sapiens
atgtttgagcccagtcagtgtgagtggctttattctgggtggcagcacccgtgtccg

SEQ ID NO: 3534 - DNA, 533 bp, Homo sapiens
  misc_feature (36)..(36): n includes a, c, g, or t, or contains no nucleotide
  misc_feature (60)..(60): n includes a, c, g, or t, or contains no nucleotide
  misc_feature (112)..(133): n includes a, c, g, or t, or contains no nucleotide
  misc_feature (289)..(289): n includes a, c, g, or t, or contains no nucleotide
gttagcaacactcatagttttgccaattaccagtangacactagtggaaccatctaactnggaacttcctctctccttccacttatttcctcaaacttgttgctttacactnnnnnnnnnnnnnnnnnnnnnntaaacacaccaaaacagatcatgccaaatgagttgcctgtcaaaggctggagggcaggaggagggcctgggtttgggttctttcctcccagcctttggatggtgccttgggccccttagccccagcgccagggcctcccagctgaggccacagganaagcacttttttatgatgtactaaaagccacagtatgtggcaactgcaaaaggatcaggaatttagggtatgatctcggtcacgtgtcccgggcgctgaggggaaaggaagcgggcatgattgtagacaatgagggggttctcttgatgtaatgaaatgcaattttatggtttggtgcaaaaactcctattttccagtaaattaactttatttctaaagcatattttgatttgccatcaagagc

SEQ ID NO: 3535 - DNA, 431 bp, Homo sapiens
  misc_feature (106)..(161): n includes a, c, g, or t, or contains no nucleotide
  misc_feature (188)..(211): n includes a, c, g, or t, or contains no nucleotide
  misc_feature (380)..(403): n includes a, c, g, or t, or contains no nucleotide
atcagtaatatcttcaacgtgtgttgtaaccgagtgctggggattcaccacatctccgtcatgcactccatcttcagcttgctgggtctgcttggagagatcaccnnnnnnnnnnnnnnnnnnnnnnnnnnnnnnnnnnnnnnnnnnnnnnnnnnnnnnnnccaggtcctcctcagcattggggaacnnnnnnnnnnnnnnnnnnnnnnnntcacgtctggtctcctgacaggtttgctcctaaatctcaaaatatggaaagcacctcatgtggctaaatattttgatgaccaagttttctggaagtttcctcatttggctgttggattttaagcaaaagcatccaagaaaaacaaggcctgttcaaaaacaagacaacnnnnnnnnnnnnnnnnnnnnnnnngtacgtgagaaacgctcatgacagcaaa

SEQ ID NO: 3536 - DNA, 165 bp, Homo sapiens
ggtgagactcctcaagcctcctcacccccaccaccgcgccctcaccaccgcccctgccccaccgtccctgccccccgccactcctctgggaccctgggccttctggagcaggtcacagtggtgccctctccccatcttcagatcatcagatgtggtctataatgc

SEQ ID NO: 3537 - DNA, 378 bp, Homo sapiens
  misc_feature (290)..(324): n includes a, c, g, or t, or contains no nucleotide
agctgtggtttctccagtaaatattttcttctactgaacatggagccattattaagagttgtgtgttttttattatgtacatttgtatatttttttgcttgtttgatgttctatttttctaatagttttcttttagtttcttaaagttgtgatactagatttagattctgatgctaactgcaaatcaggttggtctctgctgggtctctcctgcttttattttactttaaggacaagtgtagttgtcgtccaccacctttcaaaaaatgtgaaactgccctgcctccccnnnnnnnnnnnnnnnnnnnnnnnnnnnnnnnnnnnctaccatactttatgttgtaaaatcaaactcttttgtggtacattatctcatgc

SEQ ID NO: 3538 - DNA, 281 bp, Homo sapiens
  misc_feature (44)..(44): n includes a, c, g, or t, or contains no nucleotide
  misc_feature (183)..(183): n includes a, c, g, or t, or contains no nucleotide
  misc_feature (215)..(215): n includes a, c, g, or t, or contains no nucleotide
cctgactttgtttctgcaaaggcacctgcatgtgtctgtgttcntgtaggcataatgtgaggaggtggggagaccaccccacccccatgtccaccatgaccctcttcccacgctgacctgtgctccctccccaatcatctttcctgttccagagaggtggggctgaggtgtctccatctctgnctcaacttcatggtgcactgagctgtaacttnttccttccctattaaaattagaacctgagtataaatttactttctcaaattcttgccatgagaggt

SEQ ID NO: 3539 - DNA, 516 bp, Homo sapiens
  misc_feature (285)..(334): n includes a, c, g, or t, or contains no nucleotide
ttcctttgaggcaggccgtcgctgcgtctctggagagggcaactttgagttcgaaacccggcaaggcaatgagatcttcttggccctggaagaggccatctctgcccagaagaatgctgcacccgctacaccccaaccgcagccagccacaatccccgcgtcgctgccccggcctgatagcccctactctcggccgcatgactcactgccgccgccttcacccaccacaccggtgcctgctccacggcctcggggccaggagggggagtatgccgtgcccttcgnnnnnnnnnnnnnnnnnnnnnnnnnnnnnnnnnnnnnnnnnnnnnnnnnncctcctcagctcctggccgaccctctgtacgacagcattgaggagaccctgccccctcgacctgaccacatatacgataagcccgagggagtggctgccctgtccctctatgacagcccgcaggagccccggggtgaggcatggaggaggcaggcgacacgtgacagggaccctgctggcct

SEQ ID NO: 3540 - DNA, 578 bp, Homo sapiens
  misc_feature (160)..(174): n includes a, c, g, or t, or contains no nucleotide
  misc_feature (379)..(509): n includes a, c, g, or t, or contains no nucleotide
  misc_feature (513)..(522): n includes a, c, g, or t, or contains no nucleotide
ttccactttgagagggatctgtcctctttggtcccctgcgttttcaaatatttgaggaaaggtgtcgcctctttttctgtggaaagaggaagctcatgagcgcgaaacagcaggggacggagggcgagaagggctttctcaggttgcgggtcggagggcnnnnnnnnnnnnnnnagtacagagacccggacaggtggctgtttctcacgctcactttggattgctccctacggcttcctccgcagccatgtctgacaaacctggtatggctgagatcgagaaattcgataagtcgaaactgaagaagacagaaacgcaagagaagaatccattgtcttccaaagaaactatcgaacaggagaggcaagcaggcgaatcnnnnnnnnnnnnnnnnnnnnnnnnnnnnnnnnnnnnnnnnnnnnnnnnnnnnnnnnnnnnnnnnnnnnnnnnnnnnnnnnnnnnnnnnnnnnnnnnnnnnnnnnnnnnnnnnnnnnnnnnnnnnnnnnnnntttnnnnnnnnnnacctgctgacaatggaggccacgcctgcttctcccatcgcctgtctggctggcagg

SEQ ID NO: 3541 - DNA, 492 bp, Homo sapiens
  misc_feature (93)..(120): n includes a, c, g, or t, or contains no nucleotide
  misc_feature (361)..(361): n includes a, c, g, or t, or contains no nucleotide
ctgcagcaaaatctaggggtgtaagtgtatcaggacttatgtgacttatattttggggagatgagggttgggttttttttttaatgctacgtnnnnnnnnnnnnnnnnnnnnnnnnnnnnctgggggtaaatcaattcttcaacccttgggtgtgtgagtttgaggcagggtcatttgtgtgatgtgtttggccttaccaaagcaaaagagggtgcaagaatgtgggagtatgtctgccggtttcaacacacacagacaaacacagccacacgcgcacacaagtataagactttttgtattactgctccctacttaacatacttgaattctcaaatttcctttggggtaaaaaaaaaaaanggatttgaaaccataaagtgttctgaagaaattaagtctataaaaagcatactttcttttttcttttccttttttccctccacagacaatgtcctctgttcaattcctaacgcaaactacaataaatggtg

SEQ ID NO: 3542 - DNA, 613 bp, Homo sapiens
cataggcaccttttactgtgatgtttgtgtatgtgggagtactctcatcactacagtattactcttacaagagtggactcagtgggttaacatcagttttgtttactcatcctccaggaactgcaggtcaagttgtcaggttatttattttataatgtccatatgctaatagtgatcaagaagactttaggaatggttctctcaacaagaaataatagaaatgtctcaaggcagttaattctcattaatactcttattatcctatttctgggggaggatgtacgtggccatgtatgaagccaaatattaggcttaaaaactgaaaaatctggttcattcttcagatatactggaacccttttaaagttgatattggggccatgagtaaaatagattttataagatgactgtgttgtaccaaaattcatctgtctatattttatttaggggaacatggtttgactcatcttatatgggaaaccatgtagcagtgagtcatatcttaatatatttctaaatgtttggcatgtaaatgtaaactcagcatcaaaatatttcagtgaatttgcactgtttaatcatagttactgtgtaaactcatctgaaatgttac

SEQ ID NO: 3543 - DNA, 214 bp, Homo sapiens
  misc_feature (133)..(147): n includes a, c, g, or t, or contains no nucleotide
  misc_feature (162)..(162): n includes a, c, g, or t, or contains no nucleotide
  misc_feature (165)..(169): n includes a, c, g, or t, or contains no nucleotide
  misc_feature (171)..(172): n includes a, c, g, or t, or contains no nucleotide
tggcggccaagctgctccacatctaccaacaatcccggaaggacaactccaattccctgcaggtgaaaacgtgccacctggtcaggtactggatctccgccttcccagcggagtttgacttgaacccggagtnnnnnnnnnnnnnnnaggagctgaaggctntgnnnnncnnagaagggaaccgacggcacagcagcctaatcgacatagacag

SEQ ID NO: 3544 - DNA, 230 bp, Homo sapiens
  misc_feature (32)..(74): n includes a, c, g, or t, or contains no nucleotide
  misc_feature (81)..(82): n includes a, c, g, or t, or contains no nucleotide
  misc_feature (176)..(190): n includes a, c, g, or t, or contains no nucleotide
agtgacacagccatccttgggtgtaggctatnnnnnnnnnnnnnnnnnnnnnnnnnnnnnnnnnnnnnnnnnnncctgttnngcccgcagtctggccgcgtgctttcggccatgatccggggagcagcagatggctctcggttccaggtgtgggactatgaggagggagaggtggnnnnnnnnnnnnnnngatacttcgaggctgatcctccagggcaggtggctgcctc

SEQ ID NO: 3545 - DNA, 488 bp, Homo sapiens
  misc_feature (103)..(103): n includes a, c, g, or t, or contains no nucleotide
  misc_feature (202)..(202): n includes a, c, g, or t, or contains no nucleotide
  misc_feature (245)..(274): n includes a, c, g, or t, or contains no nucleotide
  misc_feature (385)..(385): n includes a, c, g, or t, or contains no nucleotide
  misc_feature (388)..(388): n includes a, c, g, or t, or contains no nucleotide
  misc_feature (429)..(429): n includes a, c, g, or t, or contains no nucleotide
ctttctcaggtttcccagttcatggcgtgtgaggagctgcccccgggggccccagagcttccccaagaaggccccacacgacgcctctccctaccgggccagntgggggccctcacctcccagcccctgcacagacacggctcggacccgggcagttagtggggctgcccagtgtggacacgtggctcacccagggatcaanggcgctgctgggccgctccccttggaggccctgctcaggaggnnnnnnnnnnnnnnnnnnnnnnnnnnnnnnaagcacagctcctcccccagcccttgggaccatcttctcctgcagtcccctgggccccagtgagaggggcaggggcagggccggcagtaggtggggcctgtggtccccccnctnccctgagggcattagctggtctaactgcccggaggcacccngccctgggccttaggcacctcaaggacttttctgctatttactgctcttattgttaagg

SEQ ID NO: 3546 - DNA, 385 bp, Homo sapiens
caatgcctgtttattcaccatcaacaaagaagaccacacactgggaaacatcattaaatcacaactcctaaaagacccgcaagtgctatttgctggctacaaagtcccccaccccttggagcacaagatcatcatccgagtgcagaccacgccggactacagcccccaggaagcctttaccaacgccatcaccgacctcatcagtgagctgtccctgctggaggagcgctttcgggtggccataaaagacaagcaggaaggaattgagtaggggccagagggggctctgctcggcctgtgagccccgttcctacctgtgcctgaccctccgctccaggtaccacaccgaggagagcggccggtcccagccatggcccgccttgtg

SEQ ID NO: 3547 - DNA, 324 bp, Homo sapiens
  misc_feature (114)..(114): n includes a, c, g, or t, or contains no nucleotide
catggccgaggaaggcattgctgctggaggtgtaatggacgttaatactgctttacaagaggttctgaagactgccctcatccacgatggcctagcacgtggaattcgcgaagntgccaaagccttagacaagcgccaagcccatctttgtgtgcttgcatccaactgtgatgagcctatgtatgtcaagttggtggaggccctttgtgctgaacaccaaatcaacctaattaaggttgatgacaacaagaaactaggagaatgggtaggcctttgtaaaattgacagagaggggaaaccccgtaaagtggttggttgcagttg

SEQ ID NO: 3548 - DNA, 110 bp, Homo sapiens
cctcctctccggagcattttgataccagaagggaaagcttcattctccttgttgttggttgttttttcctttgctctttcccccttccatctctgacttaagcaaaagaa

SEQ ID NO: 3549 - DNA, 307 bp, Homo sapiens
  misc_feature (39)..(39): n includes a, c, g, or t, or contains no nucleotide
  misc_feature (52)..(52): n includes a, c, g, or t, or contains no nucleotide
  misc_feature (246)..(271): n includes a, c, g, or t, or contains no nucleotide
  misc_feature (279)..(279): n includes a, c, g, or t, or contains no nucleotide
ggtttacacgctaatcccgattcaccctgtccaaactgnctaagccctccgncattctcaagccctgcagtcacagctacacagatcacagcttcagccaggagctgggcagaaggccaagaggctgttcccaccaggctgctcagggctggtcttttaggacccttcccttgagccctctatggtgtggcaaagccttcattgccttaactggagccccatcagctccagctgctctgtcttctnnnnnnnnnnnnnnnnnnnnnnnnnncaaatggnggcctgtcctgacctgtctcaccatgta

SEQ ID NO: 3550 - DNA, 601 bp, Homo sapiens
  misc_feature (210)..(248): n includes a, c, g, or t, or contains no nucleotide
  misc_feature (268)..(268): n includes a, c, g, or t, or contains no nucleotide
  misc_feature (285)..(297): n includes a, c, g, or t, or contains no nucleotide
  misc_feature (299)..(305): n includes a, c, g, or t, or contains no nucleotide
  misc_feature (307)..(308): n includes a, c, g, or t, or contains no nucleotide
  misc_feature (402)..(428): n includes a, c, g, or t, or contains no nucleotide
accggatctgctctgaccgcacttgaaggctggggcccaggcacctgtgccggccattcgttttctctctctccctttctttctcccagctttgcctcccttatcccaccctcgaggcagggaaaagccatctattcttctgcagcctcaggagcgagacttcaaggactcagtttggttccacccagttgaaagacacccagtgcacannnnnnnnnnnnnnnnnnnnnnnnnnnnnnnnnnnnnnnaaacacagatgtgtctaaanaaaaaaaaaaaaaaaannnnnnnnnnnnnannnnnnncnnctgggtacatctgggccgtggactatctgatcttggtcctggccgagaaacagcccggagtaaggttcagaaagtccccctggggactcctccnnnnnnnnnnnnnnnnnnnnnnnnnnnccgagaaacccagttctcctgggccaaggatcccttctggcaaagctgctgctccgccgcttggttccccggcaccagacatcgccctggccctgctggcccgggtatcggaaggaggagcgagggaatgacggaggtagggtgcagggtaagggctcccaggtcttcatctg

SEQ ID NO: 3551 - DNA, 506 bp, Homo sapiens
  misc_feature (64)..(64): n includes a, c, g, or t, or contains no nucleotide
  misc_feature (70)..(110): n includes a, c, g, or t, or contains no nucleotide
  misc_feature (197)..(197): n includes a, c, g, or t, or contains no nucleotide
  misc_feature (204)..(204): n includes a, c, g, or t, or contains no nucleotide
cgctcgagctcttcctagagtcgctgttgaagaaggcctgccaggtgacccagtcgcggaacgngaagannnnnnnnnnnnnnnnnnnnnnnnnnnnnnnnnnnnnnnnncagcagtttgacttcttgaaggacctggtggcatctgttcccgacatgcagggggacggggaagacaaccacatggatggggacaangggcgcnccgcaggggccggaagccaggcagcggcggccggaagaacggtgggatgggaacgaaaagcaaggacaagaagctgtccgggacagactcggagcaggaggatgaatctgaggacacagatactgatggggaagaggagacatcacaacccccaccccaggccagccacccctctgcccactttcagagccccccgacacccttcctgcccttcgcctctactctgcctttgcccccagcgcccccgggcccctcagcacctgatgaagaggacgaagaagattacgactcctagcgccttc

SEQ ID NO: 3552 - DNA, 281 bp, Homo sapiens
  misc_feature (77)..(130): n includes a, c, g, or t, or contains no nucleotide
  misc_feature (169)..(187): n includes a, c, g, or t, or contains no nucleotide
  misc_feature (255)..(255): n includes a, c, g, or t, or contains no nucleotide
ttctcagtgccttggccctgttgagtctatctggtaacactggagctgactccctgggaagagaggccaaatgttannnnnnnnnnnnnnnnnnnnnnnnnnnnnnnnnnnnnnnnnnnnnnnnnnnnnnaaatacttatcccaatgaatgcgtgttatgttttgaaannnnnnnnnnnnnnnnnnntatcctcattcaaaaatctgggccttgctgagaaccaaggttttgaaatcccatcaggtcaccgcgangcctgactggccttattgttgaataa

SEQ ID NO: 3553 - DNA, 366 bp, Homo sapiens
  misc_feature (89)..(107): n includes a, c, g, or t, or contains no nucleotide
gctatgcccaggagaacttcaagtccttcatcttcacagagacccagttcacacgagtgactgcctatcagaaccacaggatcacccannnnnnnnnnnnnnnnnnnccttttgccaaaggctttagagagagtgacctggactcctggcctgtggccccacggcccctgctcagtgtcccagcccggagtcacagcagcctcagtccctgtgtgctgaagggtgccacagacagggagaaagagacccccaacaaagcttcagcttccacctccaagacccctgcttggctccatcatcaaggaggcctcgcctctcccagctgggctggggctcctgtcccccactgtggtgtgcctggggcct

SEQ ID NO: 3554 - DNA, 504 bp, Homo sapiens
  misc_feature (34)..(34): n includes a, c, g, or t, or contains no nucleotide
  misc_feature (36)..(50): n includes a, c, g, or t, or contains no nucleotide
tgtcctgaaattttagtctattctgggtaaatangnnnnnnnnnnnnnnnatatgagaagttgtagctctgatgtctagctgtagtctccttgatctgctgattgcattattttaatttgcttttctgggaaagcagttttgctaaaagctgtacagactttttcttttgtacctagcagtactttatatagtatagctttgggccatgtagcattttaagactcaattttaaaaaattattaatctgttgctgactcttaattcctatttcaatatgtgtttccttgaagaattcaggatacaacttcttgtgtatgacagctttccttcacacactatttttgtgggtgtgtatatatctgatttgggaagaatttaaaaaacacatagctttttaatttgtttgaaacagactttctgcctgttacatttttgcttttaaccaattaaagaagccaatggcattttagttttatattgtgttttccactagtatatccctg

SEQ ID NO: 3555 - DNA, 488 bp, Homo sapiens
  misc_feature (325)..(325): n includes a, c, g, or t, or contains no nucleotide
  misc_feature (327)..(327): n includes a, c, g, or t, or contains no nucleotide
  misc_feature (329)..(331): n includes a, c, g, or t, or contains no nucleotide
  misc_feature (339)..(339): n includes a, c, g, or t, or contains no nucleotide
  misc_feature (446)..(446): n includes a, c, g, or t, or contains no nucleotide
ggccaacagaaaatcctactgcacacagcaatctctacatcttggctggacatgaaaatagttactaagcaacagaaactgatctcaaatgacaggaaaatgaatatactccattgaaaggaaaaataaggaaattcaatacaaactgcactatgatttgctttaactattatgggttatattgcaaatgatctgtactttagggtagaattcaatattttctgcagctggaaacagctagtctatctcttgccactgtgtggtggttatatcaagtttgcttaataaaagctatgagacaaatagtcctctagttccaggaaananannntttttttnaaaaaaaacaatgtttgtaacaagggtgccatggtatttttagataactcgtgattatcttaagagaggtaaatttagtgatcattttatatcatgtcttattcctncttaatgaacataatttgttaaattctcaagcaaggttttca

SEQ ID NO: 3556 - DNA, 247 bp, Homo sapiens
  misc_feature (63)..(63): n includes a, c, g, or t, or contains no nucleotide
  misc_feature (120)..(120): n includes a, c, g, or t, or contains no nucleotide
  misc_feature (136)..(136): n includes a, c, g, or t, or contains no nucleotide
gccctagctgggaagttctgatccccaaagccacagcaggggactgatggctatagcagaatnaggtcgggtcaggaccctcaaacaccatctgggaacaccaagcaccctgaatcgagnctgcaggagccctgcngggtgagactgtgtcagagatacactgctggccacaagtgtcccctctcagtcccaccttttcgggctgtcccatgtctatctcaggggcccgttacctctctgcagcagt

SEQ ID NO: 3557 - DNA, 363 bp, Homo sapiens
  misc_feature (150)..(204): n includes a, c, g, or t, or contains no nucleotide
  misc_feature (289)..(307): n includes a, c, g, or t, or contains no nucleotide
  misc_feature (332)..(332): n includes a, c, g, or t, or contains no nucleotide
gttcatcaaatacgtgtgcaaggtgctgtccctggacaccaacatcacaaaccaggtgaataagctgaaccgagacctgcttcgcctggtggatgtcggcgagttctccgaggaggcccagttccgagacccctgccgctcctacgtgcnnnnnnnnnnnnnnnnnnnnnnnnnnnnnnnnnnnnnnnnnnnnnnnnnnnnnnnagactcttccttctcagaggatggggcggtcctgcctcagtggctctgctccaactgtcaggcgccctacgactcctctgccatnnnnnnnnnnnnnnnnnnngttctacagaagaagctgatggccnttcaccctgcaggacctggtctgcctgaagt

SEQ ID NO: 3558 - DNA, 192 bp, Homo sapiens
tttgcaaatctcaggataaagtttgctaagtaaattagtaatgtactatagatataactgtacaaaaattgttcaacctaaaacaatctgtaattgcttattgttttattgtatactctttgtctttttaagacccctaatagccttttgtaacttgatggcttaaaaatacttaataaatctgccatttca

SEQ ID NO: 3559 - DNA, 487 bp, Homo sapiens
ttgatttatccctgtagggctggcagggttgtagatgaagggggaatgatctgagccttggttcccctgacacgtcttgctagccccagggttagagtgggcagggcagagccgcgcagcacctgggagcggtacctttcccttgggcagcctggggtcccaggaacaagccagggcgagtggcatgtctgcctgagcagggtgtggccccagaaagctgaggagtgtgggctggcagagagcttcgagggcaaggccacccgcgggggcgtgtgtgtggtggggcttggcatgtgatggcagctccaggcatgccgctgcttgtatggctttctttggcctctgaccctgctgcccattctttccaacatcacagatgaactgcctctcctcctccctgcctggggagcccagtggccagggaggggagtggtggagccagtcgctgtaacactgagcctcagagacgaaccaaaaccagctgggc

SEQ ID NO: 3560 - DNA, 365 bp, Homo sapiens
  misc_feature (59)..(63): n includes a, c, g, or t, or contains no nucleotide
  misc_feature (65)..(69): n includes a, c, g, or t, or contains no nucleotide
  misc_feature (71)..(71): n includes a, c, g, or t, or contains no nucleotide
  misc_feature (73)..(78): n includes a, c, g, or t, or contains no nucleotide
  misc_feature (80)..(85): n includes a, c, g, or t, or contains no nucleotide
  misc_feature (87)..(87): n includes a, c, g, or t, or contains no nucleotide
  misc_feature (89)..(89): n includes a, c, g, or t, or contains no nucleotide
  misc_feature (91)..(91): n includes a, c, g, or t, or contains no nucleotide
  misc_feature (95)..(163): n includes a, c, g, or t, or contains no nucleotide
  misc_feature (165)..(165): n includes a, c, g, or t, or contains no nucleotide
  misc_feature (167)..(167): n includes a, c, g, or t, or contains no nucleotide
  misc_feature (171)..(172): n includes a, c, g, or t, or contains no nucleotide
  misc_feature (174)..(180): n includes a, c, g, or t, or contains no nucleotide
  misc_feature (183)..(205): n includes a, c, g, or t, or contains no nucleotide
  misc_feature (207)..(210): n includes a, c, g, or t, or contains no nucleotide
  misc_feature (212)..(213): n includes a, c, g, or t, or contains no nucleotide
  misc_feature (216)..(216): n includes a, c, g, or t, or contains no nucleotide
  misc_feature (218)..(219): n includes a, c, g, or t, or contains no nucleotide
  misc_feature (226)..(228): n includes a, c, g, or t, or contains no nucleotide
  misc_feature (230)..(231): n includes a, c, g, or t, or contains no nucleotide
  misc_feature (264)..(264): n includes a, c, g, or t, or contains no nucleotide
  misc_feature (280)..(280): n includes a, c, g, or t, or contains no nucleotide
  misc_feature (284)..(284): n includes a, c, g, or t, or contains no nucleotide
  misc_feature (287)..(288): n includes a, c, g, or t, or contains no nucleotide
  misc_feature (297)..(297): n includes a, c, g, or t, or contains no nucleotide
  misc_feature (299)..(299): n includes a, c, g, or t, or contains no nucleotide
  misc_feature (304)..(304): n includes a, c, g, or t, or contains no nucleotide
  misc_feature (310)..(310): n includes a, c, g, or t, or contains no nucleotide
  misc_feature (321)..(321): n includes a, c, g, or t, or contains no nucleotide
attttagtcctgtgtagcagaattcaattacgggaactaccataatttatctgttctcnnnnngnnnnnangnnnnnntnnnnnntntntntatnnnnnnnnnnnnnnnnnnnnnnnnnnnnnnnnnnnnnnnnnnnnnnnnnnnnnnnnnnnnnnnnnnnnnananacanntnnnnnnntannnnnnnnnnnnnnnnnnnnnnnannnnanntgngnntttttgnnnannacatgagtatggaatggtgttttattatgactntagtttgcattttccncaantcnngttaaatcntncattntaatgnacattttattntgaagaacctgttcatatcctgtgctcaactttgtattgaatta

SEQ ID NO: 3561 - DNA, 430 bp, Homo sapiens
  misc_feature (250)..(250): n includes a, c, g, or t, or contains no nucleotide
  misc_feature (269)..(269): n includes a, c, g, or t, or contains no nucleotide
  misc_feature (272)..(272): n includes a, c, g, or t, or contains no nucleotide
  misc_feature (275)..(277): n includes a, c, g, or t, or contains no nucleotide
  misc_feature (280)..(281): n includes a, c, g, or t, or contains no nucleotide
  misc_feature (284)..(284): n includes a, c, g, or t, or contains no nucleotide
  misc_feature (287)..(287): n includes a, c, g, or t, or contains no nucleotide
  misc_feature (301)..(301): n includes a, c, g, or t, or contains no nucleotide
  misc_feature (323)..(323): n includes a, c, g, or t, or contains no nucleotide
  misc_feature (329)..(329): n includes a, c, g, or t, or contains no nucleotide
  misc_feature (332)..(332): n includes a, c, g, or t, or contains no nucleotide
  misc_feature (339)..(339): n includes a, c, g, or t, or contains no nucleotide
tttctggccagaagtcaatggcagcaagtggaaatttgggacatacaccttttgttgatgagttgtaatactgatgcacacattacaggagagagctgaacgttctctcagcccagagcagcaaacacatgaaagtcagaagtctctaatatatcatttgtcttttttccagtgaggtaaaataaggcataaatgcaggtaattattcccagctgacctaaagtcaataaaacattctgtttaagtgttnaaaaaaaaaaaaaaaaaanaanaannnaannaanaantattattatgtgcngatatcttggttttaagatgcnttaaanggngacaggnatataattattgagtatagaagcatcagaaactattaaaattaaggctaagtggctatcggggtaaatagtgccagattactattggtggc

SEQ ID NO: 3562 - DNA, 366 bp, Homo sapiens
  misc_feature (150)..(150): n includes a, c, g, or t, or contains no nucleotide
  misc_feature (158)..(174): n includes a, c, g, or t, or contains no nucleotide
gggtgctgcccaccatgctcctgagcctcccaagagctgcagcccacgggcccggcccggcctggcccttcaggggatggccactgtgaaggacgccttcccagcctgcccgttgccaatctgctgtgagaggggggcctccctgccttngggccttnnnnnnnnnnnnnnnnntttcctccggggagaaaggacactgcccctcccccgacctgggcccacactgctgccttctcccaggacggaggcttttggaccctcggaccccatcccactcagccaagtgtctttctgtgtctggggggaggaggggatgatatccgtgtggttcgatgtattatttttaagctccgtgagtgcgtgggt

SEQ ID NO: 3563 - DNA, 506 bp, Homo sapiens
  misc_feature (276)..(279): n includes a, c, g, or t, or contains no nucleotide
  misc_feature (281)..(305): n includes a, c, g, or t, or contains no nucleotide
  misc_feature (328)..(328): n includes a, c, g, or t, or contains no nucleotide
  misc_feature (332)..(332): n includes a, c, g, or t, or contains no nucleotide
  misc_feature (352)..(352): n includes a, c, g, or t, or contains no nucleotide
  misc_feature (417)..(432): n includes a, c, g, or t, or contains no nucleotide
  misc_feature (466)..(481): n includes a, c, g, or t, or contains no nucleotide
gtcatgaacaatgtcacctgtactcggatctatgaaaaagtagaataaaaattccatcatcactttggacaggagttaattaagagaatgaccaagctcagttcaatgagcaaatctccatactgtttctttcttttttttttcattactgtgttcaattatctttatcataaacattttacatgcagctatttcaaagtgtgttggattaattaggatcatccctttggttaataaataaatgtgtttgtgctaataaaaaaaaaaaaaaaaaannnnannnnnnnnnnnnnnnnnnnnnnnnnttaataattattaattgagtaanggtnggggcagtcttgagggtacntatattgagatgacactctagcaatttatatagatagctactcttacaggaaatactgtaccaannnnnnnnnnnnnnnntatactatttgaactttgtatgaattcaggaatnnnnnnnnnnnnnnnnagaccattctcaataaaaggtgact

SEQ ID NO: 3564 - DNA, 430 bp, Homo sapiens
  misc_feature (26)..(26): n includes a, c, g, or t, or contains no nucleotide
  misc_feature (29)..(31): n includes a, c, g, or t, or contains no nucleotide
  misc_feature (34)..(34): n includes a, c, g, or t, or contains no nucleotide
  misc_feature (42)..(43): n includes a, c, g, or t, or contains no nucleotide
  misc_feature (52)..(52): n includes a, c, g, or t, or contains no nucleotide
  misc_feature (109)..(109): n includes a, c, g, or t, or contains no nucleotide
  misc_feature (132)..(132): n includes a, c, g, or t, or contains no nucleotide
  misc_feature (182)..(182): n includes a, c, g, or t, or contains no nucleotide
  misc_feature (359)..(379): n includes a, c, g, or t, or contains no nucleotide
  misc_feature (405)..(405): n includes a, c, g, or t, or contains no nucleotide
ccttcgatgtggattcagggagaganttnnnaanccccaacnngcctgtggnccagcacccggctgccctcggacactgatgacagtgatgcgtctgaggacccagggncctggcgccgagcgcggaggagnccagcagcagctgctgtgaagaggagcagacgcagggacggggggctgangccagggccccggctgaggtttggaaaggaatcaagaaacggcagagagactgagggttgcagacacatatatttttgaggctgggtgacgagaaaatctagagacatgagggacataaatgggcctggcagcctcggctctttgcggctgctggcaggactgagctgtccgggttnnnnnnnnnnnnnnnnnnnnnctgtgctctgtgtcctgcctcggcgntctcgcaaatgaagctgcaggccaa

SEQ ID NO: 3565 - DNA, 330 bp, Homo sapiens
  misc_feature (46)..(46): n includes a, c, g, or t, or contains no nucleotide
  misc_feature (168)..(183): n includes a, c, g, or t, or contains no nucleotide
gtcaactccgcaatcagatgttacagaggatggtgagagccctgangatccctcagggacagagggtcagctgtccgaggaggagaaaccagatcagcagcccctgagcggagaagaggagctagagcctgaggccagtgatggttcaggctcctgggaagatgcagnnnnnnnnnnnnnnnnccaacctgcctgctcctgctcctgcttctgcttctgcccctgtcctagagactctgggcagctctgaacctgctgggggtgctctccgacagcgccccacctgctctagttcctgaagaaaaggggcagactcctcacattccagca

SEQ ID NO: 3566 - DNA, 598 bp, Homo sapiens
  misc_feature (106)..(135): n includes a, c, g, or t, or contains no nucleotide
  misc_feature (137)..(137): n includes a, c, g, or t, or contains no nucleotide
  misc_feature (141)..(143): n includes a, c, g, or t, or contains no nucleotide
atccccataggatgggcagccctgctcctttactacctggtgaccttctgggaggagggtcggattcaatctgaacttagaactttcaactctgacctcgtgaccnnnnnnnnnnnnnnnnnnnnnnnnnnnnnncntttnnnttttttttttcaacttgcaataaatacatttttaaaaggaaaaaagaaaacggagagaaaaaaaggtgggtcattgacagactgtctgagcacatagttgcctcccttataacttcagttttttcgtttggaatatgaatccaaaaagagaacatatcactcttgaaatacttgaatcatgaacgccaacctagaaagacaatgtgaagcaagtacacataccatttaaatttaaacacaaaaaaattaaaaaaattagtttctagtttttcacttttttcatgttatatggaagttgttgctaagaaacatatatactgaaaaaaaatagctttttaactttgtttgcactgggtgtgtttccgtccttaggtctaccatgtttgggagggagggaaattcaaaagaattgttgggggaggggggagggaagacttgacggagcctcactttaa

SEQ ID NO: 3567 - DNA, 497 bp, Homo sapiens
  misc_feature (60)..(60): n includes a, c, g, or t, or contains no nucleotide
  misc_feature (136)..(160): n includes a, c, g, or t, or contains no nucleotide
  misc_feature (216)..(265): n includes a, c, g, or t, or contains no nucleotide
  misc_feature (359)..(375): n includes a, c, g, or t, or contains no nucleotide
  misc_feature (383)..(403): n includes a, c, g, or t, or contains no nucleotide
gagcaatatgcctccttgtattataaaatctttctgataatgcattagaaggtttttttngtcgattagtaaaagtgctttccatgttactttattcagagctaataagtgctttccttagttttctagtaactannnnnnnnnnnnnnnnnnnnnnnnnctttatagtttttaaaatattttagataattcttaaactatgaaccttcttaacannnnnnnnnnnnnnnnnnnnnnnnnnnnnnnnnnnnnnnnnnnnnnnnnnctttacctcgcccacgcggacacacgcctcctgtagtcgctttgcctattgatgttcctttgggtctgtgaggttctgtaaactgtgctagtgnnnnnnnnnnnnnnnnnaacttaannnnnnnnnnnnnnnnnnnnntgggacccttcagccactacaacagaattttttaaattgacagttgcagaattgtggagtgtttttacattgatcttttgctaatgcaattagc

SEQ ID NO: 3568 - DNA, 71 bp, Homo sapiens
gcctaactgacttcttgaggtcagaatggcggcagcggagcatcgtcattcttcaggattgccctactggc

SEQ ID NO: 3569 - DNA, 529 bp, Homo sapiens
  misc_feature (213)..(213): n includes a, c, g, or t, or contains no nucleotide
  misc_feature (216)..(216): n includes a, c, g, or t, or contains no nucleotide
  misc_feature (288)..(288): n includes a, c, g, or t, or contains no nucleotide
  misc_feature (343)..(355): n includes a, c, g, or t, or contains no nucleotide
  misc_feature (477)..(493): n includes a, c, g, or t, or contains no nucleotide
gccactggtgcctcgagtagccatggcaacgggcccagtgtccagtcacttagaagttccccccttggccaaaaacccaattcacattgagagctggtgttgtctgaagttttcgtatcacagtgttaacctgtactctctcctgcaaacctacacaccaaagctttatttatatcattccagtatcaatgctacacagtgttgtcccgagcnccngggaggcgttgggcagaaaccctcgggaatgcttccgagcacgctgtagggtatgggaagaacccagcaccnctaataaagctgctgcttggctggaaaaaaaaaaaaaaaaaaaaaaaaaaaaaannnnnnnnnnnnntcccagggggtgtgggacattggggctcccgtggacagtctcagccctcccagcaccagcacctgcatgtaccctagaacctcaggcacagcacaccgattggtgtccggctggtgacttgnnnnnnnnnnnnnnnnntttcccgtgggtccctggtttggtgtcctggcccca

SEQ ID NO: 3570 - DNA, 469 bp, Homo sapiens
acttcctggtgtctgctgtgacaaaattgcctccaatcaaagtgacccagaagaagcagtataaggagacaatgatgggacagacttctcgggcttcccgttgggctgaccctgaccactttgcccagcgacagagctgcatgaatacgtttgccagctggtttggctacatgccgctgatccactctcagatgaggctcgaccccgtcctctttaaagaccaggtctctattttgaggaagaaataccgagacattgagcgactttgaggaatccggctgagtgggggaggggaagcaagaagggatgggggtcaagctgctctctcttcccagtgcagatccactcatcagcagagccagattgtgccaactatccaaaaacttagatgagcagaatgacaaaaaaaaaaaaggccaatgagaactcaactcctggctcctgggactgcaccagactgctccaaact

SEQ ID NO: 3571 - DNA, 236 bp, Homo sapiens
  misc_feature (66)..(164): n includes a, c, g, or t, or contains no nucleotide
cctaatggggccatagaaatcagactccacaccaccggctacatcagctcagcattcccctttggnnnnnnnnnnnnnnnnnnnnnnnnnnnnnnnnnnnnnnnnnnnnnnnnnnnnnnnnnnnnnnnnnnnnnnnnnnnnnnnnnnnnnnnnnnnnnnnnnnnggcatcctggcagaggcaaaagtgctggaggggtgagctgaagtctccatgcctagctttaaaagttttcgt

SEQ ID NO: 3572 - DNA, 522 bp, Homo sapiens
  misc_feature (115)..(115): n includes a, c, g, or t, or contains no nucleotide
  misc_feature (267)..(281): n includes a, c, g, or t, or contains no nucleotide
  misc_feature (475)..(491): n includes a, c, g, or t, or contains no nucleotide
tacctctaaaactgggcaaagtactttttccagctctgcaagtcacctatgcacataggaaaaaaatacttaatgtgtccgataagagaaggactttaatttaaaaaaggaatanaatgccgttttctgtcctaagtttgtgaagatgaggagcagtgatatttacacttctgcttaaagttaagttgctgatgacttttcaaaaagacaatttggtggatggttccacatttggcctgtgccaatggctgcccagaagtggtaacnnnnnnnnnnnnnnnaaaatgccagcttaacatctgtgacagtgaaaacaagacacctctaacgaaggctataatgtgccaagaagatgtgaaactattctgctagaccttggtgctgatccaaatattaccgatgtctatggcaacactgctctccatatgctgtctataatgagaatatgtcaatggtagcaagactgttttcacannnnnnnnnnnnnnnnntgaaaaacaatgtagagcaaccaatgttatt

SEQ ID NO: 3573 - DNA, 379 bp, Homo sapiens
  misc_feature (57)..(72): n includes a, c, g, or t, or contains no nucleotide
  misc_feature (204)..(225): n includes a, c, g, or t, or contains no nucleotide
  misc_feature (266)..(267): n includes a, c, g, or t, or contains no nucleotide
gccttggcaggagtacttattctagtgttgctggcttattttattggtctcaagcannnnnnnnnnnnnnnngagcaattttagaatctgcaacctgattgattatataaaaatacatgcaaataacaagattttcttacctctcagttgttgaaacactttgcttcttaaaattgatatgttgaaactttaattcttttatcnnnnnnnnnnnnnnnnnnnnnntctttattaataaaacctgttctctttaatcagcttaaaanncaaagtgtcatatttactggtcctggagacaaacttgttcaaaagaacatcaacgtgcaatgttttaaggtctatcttaagaagccctggccaaattttgatcctaaccttg

SEQ ID NO: 3574 - DNA, 491 bp, Homo sapiens
  misc_feature (63)..(63): n includes a, c, g, or t, or contains no nucleotide
  misc_feature (91)..(91): n includes a, c, g, or t, or contains no nucleotide
  misc_feature (134)..(134): n includes a, c, g, or t, or contains no nucleotide
  misc_feature (277)..(326): n includes a, c, g, or t, or contains no nucleotide
  misc_feature (419)..(436): n includes a, c, g, or t, or contains no nucleotide
gccttgggagatcctgggccagcccctccacacatctccctaagtcagagtggctgctggccntggtagatttgacttgctcttgcctcantcgacctccaaagtgggactgaagacagtggtcaagagacttnagttcgggacagtaagccaggggttaaggttctttcctttttttgaaagccaaagacccagtttgcattgtgctgctgcattcatggttagaagctttccatgcctaggttctagggaatttatttttctatgtgtatatatnnnnnnnnnnnnnnnnnnnnnnnnnnnnnnnnnnnnnnnnnnnnnnnnnngtctgtctacaccccaccattcattctgtctgtctgttccctggacactgcctaaaagggtctcaagacagtgccctgtgggttcctaggacnnnnnnnnnnnnnnnnnntcttctgctgggaaatgcagctttaaaatggctaaccacagcagagggcagatgc

SEQ ID NO: 3575 - DNA, 462 bp, Homo sapiens
  misc_feature (340)..(340): n includes a, c, g, or t, or contains no nucleotide
  misc_feature (354)..(354): n includes a, c, g, or t, or contains no nucleotide
gggcccagctgcatttctgttaacatttcagtttactacagagacagacgcttaaaacacaaagagaaacagtcttaagtatgaatgtgctcacaacgtggaaactaacgggggagctcctgccaggagccgaataactgctctgcttattaacccgaacgttcggcccggggctgggaagccagaaggacgatgctgagccatggatcgcggaaggcgtcctctggcctcaggagccacccagagcctcacaggctgagttcttgcctctgtgtcctgtccttcctggaagtcaggactctgcttcctcagggagcccggggaaggcggagctcagtgnccacaggccgaggnccatggggccgctcagtcccgttggggttgtcctgagttgagcctgggggggccgtcctgcccgcctaagagatgcccccagcaccgcacactcgtggttcccaataa

SEQ ID NO: 3576 - DNA, 486 bp, Homo sapiens
  misc_feature (26)..(26): n includes a, c, g, or t, or contains no nucleotide
  misc_feature (99)..(99): n includes a, c, g, or t, or contains no nucleotide
  misc_feature (101)..(101): n includes a, c, g, or t, or contains no nucleotide
  misc_feature (106)..(108): n includes a, c, g, or t, or contains no nucleotide
  misc_feature (112)..(112): n includes a, c, g, or t, or contains no nucleotide
  misc_feature (115)..(121): n includes a, c, g, or t, or contains no nucleotide
  misc_feature (124)..(126): n includes a, c, g, or t, or contains no nucleotide
  misc_feature (128)..(130): n includes a, c, g, or t, or contains no nucleotide
  misc_feature (132)..(132): n includes a, c, g, or t, or contains no nucleotide
  misc_feature (134)..(135): n includes a, c, g, or t, or contains no nucleotide
  misc_feature (137)..(156): n includes a, c, g, or t, or contains no nucleotide
  misc_feature (158)..(158): n includes a, c, g, or t, or contains no nucleotide
  misc_feature (259)..(259): n includes a, c, g, or t, or contains no nucleotide
  misc_feature (315)..(315): n includes a, c, g, or t, or contains no nucleotide
  misc_feature (323)..(323): n includes a, c, g, or t, or contains no nucleotide
  misc_feature (382)..(383): n includes a, c, g, or t, or contains no nucleotide
  misc_feature (391)..(406): n includes a, c, g, or t, or contains no nucleotide
agtctgcagaatttctgccgagtggnaccgagaacaccatccatctaaggacgaacaaaagaaccaggagggcgggacccccctcttcctctcctgggntnggggnnngggnccnnnnnnnccnnncnnncntnntnnnnnnnnnnnnnnnnnnnngnccacgtggggaagcgggaacacggggtgtctgcgcatgtttcctcctcctagctccatcactgcgcacacagctgcctgcctcgccagatgcaggggggcnggcagccctccctggctgccaggaggctctgcatgcccacagtcctgccctgcctntcccctcnaacccggcagtgcctgtagcaccgaggagcaaagggggtggatggggggcttggagaanngcggagcnnnnnnnnnnnnnnnncatgttgacatcttctgactgtcccctgcttggctggagccaggcccttccctagagtttcgtcaagagcctcctgggga

SEQ ID NO: 3577 - DNA, 319 bp, Homo sapiens
aattcatccttgttcaagcagacaccccctcttcaccatccatcgaccaggtggagccatactccagcacagcccaggtgcagtttgatgaaccagaggccacaggtggggtgcccatcctcaaatacaaagctgagtggagagcagttggtgaagaagtatggcattccaagtggtatgatgccaaggaagccagcatggagggcatcgtcaccatcgtgggcctgaagcccgaaacaacgtacgccgtaaggctggcggcgctcaatggcaaagggctgggtgagatcagcgcggcctccgagttcaagacgcagcc

SEQ ID NO: 3578 - DNA, 534 bp, Homo sapiens
  misc_feature (38)..(38): n includes a, c, g, or t, or contains no nucleotide
  misc_feature (99)..(99): n includes a, c, g, or t, or contains no nucleotide
  misc_feature (138)..(138): n includes a, c, g, or t, or contains no nucleotide
  misc_feature (142)..(163): n includes a, c, g, or t, or contains no nucleotide
  misc_feature (183)..(183): n includes a, c, g, or t, or contains no nucleotide
  misc_feature (288)..(288): n includes a, c, g, or t, or contains no nucleotide
  misc_feature (364)..(364): n includes a, c, g, or t, or contains no nucleotide
  misc_feature (469)..(469): n includes a, c, g, or t, or contains no nucleotide
tcgggtgctgccttcacctgccaggcccttccccgctnagcttggggcgagcagagctgcatccagtggaactaaagccgttccaggattatcaaaaantgagcagcaaccttgggggacctggatcatcacggactncccnnnnnnnnnnnnnnnnnnnnnngcctcaattcccgtctcaangccacgccttccacctacagtggagtcttccgcacccagcgcgtcgacctttaccagcaggcctccccaccagatgccctgcgctggatacctaagccttgggancggacagggccgccacctcgagaagggccctcccgacgggcagaggagcctgggtcccgaggggacaaggagcctnggttgcccccaccccgctgagggagttcctcttgccccctacccccggggcttgtatatagattataaatatataagggggaaaggggtgggcggggaggggttntggggctggggcctcacttcccctcctcccccttcccctggtcccctgtccctggggctgtttgt

SEQ ID NO: 3579 - DNA, 591 bp, Homo sapiens
gccaccaactgcagtacagcttgtgcccataccaatgtgaccctggccttggcccctatcttggatgatggctggtgcaaagagcggaccctggacaaccagctgttcttcttcttggtggaggatgacgccagaggcacggtcgtgctcagagtgagaccccaagaaaagggagcagaccacacgcaggccattgtgctgggctgcgtagggggcatcgtggcagtggggctggggctggtcctggcttaccggctctcggtggaaatctatgaccgccgggaatacagtcgctttgagaaggagcagcaacaactcaactggaagcaggacagtaatcctctctacaaaagtgccatcacgaccaccatcaatcctcgctttcaagaggcagacagtcccactctctgaaggagggagggacacttacccaaggctcttctccttggaggacagtgggaactggagggtgagaggaagggtgggtctgtaagaccttggtaggggactaattcactggcgaggtgcggccaccaccctacttcattttcagagtgacacccaagagggctgcttcccatgcctgcaacc

SEQ ID NO: 3580 - DNA, 571 bp, Homo sapiens
gatgtgaagcgacgagccatggccgaccctgaggtgcagcagatcatgagtgacccagccatgcgccttatcctggaacagatgcagaaggacccccaggcactcagcgaacacttaaagaatcctgtaatagcacagaagatccagaagctgatggatgtgggtctgattgcaattcggtgatgacttgttcatccccccttcccttcgccctcatgtggaaagaggagctgggaccgcggcgagcagcacggagcggaagggagagcaggggagagaaggcctcatctctctatatttatacataaccccggggaagacacagagactcgtacctgcgctgtttgtgccgccgctgcctctgggccctcccagcacacgcatggtctcttcaccgctgccctcgagttccatgtctctttcccctgcccctagttgctgtctcggctgctctcccatagttggttttttttttatttggggcagtgggcatgttatggggaggggagggggttcttccagcctcaggtcccagctgtctcacgttgtttattctgcgtccccttctcca

SEQ ID NO: 3581 - DNA, 163 bp, Homo sapiens
  misc_feature (26)..(35): n includes a, c, g, or t, or contains no nucleotide
  misc_feature (37)..(42): n includes a, c, g, or t, or contains no nucleotide
  misc_feature (48)..(48): n includes a, c, g, or t, or contains no nucleotide
  misc_feature (53)..(53): n includes a, c, g, or t, or contains no nucleotide
  misc_feature (56)..(59): n includes a, c, g, or t, or contains no nucleotide
  misc_feature (68)..(68): n includes a, c, g, or t, or contains no nucleotide
  misc_feature (81)..(81): n includes a, c, g, or t, or contains no nucleotide
ttgttgttcttagacaagtgcctccnnnnnnnnnncnnnnnncttctncctgnttnnnnaagcaaatnccacaggccaccntatagctacatactcctggcattgcactttttaaccttgctgacatccaaatagaagataggactatctaagccctaggttt

SEQ ID NO: 3582 - DNA, 474 bp, Homo sapiens
  misc_feature (202)..(202): n includes a, c, g, or t, or contains no nucleotide
  misc_feature (262)..(276): n includes a, c, g, or t, or contains no nucleotide
  misc_feature (339)..(339): n includes a, c, g, or t, or contains no nucleotide
gctgccattttgatagtataatctatttttaaatggggcttttcaataggggagagggagtcatctcttcctatatttggtggggtgggtgggaaggaagggatttgggggggaatcttcctgccgcctcccccactccaagtgtttatttttgataccaaacatgaattttcagttccctccctcccagccccccaatttnctgcgggcgggtacaaaggaccctttcaatgtccctggagttgggagggaggaatggggnnnnnnnnnnnnnnnctgtctctattctaggcaagagagagtgggttcaaaagactcctgggctcacctgttagcgcnggcccagcccaggccttgggacctgggggttggtgatttgggggacagtgctacactcgtctccactgtttgttttacttccccaaaatggaccttttttttttctaaagagtcccagagaatggggaattgttc

SEQ ID NO: 3583 - DNA, 400 bp, Homo sapiens
  misc_feature (196)..(212): n includes a, c, g, or t, or contains no nucleotide
gtttccggcgtcagctagccctgctcacctggacgctgcaaggggcagccaatgcgcttagcggggatgtctggaacattgataacaacttctgaggccctggggatcctcacatccccgtcccccagtcaagagctcctctgctcctcgcttgaatgattcagggtcagggaggtggctcagagtccacctctcnnnnnnnnnnnnnnnnntcattacccctacacatctctccacggagcccagaccccagcacagatatccacacaccccagccctgcagtgtagctgaccctaatgtgacggtcatactgtcggttaatcagagagtagcatcccttcaatcacagccccttcccctttctggggtcctccatacctagagaccactctgggaggt

SEQ ID NO: 3584 - DNA, 572 bp, Homo sapiens
  misc_feature (58)..(58): n includes a, c, g, or t, or contains no nucleotide
  misc_feature (198)..(212): n includes a, c, g, or t, or contains no nucleotide
  misc_feature (337)..(351): n includes a, c, g, or t, or contains no nucleotide
  misc_feature (389)..(389): n includes a, c, g, or t, or contains no nucleotide
  misc_feature (391)..(391): n includes a, c, g, or t, or contains no nucleotide
actttgttgtttggattcctcacagccttggctcctgagaaaggtgaggagggcagtnccaagaggggccgctgacttctttcacaagtactatctgttcccctgtcctgtgaatggaagcaaagtgctggattgtccttggaggaaacttaagatgaatacatgcgtgtacctcactttacataagaaatgtattcnnnnnnnnnnnnnnntaaatcaagtcccaaattcattgacttaggggagttcagtatttaatgaaaccctatggagaatttatccctttacaatgtgaatagtcatctcctaatttgtttcttctgtctttatgtttttnnnnnnnnnnnnnnntttaaatcatattaaaattacagatgtgaaaataaaananaagcaacctttttccctcttcccagaaaaccagtctgtgtttacagacagaagagaaggaagccatagtgtcacttccacacaattatttatttcatgtctttactggacctgaaatttaaactgcaatgccagtcctgcaggagtgctggcattaccctctgcagaacagtgaaaggtat

SEQ ID NO: 3585 - DNA, 450 bp, Homo sapiens
  misc_feature (27)..(58): n includes a, c, g, or t, or contains no nucleotide
  misc_feature (74)..(74): n includes a, c, g, or t, or contains no nucleotide
  misc_feature (79)..(121): n includes a, c, g, or t, or contains no nucleotide
  misc_feature (123)..(123): n includes a, c, g, or t, or contains no nucleotide
  misc_feature (125)..(125): n includes a, c, g, or t, or contains no nucleotide
  misc_feature (137)..(137): n includes a, c, g, or t, or contains no nucleotide
  misc_feature (141)..(141): n includes a, c, g, or t, or contains no nucleotide
  misc_feature (149)..(151): n includes a, c, g, or t, or contains no nucleotide
tctccagtttctgagccctatgcacannnnnnnnnnnnnnnnnnnnnnnnnnnnnnnnatcagagaggaacatnccatnnnnnnnnnnnnnnnnnnnnnnnnnnnnnnnnnnnnnnnnnnnantnccaactgctctncctnagctgtannnccccaacatcagacttggcacgtggtggacactaacacacaggcactcaatgaatgagtgaaggaaataaaagtcaccccgttggtgagaggtgctatccctgagtctcagtgcaggaccagtggatgaaaggcaaggtaaagaggcccaagataggctggcttcccccgttcaaggtatagtctgcctttaagggagttttagaaccaacatgcaagacattgaaagaaatcttgcaagagccattattgacttagatccaaaacagcctctctcatgtctaaaaaggcacagaattt

SEQ ID NO: 3586 - DNA, 301 bp, Homo sapiens
  misc_feature (50)..(50): n includes a, c, g, or t, or contains no nucleotide
  misc_feature (78)..(78): n includes a, c, g, or t, or contains no nucleotide
  misc_feature (80)..(80): n includes a, c, g, or t, or contains no nucleotide
  misc_feature (86)..(86): n includes a, c, g, or t, or contains no nucleotide
  misc_feature (118)..(118): n includes a, c, g, or t, or contains no nucleotide
  misc_feature (127)..(128): n includes a, c, g, or t, or contains no nucleotide
  misc_feature (137)..(137): n includes a, c, g, or t, or contains no nucleotide
  misc_feature (179)..(179): n includes a, c, g, or t, or contains no nucleotide
  misc_feature (207)..(207): n includes a, c, g, or t, or contains no nucleotide
atcttctagggagacaacagccctgtctcaaaaccgggttgccagctccnatgtaccagcagctggaatctgaaggcntnagtctncatcttagggcatcgctcttcctcacaccacnaatctgaanntgcctctcncttgcttacaaatgtctaaggtccccactgcctgctggaganaaaacacactcctttgcttagcccacanttctccatttcacttgacccctgcccacctctccaacctaactggcttacttcctagtctacttgaggctgcaatcacactgaggaactcacaa

SEQ ID NO: 3587 - DNA, 597 bp, Homo sapiens
  misc_feature (34)..(34): n includes a, c, g, or t, or contains no nucleotide
  misc_feature (143)..(500): n includes a, c, g, or t, or contains no nucleotide
cggttggatctatggaggtagtctcacccttttngtcttttgtgggaaattaagagaaataattatcagacatatcatcacctccagtggaactacagagacctggacccagctgcactattttaatgtaaaaataacagtannnnnnnnnnnnnnnnnnnnnnnnnnnnnnnnnnnnnnnnnnnnnnnnnnnnnnnnnnnnnnnnnnnnnnnnnnnnnnnnnnnnnnnnnnnnnnnnnnnnnnnnnnnnnnnnnnnnnnnnnnnnnnnnnnnnnnnnnnnnnnnnnnnnnnnnnnnnnnnnnnnnnnnnnnnnnnnnnnnnnnnnnnnnnnnnnnnnnnnnnnnnnnnnnnnnnnnnnnnnnnnnnnnnnnnnnnnnnnnnnnnnnnnnnnnnnnnnnnnnnnnnnnnnnnnnnnnnnnnnnnnnnnnnnnnnnnnnnnnnnnnnnnnnnnnnnnnnnnnnnnnnnnnnnnnnnnnnnnnnnnnnnnnnnnnnnnnnnnattctcatttctgcctttcctgtgctggctcatggtagctgggcatgacttgccttcctacataggttgtcttcatacatatgcactgggaatcaat

SEQ ID NO: 3588 - DNA, 426 bp, Homo sapiens
  misc_feature (86)..(86): n includes a, c, g, or t, or contains no nucleotide
  misc_feature (256)..(270): n includes a, c, g, or t, or contains no nucleotide
  misc_feature (330)..(330): n includes a, c, g, or t, or contains no nucleotide
ctcagccttttaaagcttgaggtgggatgtgtgtgggctgaaattccgagctgcggttgtgcatgagaatacacccttcgtggtanccccatctccgggacgttctcggctctgtgcgttcagtccctcaggaaccgtggaccttaatttaccttgctaagttcagaccttctcttcctttcctttcctttcctctcctgcccattttcctgttcttctgtccttcaatacttctgtagcttcccattcatgttcnnnnnnnnnnnnnnncctcattgtgtgcagaaactgtggtgggggctgtgctgtctcctccctgcctcctgcctnctgcggctgttggatttgggaatgaccttggtgagagtctcactgctccagggtctctttttggtccaaaggctagacctatagagttggatcact

SEQ ID NO: 3589 - DNA, 415 bp, Homo sapiens
cctgttgtctttcaaagaacctcggccccagtgatggctgatctcactcccactgtctcgtagaattacactccttcctggggatccctcttcctgcagccttgtccttggggagtacagggaagtacctgcagtgaccctgcccccatgaccttggccaggcaggatgattccagagcccgtactgtggggatcctcactgaccagcccagccccatccgcaagccaggctgggcctgggcataacttcgctgggctctcccaagaccatcagcagtgcatccagccccctggggcctgggctgctgctggttcttcatcagtcccttggtctctagcctcggccagggctgctctgctctccgccctcctttgtgtatcaagtgtcgctcacagccccattcactggggagcc

SEQ ID NO: 3590 - DNA, 481 bp, Homo sapiens
tcagttctgctctggaaaaaatggaaaatcagtctgaaaacaatgatatcgatgaagttatcattcccacagctcccttatacaaacagatcctgaatctgtatgcagaagaaaacgctattgaagacactatcttttacttgggagaagccttgagaaggggcgtgatagacctggatgtcttcctgaagcatgtacgtcttctgtcccgtaaacagttccagctgagggcactaatgcaaaaagcaagaaagactgccggtctcagtgacctctactgacttctctgataccagctggaggttgagctcttcttaaagtattcttctcttccttttatcagtaggtgcccagaataagttattgcagtttatcattcaagtgtaaaatattttgaatcaataatatattttctgttttcttttggtaaagactggcttttattaatgcactttctatcctctgtaaactttttgtgctg

SEQ ID NO: 3591 - DNA, 237 bp, Homo sapiens
  misc_feature (111)..(149): n includes a, c, g, or t, or contains no nucleotide
  misc_feature (165)..(165): n includes a, c, g, or t, or contains no nucleotide
  misc_feature (195)..(195): n includes a, c, g, or t, or contains no nucleotide
gtgtcccaagtgcaacaaggaggtgtacttcgccgagagggtgacctctctgggcaaggactggcatcggccctgcctgaagtgcgagaaatgtgggaagacgctgacctnnnnnnnnnnnnnnnnnnnnnnnnnnnnnnnnnnnnnnnaccacccctgctacgnagccatgtttgggcctaaaggctttgggcngggcggagccgagagccacactttcaagtaaaccaggtggtg

SEQ ID NO: 3592 - DNA, 478 bp, Homo sapiens
  misc_feature (173)..(173): n includes a, c, g, or t, or contains no nucleotide
  misc_feature (273)..(273): n includes a, c, g, or t, or contains no nucleotide
  misc_feature (278)..(278): n includes a, c, g, or t, or contains no nucleotide
  misc_feature (280)..(290): n includes a, c, g, or t, or contains no nucleotide
  misc_feature (294)..(294): n includes a, c, g, or t, or contains no nucleotide
ttagtccaacaatagctaagttatgctaatatcacattattatgtattcactttaagtgatagtttaaaaaataaacaagaaatattgagtatcactatgtgaagaaagttttggaaaagaaacaatgaagactgaattaaattaaaaatgttgcagctcataaagaattggnactcacccctactgcactaccaaattcatttgactttggaggcaaaatgtgttgaagtgccctatgaagtagcaattttctataggaatatagttggaantaaangnnnnnnnnnnnattnttattaatcaatgcaatatttaaatgaaatgagaacaaagaggaaaatggtaaaaacttgaaatgaggctggggtatagtttgtcctacaatagaaaaaagagagagcttcctaggcctgggctcttaaatgctgcattataactgagtctatgaggaaatagttcctgtccaatttgtgtaat

SEQ ID NO: 3593 - DNA, 482 bp, Homo sapiens
gaacccacttctatctgttcgagaatatctacttgagacatcttcttcagagacactggttgtgcttttatatctgcctgaaactgttctaggtggctcctgtagcagataggaactgcctggatctagtaagtttacagcttcattctgtatagtgttctgttgtgtaattgcatcttctcgtttccgctctttctgccctgcttcatcatcttcgtactcatctaagcactctgcggcagggatgttgaccacgccggtggagcgccgcttctcccgcagcttcctcttctcgatctgccccttgcctttcctggcactggggcccgagctcttgcccttctctgggacgccgtccggctcctcctcgtcacgctggggcggcggtgcagccgaggcagaggcggctgggggctcgtcctccgaccgccgcgggccgggggccgcccgcgtcagcatggcggagccgaccgcgcagttca

SEQ ID NO: 3594 - DNA, 607 bp, Homo sapiens
ggacctgaggcaagacgagcacaccaggagagagctggccaagatgaagcaggagcccgttcggtctgaggaaggccgggacatggcgaaccggatcagtgcctttggctaccttgagtgctcagccaagaccaaggagggagtgcgggaggtgtttgagatggccactcgggctggcctccaggtccgcaagaacaagcgtcggaggggctgtcccattctctgagatccccccaaagggcccttttcctacatgccccctcccttcacaggggtacagaaattatccccctacaaccccagcctcctgagggctccatactgaaggctccattttcagttccctcctgcccaggactgcattgttttctagccccgaggtgtggcacgggccctccctcccagcgctctgggagccacgcctatgccctgcccttcctcatgggcccctggggatcttgcccctttgaccttccccaaaggatggtcacacaccagcactttatacacttctggctcacaggaaagtgtctgcagtagggacccagagtcccaggcccctggagttgtttctgcaggggccttgtctctcactgcatttggtcag

SEQ ID NO: 3595 - DNA, 265 bp, Homo sapiens
  misc_feature (26)..(26): n includes a, c, g, or t, or contains no nucleotide
  misc_feature (47)..(48): n includes a, c, g, or t, or contains no nucleotide
  misc_feature (50)..(50): n includes a, c, g, or t, or contains no nucleotide
gcaatcctaagagtgggaggcagccnaagacccccttccttcaaaanncntcccggaagtggtttcaggccctctagttgccatgaccaatttgtgtgtgtgtttaatttttgcttcaagctctgtagcaggacctgccccacgcacacccctacccctctgtgaggagctgtgggaagtgtgggtttgtctccagaacagaagagaatgatggatattctggctctggggccctctccaccaccactcacagtagccttgctga

SEQ ID NO: 3596 - DNA, 46 bp, Homo sapiens
gcaaggtgaatggcacctggctgcaggcgggcgtggtcagctgggg

SEQ ID NO: 3597 - DNA, 557 bp, Homo sapiens
  misc_feature (123)..(156): n includes a, c, g, or t, or contains no nucleotide
  misc_feature (172)..(172): n includes a, c, g, or t, or contains no nucleotide
  misc_feature (204)..(204): n includes a, c, g, or t, or contains no nucleotide
  misc_feature (230)..(230): n includes a, c, g, or t, or contains no nucleotide
  misc_feature (239)..(240): n includes a, c, g, or t, or contains no nucleotide
  misc_feature (261)..(261): n includes a, c, g, or t, or contains no nucleotide
  misc_feature (275)..(275): n includes a, c, g, or t, or contains no nucleotide
  misc_feature (277)..(277): n includes a, c, g, or t, or contains no nucleotide
  misc_feature (287)..(287): n includes a, c, g, or t, or contains no nucleotide
  misc_feature (291)..(291): n includes a, c, g, or t, or contains no nucleotide
  misc_feature (294)..(294): n includes a, c, g, or t, or contains no nucleotide
  misc_feature (296)..(296): n includes a, c, g, or t, or contains no nucleotide
  misc_feature (306)..(308): n includes a, c, g, or t, or contains no nucleotide
  misc_feature (340)..(340): n includes a, c, g, or t, or contains no nucleotide
  misc_feature (359)..(359): n includes a, c, g, or t, or contains no nucleotide
  misc_feature (361)..(362): n includes a, c, g, or t, or contains no nucleotide
  misc_feature (419)..(442): n includes a, c, g, or t, or contains no nucleotide
tcaataagaaaatccctaagcagaggctggagagctacagaaggaccaccagtagccactgtccccgggaagctgtaatcttcaagaccaaactggacaaggagatctgtgctgaccccacannnnnnnnnnnnnnnnnnnnnnnnnnnnnnnnnnacaagaaaacccaaanctccaaagctttgaacattcatgactgaactngaaaacaagccatgacttgagaaacnaataatttnntataccctgtcctttctcagnagtggttctgagantnattttaatcnaatnccnanggaatatgannntttatgtaataatgtgaatcatggtttttctnagtagattttaaaagttantnnaatattttaatttaatcttccatggattttggtgggttttgaacataaagccttggnnnnnnnnnnnnnnnnnnnnnnnnaaaaactgtgggatgctcctcccttctctacctcatgggggtattgtataagtccttgcaagaatcagtgcaaagatttgctttaattgttaagatatgatgtccctatggaagc

SEQ ID NO: 3598 - DNA, 414 bp, Homo sapiens
  misc_feature (26)..(263): n includes a, c, g, or t, or contains no nucleotide
cttctgacatgatttacttttaaggnnnnnnnnnnnnnnnnnnnnnnnnnnnnnnnnnnnnnnnnnnnnnnnnnnnnnnnnnnnnnnnnnnnnnnnnnnnnnnnnnnnnnnnnnnnnnnnnnnnnnnnnnnnnnnnnnnnnnnnnnnnnnnnnnnnnnnnnnnnnnnnnnnnnnnnnnnnnnnnnnnnnnnnnnnnnnnnnnnnnnnnnnnnnnnnnnnnnnnnnnnnnnnnnnnnnnnnnnnnnnnnnnnnnnnnnnnnnnnatctgtatgttgaggcaaaaggattgaacctggaagtctgggactttatcatagaaacaaagtctcagatattttagttctttggaaacaaatgctgtaattcaaaagcatttgacctgtcactgtactatctacatgtggaagaatgttc

SEQ ID NO: 3599 - DNA, 522 bp, Homo sapiens
  misc_feature (57)..(57): n includes a, c, g, or t, or contains no nucleotide
  misc_feature (151)..(152): n includes a, c, g, or t, or contains no nucleotide
  misc_feature (174)..(175): n includes a, c, g, or t, or contains no nucleotide
  misc_feature (272)..(273): n includes a, c, g, or t, or contains no nucleotide
  misc_feature (317)..(317): n includes a, c, g, or t, or contains no nucleotide
gactgaggcctgagcgctcctgccgcagagcttgccgcgccaaataatgtctctgtnagactcgagaactttcatttttttccaggctggttcggatttggggtggattttggttttgttcccctcctccactctcccccaccccctcccnngccctttttttttttttttttnnaaactggtattttatctttgattctccttcagccctcacccctggttctcatctttcttgatcaacatcttttcttgcctctgtccccttctctcanntctcttagctcccctccaacctggggggcagtggtgtggagaanccacaggcctgagatttcatctgctctccttcctggagcccagaggagggcagcagaagggggtggtgtctccaaccccccagcactgaggaagaacggggctcttctcatttcacccctccctttctcccctgcccccaggactgggccacttctgggtggggcagtgggtcccagattggctcacactgagaatgtaagaact

SEQ ID NO: 3600 - DNA, 394 bp, Homo sapiens
  misc_feature (336)..(350): n includes a, c, g, or t, or contains no nucleotide
tcgacgcacttgctcccggaggctgcgccccggcgcctggaacccgaggtgggaggaccggttggtgtcaccctgctcggccctcagccctgccgcgtggggcgcgtgggcacggagcttcctgcctctctgctccgacacccggcaagcagccggagacaaaacgccttaaagcccccggcccagccctgcaggtatattgcaggggcctgggggcggccctggactggcgggcggttccccagtggggtgccctggaggctgccgggcagagtggagcagcttggggccgtgcccagggcggtggctgtgagtctagtttttgctttaccaagnnnnnnnnnnnnnnntttacgtttctctgatgctcccttgaagccatagaatttagggg

SEQ ID NO: 3601 - DNA, 158 bp, Homo sapiens
ttgattctagttccagttggtggaccaactgggtgatccctgccatctctgcagtggccgtcgccttgatgtatcgcctatacatggcagaggactgaacacctcctcagaagtcagcgcaggaagagcctgctttggacacgggagaaaagaagcca

SEQ ID NO: 3602 - DNA, 518 bp, Homo sapiens
  misc_feature (76)..(76): n includes a, c, g, or t, or contains no nucleotide
  misc_feature (79)..(79): n includes a, c, g, or t, or contains no nucleotide
  misc_feature (88)..(88): n includes a, c, g, or t, or contains no nucleotide
  misc_feature (91)..(91): n includes a, c, g, or t, or contains no nucleotide
  misc_feature (108)..(108): n includes a, c, g, or t, or contains no nucleotide
  misc_feature (164)..(164): n includes a, c, g, or t, or contains no nucleotide
  misc_feature (383)..(383): n includes a, c, g, or t, or contains no nucleotide
ggaccagcccttgctctgactgcggccaagcaccacgcaggaggccactcttgtctctcagcagctgttcccaggnggnagctccctnctnggcacatgggggctggncacaatagcccagagggtcagaactggacagctgcagagacctgtgcccagagaanggtctcgacccactcaaggacacacagcaggtccgtggatgggctggatgagtgaccagggccagcctctgtctcaggacattccagaaggacaaggagatgtctctccctctcccaaagcaccagcgtccctgcctcccgtgggccctgtccgggttgccctggtgaccccagcctctgtccacttcctaacccagggaccctgcacagccagaactncctttggccctacggatggccactggctctggtctaaagtgcctgggcttggtggccatcaagagggagccagtcaggcctgtgagggccgtagaccttgtatataccctgcaccagcagtgaccgggcagagcc

SEQ ID NO: 3603 - DNA, 369 bp, Homo sapiens
  misc_feature (301)..(315): n includes a, c, g, or t, or contains no nucleotide
ccagttgctaaagttcttagtattttagcctaacatatttatcaccaacttttctttaaaagtgttccttttgtcacttagttactgattttcctgggtttgacataagtattctatgagatgatatatatgctttttttgaaagctgattctcatgaattcaagtagctgagttcctttatgtttcgtttattcactaaagtagctgacacaaaacacaccaaaacctagagcggtagttttatgtaaatgctcatgagtttgtatcaataatataattgttgatccacttataattcgnnnnnnnnnnnnnnnatgtagagattgagttgtcaattaaaaaaaatgtggcctctttgtgatcataaa

SEQ ID NO: 3604 - DNA, 386 bp, Homo sapiens
gaagatgccatagttttcgttactggatgtttggagtagatactggtctgtgattggtggaatggagaacacacgtgttggtgcttctgggtagcactggtttgcattagtttatgtttccatgccagagtttgtgtgggcgggcgcatgtgcaccacagagtgcactcgaggggactttcagtcacaggatttcataattgtcattgtcacactttcaaatttttgtacatcagtgaatttttttatattaaaaggttgagccaaagcccccagtgtttgtattttgaagccaagcttcacttctaaagtgcctacagagacttgtaaatgaaaatgcagctctgcacgagtttgaaaccgtcatacctccttctattaggaatg

SEQ ID NO: 3605 - DNA, 259 bp, Homo sapiens
  misc_feature (122)..(148): n includes a, c, g, or t, or contains no nucleotide
ggagcaaaagctcatttctgaagaggacttgttgcggaaacgacgagaacagttgaaacacaaacttgaacagctacggaactcttgtgcgtaaggaaaagtaaggaaaacgattccttctnnnnnnnnnnnnnnnnnnnnnnnnnnntgaacttgtttcaaatgcatgatcaaatgcaacctcacaaccttggctgagtcttgagactgaaagatttagccataatgtaaactgcctcaaattggactttgggcataa

SEQ ID NO: 3606 - DNA, 392 bp, Homo sapiens
  misc_feature (128)..(128): n includes a, c, g, or t, or contains no nucleotide
  misc_feature (256)..(351): n includes a, c, g, or t, or contains no nucleotide
cttgcgttcacaagcaacctaaggggcaggtgaagaagcgcagccctgccagacgcgctagattcctctaaggtctctgagatgcaccgttttttaaaaaggcgtggggtgaactgattttgatcttncttgtctagatgcaataaataaatctgaagcatttaatgtagtcatcttgacattgggcctacactgtacgagttccttatgtttccttgagctaaaaatatgtaaataatttttgtcccagtgagannnnnnnnnnnnnnnnnnnnnnnnnnnnnnnnnnnnnnnnnnnnnnnnnnnnnnnnnnnnnnnnnnnnnnnnnnnnnnnnnnnnnnnnnnnnnnnnaacacgagggtggaaatgaaaactggaacttccttgtaaat

SEQ ID NO: 3607 - DNA, 499 bp, Homo sapiens
  misc_feature (322)..(353): n includes a, c, g, or t, or contains no nucleotide
ctcaatcagtgcagtgatacatgtactccagagggacagggtggaccccctgagtcaactggagcaagaaggaaggaggcagactgatggcgattccctctcacccgggactctccccctttcaaggaaagtgaacctttaaagtaaaggcctcatctcctttattgcagttcaaatcctcaccatccacagcaagatgaattttatcagccatgtttggttgtaaatgctcgtgtgatttcctacagaaatactgctctgaatattttgtaataaaggtctttgcacatgtgaccacatacgtgttaggaggctgcatgcnnnnnnnnnnnnnnnnnnnnnnnnnnnnnnnnggaagagctcttcggtttctgagcataatgctcccatctcctgatttctctgaacagaaaacaaaagagagaatgagggaaattgctattttatttgtattcatgaacttggctgtaatcagttatgccgtataggatgtcagaca

SEQ ID NO: 3608 - DNA, 268 bp, Homo sapiens
aatttcaactatttatgagatgtatcttttgctctctcttgctctcttatttgtaccggtttttgtatataaaattcatgtttccaatctctctctccctgatcggtgacagtcactagcttatcttgaacagatatttaattttgctaacactcagctctgccctccccgatcccctggctccccagcacacattcctttgaaataaggtttcaatatacatctacatactatatatatatttggcaacttgtatttgtgtgtatat

SEQ ID NO: 3609 - DNA, 497 bp, Homo sapiens
  misc_feature (204)..(224): n includes a, c, g, or t, or contains no nucleotide
  misc_feature (297)..(305): n includes a, c, g, or t, or contains no nucleotide
  misc_feature (308)..(308): n includes a, c, g, or t, or contains no nucleotide
  misc_feature (310)..(310): n includes a, c, g, or t, or contains no nucleotide
  misc_feature (313)..(313): n includes a, c, g, or t, or contains no nucleotide
  misc_feature (331)..(331): n includes a, c, g, or t, or contains no nucleotide
  misc_feature (358)..(358): n includes a, c, g, or t, or contains no nucleotide
  misc_feature (372)..(372): n includes a, c, g, or t, or contains no nucleotide
  misc_feature (383)..(383): n includes a, c, g, or t, or contains no nucleotide
  misc_feature (408)..(408): n includes a, c, g, or t, or contains no nucleotide
gttgactggctttcctctcgttggtagttgagacgctgttgcaaattccacccctccttccctggtccagattgtagctcttagtcctccctgctcagctggccgggttggaggcctcaccctgcttggggcctggcgtggggggagctctggtgggaaaatgtcccccacctcttttcctagttttatgtttcttgggaaaannnnnnnnnnnnnnnnnnnnncagggcttcagatattttgcacgaattttaaaacatggcaataaatggctcgtgggctctggctccctgggannnnnnnnncgncnttnttttgaccccttcctgtntggcccaaaggaagtagcaggcccagntggggcccctcggntaccccccgtntcctgccgggcaggtcccaggttgnaggccctaggcgcggttcaggtcagggctatggatggggcccaggggctttggtggcccctccccaactccttcctctttgcttgggtt

SEQ ID NO: 3610 - DNA, 426 bp, Homo sapiens
  misc_feature (42)..(57): n includes a, c, g, or t, or contains no nucleotide
  misc_feature (139)..(274): n includes a, c, g, or t, or contains no nucleotide
  misc_feature (322)..(327): n includes a, c, g, or t, or contains no nucleotide
  misc_feature (346)..(347): n includes a, c, g, or t, or contains no nucleotide
  misc_feature (350)..(354): n includes a, c, g, or t, or contains no nucleotide
tacatccggaagataaatgaactgatgcctaaatatgccccnnnnnnnnnnnnnnnncggaccgatttgtagtctgctcaatctctgttgcacctgagggggaaaaaacagttcaactgcttactcccaaaacagcctnnnnnnnnnnnnnnnnnnnnnnnnnnnnnnnnnnnnnnnnnnnnnnnnnnnnnnnnnnnnnnnnnnnnnnnnnnnnnnnnnnnnnnnnnnnnnnnnnnnnnnnnnnnnnnnnnnnnnnnnnnnnnnnnnnnnnnnncttcaaagtgtgtctgggatttttttattaaagaaaaaaaatttctannnnnnaaaaaaaaaaaaaaaaaannaannnnnaaaaggaaaaagggtctgtccttcctgggattcctagccgaggccagtctgctgccgtgtgcgtgtgcgtca

SEQ ID NO: 3611 - DNA, 224 bp, Homo sapiens
  misc_feature (93)..(93): n includes a, c, g, or t, or contains no nucleotide
  misc_feature (111)..(112): n includes a, c, g, or t, or contains no nucleotide
  misc_feature (126)..(126): n includes a, c, g, or t, or contains no nucleotide
  misc_feature (129)..(129): n includes a, c, g, or t, or contains no nucleotide
  misc_feature (145)..(145): n includes a, c, g, or t, or contains no nucleotide
  misc_feature (156)..(156): n includes a, c, g, or t, or contains no nucleotide
attcagaatggtctgatactattccagtatcacctccttaattctgtttctcctcgttttcctgattttccttctcattctctccttccccgnctctgtctctctctcccnngtcactctctctcntcntcgttccttatttttngtttcttaccntcttactgtttaacctgttgcttccttctggattaatacatttagagccattcctttatatggtcaca

SEQ ID NO: 3612 - DNA, 550 bp, Homo sapiens
  misc_feature (80)..(99): n includes a, c, g, or t, or contains no nucleotide
  misc_feature (116)..(116): n includes a, c, g, or t, or contains no nucleotide
  misc_feature (240)..(257): n includes a, c, g, or t, or contains no nucleotide
  misc_feature (343)..(343): n includes a, c, g, or t, or contains no nucleotide
  misc_feature (345)..(349): n includes a, c, g, or t, or contains no nucleotide
  misc_feature (454)..(468): n includes a, c, g, or t, or contains no nucleotide
tgttggcatgccttgctcaccctgcccccagggccgctactgaagtccctttgtgccagtggatcctggagggcctgggnnnnnnnnnnnnnnnnnnnngtggccaccagaagagnagggccagccccggtcagcaaggaagaccctgagcaggaccgtggatcacctgcaacaagctctgatactccaggggatacttaagccctcatcacttcaaaactgcctcttttttccatgggnnnnnnnnnnnnnnnnnngatgtttctggttgtctgtgctgcctcaaagagcgtgtgttcttagttaactggcaaatagagctgtactcagtggccttgcaaanannnnngtctctgtttgtcacttacgctgctgcatccacaagccaatcctactcaattgggcttaagaggaacgtgggcaaattctgtatttatttttatgctccttctgnnnnnnnnnnnnnnngagaggtgttcactaaaagggcccgcatgccataaaccagttaaaactaatcaattactctagagccaagtaataaaagaat

SEQ ID NO: 3613 - DNA, 272 bp, Homo sapiens
caggcacttgtgaagagtgtgactgattgacacttttttgccttggttgctgggaagctcagatctcccctctgcatgtcccttgcttaggacctcccatggtgtacttggagttgggacctcacctggctctcccttatctttccggctgccattttttcccctttctaactttctttcccatacacttatttgaaatattatctcacggtaacgaaataaagtgtctgtcacctcctgctgtgttgtcatcttgcatgagctatctaagt

SEQ ID NO: 3614 - DNA, 481 bp, Homo sapiens
cctggcctgttctgttttgcctgaagttggagtgagtgtggctcccctctatttagcatgacaagccccaggcaggctgtgcgctgacaaccaccgctccccagcccagggttcccccagccctgtggaagggactaggagcactgtagtaaatggcaattctttgacctcaacctgtgatgaggggaggaaactcacctgctggcccctcacctgggcacctggggagtgggacagagtctgggtgtatttattttcctccccagcaggtggggagggggtttggtggcttgcaagtatgttttagcatgtgtttggttctggggcccctttttactccccttgagctgagatggaacccttttggcccccagctgggggccatgagctccagacccccagcaaccctcctatcacctcccctccttgcctcctgtgtaatcatttcttgggccctcctgaaacttacacacaaaacgtt

SEQ ID NO: 3615 - DNA, 352 bp, Homo sapiens
  misc_feature (55)..(57): n includes a, c, g, or t, or contains no nucleotide
agcccagatccaaagttgtctcctgcccatgagcaccacagtcaggccttgaggnnntcttctagggagacaacagccctgtctcaaaaccgagttgccagctcccatgtaccagcagctggaatctgaaggcgtgagtcttcatcttagggcatcgctcctcctcacgccacaaatctggtgcctctctcttgcttacaaatgtctaggtccccactgcctgctggaaagaaaacacactcctttgcttagcccacagttctccatttcacttgacccctgcccacctctccaacctaactggcttacttcctagtctacttgaggctgcaatcacactgaggaactcaca

SEQ ID NO: 3616 - DNA, 612 bp, Homo sapiens
actggaaccactgtggagagatggcacctgcctgcaaacggcatttcatccaggacacctgcctctacgagtgctcccccaacttggggccctggatccagcaggtggatcagagctggcgcaaagagcgggtactgaacgtgcccctgtgcaaagaggactgtgagcaatggtgggaagattgtcgcacctcctacacctgcaagagcaactggcacaagggctggaactggacttcagggtttaacaagtgcgcagtgggagctgcctgccaacctttccatttctacttccccacacccactgttctgtgcaatgaaatctggactcactcctacaaggtcagcaactacagccgagggagtggccgctgcatccagatgtggttcgacccagcccagggcaaccccaatgaggaggtggcgaggttctatgctgcagccatgagtggggctgggccctgggcagcctggcctttcctgcttagcctggccctaatgctgctgtggctgctcagctgacctccttttaccttctgatacctggaaatccctgccctgttcagccccacagctcccaactatttggttcctgctccatggtcgggcctct

SEQ ID NO: 3617 - DNA, 442 bp, Homo sapiens
  misc_feature (128)..(150): n includes a, c, g, or t, or contains no nucleotide
  misc_feature (333)..(333): n includes a, c, g, or t, or contains no nucleotide
  misc_feature (396)..(398): n includes a, c, g, or t, or contains no nucleotide
  misc_feature (401)..(404): n includes a, c, g, or t, or contains no nucleotide
gggcaccattttcttcttccctttgatctcacatatgctccctaaaaatccttaagttgtcaatctgatccccagtgtgaggttaatgagcaaaattggtctttggggccctttttgtccaagccccnnnnnnnnnnnnnnnnnnnnnnntattatctttaaagccctactttaactccttaattccagcatacagctaaaactggatgtatattctggcaagtaaaggctgaggactcctctttaatcctcagatctagataactcatgacattttatttgaccaacatagcacatgatgagatatcaaggtaattaaaatagcatgcttgnaaaaaaaatacgtaatctgtttcacctgtaactgtttaagccaataaacttttcaaaatttannnaannnngggcttttatgtagcactttacgttttcatgctgctta

SEQ ID NO: 3618 - DNA, 284 bp, Homo sapiens
  misc_feature (38)..(98): n includes a, c, g, or t, or contains no nucleotide
  misc_feature (234)..(236): n includes a, c, g, or t, or contains no nucleotide
  misc_feature (240)..(240): n includes a, c, g, or t, or contains no nucleotide
tgaccagcattgaggggacactgagaaaagttcttcannnnnnnnnnnnnnnnnnnnnnnnnnnnnnnnnnnnnnnnnnnnnnnnnnnnnnnnnnnnncctgtgcggaactcctgctgagcagagtggctttgtattcttccttccaactcaggctgttggtgcactgctagagggctgctgtctctgacactgcagtagccacagtcgagcttgagctggctggtccagcagnnnctgntccgcagccctggggctcagaccagagcaatgctgtgagagtcc

SEQ ID NO: 3619 - DNA, 520 bp, Homo sapiens
  misc_feature (71)..(146): n includes a, c, g, or t, or contains no nucleotide
  misc_feature (197)..(255): n includes a, c, g, or t, or contains no nucleotide
ggaccatgtgtcacttgtgctttgctcttgtcccacgtgtcttccactttgcatatgagccgtgaactgtnnnnnnnnnnnnnnnnnnnnnnnnnnnnnnnnnnnnnnnnnnnnnnnnnnnnnnnnnnnnnnnnnnnnnnnnnnnnttatttattttatttgtttttcattcatcccattaatcatttccccataannnnnnnnnnnnnnnnnnnnnnnnnnnnnnnnnnnnnnnnnnnnnnnnnnnnnnnnnnnctgtagatcccaagatgactggggtgggaggtcttgctagaatgggaagggtcatagaaagggccttgacatcagttcctttgtgtgtactcactgaagcctgcgttggtccagagcggaggctgtgtgcctgggggagttttcctctatacatctctccccaaccctaggttccctgttcttcctccagctgcaccagagcaacctctcactccccatgccacgttccacagttgccaccacctctgtggcattgaaatgagca

SEQ ID NO: 3620 - DNA, 452 bp, Homo sapiens
  misc_feature (72)..(73): n includes a, c, g, or t, or contains no nucleotide
  misc_feature (106)..(106): n includes a, c, g, or t, or contains no nucleotide
  misc_feature (120)..(123): n includes a, c, g, or t, or contains no nucleotide
  misc_feature (132)..(132): n includes a, c, g, or t, or contains no nucleotide
  misc_feature (135)..(135): n includes a, c, g, or t, or contains no nucleotide
  misc_feature (170)..(170): n includes a, c, g, or t, or contains no nucleotide
  misc_feature (276)..(373): n includes a, c, g, or t, or contains no nucleotide
gccttgcagatatgtgtggcatttactagccagagctctgaaaggcagtgctgtctgtttcttgtactgggnnaccaaagtaaaaatccaagcacattccccttgncagttaggggaggnnnnccctactgnccnttctcaaagcagagaggcagcttatcaaactcagncccaaaactctgtttacatgggtggggagatggagcagggaagtacagagtgggatggtcaggacctgggccattgcaaccaaaatggggacttcctgggtagggnnnnnnnnnnnnnnnnnnnnnnnnnnnnnnnnnnnnnnnnnnnnnnnnnnnnnnnnnnnnnnnnnnnnnnnnnnnnnnnnnnnnnnnnnnnnnnnnnntaaatgaggcctaaatgtgtgaagtgcgatttctgcttttgtgtaccccaccaccccattaccacagctgcctttgtgt

SEQ ID NO: 3621 - DNA, 121 bp, Homo sapiens
gtgtgagtggctccagaagactcttctcttctctgtgcaagagccaggaaggctctagaaaggaatgtctgaggaagcatcggagactgggtcccgccatgcctgtgtcatctcctggctt

SEQ ID NO: 3622 - DNA, 529 bp, Homo sapiens
  misc_feature (67)..(116): n includes a, c, g, or t, or contains no nucleotide
  misc_feature (278)..(313): n includes a, c, g, or t, or contains no nucleotide
  misc_feature (340)..(356): n includes a, c, g, or t, or contains no nucleotide
atatagacctatgatgtacaggtacgacatgtataggttacctagatgttatgagaaattttagttnnnnnnnnnnnnnnnnnnnnnnnnnnnnnnnnnnnnnnnnnnnnnnnnnnggctttctatcatttttatgttttaatgcaaaggaaattttaaaatgttctggaagtgtttttgattaagcaatgcagcctagaagcaatggttctgttcaatcattcagatgttagtggaagcataaaagtcaagactgcatgttgaaacctttcttttgnnnnnnnnnnnnnnnnnnnnnnnnnnnnnnnnnnnncatgtgctaatttttcacaattattgnnnnnnnnnnnnnnnnnctgtagtttggtatttccctttactttggtggcctgcttccctcatgccctggaatacaactcagagctccaggcagcggaaccatctattgttttgtttgccagaaagtgcaccctgtatggtctcctgtctaagttggaaatattatgcatgtgcaggactattcgagtat

SEQ ID NO: 3623 - DNA, 506 bp, Homo sapiens
  misc_feature (168)..(189): n includes a, c, g, or t, or contains no nucleotide
  misc_feature (299)..(300): n includes a, c, g, or t, or contains no nucleotide
  misc_feature (303)..(303): n includes a, c, g, or t, or contains no nucleotide
  misc_feature (306)..(306): n includes a, c, g, or t, or contains no nucleotide
  misc_feature (309)..(325): n includes a, c, g, or t, or contains no nucleotide
  misc_feature (338)..(340): n includes a, c, g, or t, or contains no nucleotide
  misc_feature (346)..(346): n includes a, c, g, or t, or contains no nucleotide
  misc_feature (348)..(351): n includes a, c, g, or t, or contains no nucleotide
  misc_feature (419)..(438): n includes a, c, g, or t, or contains no nucleotide
cagattatcaggactgtgaggaccttgaaatcatcaggaacaagagagaagatccttctgctactgactgaactcgttgtgaggtactcagtgttggctgaggtagaagctgccaccagagactaaagggaaggctgctatggaggaactacagagaactcctttgcnnnnnnnnnnnnnnnnnnnnnntgtcctgttttgaggacgataccccacatgaggacttggtataaagattcctgccctacgtggcattgtcccgttttacatccttccctcatgacctggcctgatgtggnntanctnctnnnnnnnnnnnnnnnnnttttgaaggtgannnaaaaanannnnttatttacagtacatccctcttaggggcaagtctctgactggttctggacctgccacagttcacttgnnnnnnnnnnnnnnnnnnnncagtgaggtgggcacccacgtcttctcgccctggacaaagaccactccccggtcgatgtagatcacaa

SEQ ID NO: 3624 - DNA, 260 bp, Homo sapiens
  misc_feature (134)..(134): n includes a, c, g, or t, or contains no nucleotide
cttgacgcagatgcttagggccttggcaacagatggaaataaacaccgggccaaagtggacaagagaaagcagcggtcagttttcagagatgtcctgagggcagtggaggaacgggattttccaacagaaaccnttaaatttggtcctgaacgcatgtatattgattgctgggtaaaaaaacacacctatgacacctttaaggaggttcttggatcagggatgcagtaccacttgcagtcaaatgaattccttcgaaatg

SEQ ID NO: 3625 - DNA, 472 bp, Homo sapiens
  misc_feature (143)..(171): n includes a, c, g, or t, or contains no nucleotide
  misc_feature (243)..(301): n includes a, c, g, or t, or contains no nucleotide
  misc_feature (396)..(396): n includes a, c, g, or t, or contains no nucleotide
  misc_feature (398)..(398): n includes a, c, g, or t, or contains no nucleotide
  misc_feature (413)..(420): n includes a, c, g, or t, or contains no nucleotide
  misc_feature (422)..(424): n includes a, c, g, or t, or contains no nucleotide
  misc_feature (426)..(429): n includes a, c, g, or t, or contains no nucleotide
atttggtcaagatactcacttgtaattattccaaaaaattggagtctgtttgctgttaatttctttgtgggggcagcaggagcctctcagctttttcgtatttggagatataaccaagaactaaaagctaaagcacacaaatnnnnnnnnnnnnnnnnnnnnnnnnnnnnnagatgtggacaaaaccattgggacctagtttattatttggttattgataaagcaaagctaactgtgtgtttnnnnnnnnnnnnnnnnnnnnnnnnnnnnnnnnnnnnnnnnnnnnnnnnnnnnnnnnnnnaataacagtctctctacatgacttaaggaacttatctatggatattagtaacatttttctaccatttgtccgtaataaaccatacttgctcgtananaaaaaaaaaaaaaannnnnnnnannnannnnacatatgtacataaaagaacacacaaattcaagaagttggaag

SEQ ID NO: 3626 - DNA, 560 bp, Homo sapiens
  misc_feature (393)..(425): n includes a, c, g, or t, or contains no nucleotide
tgtcgggagtcgaggccttcctgcaggccagccagcccccggacccccaccgcggcgccaaggtcatccgcgcagacccgcaggggggccgccgccgccacagttccgagaccttctcctccaccacgacggtcacccccgtgtccccgtccttcgcccacaaccccaagcgccacaactcggcctccgtggaaaatgtctctctcaggaaaagcagcgagggcggcgtgggtgtcggccctggagggggcgacgagccgcccacctccccacgacagttgcagccggcgccccctttggcaccgcagggccggccgtggaccccgggtcagcccgggggcttggtcggttgtcctgggagcggtggatcgcccatgcgcagagagacctctnnnnnnnnnnnnnnnnnnnnnnnnnnnnnnnnnatcgacgtgagggaggagcccgggctgccaccccagccgcagccgccgccgccgccgcttcctcagccgggagacaagagctcctggggccggacccgaagcctcgggggtctcatcagcgctgtgggcgtcggc

SEQ ID NO: 3627 - DNA, 361 bp, Homo sapiens
  misc_feature (161)..(161): n includes a, c, g, or t, or contains no nucleotide
ttgcttccaggtgtgcctggcatgggcctggcccaggaagacaccacctcactgaggactttgcgaatatcagagacctcagactcttcacagggtcaggactcagagagtgtcttactggtggatgaggctggtgggagcggcagggctgggcctgcccntaaggggagctccctgcaagtcacatttcccagtgaaacactgaacttatcagaaaaatgtatataataggcaaggaaagaaatacagtactgtttctggacccttataaaatcctgtgcaatagacacatacatgtcacatttagctgtgctcagaagggctatcatcatcctacaactcacattagagaacatcctgg

SEQ ID NO: 3628 - DNA, 480 bp, Homo sapiens
  misc_feature (79)..(79): n includes a, c, g, or t, or contains no nucleotide
  misc_feature (85)..(85): n includes a, c, g, or t, or contains no nucleotide
ttgctgccctgtggacactggctgggaaggcaggtcttcccctagcacatggggaccccggcctcgagggtgacctccntacctngcccctgccagccaccaagcgcaggtgcagcgggggccagactcctgccggcctcagaggacacctggcccagcacaggcagctagaagggccggtgggcaccggggccgggaagcccccacctcaccacctgagggcccctgggaggctcctctggcctggctgggctgggtctggggccgccacaggcccctcacggggcggcagaggcaacttcagtgtccctgttagagcaacacgggtccctccgtggggggctgggtgcggccccctgccgtgtatttcctccccagggagtggggcctccccgggagctgacgccaccaccctgcttagccctcacagggccccaaggtgtccgagtgtgttgggtctgaacgcgaaataaagaaatc

SEQ ID NO: 3629 - DNA, 566 bp, Homo sapiens
  misc_feature (37)..(52): n includes a, c, g, or t, or contains no nucleotide
  misc_feature (97)..(97): n includes a, c, g, or t, or contains no nucleotide
  misc_feature (307)..(307): n includes a, c, g, or t, or contains no nucleotide
  misc_feature (324)..(324): n includes a, c, g, or t, or contains no nucleotide
  misc_feature (431)..(431): n includes a, c, g, or t, or contains no nucleotide
  misc_feature (464)..(464): n includes a, c, g, or t, or contains no nucleotide
  misc_feature (508)..(508): n includes a, c, g, or t, or contains no nucleotide
  misc_feature (525)..(525): n includes a, c, g, or t, or contains no nucleotide
  misc_feature (529)..(529): n includes a, c, g, or t, or contains no nucleotide
acactgtggcggagaaatgccagtggggatcccgtgnnnnnnnnnnnnnnnntctactacaagctacaccaggtgaaccggccactgaccatgcggnaaggatggtattcagactcgaaaccgcaaggcatctggaaaagggaaaaagaaacggggctccagtctgggaggcacaggagcagccgaaggaccagctggtggctttatggtggtggctgggggcagcggtagcgggaattgtggggaggtggcttcaggcctgacactgggccccccaggtactgcccatctctaccaaggcctgggnccctgtggtgctgtcangggcctgttagccacctcatgcctttccctggacccctactgggctcacccacgggctccttccccacaggccccatgccccccaccaccagcactactgtggtggntccgctcagctcatgagggcacagagcatggcntccagaggaggggtggtgtccttctcctcttgtagccagaattntggacaacccaagtctntggnccccaggcaccccctggcttgaaccttcaaagctttt

SEQ ID NO: 3630 - DNA, 547 bp, Homo sapiens
tcagctcttgcaagaggactccctcaatgtggctgacttgacttccctccgggccccactggacatccccatcccagaccctccacccaaggatgatgagatggaaacagataagcaggagaagaaagaagtccctaagtgtggatttctccctgggaatgagaaagtcctgtccctgcttgccctggttaagccagaagtctggactctcaaagagaaatgcattctggtgattacatggatccaacacctgatccccaagattgaagatggaaatgattttggggtagcaatccaggagaaggtgctggagagggtgaatgccgtcaagaccaaagtggaagctttccagacaaccatttccaagtacttctcagaacgtggggatgctgtggccaaggcctccaaggagactcatgtaatggattaccgggccttggtgcatgagcgagatgaggcagcctatggggagctcagggccatggtgctggacctgagggccttctatgctgagctttatcatatcatcagcagcaacctggagaaa

SEQ ID NO: 3631 - DNA, 401 bp, Homo sapiens
  misc_feature (61)..(61): n includes a, c, g, or t, or contains no nucleotide
  misc_feature (79)..(79): n includes a, c, g, or t, or contains no nucleotide
  misc_feature (106)..(144): n includes a, c, g, or t, or contains no nucleotide
  misc_feature (312)..(356): n includes a, c, g, or t, or contains no nucleotide
gttgcccagtcatgtgatcccctgccatcttgccttaggaacagccttcccccaccagcanccatggctggctggggcnttagccaagccacctactgccaggaannnnnnnnnnnnnnnnnnnnnnnnnnnnnnnnnnnnnnncagcagctggactgagggcagagtctgtgggtgcagagaccctgcatgtaggtcacaggttgaggcccagccactctccctggggcctggtgggtaggcaagtagctctggggccacctcaagtgaccaaatgctattaatttccatcctttagcaggctgggccctnnnnnnnnnnnnnnnnnnnnnnnnnnnnnnnnnnnnnnnnnnnnnctgcctagcttgcgtgcttgaggaaggtggcattccgtgcttgcc

SEQ ID NO: 3632 - DNA, 460 bp, Homo sapiens
  misc_feature (54)..(54): n includes a, c, g, or t, or contains no nucleotide
ttaacgactgggtgcccagcatcaccctccccgagtgacagcccggcggggacnttggtctgatcgacgtggtgacgccccggggcgcctagagcgcggctggctctgtggaggggccctccgagggtgcccgagtgcggcgtggagactggcaggcggggggggcgcctggagagcgaggaggcgcggcctcccgaggaggggcccggtggcggcagggccaggctggtccgagctgaggactctgcaagtgtctggagcggctgctcgcccaggaaggcctaggctaggacgttggcctcagggccaggaaggacagactggccgggcaggcgtgactcagcagcctgcgctcggcaggaaggagcggcgccctggacttggtacagttgcaggagcgtgaaggacttagccgactgcgctgctttttcaaaacggatccgggcaatgcttcgttttc

SEQ ID NO: 3633 - DNA, 453 bp, Homo sapiens
  misc_feature (61)..(101): n includes a, c, g, or t, or contains no nucleotide
  misc_feature (142)..(142): n includes a, c, g, or t, or contains no nucleotide
  misc_feature (145)..(145): n includes a, c, g, or t, or contains no nucleotide
  misc_feature (197)..(197): n includes a, c, g, or t, or contains no nucleotide
  misc_feature (208)..(208): n includes a, c, g, or t, or contains no nucleotide
  misc_feature (213)..(213): n includes a, c, g, or t, or contains no nucleotide
  misc_feature (242)..(243): n includes a, c, g, or t, or contains no nucleotide
  misc_feature (249)..(253): n includes a, c, g, or t, or contains no nucleotide
  misc_feature (255)..(310): n includes a, c, g, or t, or contains no nucleotide
  misc_feature (399)..(401): n includes a, c, g, or t, or contains no nucleotide
tttctccagtgctcaactgttagatattaatcttggcaaactgcttaatcttgtggatttnnnnnnnnnnnnnnnnnnnnnnnnnnnnnnnnnnnnnnnnnagtgaaaggaaaaattgcattagttggttgcatgaacttcngangggcagatattactgcacaaactgccatctcgcttcatttttttaactatgncatttgagtancaganctaatttttaaaatatgctaaactggaanngattannnnnannnnnnnnnnnnnnnnnnnnnnnnnnnnnnnnnnnnnnnnnnnnnnnnnnnnnnnntggctgtcccccccgccgccccccccacccccatatgtacagatgataatagggtgtggaatgtcgtcagtggcaaacatttcacagannnttattttgtttctgtcttcaacatttttgacactgtgctaatagttatattc

SEQ ID NO: 3634 - DNA, 196 bp, Homo sapiens
ccaaaaacagcatgcaaggtacagacccaccaaatgggaagaatttgaaattcggaattccaaagacccccaagaattaacttgcagcttggtatacccaccttaaaaacggtggcaaatttccaggggcaaagccccccactaatgaaggggtaacccaaagggaccgcttttccagaaaatagggcccagcaat

SEQ ID NO: 3635 - DNA, 572 bp, Homo sapiens
  misc_feature (46)..(47): n includes a, c, g, or t, or contains no nucleotide
  misc_feature (49)..(50): n includes a, c, g, or t, or contains no nucleotide
  misc_feature (105)..(105): n includes a, c, g, or t, or contains no nucleotide
  misc_feature (111)..(111): n includes a, c, g, or t, or contains no nucleotide
  misc_feature (128)..(128): n includes a, c, g, or t, or contains no nucleotide
  misc_feature (182)..(182): n includes a, c, g, or t, or contains no nucleotide
  misc_feature (184)..(198): n includes a, c, g, or t, or contains no nucleotide
  misc_feature (201)..(201): n includes a, c, g, or t, or contains no nucleotide
  misc_feature (204)..(206): n includes a, c, g, or t, or contains no nucleotide
  misc_feature (217)..(217): n includes a, c, g, or t, or contains no nucleotide
  misc_feature (221)..(222): n includes a, c, g, or t, or contains no nucleotide
  misc_feature (225)..(269): n includes a, c, g, or t, or contains no nucleotide
  misc_feature (407)..(407): n includes a, c, g, or t, or contains no nucleotide
  misc_feature (429)..(429): n includes a, c, g, or t, or contains no nucleotide
  misc_feature (448)..(448): n includes a, c, g, or t, or contains no nucleotide
  misc_feature (485)..(485): n includes a, c, g, or t, or contains no nucleotide
taccggatcacagagaaaaaggctttccgggggcttacggagctgnngnngttttaccagcagaactctctaaaggattgcttcaagtctctggacaccaccttncagttncccttcaaggagcctgnaaagagaaccatcagcaggccagcagtgggaagcacaaagtattttggcacagncnnnnnnnnnnnnnnnttntgnnnccgagaccgantcannagnnnnnnnnnnnnnnnnnnnnnnnnnnnnnnnnnnnnnnnnnnnnnggacagcaaggctggtggcgaggggagatctatggccgggttggctggttccctgccaactacgtggaggaagattattctgaatactgctgagccctggtgccttggcagagagacgagaaactccaggctctgagnccggcgtgggcaggcagcgganccaggggctgtgacagctnccggcgggtggagactttgggatggactggaggaggncagcgtccagctggcggtgctcccgggatgtgccctgacatggttaatttataacaccccgatttcctcttgggtcccctcaagcag

SEQ ID NO: 3636 - DNA, 551 bp, Homo sapiens
  misc_feature (506)..(524): n includes a, c, g, or t, or contains no nucleotide
  misc_feature (526)..(526): n includes a, c, g, or t, or contains no nucleotide
atgcaaacaggacttaaatgaactttgatctctgttttaaagattattaaaaaacattgtgtatctatacatatggctcttgaggacttagctttcactacactacaggatatgatctccatgtagtccatataaacctgcagagtgattttccagagtgctcgatactgttaattacatctccattagggctgaaaagaatgacctacgtttctgtatacagctgtgttgcttttgatgttgtgttactgtacacagaagtgtgtgcactgaggctctgcgtgtggtccgtatggaaagcctggtagccctgcgagttaagtactgcttccattcattgtttacgctggaatttttctccccatggaatgtaagtaaaacttaagtgtttgtcatcaataaatggtaatactaaatttttttgttaatttattctcaaatgccactactgctaggttggtcccctcccaacttgcccctatcctttttttatttttaagaaaaannnnnnnnnnnnnnnnnnntnccatctgggcaaaagtctgaagatc

SEQ ID NO: 3637 - DNA, 435 bp, Homo sapiens
  misc_feature (92)..(92): n includes a, c, g, or t, or contains no nucleotide
  misc_feature (142)..(142): n includes a, c, g, or t, or contains no nucleotide
  misc_feature (163)..(163): n includes a, c, g, or t, or contains no nucleotide
  misc_feature (170)..(170): n includes a, c, g, or t, or contains no nucleotide
tgtgggagctttctgcaagacatccaagatcgatatgaaaggctgcataaaagttttgaaggagcaggccccagacagtgtggaggggctgnctaaatgccctcaggttcactacaaagcacttgaacgatgaatcaacttnccaaacagattcgagcaatgncttcagntagagctctgctcaaagaagaggatctatgtgctgacctcagaagatgtatatgtttacataatttaatacagattgatgttaatacttgtgtatttacataaccgtttccttcttgtcactgaaatatatggaccttaatttgtatcctgactgactcaacccagcagagcataaattgacttgagagccttacctttgatgtctgaaatgaaacccccttctccaaaggcaaaattcggagactttgatctttgctactggag

SEQ ID NO: 3638 - DNA, 388 bp, Homo sapiens
  misc_feature (112)..(119): n includes a, c, g, or t, or contains no nucleotide
  misc_feature (124)..(125): n includes a, c, g, or t, or contains no nucleotide
  misc_feature (127)..(128): n includes a, c, g, or t, or contains no nucleotide
  misc_feature (131)..(131): n includes a, c, g, or t, or contains no nucleotide
  misc_feature (134)..(210): n includes a, c, g, or t, or contains no nucleotide
  misc_feature (249)..(263): n includes a, c, g, or t, or contains no nucleotide
  misc_feature (296)..(320): n includes a, c, g, or t, or contains no nucleotide
  misc_feature (334)..(350): n includes a, c, g, or t, or contains no nucleotide
agtgagcggcgtggacgcctctttcctccggctcttcccttgttgctgcgagagcgagagggccgcgggcggcggaggcagcggggccgggatggaggacgttaactctaannnnnnnncgtgnncnngcngannnnnnnnnnnnnnnnnnnnnnnnnnnnnnnnnnnnnnnnnnnnnnnnnnnnnnnnnnnnnnnnnnnnnnnnnnnnnggaaaatggctttgtaaagaagcttgagcctaaatctgnnnnnnnnnnnnnnntagaagttacaggaaagatctgtgaaatgctcnnnnnnnnnnnnnnnnnnnnnnnnnccagaaaggacacnnnnnnnnnnnnnnnnngcctaatttttctgactcttacgaaaacgattgccaac

SEQ ID NO: 3639 - DNA, 538 bp, Homo sapiens
  misc_feature (176)..(205): n includes a, c, g, or t, or contains no nucleotide
  misc_feature (342)..(342): n includes a, c, g, or t, or contains no nucleotide
  misc_feature (349)..(350): n includes a, c, g, or t, or contains no nucleotide
  misc_feature (352)..(352): n includes a, c, g, or t, or contains no nucleotide
  misc_feature (359)..(367): n includes a, c, g, or t, or contains no nucleotide
  misc_feature (369)..(379): n includes a, c, g, or t, or contains no nucleotide
  misc_feature (381)..(382): n includes a, c, g, or t, or contains no nucleotide
ggaatttggcttcatactctttctttgcaacagcagtgttctgggtgataattttgaattgatacctgttcctttttctgggttttgttggctttttgaaaaattgtctttccttatcattggtgggaggcttggtagcaaagtaacattttttggaaaagaggacagaaaaattnnnnnnnnnnnnnnnnnnnnnnnnnnnnnntcctactttgttattgcaaattgaggaatcacttttaactgttttaggtgtgtgtgtccagagtgagcaaggattatgtttttggattgtcaaagaggatgcttagtcttaaaataaaaataaatttaaaaatcatnttataannanaaaaaannnnnnnnnannnnnnnnnnnannaaggcaactaatcacattttaaaactgttcggcatataacatattcttaaagtaagaaaaaaaaggtcacagaatagcatctcttttacctgggcttgtgactgagcttaggttttagggcccatattttgtttaaaccagatagtttcatgggtc

SEQ ID NO: 3640 - DNA, 44 bp, Homo sapiens
ctggcacgtggcttcagccccaaggatgtgctggttcgctggct

SEQ ID NO: 3641 - DNA, 378 bp, Homo sapiens
  misc_feature (118)..(148): n includes a, c, g, or t, or contains no nucleotide
  misc_feature (188)..(188): n includes a, c, g, or t, or contains no nucleotide
  misc_feature (196)..(212): n includes a, c, g, or t, or contains no nucleotide
  misc_feature (214)..(214): n includes a, c, g, or t, or contains no nucleotide
tttctgttgctattgatgcaggtcatgagtccttcctgttctataaagaaggcatttattttgagccagactgtagcagtgaagacatggatcatggtgtgctggtggttggctacgnnnnnnnnnnnnnnnnnnnnnnnnnnnnnnnatattggctggtgaagaacagctggggtgaagaatggggncatgggtnnnnnnnnnnnnnnnnngnccaaagaccggagaaaccattgtggaattgcctcagcagccagctaccccactgtgtgagctggtggacggtgatgaggaaggacttgactggggatggcgcatgcatgggaggaattcatcttcagtctaccagcccccgctgtgtcggatacacactcgaat

SEQ ID NO: 3642 - DNA, 555 bp, Homo sapiens
  misc_feature (99)..(119): n includes a, c, g, or t, or contains no nucleotide
  misc_feature (164)..(166): n includes a, c, g, or t, or contains no nucleotide
  misc_feature (170)..(171): n includes a, c, g, or t, or contains no nucleotide
  misc_feature (225)..(280): n includes a, c, g, or t, or contains no nucleotide
  misc_feature (307)..(330): n includes a, c, g, or t, or contains no nucleotide
  misc_feature (454)..(458): n includes a, c, g, or t, or contains no nucleotide
  misc_feature (504)..(527): n includes a, c, g, or t, or contains no nucleotide
cttatgtgcacagtgcggtgttggcaggaggcgtggctgtgggtacctcgtgtcacctgatcccttctccgtggcttgccatggtgctgggtcttgtgnnnnnnnnnnnnnnnnnnnnnggagccaagtgcctgccggtgtgttgtaaccgagtgctggggatnnnccanntctccgtcatgcactccatcttcagcttgctgggtctgcttggagagatcaccnnnnnnnnnnnnnnnnnnnnnnnnnnnnnnnnnnnnnnnnnnnnnnnnnnnnnnnnccaggtcctcctcagcattggggaacnnnnnnnnnnnnnnnnnnnnnnnntcacgtctggtctcctgacaggtttgctcctaaatctcaaaatatggaaagcacctcatgtggctaaatattttgatgaccaagttttctggaagtttcctcatttggctgttggattttaagnnnnncaaaagcatccaagaaaaacaaggcctgttcaaaaacaagacaacnnnnnnnnnnnnnnnnnnnnnnnngtacgtgagaaacgctcatgacagcaaa

SEQ ID NO: 3643 - DNA, 564 bp, Homo sapiens
  misc_feature (46)..(60): n includes a, c, g, or t, or contains no nucleotide
  misc_feature (131)..(151): n includes a, c, g, or t, or contains no nucleotide
  misc_feature (219)..(219): n includes a, c, g, or t, or contains no nucleotide
  misc_feature (351)..(365): n includes a, c, g, or t, or contains no nucleotide
gtttgtcatggcacgggaacatgctccatctatcatcttcatggannnnnnnnnnnnnnncggctcctcgcggctggaggggggttctggaggggacagtgaagtgcagcgcacgatgctggagttgctcnnnnnnnnnnnnnnnnnnnnngccaccaagaacatcaaggttatcatggctactaataggattgatatcctggactcggcactgcttcncccagggcgcattgacagaaaaattgaattcccaccccccaatgaggaggcccggctggacattttgaagattcattctcggaagatgaacctgacccgggggatcaacctgagaaaaattgctgagctcannnnnnnnnnnnnnngggctgaagtgaagggcgtgtgcacagaagctggcatgtatgccctgcgagaacggcgagtccatgtcactcaggaggactttgagatggcagtagccaaggtcatgcagaaggacagtgagaaaaacatgtccatcaagaaattatggaagtgagtggacagcctttgtgtgtatctctccaataaagctctgtgggc

SEQ ID NO: 3644 - DNA, 586 bp, Homo sapiens
  misc_feature (248)..(248): n includes a, c, g, or t, or contains no nucleotide
  misc_feature (251)..(251): n includes a, c, g, or t, or contains no nucleotide
  misc_feature (266)..(266): n includes a, c, g, or t, or contains no nucleotide
  misc_feature (376)..(376): n includes a, c, g, or t, or contains no nucleotide
  misc_feature (381)..(409): n includes a, c, g, or t, or contains no nucleotide
  misc_feature (533)..(533): n includes a, c, g, or t, or contains no nucleotide
gagaacccgtactctagggccaaatccattcttcttgccctggctcacttgtcccccccaccgccccgcgctggagccactgcctagttcttcagccctagatggtgctcgccagacctcctctcaatgctcatcacacacagggctattcctttcctccaatgaaccaaacgcctcccgcccacctccaggtcccagtcctctgttccctttgcctggtccacccttgccctccctgggtcgcaganganggtcggcctcgtcanttccccgcagaccgccgcgcgtccctcttgtgcggttcaccacagttgtatttaagtgatcgtgtgagtcgtcgttaaatgcctgtctccccgcggatcatgggctcctngaggnnnnnnnnnnnnnnnnnnnnnnnnnnnnntaaccccgcgccggcatagggacctaaggcccactggagggcgctcatcaagtagctgctggatgttgacgaaggaagcggcggcgcagctcagggatctccgagtcaggacggtcggccaganccacggggtaacgggtctaatcgtgtaggaataaagctgtattccagtgcttc

SEQ ID NO: 3645 - DNA, 516 bp, Homo sapiens
  misc_feature (35)..(35): n includes a, c, g, or t, or contains no nucleotide
ctaactacatctatttctataatttttaaggactnttcataaggactcttaaaataatcctgaacattagaaccctaatgttcaggaagattttaatctaagcatttttatggaaatatttttaatgcagcagctattgcacttcagccaaatgtttatttcacacaaaacggatgtaacattcatgtgatcgtgcacccactggacaaaccaaaatgtgaccataactgtttaggttctgtgtgtttgtaatatgtctaataatctggagtagaaatgcgtaatttcaattactgtataaagtttatgtttttttaagtgtgcagaatctgagagcaatggtttttacttctctgtgttaattgtaatattgactctattttgtaacttaagtttctgacctgtcgtacatttgtttgagtcgtttatgtactactgaactgtaccagttgcacatgcttgaactgtagtaatgttagcttgttctaaagctatccattgtgtcatatttactct

SEQ ID NO: 3646 - DNA, 408 bp, Homo sapiens
  misc_feature (28)..(28): n includes a, c, g, or t, or contains no nucleotide
  misc_feature (32)..(32): n includes a, c, g, or t, or contains no nucleotide
  misc_feature (40)..(40): n includes a, c, g, or t, or contains no nucleotide
  misc_feature (46)..(47): n includes a, c, g, or t, or contains no nucleotide
  misc_feature (49)..(50): n includes a, c, g, or t, or contains no nucleotide
  misc_feature (97)..(97): n includes a, c, g, or t, or contains no nucleotide
  misc_feature (123)..(139): n includes a, c, g, or t, or contains no nucleotide
  misc_feature (160)..(160): n includes a, c, g, or t, or contains no nucleotide
  misc_feature (185)..(185): n includes a, c, g, or t, or contains no nucleotide
  misc_feature (266)..(293): n includes a, c, g, or t, or contains no nucleotide
ctgcaggacaaggacacctacagctggnctcntgaaggancggagnnannccagcgacaagcggaagttcctgaaggagcggcttgcacggctgacngcaggctcggcgccggcttgcccagnnnnnnnnnnnnnnnnnactctgtccagccccgtagangtgcacgcacactgtctgcccccgnttcccgggtagccactggactgacgacttgagtgctcagtagtcagactggatagtccgtctctgcttatccgttagccgnnnnnnnnnnnnnnnnnnnnnnnnnnnnagtttggtttctagcatgaagacagagccccaccctcagatgcacatgagctggcgggattgaaggatgctgtcttcgtactgggaaagggattttcagccctcagaatcgctcc

SEQ ID NO: 3647 - DNA, 343 bp, Homo sapiens
ctgctcaaggtcacgcagctggtgactggttggggcagaccggacccaggtttcctgactcctggcccaagtctcttcctcctatcctgcgggatcactggggggctctcagggaacagcagcagtgccatagccaggctctctgctgcccagcgctggggtgaggctgccgttgtcagcgtggaccactaaccagcccgtcttctctctctgctcccacccctgccgcctcacctgcccttgttgtctctgtctctcactgtctcttctgctgtctctctactgtcttctggctctctctgtacccttcctggtgctgccgtgcccccaggaggagatgacc

SEQ ID NO: 3648 - DNA, 325 bp, Homo sapiens
tccgtggcaatgagactctgcactatgagaccttcgggaaggcagcccctgctccgcaggaggccacagccacattcaacagcacggctgacagagaggatggccaccgcaacttctcctgcctggctgtgctggacttgatgtctcgcggtggcaacatctttcacaaacactcagccccgaagatgttggagatctatgagcctgtgtcggacagccagatggtcatcatagtcacggtggtgtcggtgttgctgtccctgttcgtgacatctgtcctgctctgcttcatcttcggccagcacttgcgccagcagcggatggg

SEQ ID NO: 3649 - DNA, 132 bp, Homo sapiens
catgtctattctaacacatcagcttattcaaaagcaagaattttaaaaataagataaatgtaaagttgttttataaacgatcctgttaattaaaccacagacaccatatatccttctgcatcctttggccaa

SEQ ID NO: 3650 - DNA, 562 bp, Homo sapiens
  misc_feature (480)..(498): n includes a, c, g, or t, or contains no nucleotide
ctctccatgtaattcaggacaagctgcaacttcccccagcttaacacaatgcccatacctcatacgatatgcgccctcccgttccatccctggccccctcaaacgagacttctcacaaggctgattacagatggtcaaacctggcttccaaggacagaattgcctctcggaagccagctgtggatctgagtccagagttggccacttgtgtgggtcctcacaagcaaagagagcactaaacttgacattgggggtccaccactccaactttgctttctgaaggttttggtgtacattgagccccagaaggaaaggagagtatctgtgagtgggggcctcccttgaccccagtacgaagtctatgccctgaatccccagagtagcccttcctggtgcccaactggcctggggacaaacagcgtccactacatctaggactgccggctaagtggacacacttcttgacctcctaccaggaannnnnnnnnnnnnnnnnnntggggaaggggttgggtgtaaatatgagagggtggagggagaccagctggtagcaataaacatg

SEQ ID NO: 3651 - DNA, 242 bp, Homo sapiens
  misc_feature (95)..(96): n includes a, c, g, or t, or contains no nucleotide
acggctaagaacctccttcctctggttttgaaaagcagttcgggttgtccaattctgtaacattcatctccattttttaaaaaggtttctctganngccccacggcccgagccgcggtgagcgtcgtgttgcatgagcctgggccccgggcttcccgtgcgcctctgccgcaggtgcttctgggcacccatcctctgcgtttcatttgcagtcgactgtacagaaggcactcaccacaataa

SEQ ID NO: 3652 - DNA, 557 bp, Homo sapiens
  misc_feature (350)..(399): n includes a, c, g, or t, or contains no nucleotide
  misc_feature (401)..(403): n includes a, c, g, or t, or contains no nucleotide
  misc_feature (439)..(441): n includes a, c, g, or t, or contains no nucleotide
  misc_feature (443)..(445): n includes a, c, g, or t, or contains no nucleotide
  misc_feature (447)..(450): n includes a, c, g, or t, or contains no nucleotide
  misc_feature (460)..(460): n includes a, c, g, or t, or contains no nucleotide
  misc_feature (462)..(464): n includes a, c, g, or t, or contains no nucleotide
  misc_feature (467)..(479): n includes a, c, g, or t, or contains no nucleotide
  misc_feature (500)..(500): n includes a, c, g, or t, or contains no nucleotide
catttactgaaggagggacatggacaaaacaacattgaattcccagccccattggggagtgatctcttggacacagagcccccattcaaaatggggcagggcaagggtgggagtgtgcaaagccctgatctggagttacctgaggccatagctgccctattcacttctaagggccctgttttgagattgtttgttctaatttattttaagctaggtaaggctggggggagggtggggccgtggtcccctcagcctccatggggagggaagaagggggagctctttttttacgttgatttttttttttctactctgttttccctttttccttccgctccatttggggcccnnnnnnnnnnnnnnnnnnnnnnnnnnnnnnnnnnnnnnnnnnnnnnnnnntnnntctaacttgtaaataaagaaaatattattcaaaaannnannnannnnaaaaaaaaanannnaannnnnnnnnnnnnaacatcataagaattgtcttnataattttgagggaaatattactgcagtgagaaaaggcaatagctaacctataattg

SEQ ID NO: 3653 - DNA, 130 bp, Homo sapiens
aagcgttgttccatcaaagctgagcggcagcttttgaactcatttctcttagatgagctgcatgtgattttctctacatatcctgtgggaccacactcaggggtagttttagcccggaaattagagcatg

SEQ ID NO: 3654 - DNA, 553 bp, Homo sapiens
  misc_feature (26)..(27): n includes a, c, g, or t, or contains no nucleotide
  misc_feature (34)..(34): n includes a, c, g, or t, or contains no nucleotide
  misc_feature (36)..(37): n includes a, c, g, or t, or contains no nucleotide
  misc_feature (40)..(55): n includes a, c, g, or t, or contains no nucleotide
  misc_feature (137)..(258): n includes a, c, g, or t, or contains no nucleotide
  misc_feature (289)..(311): n includes a, c, g, or t, or contains no nucleotide
  misc_feature (390)..(392): n includes a, c, g, or t, or contains no nucleotide
  misc_feature (399)..(400): n includes a, c, g, or t, or contains no nucleotide
  misc_feature (402)..(406): n includes a, c, g, or t, or contains no nucleotide
  misc_feature (411)..(411): n includes a, c, g, or t, or contains no nucleotide
  misc_feature (413)..(413): n includes a, c, g, or t, or contains no nucleotide
  misc_feature (415)..(416): n includes a, c, g, or t, or contains no nucleotide
  misc_feature (418)..(419): n includes a, c, g, or t, or contains no nucleotide
  misc_feature (421)..(421): n includes a, c, g, or t, or contains no nucleotide
  misc_feature (423)..(435): n includes a, c, g, or t, or contains no nucleotide
tcgggagttcacacagggtggcaaannccccctnannagnnnnnnnnnnnnnnnnctgccccctagcctttgaccactgtcagccacctgtgtcccttgagccttcgggtcttcacttcccacttggacatcactgnnnnnnnnnnnnnnnnnnnnnnnnnnnnnnnnnnnnnnnnnnnnnnnnnnnnnnnnnnnnnnnnnnnnnnnnnnnnnnnnnnnnnnnnnnnnnnnnnnnnnnnnnnnnnnnnnnnnnnnnnngtgggttcagaagctctcccatcttcacagnnnnnnnnnnnnnnnnnnnnnnntgggagggaagcagcagagaaactgaagtgttagacactatgtgtcccaccaccccattacagagacatatgacaatgnnnaaaaaannannnnnaaaananannannanannnnnnnnnnnnngctgtctggaggcacgtgggtggtgtgcgggccctcactggccagcctctgggtggcccgcctatcccagtatgaacgtagccaactcaagccctctactgtgtctcagcccacgaag

SEQ ID NO: 3655 - DNA, 408 bp, Homo sapiens
  misc_feature (64)..(107): n includes a, c, g, or t, or contains no nucleotide
  misc_feature (354)..(354): n includes a, c, g, or t, or contains no nucleotide
ggcaccggaggcatggaaaagcacaggctgtactgccaggctgcgatgcgtgctggcccccgcnnnnnnnnnnnnnnnnnnnnnnnnnnnnnnnnnnnnnnnnnnnntccacaacccagtctgctccatagcactctggcccaccctgtctgcaggtgaaacaggagggctgtttgcctctgccccatccccccgactgtgttcaggagtcccaccttgcatttcagacctgggctggcagtctgttggacttctcttcaggaagaaaaagcatcagggggaaatggaatgcccctgccccaggaacatggcagaagcacaggttctgtacctcagatggactcctgctgggcnttcggggtctcagttggcttcccccagattctgattctacagctgcagaatgta

SEQ ID NO: 3656 - DNA, 168 bp, Homo sapiens
  misc_feature (117)..(118): n includes a, c, g, or t, or contains no nucleotide
ctgtgtctgaagtgtaagtgaacacagaagagtgacatgtttacaaacctcaagccagccttgctcctggctggggcctgttgaagatgcttgtattttacttttccattgtaattnntatcgccatcacagctgaacttgttgagatccccgtgttactgcctatca

SEQ ID NO: 3657 - DNA, 347 bp, Homo sapiens
  misc_feature (41)..(41): n includes a, c, g, or t, or contains no nucleotide
  misc_feature (64)..(64): n includes a, c, g, or t, or contains no nucleotide
  misc_feature (73)..(73): n includes a, c, g, or t, or contains no nucleotide
  misc_feature (75)..(75): n includes a, c, g, or t, or contains no nucleotide
  misc_feature (77)..(77): n includes a, c, g, or t, or contains no nucleotide
  misc_feature (79)..(79): n includes a, c, g, or t, or contains no nucleotide
  misc_feature (82)..(117): n includes a, c, g, or t, or contains no nucleotide
  misc_feature (119)..(121): n includes a, c, g, or t, or contains no nucleotide
  misc_feature (124)..(124): n includes a, c, g, or t, or contains no nucleotide
  misc_feature (173)..(173): n includes a, c, g, or t, or contains no nucleotide
agacgggcttcaagaactggaggccggagcagccggacgantggtacggccacgggctcggagnaggcgaggncngngnccnnnnnnnnnnnnnnnnnnnnnnnnnnnnnnnnnnnncnnnctnccagaggccctaccgctgggtctgcgagacagagctggacaaggccagnccaggagccacctctcctttaatttatttcttcaatgcctcgacctgccgcaggggtccgggattgggaatccgcccatctgggggcctcttctgctttctcgggaattttcatctaggattttaagggaaggggaaggatagggtgatgttccgaaggtgaggagcttgaaac

SEQ ID NO: 3658 - DNA, 296 bp, Homo sapiens
cactgatcaacagcatggaccagaatatgttcaggaacttttccttcatgaaccccgggatggagcggctgatatcctgaatcttgcccctccagagacaggaaagaatttgccttctccctgggaactggttcaagagacactgcttgggttcctttttcaacttggaaaaagaaagaaacactcaacaataaagactgagacccgttcgcccccatgtgactttatctgtagcagaaaccaagtctacttcactaatgacgatgccgtgtgtctcgtctcctgacatgtctcac

SEQ ID NO: 3659 - DNA, 398 bp, Homo sapiens
  misc_feature (77)..(77): n includes a, c, g, or t, or contains no nucleotide
  misc_feature (257)..(272): n includes a, c, g, or t, or contains no nucleotide
  misc_feature (350)..(368): n includes a, c, g, or t, or contains no nucleotide
ggcatataaccaaaggcggaaatattggggctaagtggactattgacctgaaaagtggttctggaaaagtgtaccanaggccctgcaaaaggtgctgctgatacaacaatcatactttcagatgaagatttcatggaggtggtcctgggcaagcttgaccctcagaaggcattctttagtggcaggctgaaggccagagggaacatcatgctgagccagaaacttcagatgattcttaaagactacgccaagctctnnnnnnnnnnnnnnnntattaataaaaatggaatcattaaatactctcttcacccaaatatgcttgattattctgcaaaagtgattagaactannnnnnnnnnnnnnnnnnntaacattttcagatatcagataactgcaga

SEQ ID NO: 3660 - DNA, 426 bp, Homo sapiens
  misc_feature (26)..(40): n includes a, c, g, or t, or contains no nucleotide
  misc_feature (125)..(139): n includes a, c, g, or t, or contains no nucleotide
  misc_feature (326)..(367): n includes a, c, g, or t, or contains no nucleotide
  misc_feature (378)..(399): n includes a, c, g, or t, or contains no nucleotide
tttcctatgttccaacagcaaggcannnnnnnnnnnnnnnatgtccaaggcccctgtactccaggagggtccaatcatgaggcacctaataatgcctttgggcagaaagtcctagaactcagaannnnnnnnnnnnnnnataggggtaggcctgcagctgaggggtgtcacgtggtgcaaaaggcctcccagctacatcctgggatggggtttgagatggattaatggcctttgcatggcacagaggatgtttgcccccaggtttatcccttaataaaagtgaaattaccagaaaaaattaaggtgcctttcagcccatctcttcnnnnnnnnnnnnnnnnnnnnnnnnnnnnnnnnnnnnnnnnnngtttatgagannnnnnnnnnnnnnnnnnnnnncacagtatttaaccttgcacatgcatg

SEQ ID NO: 3661 - DNA, 535 bp, Homo sapiens
atacatctactaatgaaattggctggtttccttgtaacagggtgaagccctatgtccatggccctcctcaggacctgtctgttcatctctggtacgcaggccccatggagcgggcaggggcagagagcatcctggccaaccgctcggacgggactttcttggtgcggcagagggtgaaggatgcagcagaatttgccatcagcattaaatataacgtcgaggtcaagcacacggttaaaatcatgacagcagaaggactgtaccggatcacagagaaaaaggctttccgggggcttacggagctggtggagttttaccagcagaactctctaaaggattgcttcaagtctctggacaccaccttgcagttccccttcaaggagcctgaaaagagaaccatcagcaggccagcagtgggaagcacaaagtattttggcacagccaaagcccgctatgacttctgcgcccgtgaccgttcagagctgtcgctcaaggagggtgacatcatcaagatccttaacaagaagggacagca

SEQ ID NO: 3662 - DNA, 584 bp, Homo sapiens
  misc_feature (26)..(26): n includes a, c, g, or t, or contains no nucleotide
  misc_feature (196)..(196): n includes a, c, g, or t, or contains no nucleotide
  misc_feature (229)..(247): n includes a, c, g, or t, or contains no nucleotide
  misc_feature (420)..(422): n includes a, c, g, or t, or contains no nucleotide
  misc_feature (481)..(481): n includes a, c, g, or t, or contains no nucleotide
  misc_feature (536)..(556): n includes a, c, g, or t, or contains no nucleotide
gagaggccaatcaggtcccagagctngagtgctaacaagcccagcatcccctggggctgtgatcatggtggatgaggaagcctcaacgtagattcctgaactcaaggtaccagcaagaatgccttctcccagtgtgctctccccaacatcctaggcacagctttcataacccagtttcttaggtgtaagaaactgnttttatctcatttattaagtctcagaacttaannnnnnnnnnnnnnnnnnnaatattctttttaattttattttagattaacagttttgtactttacatttttttatacaaccaaccagtttcttttctagccaatcatctctgaagagttgctgtttcttactgacaataaaaaatgttctcttggttcgaaaaaaaaaaaaaaaaaaaaaaaaaaaaaaaannntcctgggcccaggactgggcaggaagctccctggaaggaaggcaggcccaggggctgcnagtgatgtgaaggagcctggtgatgcccttgcccaatgccaaatttccccacctnnnnnnnnnnnnnnnnnnnnnagaatctccatgactcttgttccttagg

SEQ ID NO: 3663 - DNA, 236 bp, Homo sapiens
  misc_feature (34)..(49): n includes a, c, g, or t, or contains no nucleotide
  misc_feature (158)..(173): n includes a, c, g, or t, or contains no nucleotide
tgtcaaatctcaaggtgaagatctaaatgtgaannnnnnnnnnnnnnnntactgaagtttaaatctgtggcacaatcaatgtaagcatggggtttgtttctctaaattgatttgtaatctgaaattactgaacaactcctattcccatttttgctaannnnnnnnnnnnnnnntggtatatatccattccagcttaatgcctctaattttaatgccaacaaaattggttgtaatca

SEQ ID NO: 3664 - DNA, 434 bp, Homo sapiens
ccagatcctttctgtaggctaattcctcttgcccaacggcatatggagtgtccttattgctaaaaaggattccgtctccttcaaagaagttttatttttggtccagagtacttgttttcccgatgtgtccagccagctccgcagcagcttttcaaaatgcactatgcctgattgctgatcgtgttttaactttttcttttcctgtttttattttggtattaagtcgttgcctttatttgtaaagctgttataaatatatattatataaatatattaaaaaggaaaatgtttcagatgtttatttgtataattacttgattcacacagtgagaaaaaatgaatgtattcctgtttttgaagagaagaataattttttttttctctagggagaggtacagtgtttatattttggagccttcctgaaggtgtaaaat

SEQ ID NO: 3665 - DNA, 460 bp, Homo sapiens
  misc_feature (27)..(27): n includes a, c, g, or t, or contains no nucleotide
  misc_feature (41)..(41): n includes a, c, g, or t, or contains no nucleotide
  misc_feature (47)..(50): n includes a, c, g, or t, or contains no nucleotide
  misc_feature (77)..(77): n includes a, c, g, or t, or contains no nucleotide
  misc_feature (145)..(145): n includes a, c, g, or t, or contains no nucleotide
  misc_feature (151)..(151): n includes a, c, g, or t, or contains no nucleotide
  misc_feature (173)..(173): n includes a, c, g, or t, or contains no nucleotide
  misc_feature (179)..(180): n includes a, c, g, or t, or contains no nucleotide
  misc_feature (182)..(183): n includes a, c, g, or t, or contains no nucleotide
  misc_feature (185)..(189): n includes a, c, g, or t, or contains no nucleotide
  misc_feature (191)..(191): n includes a, c, g, or t, or contains no nucleotide
  misc_feature (193)..(195): n includes a, c, g, or t, or contains no nucleotide
  misc_feature (197)..(198): n includes a, c, g, or t, or contains no nucleotide
  misc_feature (201)..(201): n includes a, c, g, or t, or contains no nucleotide
  misc_feature (219)..(219): n includes a, c, g, or t, or contains no nucleotide
  misc_feature (288)..(288): n includes a, c, g, or t, or contains no nucleotide
  misc_feature (303)..(318): n includes a, c, g, or t, or contains no nucleotide
  misc_feature (320)..(321): n includes a, c, g, or t, or contains no nucleotide
tccagggacagctcccttatacctggncccacgtccttctncagccnnnnctcgacaacagtgaccaacagacaggncagctgggtttcccaggccatccctctgttgccatcagcttgattggcttccccgagggccagcaggnctgggngctccggagagcagcaggaagnactccnngnnannnnntncnnntnnccntctttcccctttgccccntgcttcatcccagctctgtgtgtggaggacaaagcttcttcctgcgtggctccaggaaaagatgtggcntcacgtaggtggcannnnnnnnnnnnnnnntnncaatcacagccccataggaacgtctggaattgcttgggagttggggagaactgtcaagaagagtgaagagagtgccaaagcggagatctgttcacctgggggccatggaggggggacccactaaagatcaagatcaaag

SEQ ID NO: 3666 - DNA, 566 bp, Homo sapiens
  misc_feature (111)..(129): n includes a, c, g, or t, or contains no nucleotide
  misc_feature (180)..(205): n includes a, c, g, or t, or contains no nucleotide
  misc_feature (209)..(209): n includes a, c, g, or t, or contains no nucleotide
  misc_feature (239)..(277): n includes a, c, g, or t, or contains no nucleotide
  misc_feature (289)..(307): n includes a, c, g, or t, or contains no nucleotide
  misc_feature (345)..(346): n includes a, c, g, or t, or contains no nucleotide
  misc_feature (354)..(354): n includes a, c, g, or t, or contains no nucleotide
cgcgcttggtttgcagatgtcaaagaatctgcagagggtgctactgaagatccagccttagccaatcaccacctcattgggtgaaagttccagggctcaatccaggaccannnnnnnnnnnnnnnnnnncactcttattggccaggcaggggctcccacagagctttgagtaacttcttnnnnnnnnnnnnnnnnnnnnnnnnnngttnggcattgtaaattcctcccttgcagcctcnnnnnnnnnnnnnnnnnnnnnnnnnnnnnnnnnnnnnnntgtggacaaagnnnnnnnnnnnnnnnnnnnacgagtgctattgttgcctgtggtggtctccctgtccnnaagcgggnaccgctttgcagagaccagaggcatatcgcggcttgagctgaaaatgcatttgttgcagcttaggttgaattatttttcgtttgctctttcttctacacgcgcctgatggatagtgaacctattcatcaaaaaagtgcactgctcttctgtctattgtaccgacttaacctcttccacccaagtccgcatctgtgtgtatcatcaataaagt

SEQ ID NO: 3667 - DNA, 201 bp, Homo sapiens
  misc_feature (46)..(61): n includes a, c, g, or t, or contains no nucleotide
  misc_feature (115)..(150): n includes a, c, g, or t, or contains no nucleotide
atttgcccaaatgtggtgttggtcacattcatgtaaagtatttggnnnnnnnnnnnnnnnnctcttggttgcctggtggctcagagcattgtttttccctaacccagcaggaccnnnnnnnnnnnnnnnnnnnnnnnnnnnnnnnnnnnncacccacatgtacctgtgacaggtggctgccttctgcaaggtcctatgact

SEQ ID NO: 3668 - DNA, 208 bp, Homo sapiens
  misc_feature (46)..(46): n includes a, c, g, or t, or contains no nucleotide
  misc_feature (63)..(63): n includes a, c, g, or t, or contains no nucleotide
  misc_feature (105)..(106): n includes a, c, g, or t, or contains no nucleotide
  misc_feature (115)..(115): n includes a, c, g, or t, or contains no nucleotide
  misc_feature (127)..(127): n includes a, c, g, or t, or contains no nucleotide
  misc_feature (132)..(133): n includes a, c, g, or t, or contains no nucleotide
  misc_feature (146)..(146): n includes a, c, g, or t, or contains no nucleotide
  misc_feature (154)..(155): n includes a, c, g, or t, or contains no nucleotide
  misc_feature (165)..(165): n includes a, c, g, or t, or contains no nucleotide
  misc_feature (177)..(177): n includes a, c, g, or t, or contains no nucleotide
  misc_feature (183)..(183): n includes a, c, g, or t, or contains no nucleotide
cctttgtgacttcaagagcctctggcatctctttctgcaaaggcanctgaatgtgtctgcgtncctgttagcataatgtgaggaggtggagagacagcccacccnngtgtccacngtgacccctgtncccannctgacctgtgttncctccccnntcatctttcntgttccagagangtgggnctggatgtctccatctctgtctcaa

SEQ ID NO: 3669 - DNA, 454 bp, Homo sapiens
  misc_feature (230)..(231): n includes a, c, g, or t, or contains no nucleotide
  misc_feature (329)..(329): n includes a, c, g, or t, or contains no nucleotide
gtatccacttgaggaaacattacattctacaaaaagtggcatttccattttctatttattctctttaattgtttttcaaagttcgtatgcagattctcccccaattttgtatggtggttggaattttgtttttatcttcaacagatatgctatccaaaatttttcagtgagaaacccctgggtgtgtttgtgtcatgccatatgaataaaaattgcacttctaagaaaannttttcaggtttgtgggtttcttttggaggggtggatttctagttccctctgtctgttgattatttgttaacttaaaaaaatccaacttgattattttnccttcttttaaaaataatatacatgtgtagtgggaaatgtcagcaaaagtgctgttatgtttctgtggggagagaagctccctctttgaattttgctgttggatatccagagttaaacaggaagc

SEQ ID NO: 3670 - DNA, 212 bp, Homo sapiens
  misc_feature (54)..(54): n includes a, c, g, or t, or contains no nucleotide
  misc_feature (59)..(59): n includes a, c, g, or t, or contains no nucleotide
  misc_feature (101)..(102): n includes a, c, g, or t, or contains no nucleotide
cctgggccatagtcattctgcctgccctgaaagtcccagatcaagcctgcctcnaatcnagtattcatatttatagccaggtaccttctcacctgtgagannccaaattgagctaggggggtcagccagccctcttctgacactaaaacacctcagctgcctccccagctctatcccaacctctcccaactataaaactaggtgctgcagcc

SEQ ID NO: 3671 - DNA, 374 bp, Homo sapiens
  misc_feature (76)..(76): n includes a, c, g, or t, or contains no nucleotide
  misc_feature (89)..(89): n includes a, c, g, or t, or contains no nucleotide
  misc_feature (111)..(111): n includes a, c, g, or t, or contains no nucleotide
gattcttaccgtctccacaaaggtcagagattgtaaatggtcaatactgactttttttttattcccttgactcaangacagctaacttncattttcagaactgttttaaancctttgtgtgctggtttataaaataatgtgtgtaatccttgttgctttcctgataccagactgtttcccgtggttggttagaatatattttgttttgatgtttatattggcatgtttagatgtcaggtttagtcttctgaagatgaagttcagccattttgtatcaaacagcacaagcagtgtctgtcactttccatgcataaagtttagtgagatgttatatgtaagatctgatttgctagttcttccttgtagagttataa

SEQ ID NO: 3672 - DNA, 578 bp, Homo sapiens
  misc_feature (68)..(110): n includes a, c, g, or t, or contains no nucleotide
  misc_feature (118)..(119): n includes a, c, g, or t, or contains no nucleotide
  misc_feature (122)..(123): n includes a, c, g, or t, or contains no nucleotide
  misc_feature (489)..(489): n includes a, c, g, or t, or contains no nucleotide
  misc_feature (516)..(534): n includes a, c, g, or t, or contains no nucleotide
tgaatctgacagaggcgaatctaaagggagagtccatctggaagctggagtatatcctgacccagacnnnnnnnnnnnnnnnnnnnnnnnnnnnnnnnnnnnnnnnnnnngctaaacnnttnncaatcctagacagtaagcagtttataaaatactacaattacttctttgtgagttatgacagcagtgtaacatgtgataagacatgtaaggcctttcagatttgtgcaattatgaatcttgataatatttcctatgcagattgcctcaaacagctttatataaagcacaattactagtatttcacagtttttgctaatagaaaatgctgattctgattctgagatcaatttgtgggaattttacataaatctttgttaattactgagtgggcaagtagacttcctgtctttgctttctttttttttttctttttgatgccttaatgtagatatctttatcattctgaattgtattatatatttaaantgctcattaatagaatgatggatgtannnnnnnnnnnnnnnnnnngtttatataattatatctaatttgtacccttgttgaaattgtca

SEQ ID NO: 3673 - DNA, 612 bp, Homo sapiens
cactgctggccacatacggggtcactgcctacctgtgcggccacgatcacaatctgcagtacctgcaagatgagaatggcgtgggctacgtgctgagtggggctgggaatttcatggacccctcaaagcggcaccagcgcaaggtccccaacggctatctgcgcttccactatgggactgaagactcactgggtggctttgcctatgtggagatcagctccaaagagatgactgtcacttacatcgaggcctcgggcaagtccctctttaagaccaggctgccgaggcgagccaggccctgaactcccatgactgcccagctctgaggcccgatctccactgttgggtgggtggcctgccgggaccctgctcacaggcaggcttttcctccaacctgtggcgctgcagcagggcaggaaggggaaacacagctgatgaactgtggtgccacatgaccttgtggcacagatgccagtatgtgaacacacatggacatgtgtccagcacagtgtatgctcttggtctggctcaccgtttgctgagttccggggtgcaatgggggagggagggagggaaagcttcctcctaaatcaagcatctttctgttactga

SEQ ID NO: 3674 - DNA, 347 bp, Homo sapiens
  misc_feature (278)..(278): n includes a, c, g, or t, or contains no nucleotide
  misc_feature (280)..(280): n includes a, c, g, or t, or contains no nucleotide
  misc_feature (283)..(283): n includes a, c, g, or t, or contains no nucleotide
  misc_feature (291)..(305): n includes a, c, g, or t, or contains no nucleotide
  misc_feature (311)..(311): n includes a, c, g, or t, or contains no nucleotide
tgttgcagtactgcaagcatctggccctgtctcagccattcagcttcacccagcaggacatgcccaaacttcgtcggcagatctacaaggagctgtgtcactgcaaactcactgtgtgagcctcgtaccccagaccccaagcccataaatgggaagggagacatgggagtcccttcccaagaaactccagttcctttcctctcttgcctcttcccactcacttccctttggtttttcatatttaaatgtttcaatttctgtatttttttttctttgananaanacttgttnnnnnnnnnnnnnnngggggnggctacagaaaagcccctttcttcctctgtttgcag

SEQ ID NO: 3675 - DNA, 194 bp, Homo sapiens
  misc_feature (44)..(74): n includes a, c, g, or t, or contains no nucleotide
  misc_feature (79)..(81): n includes a, c, g, or t, or contains no nucleotide
gactcaattgcagtgatcctgttcagtggggtgcatttttacannnnnnnnnnnnnnnnnnnnnnnnnnnnnnnaaaannnggacaagcgaagggttgttatgttggctttgatctagcacatgcagttggaaatgttgaactctacttacatgactggggagttgattttgcctgctggtgttcctacaagta

SEQ ID NO: 3676 - DNA, 547 bp, Homo sapiens
acctgctgcggatgttctttgacgcactgtatgacgaggacgtggtgaaggaggatgccttctacagttgggagagtagcaaggaccccgctgagcagcagggcaagggtgtggcccttaaatctgtcacagccttcttcaagtggctccgtgaagtcagaggaggagtctgaccacaactgagggctggtggggccggggacctggagccccatggacacacagatggctccggctagccgcctggactgcaggggggcggcagcagcggcggtggcagtgggtgcctgtagtgtgatgtgtctgaactaataaagtggctgaagaggcaggatggcttggggctgcctgggcccccctccaggatgccgccaggtgtccctctcctcccctggggcacagagatatattatatataaagtcttgaaaattttgaaatttggtgtgtcttggggtggggaggggcaccaacgcctgcccctggggtccttttttttattttctgaaaatcactctcggactgccgtcctcgctgctgggcatatgc

SEQ ID NO: 3677 - DNA, 222 bp, Homo sapiens
  misc_feature (162)..(162): n includes a, c, g, or t, or contains no nucleotide
  misc_feature (169)..(189): n includes a, c, g, or t, or contains no nucleotide
cccacacaggcagaagtgctccgtgtcctggggaagccaagacaggaagagctcaataccaagatgatggactttgaaactttcctgcctatgctccagcacatttccaagaacaaggacacaggcacctatgaggacttcgtggaggggctgcgggtcttncgacaannnnnnnnnnnnnnnnnnnnnatgggtgctgagcttcgccacgtgctggccacg

SEQ ID NO: 3678 - DNA, 514 bp, Homo sapiens
tttcctggcatctactccatgagtctctgtttgggtcagttgctgatgatcagaaacttatgatttgggatactcgttcaaacaatacttccaaaccaagccactcagttgatgctcacactgctgaagtgaactgcctttctttcaatccttatagtgagttcattcttgccacaggatcagctgacaagactgttgccttgtgggatctgagaaatctgaaacttaagttgcattcctttgagtcacataaggatgaaatattccaggttcagtggtcacctcacaatgagactattttagcttccagtggtactgatcgcagactgaatgtctgggatttaagtaaaattggagaggaacaatccccagaagatgcagaagacgggccaccagagttgttgtttattcatggtggtcatactgccaagatatctgatttctcctggaatcccaatgaaccttgggtgatttgttctgtatcagaagacaatatcatgcaagtgtggcaaat

SEQ ID NO: 3679 - DNA, 421 bp, Homo sapiens
gcaattcttcttctcaagcactgacactcattaccgtctgtgattgccatttcttcccaaggccagtctgaacctgaggttgctttatcctaaaagttttaacctcaggttccaaattcagtaaattttggaaacagtacagctatttctcatcaattctctatcatgttgaagtcaaatttggattttccaccaaattctgaatttgtagacatacttgtacgctcacttgccccagatgcctcctctgtcctcattcttctctcccacacaagcagtctttttctacagccagtaaggcagctctgtcgtggtagcagatggtcccacttattctagggtcttactctttgtatgatgaaaagaatgtgttatgaatcggtgctgtcagccctgctgtcagaccttcttccacagcaaa

SEQ ID NO: 3680 - DNA, 569 bp, Homo sapiens
  misc_feature (32)..(81): n includes a, c, g, or t, or contains no nucleotide
  misc_feature (93)..(93): n includes a, c, g, or t, or contains no nucleotide
  misc_feature (515)..(516): n includes a, c, g, or t, or contains no nucleotide
  misc_feature (518)..(520): n includes a, c, g, or t, or contains no nucleotide
  misc_feature (537)..(538): n includes a, c, g, or t, or contains no nucleotide
gaaatacctgaaacatatattggcatttatcnnnnnnnnnnnnnnnnnnnnnnnnnnnnnnnnnnnnnnnnnnnnnnnnnnaggctgcggccnagcagagcccaggccagggctctgttcttgccacacctgcttgatcctcagatgtggagggaggtaggcactgcctcagtcttcatccaaacacctttccctttgccctgagacctcagaatcttccctttaacccaagaccctgcctcttccactccacccttctccagggacccttagatcacatcactccacccctgccaggccccaggttaggaatagtggtgggaggaaggggaaagggctgggcctcaccgctcccagcaactgaaaggacaacactatctggagccacccactgaaagggctgcaggcatgggctgtacccaagctgatttctcatctggtcaataaagctgtttagaccagaaaaaaaaaaaaaaaaaaaaaaaaaaaaaaaaaaaaaaaaaaaaaaaaaaaannannntatctctgagaatactnnttgtaggactggccagtagtgcttcgggact

SEQ ID NO: 3681 - DNA, 516 bp, Homo sapiens
  misc_feature (70)..(71): n includes a, c, g, or t, or contains no nucleotide
  misc_feature (304)..(325): n includes a, c, g, or t, or contains no nucleotide
  misc_feature (343)..(358): n includes a, c, g, or t, or contains no nucleotide
cttctgaaacatgtgagagaaacccataaagaggaaatactatgtgaagtatgccggaaaacatttaaanngcaaagattaccttaagcaacacatgaaaactcatgccccagaaagggatgtatgtcgctgtccaagagaaggctgtggaagaacctatacaactgtgtttaatctccaaagccatatcctctccttccatgaggaaagccgcccttttgtgtgtgaacatgctggctgtggcaaaacatttgcaatgaaacaaagtctcactaggcatgctgttgtacatgatcctgacaannnnnnnnnnnnnnnnnnnnnnaaaaaatctcgtgaaaannnnnnnnnnnnnnnncatctcagtggatatatccctcccaaaaggaaacaagggcaaggcttatctttgtgtcaaaacggagagtcacccaactgtgtggaagacaagatgctctcgacagttgcagtacttacccttggctaagaactgcactgctttgtttaaaggactgc

SEQ ID NO: 3682 - DNA, 550 bp, Homo sapiens
  misc_feature (128)..(128): n includes a, c, g, or t, or contains no nucleotide
  misc_feature (193)..(193): n includes a, c, g, or t, or contains no nucleotide
  misc_feature (203)..(203): n includes a, c, g, or t, or contains no nucleotide
  misc_feature (228)..(228): n includes a, c, g, or t, or contains no nucleotide
  misc_feature (243)..(244): n includes a, c, g, or t, or contains no nucleotide
  misc_feature (248)..(248): n includes a, c, g, or t, or contains no nucleotide
  misc_feature (252)..(252): n includes a, c, g, or t, or contains no nucleotide
  misc_feature (258)..(258): n includes a, c, g, or t, or contains no nucleotide
  misc_feature (260)..(260): n includes a, c, g, or t, or contains no nucleotide
  misc_feature (265)..(265): n includes a, c, g, or t, or contains no nucleotide
  misc_feature (272)..(274): n includes a, c, g, or t, or contains no nucleotide
  misc_feature (497)..(511): n includes a, c, g, or t, or contains no nucleotide
accttctgtcgtcagcaacagtccttcaacagtacagagcattgaaaacacaagcaaaagtcatggtgaaattttcaaaaaggatgtctgtgcggaaaacaacaacaacatggctatgctaatttgcnttaattataattgcagtgctttttcttatctgtacctttctatttctatcaactgtggttttggncaaacaaagnctcttctctcagacgatcaaaacangtaggcaagcgtcanntagnagcnaatggngnttttnctggcannnggtctatggcccgctgaatcagacacttggaaaagaacaaaacagctcacaggacccaacctagtgatgcaatctactggagtgctcacagctacaagggaaagaaaagatgaagaaggaactgaaaaacttactaacaaacagataggttagtgaagaaaaatgcaaagtagcaatgagaaggcttatggagtaaaaatgaagtcagttggtatttaatccnnnnnnnnnnnnnnnattatctaaaatttgacatggtagaccttgcaatttaga

SEQ ID NO: 3683 - DNA, 266 bp, Homo sapiens
  misc_feature (79)..(79): n includes a, c, g, or t, or contains no nucleotide
  misc_feature (202)..(202): n includes a, c, g, or t, or contains no nucleotide
  misc_feature (228)..(228): n includes a, c, g, or t, or contains no nucleotide
  misc_feature (240)..(240): n includes a, c, g, or t, or contains no nucleotide
aacatcccttgaggtgacccagccaacctgtggccagaaggagggttgtaccttgaaaagacactgaaagcattttggngtgtgaagtaagggtgggcagaggaggtagaaaatcaattcaattgtcgcatcattcatggttctttaatattgatgctcagtgcattggccttagaatatcccagcctctcttctggtttgntgagtgctgtgtaagtaagcatggtngaattgtttggngacatatatagtgatccttggtcact

SEQ ID NO: 3684 - DNA, 272 bp, Homo sapiens
  misc_feature (58)..(72): n includes a, c, g, or t, or contains no nucleotide
  misc_feature (154)..(168): n includes a, c, g, or t, or contains no nucleotide
accaaggcgcagaagaaggacagcaagaagcgcaagcgcagccgcaaggagagctacnnnnnnnnnnnnnnnaaggtgctgaaacaggtccaccccgacaccggcatctcctctaaagccatggggatcatgaattcctttgtcaacgacatcnnnnnnnnnnnnnnnggcgaggcttcccgcctggcgcattacaacaagcgctcgaccatcacctccagggagatccagacggccgtgcgcctgctgcttcccggggagctggccaagca

SEQ ID NO: 3685 - DNA, 286 bp, Homo sapiens
gccgaggtctggtacgactggagtaccggcagcgctgggatgaagcctttcgcaagttcctgaagggcctggcttcccgaaagccccttgtgctgtgtggagacctcaatgtggcacatgaagaaattgaccttcgcaaccccaaggggaacaaaaagaatgctggcttcacgccacaagagcgccaaggcttcggggaattactgcaggctgtgccactggctgacagctttaggcacctctaccccaacacaccctatgcctacaccttttggacttatatgat

SEQ ID NO: 3686 - DNA, 463 bp, Homo sapiens
  misc_feature (77)..(79): n includes a, c, g, or t, or contains no nucleotide
  misc_feature (81)..(81): n includes a, c, g, or t, or contains no nucleotide
  misc_feature (98)..(98): n includes a, c, g, or t, or contains no nucleotide
  misc_feature (114)..(124): n includes a, c, g, or t, or contains no nucleotide
  misc_feature (179)..(179): n includes a, c, g, or t, or contains no nucleotide
  misc_feature (223)..(259): n includes a, c, g, or t, or contains no nucleotide
  misc_feature (312)..(327): n includes a, c, g, or t, or contains no nucleotide
  misc_feature (341)..(341): n includes a, c, g, or t, or contains no nucleotide
  misc_feature (343)..(343): n includes a, c, g, or t, or contains no nucleotide
  misc_feature (364)..(364): n includes a, c, g, or t, or contains no nucleotide
  misc_feature (386)..(386): n includes a, c, g, or t, or contains no nucleotide
gagggtttccgctggctctcccagtatattgactgatgtttggacggtgaaaataaaagagttttacttctctggannnancctaaaaaaaaaaaaanaaaaaaaaaaaaaaannnnnnnnnnnttcacagcttcctcatgaactttcctaatagaacaaggaaagctctccaaccatntctggcgttgagaagccaagagtctctgtcaactctctcattgnnnnnnnnnnnnnnnnnnnnnnnnnnnnnnnnnnnnnaggtaatgctgccccacgtgctggtgcaggtcagtatcctgggacttggaagnnnnnnnnnnnnnnnnggtaaagctgtatncnatcatggggcacctgaaaagnaaaacacgtctcaccactgtgnttgattcaaaagaaagtgattctattttttaaagaaagcgttgttaatgtaattggtatccctcctaactttttgag

SEQ ID NO: 3687 - DNA, 434 bp, Homo sapiens
  misc_feature (39)..(40): n includes a, c, g, or t, or contains no nucleotide
  misc_feature (55)..(55): n includes a, c, g, or t, or contains no nucleotide
  misc_feature (60)..(60): n includes a, c, g, or t, or contains no nucleotide
  misc_feature (72)..(73): n includes a, c, g, or t, or contains no nucleotide
  misc_feature (80)..(81): n includes a, c, g, or t, or contains no nucleotide
  misc_feature (94)..(94): n includes a, c, g, or t, or contains no nucleotide
  misc_feature (108)..(109): n includes a, c, g, or t, or contains no nucleotide
  misc_feature (111)..(111): n includes a, c, g, or t, or contains no nucleotide
agagaccctgagttcccactcagacccactcagccaaanntctcatggaagaccnaggangggcagcactgnntttttgnnttttttgtttttngttttttttttttnngnacactgtccaaaggttttccatcctgtcctggaatcagagttggaagctgaggagcttcagcctcttttatggtttaatggccacctgttctctcctgtgaaaggctttgcaaagtcacattaagtttgcatgacctgttatccctggggccctatttcatagaggctggccctattagtgatttccaaaaacaatatggaagtgccttttgatgtcttacaataagaataacatggtccattcacctttatgttatagatatgtctttgtgtaaatcatttgttttgagttttcaaagaatagcccattgttcattcttgtg

SEQ ID NO: 3688 - DNA, 580 bp, Homo sapiens
  misc_feature (72)..(72): n includes a, c, g, or t, or contains no nucleotide
  misc_feature (82)..(120): n includes a, c, g, or t, or contains no nucleotide
  misc_feature (147)..(147): n includes a, c, g, or t, or contains no nucleotide
  misc_feature (530)..(530): n includes a, c, g, or t, or contains no nucleotide
aagtagtggttgctttagcaaacctctgctgccattttgcaggaatcaaccaggaacctttagcagaattgncaatatggtnnnnnnnnnnnnnnnnnnnnnnnnnnnnnnnnnnnnnnnagtttatctcaccctctaatttttctnactagcataaattttaaattcctgatttgatttgtcaataagatcttggcttatatatgctgatttataggtagtgtccaaattatatagtataacatatttttctagtttcaaaatttagtaatgtcctatttatgatatatcatttctgtgtgtttgctatgtagtattacccaattaaaaatctctaaaaagaattaaagcattctaagaaaaaggtaaatttactattgcatggtacagaaattttttctttcttaaatacaatgttactataagctcactaaaatgaaactctatatgacaaaataaaattagaaaaaaatttgccctggagttgtgaattatatacaacttttaaagaatttaccccaattactcanatttcccaggaaattacaaagccaaagaatattcaacttcctccactggg

SEQ ID NO: 3689 - DNA, 444 bp, Homo sapiens
  misc_feature (62)..(62): n includes a, c, g, or t, or contains no nucleotide
  misc_feature (82)..(96): n includes a, c, g, or t, or contains no nucleotide
  misc_feature (171)..(173): n includes a, c, g, or t, or contains no nucleotide
  misc_feature (175)..(178): n includes a, c, g, or t, or contains no nucleotide
  misc_feature (182)..(189): n includes a, c, g, or t, or contains no nucleotide
  misc_feature (191)..(196): n includes a, c, g, or t, or contains no nucleotide
  misc_feature (198)..(199): n includes a, c, g, or t, or contains no nucleotide
  misc_feature (315)..(358): n includes a, c, g, or t, or contains no nucleotide
  misc_feature (384)..(384): n includes a, c, g, or t, or contains no nucleotide
aggcctgcgttcagttggtgcttccagacaccaagggcccttgtgaatcccatcctgaaaangaaggtgttacctactaagnnnnnnnnnnnnnnngccgcccagctacctaattcctcagtaacatcgatctaaaatctccatggaagcaataaattccctttaagagannnannnnaaannnnnnnnannnnnnanncggggctgactgaacctatggctaagaattgggacactctcatgtttcaagccaatttcatctcatttcccagatcatatttcatatccagtaacacagaagcaaccaagtacaannnnnnnnnnnnnnnnnnnnnnnnnnnnnnnnnnnnnnnnnnnnctttcttctttgtgttctcacccttngcactgccgcccatccctcaattcaggcaacaatgaagttaatggatactctctgccctt

SEQ ID NO: 3690 - DNA, 613 bp, Homo sapiens
caggatggactcttctcggctcaggctctgctggtggaaagcgattcactgtataaactttttttatgaaaaaaatggcatcaaccaccatggatttttacaagatccatttgcctttctgggagcagaaacagccattgcggcccaggaggggaactgagtcacgctggggctctctgagactctttagagcagctttgggatcccaccctgggacccccacgattggccacctgtagccatctgcacacacctccgagacagtccagtgtcacctctctcagagcatctggctgtttagcagaactcattctatccccaatcagctccttttccgttctgttctgctgggagttctagaaccacttcctgctacaggaggggtctcatgtcctgctggcttccagcttcaggcaccagcatccaccttgctctgccagtggatccctgcggtcaggctgggcagccccagagagaggatgtggaaagcactttttggctgacttcatctggggttggcaacaggacagagttcacaggaggccagtgggcgggccatgagggacagggtcttttttcatttcttcctcagctggttactcagggttcatct

SEQ ID NO: 3691 - DNA, 470 bp, Homo sapiens
  misc_feature (211)..(211): n includes a, c, g, or t, or contains no nucleotide
  misc_feature (294)..(313): n includes a, c, g, or t, or contains no nucleotide
  misc_feature (341)..(407): n includes a, c, g, or t, or contains no nucleotide
tgtcttgaggcttccaggttttgtttttgtttttgccaaagtagaaaaggcaggtggtgggcggctggcagggagtgcgggtccccgcccctcttcagtcctgccctcccctcctcagtcctgcccaccccgtgcagcccatgctgaggctgcagtggtgtcgtgggtgttacgtgcaggaacgtggagaccctgacgtgggctcactgcntttggttttcttttcagaacttgggagcccccagggaggggctagtgttggtaggtcctagacgtggttccctccagcctccnnnnnnnnnnnnnnnnnnnngagagaacgtccttctgtccatcgtggnnnnnnnnnnnnnnnnnnnnnnnnnnnnnnnnnnnnnnnnnnnnnnnnnnnnnnnnnnnnnnnnnnntccccttgggcactgaggagaggggcccattcacctttctcctagaatgctgttgtaaataaa

SEQ ID NO: 3692 - DNA, 547 bp, Homo sapiens
cacttaagcgaaagggggttctgctccgcgacctcgtcctggatctgtccctccatctgctgtgctcctccgggtacactgtgcgaccaaagccgtagtagcgctgtccccgcgcgatcgcgtacgcccttccgcagtacgaccttccccgagagcgcgacctgctacgggaccgggaccggtaccgcgaaggagaccggtagtatctcctggtgaacccgtagcgcctctctcggtaacggcggctgcgggatcgcgaccggctccgcgagtatgaccgcgagtagcgcctgtacttccgctggtggcgccttcgggaacgggacctggacttgctcctccgactcctggacgaaaaccggctcgagacgcgggaatgggaccgagagcttctggaaaaagagcggctcctagaccgcgacgacagccggctggacccgcccgaccgcgaggtcgagggcgaatccttctcctgcggcgagcccggccacatgtcgttcgcgtagttggacatcttcacctgcggctttagcctgcgctttctccg

SEQ ID NO: 3693 - DNA, 603 bp, Homo sapiens
aggtgattcagaacctggagcgaggctaccgcatggtgcgccctgacaactgtccagaggagctgtaccaactcatgaggctgtgctggaaggagcgcccagaggaccggcccacctttgactacctgcgcagtgtgctggaggacttcttcacggccacagagggccagtaccagcctcagccttgagaggaggccttgagaggccctggggttctccccctttctctccagcctgacttggggagatggagttcttgtgccatagtcacatggcctatgcacatatggactctgcacatgaatcccacccacatgtgacacatatgcaccttgtgtctgtacacgtgtcctgtagttgcgtggactctgcacatgtcttgtgcatgtgtagcctgtgcatgtatgtcttggacactgtacaaggtacccctttctggctctcccatttcctgagaccaccagagagaggggagaagcctgggattgacagaagcttctgcccacctacttttctttcctcagatcatccagaagttcctgaagggccaggactttatctaatacctctgtgtgctcctccttggtgcctggcctggcacac

SEQ ID NO: 3694 - DNA, 289 bp, Homo sapiens
tacctattagggatgagatacagacaaggatagctatctgggacattattggcagtgggccctggaggccagtccctagccccccttgccccttatttcttccctgcttccctcgaacccagagatttttgagggatgaacgggtagacaaggactgagattgcctctgacttcctcctcccctgggttctgacttcttcctccccttgcttccagggaagatgaagagagagagatttggaaggggctctggctccctaacacctgaatcccagatgatgggaagtat

SEQ ID NO: 3695 - DNA, 484 bp, Homo sapiens
  misc_feature (54)..(69): n includes a, c, g, or t, or contains no nucleotide
  misc_feature (73)..(125): n includes a, c, g, or t, or contains no nucleotide
  misc_feature (143)..(145): n includes a, c, g, or t, or contains no nucleotide
  misc_feature (232)..(232): n includes a, c, g, or t, or contains no nucleotide
  misc_feature (325)..(325): n includes a, c, g, or t, or contains no nucleotide
  misc_feature (353)..(354): n includes a, c, g, or t, or contains no nucleotide
  misc_feature (358)..(361): n includes a, c, g, or t, or contains no nucleotide
  misc_feature (364)..(364): n includes a, c, g, or t, or contains no nucleotide
tgcagagtgctgcatggaatctggccccaggttctgtgctgaccaccctttccnnnnnnnnnnnnnnnncaannnnnnnnnnnnnnnnnnnnnnnnnnnnnnnnnnnnnnnnnnnnnnnnnnnnnacttaccgtgcactcggnnntttccctcttcctgtgtccccagatccccactacagctccaagaggatgggcctagaaagccaagtgcaaagatgagggcagattcnttacctgtctgccctcatgatttgccagcatgaattcatgatgctccacactcgcttatgctacttaatcagaatcttgagaaaatagaccanaatgattccctgttgtattaaaattgcnntccnnnnaantcccataggatggcaagcaaagttcttctagaattccacatgcaattcactctggcgaccctgtgctttcctgacactgcgaatacattccttaacccgctgcctcagtggtaataaatg

SEQ ID NO: 3696 - DNA, 156 bp, Homo sapiens
ttaaaactgtttcaccagtacagtgaaagttgtttcaacattttaaacaaacagtggttatagactctttctttaaccattgtatattttcttccattcttgtcattggtcaataggggagggtagattagctgctccagaattcaataaagtgta

SEQ ID NO: 3697 - DNA, 205 bp, Homo sapiens
  misc_feature (35)..(49): n includes a, c, g, or t, or contains no nucleotide
taaagttccggagaagcaaaaactgttccaggagnnnnnnnnnnnnnnnctgtatctaaagggtggggtagctgatgccctcctgtatagagccaccatgattcttacagttggtggaacagcatatgccatatatgagctggctgtggcttcatttcccaagaagcaggagtgacttcagtcatcccagcaatcgcttggttca

SEQ ID NO: 3698 - DNA, 263 bp, Homo sapiens
  misc_feature (29)..(29): n includes a, c, g, or t, or contains no nucleotide
  misc_feature (227)..(227): n includes a, c, g, or t, or contains no nucleotide
acattccatgtttctgctgttgctgctgnctgctgctatttttgttattattattttctatgtccgttgttgtaagaagaaaacatcagctgcagagggtccagagctcgtgagcctgcaggtcctggatcaacacccagttgggacgagtgaccacagggatgccacacagctcggatttcagcctctgatgtcagctcttgggtccactggctccactgagggcncctagactctacagccaggcggctggaattgaattc

SEQ ID NO: 3699 - DNA, 385 bp, Homo sapiens
  misc_feature (76)..(76): n includes a, c, g, or t, or contains no nucleotide
  misc_feature (100)..(100): n includes a, c, g, or t, or contains no nucleotide
tacaaggttgccacacctagttctgcccagctttatgtcttttattccagtattccaccaaagtttgttttcctgncattccagttctcaagtcttaagnataaagattgtacttgacagtttagtatatccataaaactatttgaggtggttaaggttcttgggttcattttccttaatactttgctgaatattgtagattgtaggcaatgaaaaagtctactaaattaggaaaaccttgaataattaggtatcctaggtaagagcccctaaacatcaagcaatctgtgagtctgtaaagaaataaatattttttggattattcttatctaattccacccctgttggaagatgatttctttgttctttgcaactatggaagctg

SEQ ID NO: 3700 - DNA, 446 bp, Homo sapiens
  misc_feature (123)..(124): n includes a, c, g, or t, or contains no nucleotide
  misc_feature (160)..(175): n includes a, c, g, or t, or contains no nucleotide
  misc_feature (201)..(201): n includes a, c, g, or t, or contains no nucleotide
  misc_feature (229)..(229): n includes a, c, g, or t, or contains no nucleotide
  misc_feature (231)..(231): n includes a, c, g, or t, or contains no nucleotide
  misc_feature (341)..(342): n includes a, c, g, or t, or contains no nucleotide
ctagccactttggtcccgtgcagcttctgtcctgcgtcgaagctttgaaggccgaaggcagtgcaagagactctggcctccacagttcgacctgcggctgctgtgtgccttcgcggtggaagnnccgaggggcgcgatcttgaccctaagaccggcggcnnnnnnnnnnnnnnnntctggtggccgatcggggcactgcangggccgagccattttggggggccccccncncttgctctgcaggcaccttagtggcttttttcctcctgtgtacagggaagagaggggtacatttccctgtgctgacggaagccaacttggctttcccggactgcaagcanngctctgccccagaggcctctctctccgtcgtgggagagagacgtgtacatagtgtaggtcagcgtgcttagcctcctgacctgaggctcctgtgctactttgcc

SEQ ID NO: 3701 - DNA, 253 bp, Homo sapiens
  misc_feature (30)..(30): n includes a, c, g, or t, or contains no nucleotide
  misc_feature (39)..(39): n includes a, c, g, or t, or contains no nucleotide
  misc_feature (41)..(42): n includes a, c, g, or t, or contains no nucleotide
  misc_feature (88)..(128): n includes a, c, g, or t, or contains no nucleotide
cttagccagggctcagagatgaagcagtgnaagagacangnnattgggagggaaagggagaatggtgtaccctttatttcttctgaannnnnnnnnnnnnnnnnnnnnnnnnnnnnnnnnnnnnnnnntttccccccttgaggttcccttgtgagccttgaatcaaccaatctagtctgcagtagtgtggactagaacaacccaaatagcatctagaaagccatgagtttgaaagggcccatcacaggcactt

SEQ ID NO: 3702 - DNA, 132 bp, Homo sapiens
tgttggcccagcgactctgcggacgatggctggtctccatggtccgagtggacctcctgttctacgagctgtggcaatggaattcagcagcgcgggcgctcctgcgatagcctcaacaaccgatgtgagggc

SEQ ID NO: 3703 - DNA, 426 bp, Homo sapiens
  misc_feature (104)..(104): n includes a, c, g, or t, or contains no nucleotide
  misc_feature (148)..(148): n includes a, c, g, or t, or contains no nucleotide
cagaaatttccagagcattatgtaggtagaaaaaaatgcaagcaagctgttaaagatcttggatcccattatatagtatgtatagctgaaatctgtaattcaancactttttctcttttatcctctaaccaaaaaattgtttaatttngcatcccaaatgtttttaatctttgtatattttttaaaaatccttttctcctcatcattgccttttttgtggttgtaaatagacttacttgcactttgaagatgagttactccttgtcatcttacaaatatgtgatatggtaattttcataacagatgtcagttttgaaccaagaattggtgatttgtttataagaaaaaaactggcttcatttctgtgaaattgctctttgaaaatttctttttacacgtgtaagccaactgagataccgtgatggt

SEQ ID NO: 3704 - DNA, 498 bp, Homo sapiens
  misc_feature (92)..(92): n includes a, c, g, or t, or contains no nucleotide
  misc_feature (94)..(94): n includes a, c, g, or t, or contains no nucleotide
  misc_feature (135)..(135): n includes a, c, g, or t, or contains no nucleotide
  misc_feature (140)..(157): n includes a, c, g, or t, or contains no nucleotide
  misc_feature (159)..(159): n includes a, c, g, or t, or contains no nucleotide
  misc_feature (177)..(178): n includes a, c, g, or t, or contains no nucleotide
  misc_feature (181)..(181): n includes a, c, g, or t, or contains no nucleotide
  misc_feature (193)..(193): n includes a, c, g, or t, or contains no nucleotide
  misc_feature (206)..(206): n includes a, c, g, or t, or contains no nucleotide
  misc_feature (220)..(220): n includes a, c, g, or t, or contains no nucleotide
  misc_feature (228)..(228): n includes a, c, g, or t, or contains no nucleotide
  misc_feature (261)..(261): n includes a, c, g, or t, or contains no nucleotide
  misc_feature (299)..(355): n includes a, c, g, or t, or contains no nucleotide
agtcagtgactgaccgggcagcccgcaccctgctgtggactgagctcttccgaggcctgggcatgaccctgagctacctgttccgggaaccngnccaccatcaactacccgttcgagaagggcccgctgagcccntcgcnnnnnnnnnnnnnnnnnngngctgcgccggtacccatnnggngaggagcgttgnattgcctgcaagntctgcgaggccatntgccccgnccaggccatcaccatcgaggctgagccaagagntgatggcagccgccggaccacccgctatgacatcgacnnnnnnnnnnnnnnnnnnnnnnnnnnnnnnnnnnnnnnnnnnnnnnnnnnnnnnnnngtcgagggccccaactttgagttctccacggagacccatgaggagctgctgtacaacaaggagaagttgctcaacaacggggacaagtgggaggccgagatcgccgccaacatccaggctgactacttgtatcggtgacgccc

SEQ ID NO: 3705 - DNA, 258 bp, Homo sapiens
  misc_feature (167)..(167): n includes a, c, g, or t, or contains no nucleotide
cagacagaacgtgcaggtgtttgaattccagttgacttcagaggagatgaaagccatagatggcctaaacagaaatgtgcgatatttgacccttgatatttttgctggcccccctaattatccattttctgatgaatattaacatggagggcattgcatgaggtctnccagaaggccctgcgtgtggatggtgacacagaggatggctctatgctggtgactggacacatcgcctctggttaaatctctcctgcttgg

SEQ ID NO: 3706 - DNA, 477 bp, Homo sapiens
  misc_feature (78)..(78): n includes a, c, g, or t, or contains no nucleotide
  misc_feature (108)..(108): n includes a, c, g, or t, or contains no nucleotide
  misc_feature (172)..(172): n includes a, c, g, or t, or contains no nucleotide
  misc_feature (379)..(379): n includes a, c, g, or t, or contains no nucleotide
gaagaaatgcccagcaaagacccttccccagagccccctagccgcaggcaccagagggtccaagacaagactggaagngcacctcgggttcgggaggagctgtgagtngctgagccagctccttgaggatgtggccacttgacttgtggaaggccatcttgatgccaggacncacaggaagcccctgtgtgacatcaggagcagaacagcaagctctctgtccctgcacccccaccatcttggggacctacaagggcctggactcagaggacagtgcacaggctagcctggagctcaccaggcctggggagctgggacggggccccgctgccggacctgcagccctggacagatggggaacactgtgcctccctgaacngaaatggcaggggaggaggctgatgctttaaatgaagaggatggtggggttgggaggtataaccctgctcctctctcccagtctgtgcaataaaggtc

SEQ ID NO: 3707 - DNA, 522 bp, Homo sapiens
  misc_feature (389)..(403): n includes a, c, g, or t, or contains no nucleotide
  misc_feature (455)..(470): n includes a, c, g, or t, or contains no nucleotide
tctgatggccaatgtggagtggacaaagtgtccggaactcacatcggtgatcgtcccctcgtcttaagacccagcccgctctgtgtgagcctctggggctccctcgctcagtgagcacagttccccgggggttcatgccagagctccggctgaagcaagaagtcctccagctgcgtcgtttgccgcctgtggacgagtgcgccccagtttctgccctggcagctcctggccacaccttctcagagctcacctgtgcacttctaaattgaattggcccacggtgtccaaccaagaaggagcatctgcactccgagaaagatgtgttctgtaactgccccagtgtgaccccgcagtggctctcggtgctagatatgcatgactaagattgnnnnnnnnnnnnnnntagatgatctttcattatgttgtgggcagcgtctttctctgcctttgctatnnnnnnnnnnnnnnnngccttttgctaaaagagttttgtttgacttctgagatccaaggctgattgtt

SEQ ID NO: 3708 - DNA, 503 bp, Homo sapiens
gtggtctatttcccagttcgaggccgctgcgcggccctgcgcatgctgctggcagatcagggccagagctggaaggaggaggtggtgaccgtggagacgtggcaggagggctcactcaaagcctcctgcctatacgggcagctccccaagttccaggacggagacctcaccctgtaccagtccaataccatcctgcgtcacctgggccgcacccttgggctctatgggaaggaccagcaggaggcagccctggtggacatggtgaatgacggcgtggaggacctccgctgcaaatacgtctccctcatctacaccaactatgaggtgggcaaggatgactatgtgaaggcactgcccgggcaactgaagccttttgagaccctgctgtcccagaaccagggaggcaagaccttcattgtgggagaccagatctccttcgctgactacaacctgctggacttgctgctgatccatgaggtcctagcccctggctgcctggatgc

SEQ ID NO: 3709 - DNA, 363 bp, Homo sapiens
  misc_feature (55)..(55): n includes a, c, g, or t, or contains no nucleotide
  misc_feature (102)..(102): n includes a, c, g, or t, or contains no nucleotide
cgagccaatagactgaagagaccacagcaattggctcctccatctagagattttnttggcagtattccatgggatgttaagcaaaggaaaccaaaggaatcngtttcaaatggactcatggcttagaaatctttattcttagggcagtcagtagtattctaaagctttctgacaagataaaggaagtcaccaaaatttctttttttaaattgtatctaatcctcaacaacaaaccaaaacagaacaattaaacagccaaataaaacctcagggacaacatttttggtgtatttgagccctcccagcaagtttcaccttgggtttgtattttaaatgttttacaagaattgtccatgtgcttcc

SEQ ID NO: 3710 - DNA, 466 bp, Homo sapiens
ctgttccatgcaactggagttccttatccctctcttccccttcccttatatattgaggctatggggtaggagaaaagtgcacaacccaccaccccctttactcgtgcattaaaatttcttatttacccttttcccccttcccatttcttcccactttcatctaccttttctggcaaaaaggagccttttgctctctgtgaccctaagagcacactgcacagggaaaattgccccatccagacctggctccactcttgatctctcttgtcctcttctgctcttttcctggtgctcttttttctcggtggggtgtgggtaatagaacagccgtgggcttttggggacctttaacttttttttctctcttttgtttataaaaaacactaaacattcaattccagagaaccaaaaatcccaccttcccaccgaacactactaaggggcttgtgttctgctccataccttt

SEQ ID NO: 3711 - DNA, 423 bp, Homo sapiens
  misc_feature (32)..(32): n includes a, c, g, or t, or contains no nucleotide
  misc_feature (39)..(39): n includes a, c, g, or t, or contains no nucleotide
  misc_feature (58)..(58): n includes a, c, g, or t, or contains no nucleotide
  misc_feature (61)..(61): n includes a, c, g, or t, or contains no nucleotide
  misc_feature (64)..(65): n includes a, c, g, or t, or contains no nucleotide
  misc_feature (70)..(70): n includes a, c, g, or t, or contains no nucleotide
  misc_feature (309)..(309): n includes a, c, g, or t, or contains no nucleotide
cacactgggttggagtcattgggcagctgtgncctgtgncgagaggtgctgtggtctnggncannccccnggaaaagcacctttgctgcctgtcattgttgcctgaagaaggctggagttgctctgagagcagtttgggtttggagtattatatttggcttctatttttattattttggatcaccattctccctatcccttcttgcctccctcccttctaaacatgtgtaataactatacagagactgctacaaaattgtatatagtttttggatcaaatagcatgaggggagaggaaaccattaaaanttggggctcctactctcctttgctttgtaaattcaaaagttgggggtgggtaagagggatagttaaaatgtttacaaaactttaggctccctcggaacttttgccagtgtggag

SEQ ID NO: 3712 - DNA, 495 bp, Homo sapiens
  misc_feature (140)..(142): n includes a, c, g, or t, or contains no nucleotide
  misc_feature (337)..(359): n includes a, c, g, or t, or contains no nucleotide
ctgtaacccagtgattatgatgtaaattaagtagcaattaaagtgttttcctgaacactgatggaaatgtatagaataatatttaggcaataacgtctgcatcttctaaatcatgaaattaaagtctgaggacgagagcnnnacgcctgggagcgaaagctggccttttttctacgaatgcactacattaaagatgtgcaacctatgcgccccctgccctacttccgttaccctgagagtcggcgtgtggccccatctccatgtgcctcccgtctgggtgggtgtgagagtggacggtatgtgtgtgaagtggtgtatatggaagcatctccctacnnnnnnnnnnnnnnnnnnnnnnnacctctgcgggagatcatccggtgctaaaacattacagttgccaaggaggaaaatactgaatgactgctaagaattaaccttaagaccagttcatagttaatacaggtttacagttcatgcctgtggttttgtgtt

SEQ ID NO: 3713 - DNA, 570 bp, Homo sapiens
  misc_feature (53)..(80): n includes a, c, g, or t, or contains no nucleotide
  misc_feature (99)..(99): n includes a, c, g, or t, or contains no nucleotide
  misc_feature (112)..(112): n includes a, c, g, or t, or contains no nucleotide
  misc_feature (130)..(149): n includes a, c, g, or t, or contains no nucleotide
  misc_feature (154)..(154): n includes a, c, g, or t, or contains no nucleotide
  misc_feature (158)..(158): n includes a, c, g, or t, or contains no nucleotide
  misc_feature (300)..(300): n includes a, c, g, or t, or contains no nucleotide
  misc_feature (304)..(304): n includes a, c, g, or t, or contains no nucleotide
  misc_feature (311)..(311): n includes a, c, g, or t, or contains no nucleotide
  misc_feature (323)..(327): n includes a, c, g, or t, or contains no nucleotide
  misc_feature (329)..(329): n includes a, c, g, or t, or contains no nucleotide
  misc_feature (537)..(537): n includes a, c, g, or t, or contains no nucleotide
  misc_feature (541)..(541): n includes a, c, g, or t, or contains no nucleotide
tctccgcgtacacacgggcgagaaaccctttgcctgccccgagtgtggccagnnnnnnnnnnnnnnnnnnnnnnnnnnnngtcatcagaggacacacancggcgaaaagccntaccactgcggtgagtgnnnnnnnnnnnnnnnnnnnntctcncggntcaccgagcaccagcgcatccacacgggcgaacggcccttcgcctgccccgagtgcggccagagctttcggcagcacgccaacctcacccagcaccggcgcatccacacgggtgaacggccctacgcatgccctgagtgtgncaanggccttncgccagcggccnnnnntnacgcagcatctgcgcacccaccgacgagagaagcccttcgcctgccaggactgtggccgccgcttccaccagagcaccaagctcattcagcaccagcgcgtccacagcgccgagtagctccagccgggacgcactgtgtccgccatggtcagaacacctacctcccctggttattgtgaggctggcgattacataagtataagcaggntccncccagggcttggctactgtaggtgtccaa

SEQ ID NO: 3714 - DNA, 558 bp, Homo sapiens
  misc_feature (30)..(30): n includes a, c, g, or t, or contains no nucleotide
  misc_feature (68)..(68): n includes a, c, g, or t, or contains no nucleotide
  misc_feature (141)..(158): n includes a, c, g, or t, or contains no nucleotide
  misc_feature (174)..(175): n includes a, c, g, or t, or contains no nucleotide
  misc_feature (178)..(194): n includes a, c, g, or t, or contains no nucleotide
  misc_feature (238)..(238): n includes a, c, g, or t, or contains no nucleotide
  misc_feature (350)..(350): n includes a, c, g, or t, or contains no nucleotide
  misc_feature (352)..(352): n includes a, c, g, or t, or contains no nucleotide
  misc_feature (356)..(356): n includes a, c, g, or t, or contains no nucleotide
  misc_feature (446)..(466): n includes a, c, g, or t, or contains no nucleotide
agtgtctcactgaagcttactgagccgaangacctgctgatattccgtgcctgctgtctgctgtaaangctgcagcctccccagctctcctctgccagccaccctaaattccagccaacctcacctcctcgggcccagctnnnnnnnnnnnnnnnnnntctggaccccttaggnntannnnnnnnnnnnnnnnnggtgggggaggagggagcgtgaaggtagtgactcctgaacacancccaggtggaaccatctttggggaggagaggcccgtgtgaggggtctgatactccctttgtcttccctctctactcctcgctacacctgagccaggctcttgccaactctgntnccancctatggctttaggctagctgttaaatatgtgacccagcattagctcagcatctgtcagagcaagagaccaggtaatttctaagaacagnnnnnnnnnnnnnnnnnnnnncatttcctcagctgcagaggaggaaagggaaagggtaggcctgtagactaacgctgtttacacccttgttctgtcaaagcaattaaagatca

SEQ ID NO: 3715 - DNA, 146 bp, Homo sapiens
  misc_feature (72)..(72): n includes a, c, g, or t, or contains no nucleotide
agaatctatttaaggcgccgcggggagggctgcacggccgggcttgtggttctctagcgcggcgggggcctnctgccggctccacgggcactttctacttgtgcatgggcttggtttatacgaattgccattaaacatcgctgcac

SEQ ID NO: 3716 - DNA, 312 bp, Homo sapiens
  misc_feature (70)..(70): n includes a, c, g, or t, or contains no nucleotide
  misc_feature (100)..(116): n includes a, c, g, or t, or contains no nucleotide
actaacttcaggagccagctcgtgatctcaggatgtatggaaaaataatctttgtattactattgtcagnaattgtgagcatatcagcatcaagtaccannnnnnnnnnnnnnnnnacttcaacctcttcttcagtcacaaagagttacatctcatcacagacaaatgggataacactcattaattggtgggcgatggctcgtgttatttttgaggtgatgcttgttgttgttggaatgatcatcttaatttcttactgtattcgatgactgataaaggcatgaggatgtggcctgcatgctgcctgatctt

SEQ ID NO: 3717 - DNA, 444 bp, Homo sapiens
  misc_feature (117)..(117): n includes a, c, g, or t, or contains no nucleotide
  misc_feature (163)..(351): n includes a, c, g, or t, or contains no nucleotide
gaacaccaggccaagcagaatgaacgcaaggagctgcaggaaaagaggaggcgagaggctatcactgcagcgacctgcctgacagaagctttggtggatcacctcaatgtgggtgtngcccaggcctacatgaaccagagaaagctggaccatgaggtgaagnnnnnnnnnnnnnnnnnnnnnnnnnnnnnnnnnnnnnnnnnnnnnnnnnnnnnnnnnnnnnnnnnnnnnnnnnnnnnnnnnnnnnnnnnnnnnnnnnnnnnnnnnnnnnnnnnnnnnnnnnnnnnnnnnnnnnnnnnnnnnnnnnnnnnnnnnnnnnnnnnnnnnnnnnnnnnnnnnnnnnnnnnnnnnccttcctagcccctgttccctcccccaaccctatccctcctacctcacccgcagggggaaggagggaggctgacaagccttgaataaaacaca

SEQ ID NO: 3718 - DNA, 375 bp, Homo sapiens
  misc_feature (237)..(237): n includes a, c, g, or t, or contains no nucleotide
  misc_feature (285)..(290): n includes a, c, g, or t, or contains no nucleotide
  misc_feature (293)..(293): n includes a, c, g, or t, or contains no nucleotide
gcttggagcagagacggcagccccatccttcccgcagcaccagcctgagccacagtggggcccatggccccagctggctgggtcgcccctcctcgggcgcctgcgctcctctgcagcctgagctccaccctcccctcttcttgcggcaccgcccacccacaccccgtctgccccttgaccccacacgccggggctggccctgccctcccccacggccgtccctgacttcccagctgncagcgcctcccgccgcctcgggccgcctcctccagactcgagagggcnnnnnnccncctctcctcgtccggcctgcagcccagaacgggcctccccgggggtccccggacgctggctcgggactgtcttcaaccctgc

SEQ ID NO: 3719 - DNA, 72 bp, Homo sapiens
gctctggccctcttgcatctggaacgccaggtgggtttttctggcataggagcccacttgcattttcatagt

SEQ ID NO: 3720 - DNA, 574 bp, Homo sapiens
  misc_feature (73)..(74): n includes a, c, g, or t, or contains no nucleotide
  misc_feature (124)..(125): n includes a, c, g, or t, or contains no nucleotide
  misc_feature (174)..(174): n includes a, c, g, or t, or contains no nucleotide
  misc_feature (176)..(190): n includes a, c, g, or t, or contains no nucleotide
  misc_feature (356)..(373): n includes a, c, g, or t, or contains no nucleotide
  misc_feature (377)..(381): n includes a, c, g, or t, or contains no nucleotide
  misc_feature (386)..(387): n includes a, c, g, or t, or contains no nucleotide
  misc_feature (389)..(389): n includes a, c, g, or t, or contains no nucleotide
  misc_feature (399)..(399): n includes a, c, g, or t, or contains no nucleotide
caggagggccatcaagaatgattcagtggtggctggtggcggggccattgagatggaactctccaagtacctnngggattactcaaggactattccaggaaaacagcagctgttgattggggcnntatgccaaggccttggagattatcccacgccagctgtgtgacaatgctngnnnnnnnnnnnnnnnacattctcaacaagctgcgggctcggcatgcccaggggggtacatggtatggagtagacatcaacaacgaggacattgctgacaactttgaagctttcgtgtgggagccagctatggtgcggatcaatgcgctgacagcagcctctgaggctgcgtgcctgatcgnnnnnnnnnnnnnnnnnntcannnnnccccnntngactgtggangctcccacagcagcaggccggggccgtggtcgtggccgcccccactgagaggcaccccacccatcacatggctggctggctgctgggtgcacttaccctccttggcttggttacttcattttacaaggaaggggtagtaattggcccactctcttcttactggaggctatttaaa

SEQ ID NO: 3721 - DNA, 402 bp, Homo sapiens
  misc_feature (175)..(189): n includes a, c, g, or t, or contains no nucleotide
tctcctagatgtgaagaacatcgcccaccagaacaagtttggggaggatatgccccacccacactaagccccagaatacggtccctcttcaccttctgaggcccacgatagaccagctgtagctcattccagcctgtaccttggatgaggggtagcctcccactgcatcccatcnnnnnnnnnnnnnnnaactccccaagagtgcttatttaagtgttaatacttttaagagaactgcgacgattaattgtggatctccccctgcccattgcctgcttgaggggcaccactactccagcccagaaggaaaggggggcagctcagtggccccaagagggagctgatatcatgaggataacattggcgggaggggagttaactggcaggcatggcaaggttgca

SEQ ID NO: 3722 - DNA, 380 bp, Homo sapiens
  misc_feature (337)..(337): n includes a, c, g, or t, or contains no nucleotide
atgcatttctaaataggaggacatcaatgtattgatgaagagaaaaaactagtacttagttgccacactcatgcttacatagaaagagagcccaagaatattagatttcctcatgatacaagatactacagtaacaggctttaatttaggatccttaagattttggggtattatttgtgactctcctgaaattgtaaacttgtgcttctgtgtccagttttctaatgagtaggttcgtagcttgattgaattaataattgtgagcccatagacacaagggaagtgagaaacagtgctctggtgacatgataaatatatgtgtcaaccaccatttcanctattaaaaactcctgttatctccttgtttgaatttcaggtca

SEQ ID NO: 3723 - DNA, 521 bp, Homo sapiens
  misc_feature (57)..(72): n includes a, c, g, or t, or contains no nucleotide
  misc_feature (260)..(260): n includes a, c, g, or t, or contains no nucleotide
  misc_feature (273)..(275): n includes a, c, g, or t, or contains no nucleotide
  misc_feature (277)..(281): n includes a, c, g, or t, or contains no nucleotide
  misc_feature (283)..(296): n includes a, c, g, or t, or contains no nucleotide
  misc_feature (298)..(302): n includes a, c, g, or t, or contains no nucleotide
  misc_feature (306)..(306): n includes a, c, g, or t, or contains no nucleotide
  misc_feature (423)..(439): n includes a, c, g, or t, or contains no nucleotide
ttgacttccacgtgcccatctcaagacattccactcacagatttgaggttctggatnnnnnnnnnnnnnnnntccaatgttaatgtaaacagaactggcacacacacattaagatgaatgtaattattattcctcttgctggtcactaccgtcgctttctatttctctttctttgtgtgaatttatttaaaagaaaaaaaaactttttgtaacgactatttgcagtttaaaaatcaataaaccccgttttttcaagaaanaaaaaaaaaaaannnannnnnannnnnnnnnnnnnngnnnnngccngtaaggttctccccttgtataccttgcaagtcctggggagggggaggcggagagagagggctgtggctgtgggtggcggcatctctcatccctataagctaagcctatagctccctnnnnnnnnnnnnnnnnnttgctgcacttagaggggacggggtggaggttttctgcaaaggagcctgtacttcctgctgtattacttctgaaaagactgt

SEQ ID NO: 3724 - DNA, 339 bp, Homo sapiens
  misc_feature (126)..(143): n includes a, c, g, or t, or contains no nucleotide
ctctgagtttcatagtgattgaggcataactatcaatcacaaaagtatattcaaaaattatattttgaacaactcgaatcactcatttatttccatattaaaatcacaaactcatccattaatgtnnnnnnnnnnnnnnnnnnatatgagatgtagcaaattccaatacattattggacttccatttggaatcatatgggatactgctggtcttatcctgtccctcctccaggtagagagaccacaagcaggctcaacataacataagctagaaaaattagatgactgaatttctatggcatattgataataaaattcattccatttgctgattgtctg

SEQ ID NO: 3725 - DNA, 477 bp, Homo sapiens
  misc_feature (41)..(41): n includes a, c, g, or t, or contains no nucleotide
  misc_feature (182)..(182): n includes a, c, g, or t, or contains no nucleotide
  misc_feature (188)..(188): n includes a, c, g, or t, or contains no nucleotide
  misc_feature (202)..(216): n includes a, c, g, or t, or contains no nucleotide
tttgtctcagctgtcgatggactcagcttccaggccttttncttacttaaacttcacaccagaaccttctgacattttctcctgcattgtgactcacgaaattgaccgctacacagcaattgcctattgggtaccccggaacgcactgccctcagatctgctggagaatgtgctgtgtggcngtggcntttggcctgggtgnnnnnnnnnnnnnnntgggcattgttctcatcatctacttccggaagccttgctcaggtgactgattcttccagaccagagtttgatgccagcagcttcggccatccaaacagaggatgctcagatttctcacatcctgcccaggatctcctcttagggtagaagaagtctctgggacatccctggggtgtgtgtgtagatttcccacctggggactctgctgtccctgggcttgcatcccagggatcccagagtggcctgcctatcacaaccaca

SEQ ID NO: 3726 - DNA, 60 bp, Homo sapiens
gaaggaacctactcactgcccaagagcgaattcgttgtgcctgacctggagctgcccagt

SEQ ID NO: 3727 - DNA, 493 bp, Homo sapiens
  misc_feature (51)..(52): n includes a, c, g, or t, or contains no nucleotide
  misc_feature (90)..(119): n includes a, c, g, or t, or contains no nucleotide
  misc_feature (193)..(259): n includes a, c, g, or t, or contains no nucleotide
  misc_feature (388)..(402): n includes a, c, g, or t, or contains no nucleotide
gagaccacggggatgagctcttctccgtctttggggccccatttttaaaanngagggtgcctcagaagaggagatcagacttagcaagannnnnnnnnnnnnnnnnnnnnnnnnnnnnngcaatggaaaccccaatggggaagggctgccccactggccagagtacaaccagaaggaagggtatctgcagatnnnnnnnnnnnnnnnnnnnnnnnnnnnnnnnnnnnnnnnnnnnnnnnnnnnnnnnnnnnnnnnnnnnctttgccaagaaggcagtggagaagccaccccagacagaacacatagagctgtgaatgaagatccagccggccttgggagcctggaggagcaaagactggggtcttttgcgaaagggattgcaggttcnnnnnnnnnnnnnnnatggctggggaattgtctggtggtggggggcaggggacagaggccatgaaggagcaagttttgtatttgtgacctcagctttgggaataaa

SEQ ID NO: 3728 - DNA, 243 bp, Homo sapiens
attagatagtgcatcttctgaggtcaattaaaaggagaaaaaatacaatttctcactttgcatttagtcaaaagaaaaaatgctttatagcaaaatgaaagagaacatgaaatgcttctttctcagtttattggttgaatgtgtatctatttgagtctggaaataactaatgtgtttgataattagtttagtttgtggcttcatggaaactccctgtaaactaaaagcttcagggttatgtct

SEQ ID NO: 3729 - DNA, 551 bp, Homo sapiens
  misc_feature (73)..(74): n includes a, c, g, or t, or contains no nucleotide
  misc_feature (77)..(77): n includes a, c, g, or t, or contains no nucleotide
  misc_feature (98)..(98): n includes a, c, g, or t, or contains no nucleotide
  misc_feature (104)..(105): n includes a, c, g, or t, or contains no nucleotide
  misc_feature (130)..(149): n includes a, c, g, or t, or contains no nucleotide
  misc_feature (158)..(158): n includes a, c, g, or t, or contains no nucleotide
  misc_feature (193)..(193): n includes a, c, g, or t, or contains no nucleotide
  misc_feature (205)..(205): n includes a, c, g, or t, or contains no nucleotide
  misc_feature (230)..(267): n includes a, c, g, or t, or contains no nucleotide
  misc_feature (388)..(415): n includes a, c, g, or t, or contains no nucleotide
ctgcagcaggagtcgggccctgcctccctcccagcagggaaaccccgcccgctgccaggccatcctctctgcnngangctttcatgagccccaaggcnggggcnncagctcctacccctgcccagcagcnnnnnnnnnnnnnnnnnnnnggacatccnagaagccatggctcctggggcgcttccaggcattntgccctgccccnacaccagaaccctggtgctggtggnnnnnnnnnnnnnnnnnnnnnnnnnnnnnnnnnnnnnnggttcatcgttctgccttgtccactgggggaccagccctgcagaccactctgacaagtcttcagcccacaccctgccagccccacagattttatttttgcacataagccataaccaatccnnnnnnnnnnnnnnnnnnnnnnnnnnnncctggagcctgtgaagaccctggaaacctcatgaggctgtggccaacccctgccccttgccccacacagaccaggccttaaatgtcggtccaggccctgtgcaccttaccccagagacagactctttttgtaagat

SEQ ID NO: 3730 - DNA, 523 bp, Homo sapiens
aagaccttttcatgtgtatggacatacagctcgttgaagcactgtgtggcttccagaagccaatatctactcttgacaaccgaaccatcgtcatcacctctcatccaggtcagattgtcaagcatggagatatcaagtgtgtactaaatgaaggcatgccaatttatcgtagaccatatgaaaagggtcgcctaatcatcgaatttaaggtaaactttcctgagaatggctttctctctcctgataaactgtctttgctggaaaaactcctacccgagaggaaggaagtggaagagactgatgagatggaccaagtagaactggtggactttgatccaaatcaggaaagacggcgccactacaatggagaagcatatgaggatgatgaacatcatcccagaggtggtgttcagtgtcagacctcttaatggccagtgaataacactcactgctggcatttaatgtgcagtagtgaatgagtgaaggactgtaatcataatatgctcactacttgctcttgttt

SEQ ID NO: 3731 - DNA, 99 bp, Homo sapiens
tagaactaatcatcaggtacgcagtctctagaattaggtatatctactggggatgacataaaaattataaggctttgtgctaaactaggagtttaatcc

SEQ ID NO: 3732 - DNA, 484 bp, Homo sapiens
  misc_feature (95)..(95): n includes a, c, g, or t, or contains no nucleotide
  misc_feature (414)..(446): n includes a, c, g, or t, or contains no nucleotide
tgacacttcaaggtgacagaaggaccagcccttgagggagaacttatggccacagcccatccatagtaactgacatgattagcagaagaaaggancatttaggggcaagcaggcgctgtgctatcatgatggaatttcatatctacagatagagagttgttgtgtacagacttgttgtgactttgacgcttgcgaactagagatgtgcaattgatttcttttcttcctggctttttaactcccctgtttcaatcactgtcctccacacaagggaaggacagaaaggagagtggccattctttttttcttggcccccttcccaaggccttaagctttggacccaaggaaaactgcatggagacgcatttcggttgagaatggaaaccacaacttttaaccaaacaattatttaannnnnnnnnnnnnnnnnnnnnnnnnnnnnnnnnttcattttgaggggaggagttccacagattgtttctat

SEQ ID NO: 3733 - DNA, 507 bp, Homo sapiens
  misc_feature (186)..(186): n includes a, c, g, or t, or contains no nucleotide
  misc_feature (307)..(308): n includes a, c, g, or t, or contains no nucleotide
  misc_feature (444)..(444): n includes a, c, g, or t, or contains no nucleotide
  misc_feature (454)..(456): n includes a, c, g, or t, or contains no nucleotide
  misc_feature (458)..(458): n includes a, c, g, or t, or contains no nucleotide
  misc_feature (460)..(475): n includes a, c, g, or t, or contains no nucleotide
gagagcccttcctgttcccagatgccttggtccaaagaccccacccctctgctggtcctgccaacgtgttggtgctataagctgcttcagatataaaattggtttatctataatgtttgttcatttaatagcttctaaaaggcctttttgttatacagtgctttttttctagttttatggacttgnttactgtaataatgtcttgtttttagccatgtaactacaaacagatattctcttgatgtcttagtaaatttgcatttgatatatcattgatgagattttgttgttatgtaatattctttgnntacgcatctgtccagcatcttattaaccataatactgtgatcattatttggaaatatgtcctatggaaagaataaaagcatgtacttcacagctagcatgttcacagatttgaaagaagtttcattaaaagcaccnattgctttcnnnanannnnnnnnnnnnnnnntatcatcctacttgtgttttgctcaataaatg

SEQ ID NO: 3734 - DNA, 428 bp, Homo sapiens
  misc_feature (67)..(67): n includes a, c, g, or t, or contains no nucleotide
  misc_feature (226)..(226): n includes a, c, g, or t, or contains no nucleotide
  misc_feature (262)..(279): n includes a, c, g, or t, or contains no nucleotide
  misc_feature (290)..(290): n includes a, c, g, or t, or contains no nucleotide
  misc_feature (323)..(323): n includes a, c, g, or t, or contains no nucleotide
gcgggctcagtctgaatctgcccagagcaagatgctgagtggcattggaggcttcgtgctggggctnatcttcctcgggctgggccttattatccatcacaggagtcagaaagggctcctgcactgactcctgagactattttaactgggattggttatcacttttctgtaacgcctgcttgtccctgcccagaattcccagctgcctgtgtcagcctgtcccccngagatcagagtcctacagtggctgtcacgcagccannnnnnnnnnnnnnnnnntccccacctcnaggctgatggctgtgaccctgcttcctgcactnacccagagcctctgcctgtgcacggccagctgcgtctactgaggccccaaggggtttctgtttctattctctcctcagactgctcaagagaagcacatgaaaacc

SEQ ID NO: 3735 - DNA, 500 bp, Homo sapiens
  misc_feature (115)..(244): n includes a, c, g, or t, or contains no nucleotide
aattgacagcctcaaggttcctggctttttgaaccaccacagacatctcctttcccggctaccccaccctgagcgccagacaccatgaaccttccttccacaaaggtctcctggnnnnnnnnnnnnnnnnnnnnnnnnnnnnnnnnnnnnnnnnnnnnnnnnnnnnnnnnnnnnnnnnnnnnnnnnnnnnnnnnnnnnnnnnnnnnnnnnnnnnnnnnnnnnnnnnnnnnnnnnnnnnnnnnnnacggcgcgggcaatcacgcggccggcatcctcacgctgggcaagcggaggtccgggcccccgggcctccagggtcggctgcagcgcctcctgcaggccagcggcaaccacgccgcgggcatcctgaccatgggccgccgcgcaggcgcagagccagcgccgcgcccctgcctcgggcgccgctgttccgccccggccgccgcctccgtcgcgcccggaggacagtccgggatctgagtcgttcttcgggccctgtc

SEQ ID NO: 3736 - DNA, 405 bp, Homo sapiens
  misc_feature (100)..(101): n includes a, c, g, or t, or contains no nucleotide
tggtgtattcactgctgtatgcattattgttctttgttgctgttttatgccttcatattagcaaatatgaaattctgtgaaaaaaaaccctttgatcttnnaaaaaaaaaaaaaccaccccccccttctgtagcaggaaacaaattgcttgttcttgagaactttcccatcaagaatttagtagaagcaggtatacttctatcattttgatgtttttgttaatgtttccaaacaatgtactttgaaatcagaatcacttcttatcgttttcatatacttctgatgctcttcatcacattagtgatcagaaatgaggtgtaattccccaacccctgcccgcaagagctaagtaggatcttactgtaagttgaagggagttttgccctaactcatggattgtgcaag

SEQ ID NO: 3737 - DNA, 510 bp, Homo sapiens
tccctagttcggaaattcaagctaactacttaccctttaaactgtcactgcatatgcaagtaccgctctaatttttggatcattaaagggagttacacaacttttaagtgaaaaaaataggtaacaaaacaaccacctgatagtaagttttctgataagactatagataagtggtagaggtaatcaattcttccgaagtgtttccttcgtgaataactggtagaggtaatagttttttcaatgtatttccttcatgagtaaagaaaatgtggattgaagtatagattccagtagcctagtttccacagcacgataacaccatgacgcctactgctgttcccaccttgggattctgtgtgctgccatcccacctgcagctgccctggaattcccttcgctgtttgccttcatctccctccacgtttgagaggctgtcaggcagcagcgaaagcttgttaggatgtcctgtgctgcttgtgatgagagcctccacactgtactgttcaagtc

SEQ ID NO: 3738 - DNA, 503 bp, Homo sapiens
  misc_feature (142)..(156): n includes a, c, g, or t, or contains no nucleotide
  misc_feature (190)..(190): n includes a, c, g, or t, or contains no nucleotide
  misc_feature (384)..(398): n includes a, c, g, or t, or contains no nucleotide
gtggcattcaatcaacctgttaagctttattccatgaaatttcaagggccagataatggtcagggccctaaatatgtaaaaatttttatcaacctaccccgatctatggattttgaagaggcagaaagaagtgaaccaactnnnnnnnnnnnnnnnacagaggatgatattaaagaagatggcattgttnccacttcgttatgttaagtttcagaatgttaacagtgtaactatatttgttcagtcgaatcaaggtgaagaggaaacaacaagaatttcatattttacttttattggtactccagtccaggcaacaaatatgaatgacttcaaacgagtagttggcaaaaaaggagaaagccactaaggtacaaaagacactgnnnnnnnnnnnnnnnatcagatctacagctcctggataattgcttgattctcgccagagactgtcaatgtttcattcattgccattaccaataaatcattgcttttgttcagatggtatc

SEQ ID NO: 3739 - DNA, 148 bp, Homo sapiens
tggggagcctttcggatctatttggtctttctcatgtcccccactggtctgtaccccagggagcgggtgcttgtactgtgtgaatccagtgttcacattcacacttaatgacttccttggcaccaatcatgtatttcaccgtttgcac

SEQ ID NO: 3740 - DNA, 566 bp, Homo sapiens
ggtggacgctgactccggctataacgcttggctgtcctacgagttgcaaccggcggcggtcggcgcgcacatcccgttccacgtggggctgtacactggcgagatcagcacgacacgcatcctggatgaggcggacgctccgcgccaccgcctgctggtgctggtgaaggaccacggtgagcccgcgctgacgtccacggccacggtgctggtgtcgctggtggagaacggccaggccccaaagacgtcgtcgcgggcctcagtgggcgctgtggatcccgaagcggctctggtggatattaacgtgtacctcatcatcgccatctgtgcggtgtccagcctgctggtgctcacgctgctgctgtacactgcgctgcgttgctcagcgccgcccaccgtgagccggtgcgcgccgggcaagcccacgctggtgtgctccagcgccgtggggagttggtcttactcgcagcagaggaggcagagggtgtgctctgcagagagcccgcccaagacggacctcatggccttcagcccaagccttcagctgtctcgagaagattgtttaa

SEQ ID NO: 3741 - DNA, 486 bp, Homo sapiens
  misc_feature (359)..(389): n includes a, c, g, or t, or contains no nucleotide
  misc_feature (392)..(393): n includes a, c, g, or t, or contains no nucleotide
  misc_feature (407)..(407): n includes a, c, g, or t, or contains no nucleotide
  misc_feature (414)..(414): n includes a, c, g, or t, or contains no nucleotide
  misc_feature (430)..(430): n includes a, c, g, or t, or contains no nucleotide
taattaactggttccatcaagactgtgcacccaggccttacagtccaacctttttctgtgtctggctaatatttaaaactagaaaaactattcctaatcaacatggagtggagagtttattcactgtcttatctgcagaaatttgctgtcaatatataacccgcctgcagtggaaagtgtatagtgttttgtaataaatggcctgatgctaatgtgtaaatggcaaaggtgtatatagtatattaatgttgactgttaattcttaagcaagaaacttttttcttgatgagactcacagatctacacaaactacaaaagttaattttcttgttacacccactgcactctgcaaccagtgnnnnnnnnnnnnnnnnnnnnnnnnnnnnnnnttnncaaaaaaaaagganaaaaaantaaacccaccagcatncaaaacaggagccccatcccatggtcaggcccacacccaataaggtttccatggtt

SEQ ID NO: 3742 - DNA, 593 bp, Homo sapiens
  misc_feature (93)..(93): n includes a, c, g, or t, or contains no nucleotide
  misc_feature (106)..(106): n includes a, c, g, or t, or contains no nucleotide
  misc_feature (113)..(113): n includes a, c, g, or t, or contains no nucleotide
  misc_feature (164)..(164): n includes a, c, g, or t, or contains no nucleotide
  misc_feature (210)..(225): n includes a, c, g, or t, or contains no nucleotide
  misc_feature (227)..(227): n includes a, c, g, or t, or contains no nucleotide
  misc_feature (230)..(230): n includes a, c, g, or t, or contains no nucleotide
  misc_feature (233)..(233): n includes a, c, g, or t, or contains no nucleotide
  misc_feature (238)..(238): n includes a, c, g, or t, or contains no nucleotide
  misc_feature (240)..(245): n includes a, c, g, or t, or contains no nucleotide
  misc_feature (247)..(247): n includes a, c, g, or t, or contains no nucleotide
  misc_feature (300)..(300): n includes a, c, g, or t, or contains no nucleotide
  misc_feature (302)..(303): n includes a, c, g, or t, or contains no nucleotide
  misc_feature (306)..(306): n includes a, c, g, or t, or contains no nucleotide
  misc_feature (315)..(317): n includes a, c, g, or t, or contains no nucleotide
  misc_feature (324)..(324): n includes a, c, g, or t, or contains no nucleotide
  misc_feature (336)..(365): n includes a, c, g, or t, or contains no nucleotide
  misc_feature (487)..(488): n includes a, c, g, or t, or contains no nucleotide
ggtggggcaatggggagaggcaaatgcagtttattgtaatatatgggattagattcatctatggagggcagagtgggctgcctggggattggnagggacagggctnggggagnaggtctctggcagagaaggatgtccgttccaggagcacacggccctgcccnatcctgggccttacctcccctgccagggctcgggcgctgtggctcnnnnnnnnnnnnnnnncngtntcntgccntnnnnnnangcctgtgccacctgcaagtgcccgccctgcccctgccccaacccccaccgaanannccntgagctcannntgagccnagccacctcccnnnnnnnnnnnnnnnnnnnnnnnnnnnnnncgtggaggtgaagtccctgttctcagctccgtcatctgcggggcttctgggtggctcctgccactgacctcaccggcatgctggcctgtggcaggcctaggacctcaggcggggaggagganntgccgcaaggccctgtcccagcagaagagggaggcttcctgactgacacaggccagccccatcttggtcctgtcaccctggccccaactattaaagtgccatttc

SEQ ID NO: 3743 - DNA, 524 bp, Homo sapiens
  misc_feature (129)..(129): n includes a, c, g, or t, or contains no nucleotide
  misc_feature (168)..(168): n includes a, c, g, or t, or contains no nucleotide
  misc_feature (175)..(175): n includes a, c, g, or t, or contains no nucleotide
  misc_feature (192)..(192): n includes a, c, g, or t, or contains no nucleotide
  misc_feature (195)..(195): n includes a, c, g, or t, or contains no nucleotide
  misc_feature (214)..(214): n includes a, c, g, or t, or contains no nucleotide
  misc_feature (235)..(235): n includes a, c, g, or t, or contains no nucleotide
  misc_feature (298)..(298): n includes a, c, g, or t, or contains no nucleotide
  misc_feature (301)..(301): n includes a, c, g, or t, or contains no nucleotide
cttcattcataagatctggttgtttgggctgtaggtggcataattcatgtttattttggcctctgtcacatccagtttctttagcttttaaggtaagcttcttttggctttttttcatatgttcaccangctaaaatttaaaataataagaccaggtttctctctctnacaagtnggattataaacattttncanccaaatcataacaatactnccagctttccggtccgacttncctaggagcctggagttagcaaaggttgtctctggatttcattctctgagaatatcacagagnccngggagaagatgaatttacatgaaattgcaacatacacacctttttattttctggtgttaagctagttgtctttcctaccttacaaatcatgttagttttatgatttgttccgcatgttttatgtttattgtagaaatgtttatataacatacgctttccatatcagggaaaatcatatctgtttaataaattggctataactttaatatctgtggacaacttg

SEQ ID NO: 3744 - DNA, 277 bp, Homo sapiens
  misc_feature (113)..(113): n includes a, c, g, or t, or contains no nucleotide
  misc_feature (188)..(188): n includes a, c, g, or t, or contains no nucleotide
  misc_feature (193)..(193): n includes a, c, g, or t, or contains no nucleotide
gagaccaggtggaccccagctgcctgtcacccttcatctgggacttgctgtcaaaccctaggatagtctcataaaggggaggctgggccagcctgctgctgtctgcttcaggnccaggcagagagtgaggctgggggttctcacaccttactccaccgggcacatcccaacctgcactggggcccacncgagngcttgttctggtctcagccgctcccttggcagctgcagcccccatgcagaagaggctcccaggcccaagctctgtgtgacccag

SEQ ID NO: 3745 - DNA, 451 bp, Homo sapiens
atttcatgatagcttgcttttgcaatatgagtttgaaaaatcagtataagcttatgatggtgaaaagtcaacatattgagagtgataattcaattaataggatatgaacttaacgacatataaaagcaaatgagggcaggagggaatcgtgacaaaaaatatttgtgcccaattatgattaatgttttagagatgttgtgtccctgtgggcttagcatggaactaaaagttcctaagtctcaattctagttatgtgtcatttagtaactcaggaatctgcttaattgttatttctaagcttttgatgacaaaggagtgatgcagctaagggcatccttggagtgtcataaaaaacaaatttgaggttgaatgattagctgcgcagttagagtgataaaaaaatccaggtaggccttctgattcaccatgaccaagtcaggatttcttaata

SEQ ID NO: 3746 - DNA, 258 bp, Homo sapiens
  misc_feature (41)..(63): n includes a, c, g, or t, or contains no nucleotide
gaccagctctgtgtaggtaaccagatggctctttttcccannnnnnnnnnnnnnnnnnnnnnngactaaactcccaaccccagaccagggcaggggacaggtctcaagtccttcccagcatacacacagggaacaaacacataccacaaaccggtaactgtacctgtcaccctccttgtctcctccttgggccctacaggctacacatctacctttggcccctggttttggaaaaattccgtgttcctgacccatgtt

SEQ ID NO: 3747 - DNA, 421 bp, Homo sapiens
ctccaggcggtcttattggagttggaacaaaaattgaccccactttgtgccgggctgacagaatggtggggcaagtacttggtgcagtcggagctttacctgagatattcacagaattggaaatttcctatttcctgcttagacggcttctaggtgtacgcactgaaggagacaagaaagcagcaaaggttcaaaagctgtctaagaatgaagtgctcatggtgaacataggatccctgtcaacaggagggagagttagtgctgtcaaggccgatttgggtaaaattgttttgaccaatccagtgtgcacagaggtaggagaaaaaattgcccttagccgaagagttgaaaaacactggcgtttaattggttggggtcagataagaagaggagtgacaatcaagccaacagtagatgatga

SEQ ID NO: 3748 - DNA, 56 bp, Homo sapiens
acaagcaaaccacagtcacagtggtgattaccactgcacaggaaacataggctaca

SEQ ID NO: 3749 - DNA, 428 bp, Homo sapiens
  misc_feature (222)..(222): n includes a, c, g, or t, or contains no nucleotide
  misc_feature (228)..(228): n includes a, c, g, or t, or contains no nucleotide
  misc_feature (241)..(244): n includes a, c, g, or t, or contains no nucleotide
  misc_feature (266)..(303): n includes a, c, g, or t, or contains no nucleotide
tgaggtgcccaacacccattcatctcaagtgcttcagtctttggtttatttcatgcactgtgccttcaaaatgaaatttttaaaagggactttaaatgaagttgaatagtagtttttaaaagtcaatttgtaatttatgtgaaatctaactgtaatgaggtcctttctgttttttatatgtaaacagatctactaatcctgtataaaagttattttacgaanaaaaanaaaaaaaaaaaannnnctcataatcttttttcagatgnnnnnnnnnnnnnnnnnnnnnnnnnnnnnnnnnnnnnntatttagtttttctgcctatgctagtggaaaaatagtaccaggatcagaatacagggtatcacctatggaatgtttctgtatttatgaattgactcaaaagaaagctttgtttctgaaatcgcat

SEQ ID NO: 3750 - DNA, 67 bp, Homo sapiens
gcaacgagcgacagggctgccagttgcccctgggttcctttgtgctgctgtgtgcctcctctcctgc

SEQ ID NO: 3751 - DNA, 406 bp, Homo sapiens
agagcaatgagcattccgatgtgattgatagtcaggaactttccaaagtcagccgtgaattccacagccatgaatttcacagccatgaagatatgctggttgtagaccccaaaagtaaggaagaagataaacacctgaaatttcgtatttctcatgaattagatagtgcatcttctgaggtcaattaaaaggagaaaaaatacaatttctcactttgcatttagtcaaaagaaaaaatgctttatagcaaaatgaaagagaacatgaaatgcttctttctcagtttattggttgaatgtgtatctatttgagtctggaaataactaatgtgtttgataattagtttagtttgtggcttcatggaaactccctgtaaactaaaagcttcagggttatgtctatgttc

SEQ ID NO: 3752 - DNA, 497 bp, Homo sapiens
  misc_feature (174)..(189): n includes a, c, g, or t, or contains no nucleotide
  misc_feature (411)..(429): n includes a, c, g, or t, or contains no nucleotide
acctacccggcttacatgcaggacgcggcggctgccgccgccgccgccgccgccgccgccatcttcccaggggcggtcccgccgcgcgccccccctaacagggctccgtctattcaggctaagcgcgccgccgtcgctggccgcccgcctcatctactacccgcggagtcgccnnnnnnnnnnnnnnnnttcggcctggttcctgagcggccgctcaagcaagaattggggcccgcaccgtgggggcccggcggctctttcgccttttcctccgatggcgcccccgctaccaccaacggctaccaaccacgacaggcttcaccgggacccgtccggccaaccccctcctatgcggctgcctacgcgggccccgacggaagtacccccagggagaaggcagtgcgatacttnnnnnnnnnnnnnnnnnnngggggcaccccttgcccccagcgggcggcagcagtggcgggtggagaccacggtggacttctacggcg

SEQ ID NO: 3753 - DNA, 514 bp, Homo sapiens
  misc_feature (33)..(33): n includes a, c, g, or t, or contains no nucleotide
  misc_feature (44)..(44): n includes a, c, g, or t, or contains no nucleotide
  misc_feature (61)..(61): n includes a, c, g, or t, or contains no nucleotide
  misc_feature (79)..(79): n includes a, c, g, or t, or contains no nucleotide
  misc_feature (121)..(121): n includes a, c, g, or t, or contains no nucleotide
  misc_feature (123)..(123): n includes a, c, g, or t, or contains no nucleotide
  misc_feature (222)..(222): n includes a, c, g, or t, or contains no nucleotide
  misc_feature (248)..(248): n includes a, c, g, or t, or contains no nucleotide
  misc_feature (253)..(253): n includes a, c, g, or t, or contains no nucleotide
  misc_feature (424)..(424): n includes a, c, g, or t, or contains no nucleotide
caggtttctcctggagctacagataagcaacancaggctggagnatgcgggcgtgcggganctgtgccagggcctgggnccagcctggctctgtgctgcgggtgctctggttggccgactncngatgtgagtgacagcagctgcagcagcctcgccgcaaccctgttggccaaccacagcctgcgtgagctggacctcagcaacaactgcctgggggacgcnggcatcctgcagctggtggagagcgntccgncagccgggctgcctcctggagcagctggtcctgtacgacatttactggtctgaggagatggaggaccggctgcaggccctggagaaggacaagccatccctgagggtcatctcctgaggctcttcctgctgctgctctccctggacgaccggcctcgaggcaaccctgggncccaccagcccctgccatgctctcaccctgcatatcctaggtttgaagagaaacgctcagatccgcttatttctgccagtatattttgga

SEQ ID NO: 3754 - DNA, 529 bp, Homo sapiens
ggagttgtcaagtcttgctggcccagccaaaccctgtctgacaacctcttggtccaccttagtacctaaaaggaaatctcaccccatcccacaccctggaggatttcatctcttgtatatgatgatctggatccaccaagacttgttttatgctcagggtcaatttcttttttcttttttttttttttttttctttttctttgagactgggtctcgctttgttgcccaggctggagtggagtggcgtgatcttggcttactgcagcctttgcctccccggctcgagcagtcctgcctcagcctccggagtagctgggaccacaggttcatgccaccatggccagccaacttttgcatgttttgtagagatggggtctcacagtgttgcccaggctggtctcaaactcctgggctcaggcgatccacctgtctcagcctcccagagtgctgggattacaattgtgagccaccacgtccagctggaagggtcaacatcttttacattctgcaagcacatctgcattttcac

SEQ ID NO: 3755 - DNA, 554 bp, Homo sapiens
  misc_feature (173)..(231): n includes a, c, g, or t, or contains no nucleotide
  misc_feature (265)..(265): n includes a, c, g, or t, or contains no nucleotide
  misc_feature (289)..(289): n includes a, c, g, or t, or contains no nucleotide
  misc_feature (318)..(349): n includes a, c, g, or t, or contains no nucleotide
  misc_feature (376)..(405): n includes a, c, g, or t, or contains no nucleotide
  misc_feature (468)..(468): n includes a, c, g, or t, or contains no nucleotide
  misc_feature (489)..(489): n includes a, c, g, or t, or contains no nucleotide
  misc_feature (493)..(493): n includes a, c, g, or t, or contains no nucleotide
tccggacccccagtatctgagcttatcaccaaggcagtggcagcttctaaggagcgcagcggcgtttctctggccgcgcttaagaaagcgcttgcggctgctggctacgatgtagaaaaaaacaacagccgtatcaagcttggcctcaagagcttggtgagcaaaggtactcnnnnnnnnnnnnnnnnnnnnnnnnnnnnnnnnnnnnnnnnnnnnnnnnnnnnnnnnnnntccggggaaggcaaacccaaggccaaaaaggctngcgcagccaagcctaggaagcctnctggggcagccaagaagcccaagaaggtnnnnnnnnnnnnnnnnnnnnnnnnnnnnnnnnaaaagactcctaagaaggtaaagaagnnnnnnnnnnnnnnnnnnnnnnnnnnnnnngccaagagtgcgaaaaaggtgaaaacacctcagccaaaaaaagctgccaagagtccagctaangccaaagcccctaagcccaanggcngccaagcctaagtcggggaagccgaaggttacaaaggcaaagaaggcagctccgaagaaaa

SEQ ID NO: 3756 - DNA, 467 bp, Homo sapiens
  misc_feature (45)..(45): n includes a, c, g, or t, or contains no nucleotide
gagcgagcaagcagcccctcagaacacggcccaaggaagagctanagcctaggcagcatctacactcgcctgtatgggcagtcccctccagactcgcacacggctgagggtgatgtcctggccctgctcagcatctgtcagtggagaccacaggccctgctgcggtgggtggatgctcacgccaggcctttcggcaccatcaggcccatgtatggggtcacagcctctgctaggaccaagccaagaccatctgctgtcacaaccactgcacacctggccacaaccaggaacactagtcccagccttggagagagcaggggtaccaaggatcttcctccagtgaaggaccctggagccctatccagggaggggctgctggccccactgggtctgctggccatcctgaccttggcagtagccacactgtatggactatccctggccacacctggggagtaggccaagaa

SEQ ID NO: 3757 - DNA, 498 bp, Homo sapiens
atcctcagctgactgagtctcagaatgctcaggaccaaggtgcagagatggacaagagcagccaggagacccagcgatctgagcataaaactcattaaacctgcccctatcactagtgcatgctgtggccagacagatgacaccttttgttatgttgaaattaacttgctaggcaaccctaaattgggaagcaagtagctagtataaaggccctcaattgtagttgtttccagctgaattaagagctttaaagtttctggcattagcagatgatttctgttcacctggtaagaaaagaatgataggcttgtcagagcctatagccagaactcagaaaaaattcaaatgcacttatgttctcattctatggccattgtgttgcctctgttactgtttgtattgaataaaaacatcttcatgtgggctggggtagaaactggtgtctgctctggtgtgatctgaaaaggcgtcttcactgctttatctcatgatgcttgc

SEQ ID NO: 3758 - DNA, 325 bp, Homo sapiens
tgggttcaggattccatggaccacctggacaagcaaacccaaactccgaagacttgaacactcactccacaacccaagaatctgcagctaacttatttttccctagctttccccagacaccttgtttattttattataatgaattttgtttgttgatgtgaaacattatgccttaagtaatgttaattcttatttaagttattgatgttttaagtttatctttcatggtactagtgttttttagatacagagacttggggaaattgcttttcctcttgaaccacagttctacccctgggatgttttgagggtctttgcaagaatc

SEQ ID NO: 3759 - DNA, 474 bp, Homo sapiens
  misc_feature (51)..(51): n includes a, c, g, or t, or contains no nucleotide
  misc_feature (101)..(117): n includes a, c, g, or t, or contains no nucleotide
  misc_feature (311)..(311): n includes a, c, g, or t, or contains no nucleotide
gctctgtgggcttctccaggagcagggagggtggaggggagggatgggggncacaggagctgggagccccgtctccaggaaaaggagaggggttaagatgnnnnnnnnnnnnnnnnnggctacttgatcttgctgaaagtgtttctaaagatagcaccacttttttttttaaagcttttatatattaaaaaacgtatcatgcaccaactgtgaatagctgccgcttgcgcagaggacccggggaggggtcccgagaggctccccatgcaacactggaaatgactgttccagagagcgggcagacctggcanagcgcccctggcgcctgagactaccacccactccgttcctgccagaaacgaccctctgtggccgatgggccatgcgggcccctcgcagccaactcagccagtgttgggactggctcagagcccatgggggctggaggggggcagctgggactctggaatcttc

SEQ ID NO: 3760 - DNA, 538 bp, Homo sapiens
  misc_feature (169)..(196): n includes a, c, g, or t, or contains no nucleotide
tgtgagcgtgtactgctggccctattctgtcacgaaccctgccgccccctgcatcagctggctaccgactccaccttctccctggaccagcccggtggcaccctggatctgaccctgatccgtgcccgcctccaggagaagttgtcacctccctacagctccccacagnnnnnnnnnnnnnnnnnnnnnnnnnnnntgttcaagcaattcaacaagttaactgaggacaaggcagacgtgcagtccatcatcggcctgcagcgcttcttcgagacgcgcatgaacgaggccttcggtgacaccaagttctctgctgtgctggtggagcccccgccgatgagcctgcctggtgctggcctgagttcccaggagctgtctggtggccctggtgatggcccctgaggctggagcccccatggccagcccagcctggctctgttctctgtcctgtcaccccatccccactcccctggtggcctgactcccactccctggtggccccatcccccagttcctcacgatatggtttttacttctg

SEQ ID NO: 3761 - DNA, 397 bp, Homo sapiens
  misc_feature (250)..(250): n includes a, c, g, or t, or contains no nucleotide
  misc_feature (358)..(372): n includes a, c, g, or t, or contains no nucleotide
tccaggactggaagggccagcatccagcgtgacctcagggagcagccgcccccagcctccacccctggccatggtccctctcacagatccaccttctcggcccctctacccagccccagaacagccactcccatctatgaggaattgctatactctgatgcaaacatttactgccagatcgaccacaaagcagatgtggtctcttaggttcctctgggagctgctcttgtgggttgatggagcgtccccnaagctcccagccctggggacggggaaggacatggagcctgagccagagaaccagctctgagtcctgaggagacacaggcctggggacagggagggatgggagtccctnnnnnnnnnnnnnnnaccctgacaggttgccctgggctct

SEQ ID NO: 3762 - DNA, 508 bp, Homo sapiens
  misc_feature (33)..(33): n includes a, c, g, or t, or contains no nucleotide
  misc_feature (189)..(189): n includes a, c, g, or t, or contains no nucleotide
  misc_feature (199)..(199): n includes a, c, g, or t, or contains no nucleotide
ccagatgcaatcaatgccccagtcacctgctgntataacttcaccaataggaagatctcagtgcagaggctcgcgagctatagaagaatcaccagcagcaagtgtcccaaagaagctgtgatcttcaagaccattgtggccaaggagatctgtgctgaccccaagcagaagtgggttcaggattccatnggaccacctnggacaagcaaacccaaactccgaagacttgaacactcactccacaacccaagaatctgcagctaacttattttcccctagctttccccagacaccctgttttattttattataatgaattttgtttgttgatgtgaaacattatgccttaagtaatgttaattcttatttaagttattgatgttttaagtttatctttcatggtactagtgttttttagatacagagacttggggaaattgcttttcctcttgaaccacagttctacccctgggatgttttgagggtctttgcaagaatcattaataca

SEQ ID NO: 3763 - DNA, 313 bp, Homo sapiens
ttttctgactaattaggcaaggctatgtgattacaaggctttatctcaggggccaactaggcagccaacctaagcaagatcccatgggttgtgtgtttatttcacttgatgatacaatgaacacttataagtgaagtgatactatccagttactgccggtttgaaaatatgcctgcaatctgagccagtgctttaatggcatgtcagacagaacttgaatgtgtcaggtgaccctgatgaaaacatagcatctcaggagatttcatgcctggtgcttccaaatattgttgacaactgtgactgtacccaaatg

SEQ ID NO: 3764 - DNA, 425 bp, Homo sapiens
ccacagtgcctgtacaggaaggtgcctggccatgtcacctggctgctaggccagagccatgccaggctgcgtccctccgagcttgggataaagcaaggggaccttggcgctctcagctttccctgccacatccagcttgttgtcccaatgaaatactgagatgctgggctgtctctcccttccaggaatgctgggcccccagcctggccagacaagaagactgtcaggaagggtcggagtctgtaaaaccagcatacagtttggcttttttcacattgatcatttttatatgaaataaaaagatcctgcatttatggtgtagttctgagtcctgagacttttctgcgtgatggctatgccttgcacacaggtgttggtgatggggctgttgagatgcctgttgaaggtacatcgtttgcaaatgt

SEQ ID NO: 3765 - DNA, 116 bp, Homo sapiens
ttcacaggctattctactttaaaggaagcctttttattttgctgcacacaatctagcaggaatctttttttttttttaagagctgtgtcatccttatgtaggcaagagatgtttgc

SEQ ID NO: 3766 - DNA, 484 bp, Homo sapiens
  misc_feature (331)..(331): n includes a, c, g, or t, or contains no nucleotide
  misc_feature (333)..(334): n includes a, c, g, or t, or contains no nucleotide
catcttcatgcgacaaaagtgatacatgtttttaattaaagagtaaagcccatacaagtattcattttttctaccctttcctttgtaagttcctgggcaacctttttgatttcttccagaaggcaaaaagacattaccatgagtaataagggggctccaggactccctctaagtggaatagcctccctgtaactccagctctgctccgtatgccaagaggagactttaattctcttactgcttcttttcacttcagagcacacttatgggccaagcccagcttaatggctcatgacctggaaataaaatttaggaccaatacctcctccanannagattcttctcttaatttcatagattgtgtttttttttaaatagacctctcaatttctggaaaactgccttttatctgcccagaattctaagctggtgccccactgaatcttgtgtacctgtgactaaacaactacctcctcagtctggg

SEQ ID NO: 3767 - DNA, 505 bp, Homo sapiens
  misc_feature (296)..(315): n includes a, c, g, or t, or contains no nucleotide
  misc_feature (408)..(441): n includes a, c, g, or t, or contains no nucleotide
cagaccttttataggtaatgaagcagttcaaaacttgaaagaaaacaaaacctgtcctcagaattctataaagtgtattaagaatgttccttaaaggtttaagaagcagtaagcagcatctgaagccacaatctattataaatactttatttcaactagaaggtacaatctctcaggggtttcatagtttaaaaagctacaatcacatcatgttgtaactacgtaaaaaacagagctgtaaatggaactgcttggctttgaccatacacatttctgcccagcccttacagaatctnnnnnnnnnnnnnnnnnnnnttgctccagttaattgttcttgtatgtaagttgctttctattccagtatatccagagtggtgaaataacaaggccagccacgtagccaaaggnnnnnnnnnnnnnnnnnnnnnnnnnnnnnnnnnnaggagagaatgtatgagatcaaaaaagaacaaatgttttattattacttgagcacaagtgtaac

SEQ ID NO: 3768 - DNA, 100 bp, Homo sapiens
  misc_feature (34)..(34): n includes a, c, g, or t, or contains no nucleotide
gccaagattcccactcagctttgtgctcagatcncaggtcccaaggagtgacaggggcttcctcccaccttctgtccttgtccagtcatgtaaataatgt

SEQ ID NO: 3769 - DNA, 196 bp, Homo sapiens
gcctttacctcatatgagtctttgatcttgaaccgatacttttggatctcattgttgatatacctgaatttactttgtaagagattttaacttcacttcatgctgatgatgtatcaaattcattttatagaaagatttaaagtttttttctggaagtgatatatgtcaaattacatttcctactgcagtatttgag

SEQ ID NO: 3770 - DNA, 407 bp, Homo sapiens
  misc_feature (234)..(234): n includes a, c, g, or t, or contains no nucleotide
  misc_feature (335)..(351): n includes a, c, g, or t, or contains no nucleotide
gtggctcctgttgtcttgcgctctgggaagtcagatgtcatttcaggcctgcagtctcatcctgcccttgccatcctcccatcgatgtgccacgtgggtgtcacgtgtcccagatgcagtattcggcagccagccggggagggctacctcctcctcctcaccaccttggggcttctcatgggaaatgtgcccccgccccaggaccctctcccttgtggacaggcagggagatgnatgcgagtgcatgcagcaggggatggggccgtgtccgtgtgccccaccctccctcggctttactcctgcccagtgactgtgaccactgtccgtgttgcctnnnnnnnnnnnnnnnnnccccaaccccttcaccaaaggtcttggtacaaccagctgcccattttgtgaaattt

SEQ ID NO: 3771 - DNA, 74 bp, Homo sapiens
ttcacctctgactcctgccttggttacaggaggtggaggccggaaaggtcgcaccaagagagaagctgctgcca

SEQ ID NO: 3772 - DNA, 414 bp, Homo sapiens
  misc_feature (125)..(125): n includes a, c, g, or t, or contains no nucleotide
  misc_feature (316)..(363): n includes a, c, g, or t, or contains no nucleotide
  misc_feature (372)..(372): n includes a, c, g, or t, or contains no nucleotide
agctgctagagttctgtctggactttccagagaccagtattcccttttgctgcctctaaaaggcctgtccctgcagacatgagagacagcaggtctcatgggggtgacaagcttttttttttttncttaaagaattttcaaaatcaaattccagaatgattttacggagatatcccaggaaaattaaggcttctcttaaacactaaaaaggcatgtaattgcttgttagcaaaatggatatgacacatctctgatacttttttcattattggttgggctgagcagtcagaagacctggtcgtcgtcttgactttgnnnnnnnnnnnnnnnnnnnnnnnnnnnnnnnnnnnnnnnnnnnnnnnnagggacacngagtggcccttcatgtacatccatggtgtgctggcttaaaat

SEQ ID NO: 3773 - DNA, 51 bp, Homo sapiens
gttcatctacttcaggaatcagaaaggacactctggacttcagccaacagg

SEQ ID NO: 3774 - DNA, 512 bp, Homo sapiens
  misc_feature (222)..(255): n includes a, c, g, or t, or contains no nucleotide
  misc_feature (298)..(298): n includes a, c, g, or t, or contains no nucleotide
  misc_feature (444)..(444): n includes a, c, g, or t, or contains no nucleotide
  misc_feature (462)..(481): n includes a, c, g, or t, or contains no nucleotide
ctctaccaaggtcttcttgggctgggaaagcccatgtagggcaggccttctataagtgcgggcaccaagggcgcctacatccccaggccttgctggggtgcaggggtatatcaacttcccattagcaggagctccccagcggcaagcctggcccagtgggctcggtagtgcccagctggcaggcctgaggtgtacatagtccttcccggccatattaaccannnnnnnnnnnnnnnnnnnnnnnnnnnnnnnnnnaggtgcctttgctaggcccggagccgttggcccgggccggccnttgccctattcctctcctcctcctcctcctgggtcccccagggtggctgggcttgggctatgtgggtggtggtggcggggggtcttgggggcctctcagctcccgcccatgcctccctgatgggtgggcccagggcggcctctctntgaggagacctcacccannnnnnnnnnnnnnnnnnnnctgtaagtgcctgcactctgtattctattaa

SEQ ID NO: 3775 - DNA, 377 bp, Homo sapiens
  misc_feature (34)..(34): n includes a, c, g, or t, or contains no nucleotide
  misc_feature (43)..(48): n includes a, c, g, or t, or contains no nucleotide
  misc_feature (50)..(62): n includes a, c, g, or t, or contains no nucleotide
  misc_feature (64)..(68): n includes a, c, g, or t, or contains no nucleotide
  misc_feature (71)..(77): n includes a, c, g, or t, or contains no nucleotide
  misc_feature (79)..(79): n includes a, c, g, or t, or contains no nucleotide
  misc_feature (82)..(99): n includes a, c, g, or t, or contains no nucleotide
tcttcagtatgatcttgtgctgtgctatccgcangaaccgcgnnnnnngnnnnnnnnnnnnntnnnnnccnnnnnnngnaannnnnnnnnnnnnnnnnnggtgggattttttgtttgtttgttttgttttgtttgttgtttgttgtttgtttttttgccactaattttagtattcattctgcattgctagataaaagctgaagttactttatgtttgtcttttaatgcttcattcaatattgacatttgtagttgagcggggggtttggtttgctttggtttatattttttcagttgtttgtttttgcttgttatattaagcagaaatcctgcaatgaaaggtactatatttgctagactctagacaagatattgta

SEQ ID NO: 3776 - DNA, 441 bp, Homo sapiens
  misc_feature (133)..(148): n includes a, c, g, or t, or contains no nucleotide
  misc_feature (174)..(188): n includes a, c, g, or t, or contains no nucleotide
cagacactatgtagtctgttagattttataaagattggtagttatctgagcttaaacattttctcaattgtaaaataggtgggcacaagtattacacatcagaaaatcctgacaaaagggacacatagtgttnnnnnnnnnnnnnnnnattccttgtttgtaagtgttgtatgnnnnnnnnnnnnnnntaaaaagaaagtttatatcttgattattttgttgtctaaagctaaacaaaacttgcatgcagcagcttttgactgtttccagagtgcttataatatacataactccctggaaataactgagcactttgaattttttttatgtctaaaattgtcagttaatttattattttgtttgagtaagaattttaatattgccatattctgtagtatttttctttgtatatttctagtatggcacatgatatgagtcact

SEQ ID NO: 3777 - DNA, 593 bp, Homo sapiens
  misc_feature (27)..(53): n includes a, c, g, or t, or contains no nucleotide
  misc_feature (71)..(71): n includes a, c, g, or t, or contains no nucleotide
  misc_feature (79)..(80): n includes a, c, g, or t, or contains no nucleotide
  misc_feature (85)..(85): n includes a, c, g, or t, or contains no nucleotide
  misc_feature (90)..(90): n includes a, c, g, or t, or contains no nucleotide
  misc_feature (96)..(96): n includes a, c, g, or t, or contains no nucleotide
  misc_feature (101)..(101): n includes a, c, g, or t, or contains no nucleotide
  misc_feature (104)..(104): n includes a, c, g, or t, or contains no nucleotide
  misc_feature (116)..(116): n includes a, c, g, or t, or contains no nucleotide
  misc_feature (118)..(127): n includes a, c, g, or t, or contains no nucleotide
  misc_feature (135)..(135): n includes a, c, g, or t, or contains no nucleotide
  misc_feature (151)..(151): n includes a, c, g, or t, or contains no nucleotide
  misc_feature (157)..(157): n includes a, c, g, or t, or contains no nucleotide
  misc_feature (160)..(162): n includes a, c, g, or t, or contains no nucleotide
  misc_feature (173)..(173): n includes a, c, g, or t, or contains no nucleotide
  misc_feature (179)..(181): n includes a, c, g, or t, or contains no nucleotide
  misc_feature (194)..(194): n includes a, c, g, or t, or contains no nucleotide
  misc_feature (196)..(196): n includes a, c, g, or t, or contains no nucleotide
  misc_feature (238)..(256): n includes a, c, g, or t, or contains no nucleotide
  misc_feature (513)..(549): n includes a, c, g, or t, or contains no nucleotide
gggaccctcagccttgtttgtactgtnnnnnnnnnnnnnnnnnnnnnnnnnnnaagcacgatcagtccatnccagaggnnccggnagttnatgacnaagcnttnccaaatattttncnnnnnnnnnncgatatcnaacacttgtatctggncctctntgnnncccagcagtgnccttgnnncaatgtgaatgtncncgtctctgctaaaccaccattttatttggtttttgttttgtnnnnnnnnnnnnnnnnnnnttgccaaaatgagactctccgtcggcagctgggggaagggtctgagactccctttccttttggttttgggattacttttgatcctgggggaccaatgaggtgaggggggttctcctttgccctcagctttccccagcccctccggcctgggctgcccacaaggcttgtcccccagaggccctggctcctggtcgggaagggaggtggcctcccgccaacgcatcactggggctgggagcagggaaggacggcttggnnnnnnnnnnnnnnnnnnnnnnnnnnnnnnnnnnnnngatgttttatgtattatatctataatataaacatatcaaagtca

SEQ ID NO: 3778 - DNA, 542 bp, Homo sapiens
  misc_feature (26)..(26): n includes a, c, g, or t, or contains no nucleotide
  misc_feature (53)..(55): n includes a, c, g, or t, or contains no nucleotide
  misc_feature (59)..(60): n includes a, c, g, or t, or contains no nucleotide
  misc_feature (89)..(89): n includes a, c, g, or t, or contains no nucleotide
  misc_feature (129)..(129): n includes a, c, g, or t, or contains no nucleotide
  misc_feature (138)..(138): n includes a, c, g, or t, or contains no nucleotide
  misc_feature (144)..(145): n includes a, c, g, or t, or contains no nucleotide
  misc_feature (159)..(219): n includes a, c, g, or t, or contains no nucleotide
  misc_feature (344)..(344): n includes a, c, g, or t, or contains no nucleotide
  misc_feature (484)..(512): n includes a, c, g, or t, or contains no nucleotide
atacagctctcttcagagtaactgtnaaccttttataaccaacactagagttnnntttnnaaaagacaagatatttataatgacgactngtatagcttttaagttatttttctagtatgtggctttctntagccgtgntaacgnncaaactgttcatcnnnnnnnnnnnnnnnnnnnnnnnnnnnnnnnnnnnnnnnnnnnnnnnnnnnnnnnnnnnnnagcacaaggcattggccctctggactcctttctccttttctttcctctctaggctgctcctgaatcctgttctctgacatccgtggagcccctcctgcatccacctatgcctcctataagtccanttgaaatctcagcctccttcaacattttcttctcgtgtgtggcccacatccctccacttctccaacttctgtttaatctgatcacggctctttttaagccctggcagcattttggtccctgctccttgcccatagtaaannnnnnnnnnnnnnnnnnnnnnnnnnnnnagtttcaagtgggcaactctgctctctatt

SEQ ID NO: 3779 - DNA, 468 bp, Homo sapiens
cagttgctggacagtttgaggatgcagatgttgatcactgaaaatgatttatgcaagtttaagattctgctcctaagtgtaggagagaacttggtgcctcttccactctggagtgaagttaatgaaagtctttttccttttccaaaacccaacctgaaccagttctttcttgagacagactatactgagacaacaagttgtcaccagcagaagatagataatatgacctttattaacttgatgaattaacttaaccaagagggtatttgtagtttactatttaccctaaaactttctgtgtctgggtaccctctgagtaggcctataattcctaccttgactgtgtgcatcatttgtaagctagcagatctatgtggtgaaaatgcacaggagcttggtagactgcgggggaaagagagagctcctttcgccatgttttaccagtctgctgttataacctcttaggtt

SEQ ID NO: 3780 - DNA, 230 bp, Homo sapiens
ccctgtcccatgcaggccctttgaagcctcagctacccactttccttcatgaacatccccctcccaacactacccttccctgcactaaagccagcctgaccttccttcctgttagtggttgtatctgctttgaagggcctacctggcccctcgcctgtggagctcagccctgagctgtccccgtgttgcatgacagcattgactggtttacaggccctgctcctgcagca

SEQ ID NO: 3781 - DNA, 565 bp, Homo sapiens
gagtgtctcgactgcattgtgagagtgaatctttcaagatggatctaatcttagatgtaaacattcaaatttaccctgtagacttgggtgacaagtttcggttggtcatagctagtaccttgtatgaagatggtaccctggatgatggtgaatacaaccccactgatgataggccttccagggctgaccagtttgagtatgtaatgtatggaaaagtgtacaggattgagggagatgaaacttctactgaagcagcaacacgcctctctgcgtacgtgtcctatgggggcctgctcatgaggctgcagggggatgccaacaacctgcatggattcgaggtggactccagagtttatctcctgatgaagaagctagccttctgaacctcgcctgaagccagcctctctgccaagtcactcaggtcatgggcattgttcaagcctgagtggcagccgctcttgctcacctgttgaggaagggctggctcactgtccaccgtggcggcatctttaactggcctccactcaatgggaaactgactcgcctgtgaaagacacagtgggag

SEQ ID NO: 3782 - DNA, 415 bp, Homo sapiens
  misc_feature (179)..(257): n includes a, c, g, or t, or contains no nucleotide
ttctggtagtgtccacattgctcttcctggctctatgcacaaaggaagtggcaactgtcaaagatgccagatgcattggaggttcactagaagagcatgttgacaggaatgactcagtcaagttaatcaggagccaagtttatgcccataaggcttttcctgtttcagggagttaatgnnnnnnnnnnnnnnnnnnnnnnnnnnnnnnnnnnnnnnnnnnnnnnnnnnnnnnnnnnnnnnnnnnnnnnnnnnnnnnncctcctcacatttgtcctgcgctagataagcaatcttggtagaggatgggttagtggggctctcagaacttaagagatgtgccatcttgcatttggaaagtactttatccagaaaaaatgaaatcttactgaactcaggtacagcagtctcatcactc

SEQ ID NO: 3783 - DNA, 104 bp, Homo sapiens
cagcaccagatttaagatggataacaaactgcagttaatccctggggtctgtggattccgaatttcaaatcctcccattttgttggtctgttccttgcatgcta

SEQ ID NO: 3784 - DNA, 110 bp, Homo sapiens
  misc_feature (38)..(38): n includes a, c, g, or t, or contains no nucleotide
ccttttgtgcccagactctgctgtttttgcattgagancccctgaatttttttggccttcaaatcccaaggtaaatgcccaagagtgagcatttgactttggagtactgc

SEQ ID NO: 3785 - DNA, 341 bp, Homo sapiens
  misc_feature (78)..(78): n includes a, c, g, or t, or contains no nucleotide
  misc_feature (86)..(89): n includes a, c, g, or t, or contains no nucleotide
  misc_feature (92)..(116): n includes a, c, g, or t, or contains no nucleotide
  misc_feature (119)..(119): n includes a, c, g, or t, or contains no nucleotide
tccaaaggagtatctcaccactgcctttgaagtggaagaaagatgaaacccaggaaatatattcttccctctctcctncctttatnnnngannnnnnnnnnnnnnnnnnnnnnnnnctnccctacttctgccaccccaccaacgccttggactcctctctttgctgaagagacccaagtctcttgacacctcagagtgactgtaagctaccagtaagacaagtgggaagaggcacgttcatcaaacctgttactaaaccagcctagtcatagctcatccccatctctaaatgtgtccacacaaccacatctgccttttccacaagcttttcacaaagaagg

SEQ ID NO: 3786 - DNA, 166 bp, Homo sapiens
  misc_feature (114)..(129): n includes a, c, g, or t, or contains no nucleotide
tttcagtcagagctctcatctgaggcagcacatgaaggtgcataaagaagagaagcctcgtaaaacccggggcaaaaatatcagggtgaagactcacttaccctcttggaaagnnnnnnnnnnnnnnnngtctgtggctggtctccgttaagtatagggctttttg

SEQ ID NO: 3787 - DNA, 467 bp, Homo sapiens
  misc_feature (129)..(129): n includes a, c, g, or t, or contains no nucleotide
  misc_feature (222)..(222): n includes a, c, g, or t, or contains no nucleotide
  misc_feature (302)..(330): n includes a, c, g, or t, or contains no nucleotide
  misc_feature (381)..(435): n includes a, c, g, or t, or contains no nucleotide
tctcctggttacattttggattaaacctgtttcccggttatgtgtagggaacagcagagtgatgcacgaactttgaacattcgttatggggaaaacatcctttaacttcggggtcgtctgccagagcangggtctgggagggtccatgcagttcccgctggtgtggagggaaatgccctggtctggcctccgagcccccaggtccaccgtctcccctccccncatttgtaagaatagctacacactaacattttgggaaggagaggcacataactttttttaacatttggtaactaggttannnnnnnnnnnnnnnnnnnnnnnnnnnnntatatatttaattttcttaaattcccgttaaactctattttatggttttgnnnnnnnnnnnnnnnnnnnnnnnnnnnnnnnnnnnnnnnnnnnnnnnnnnnnnnnggtttctttagttctttactgtcactgtcatg

SEQ ID NO: 3788 - DNA, 457 bp, Homo sapiens
  misc_feature (73)..(73): n includes a, c, g, or t, or contains no nucleotide
  misc_feature (268)..(268): n includes a, c, g, or t, or contains no nucleotide
  misc_feature (273)..(273): n includes a, c, g, or t, or contains no nucleotide
  misc_feature (275)..(275): n includes a, c, g, or t, or contains no nucleotide
  misc_feature (277)..(279): n includes a, c, g, or t, or contains no nucleotide
  misc_feature (287)..(317): n includes a, c, g, or t, or contains no nucleotide
aaggagccgcccagacctagggctggactcaggagctgggggggcctcacctgttcccctgaggaccccgccnggacccggaggctcacagggaacaagacacggctgggttggatatgcctttgccggggttctggggcagggcgctccctggccgcagcagatgccctcccaggagtggaggggctggagagggggaggccttcgggaagaggcttcctgggccccctggtcttcggccgggtccccagcccccgctcctgccccnccccncncnnnctccgggnnnnnnnnnnnnnnnnnnnnnnnnnnnnnnnttgcctgccctgccttgcttggcacccgctccggcgaccctccccgctcccctgtcatttcatcgcggactgtgcggcctgggggtggggggcgggactctcacggtgacatgtttacagctgggtgtgactcagtaaag

SEQ ID NO: 3789 - DNA, 526 bp, Homo sapiens
  misc_feature (89)..(89): n includes a, c, g, or t, or contains no nucleotide
  misc_feature (99)..(99): n includes a, c, g, or t, or contains no nucleotide
  misc_feature (182)..(182): n includes a, c, g, or t, or contains no nucleotide
  misc_feature (205)..(205): n includes a, c, g, or t, or contains no nucleotide
  misc_feature (215)..(215): n includes a, c, g, or t, or contains no nucleotide
  misc_feature (227)..(227): n includes a, c, g, or t, or contains no nucleotide
  misc_feature (234)..(241): n includes a, c, g, or t, or contains no nucleotide
tctactcggccaaccagtgcaaagccctcatcaccatcctggtggtcctcggtgccttcatggtcacctggggcccctacatggttgtnatcgcctctnaggccctctgggggaaaagctccgtctccccgagcctggagacttgggccacatggctgtcctttgccagcgctgtctgccanccccctgatctatggactctggnacaagacagnttcgcaaagaantactggnnnnnnnntttggggaccggtattatcgggaaccatttgtgcaacgacagaggacttccaggctcttcagcatttccaacaggatcacagacctgggcctgtccccacacctcactgcgctcatggcaggtggacagcccctggggcacagcagcagcacgggggacactggcttcagctgctcccaggactcaggtaacctgcgtgctttataagcctctcacctgtcgcgttttccctgtgttgcgtttcccccgtgtcgcgtttcccctgtgcaggctcaagagctggcg

SEQ ID NO: 3790 - DNA, 317 bp, Homo sapiens
  misc_feature (30)..(30): n includes a, c, g, or t, or contains no nucleotide
  misc_feature (45)..(45): n includes a, c, g, or t, or contains no nucleotide
  misc_feature (56)..(56): n includes a, c, g, or t, or contains no nucleotide
  misc_feature (59)..(79): n includes a, c, g, or t, or contains no nucleotide
tcagaacctcgagagcagaacatgagaaanctcagagctctgganccgaaagcagnaannnnnnnnnnnnnnnnnnnnnacaacattattaccatcgattcagtgcctggataaagaggaaagcttacttgtttaatggcagccacatgcacgaagatgctaagaagaaaaagaattccaaatcctcaacttttgaggtttcggctctccaatttaactctttggcaacaggaaacaggttttgcaagttcaaggttcactccctatatgtgattataggaattgtttgtggaaatggattaacatacccgtctatg

SEQ ID NO: 3791 - DNA, 574 bp, Homo sapiens
  misc_feature (66)..(90): n includes a, c, g, or t, or contains no nucleotide
  misc_feature (105)..(133): n includes a, c, g, or t, or contains no nucleotide
  misc_feature (182)..(222): n includes a, c, g, or t, or contains no nucleotide
  misc_feature (491)..(491): n includes a, c, g, or t, or contains no nucleotide
ttggccactccatgggaggtcatggagctctgatctgtgctttgaaaaatcctggaaaatacaaannnnnnnnnnnnnnnnnnnnnnnnnttgcaaccctgtacnnnnnnnnnnnnnnnnnnnnnnnnnnnnnagtggatatttgggaacagatcaaagtaaatggaaggcttatgatgctnnnnnnnnnnnnnnnnnnnnnnnnnnnnnnnnnnnnnnnnngacatactaattgatcaagggaaagatgaccagtttcttttagatggacagttactccctgataacttcatagctgcctgtacagaaaagaaaatccccgttgtttttcgattgcaagagggttatgatcatagctactacttcattgcaacctttattactgaccacatcagacatcatgctaaatacctgaatgcatgaaaaaactccaaataagagaatctcttcaggattataaaagttgtaaaatgcaactgtattgctgagcnaaaaaaaaaaaaaattcaaaacattggattttatagtgctaaaagggctttattctatagttgaatcacctctgaataaagat

SEQ ID NO: 3792 - DNA, 576 bp, Homo sapiens
  misc_feature (335)..(335): n includes a, c, g, or t, or contains no nucleotide
  misc_feature (337)..(345): n includes a, c, g, or t, or contains no nucleotide
  misc_feature (424)..(466): n includes a, c, g, or t, or contains no nucleotide
  misc_feature (471)..(472): n includes a, c, g, or t, or contains no nucleotide
  misc_feature (474)..(474): n includes a, c, g, or t, or contains no nucleotide
  misc_feature (483)..(486): n includes a, c, g, or t, or contains no nucleotide
ccatttttaagaagaggtgttccagttctgcatctgataccgtctcctttccctgaagtctggcacaccatggatgacaatgaagaaaatttggatgaatcaaccattgacaatctaaacaaaatcctacaagtctttgtgttggaatatcttcatttgtaatactctgatttagtttaggataattggttctagaattgaattcaaaagtcaaggcatcatttaaaataatctgatttcagacaaatgctgtgtggaaacatctatcctatagatcatcctattcttatgtgtctttggttatcagatcaattacagaataattgtgttgtganannnnnnnnnaaattgctcattaatttttatttacagattgaaaaagaggcaccgtgtaaagaaaatggcaaaataaatatctttccannnnnnnnnnnnnnnnnnnnnnnnnnnnnnnnnnnnnnnnnnnggaannangtagccttnnnnattttatgattttttcatatgtggaaatctattacatgtaatacaaaacaaacatgtagtttgaaggcggtcagatttctttgagaaatc

SEQ ID NO: 3793 - DNA, 99 bp, Homo sapiens
  misc_feature (51)..(51): n includes a, c, g, or t, or contains no nucleotide
  misc_feature (54)..(61): n includes a, c, g, or t, or contains no nucleotide
  misc_feature (63)..(65): n includes a, c, g, or t, or contains no nucleotide
  misc_feature (68)..(72): n includes a, c, g, or t, or contains no nucleotide
  misc_feature (74)..(74): n includes a, c, g, or t, or contains no nucleotide
tttccgcgccggtgagtagcactctctgagagctccaatttcatccgtctnccnnnnnnnncnnnctnnnnncnccgccacaatggtgcgcatgaatgt

SEQ ID NO: 3794 - DNA, 386 bp, Homo sapiens
  misc_feature (90)..(104): n includes a, c, g, or t, or contains no nucleotide
  misc_feature (277)..(277): n includes a, c, g, or t, or contains no nucleotide
ctttaaactgcatgctgccaagtgccatttggggtcagcatcctcgtttcaacacagtgtgctctctagttatcatgtgtaacgtgggtnnnnnnnnnnnnnnntagactagaggacacgttagagatgcccttccctgctccatccctgtggcaccattatggttttttggctgtttgtatatacggttacgtattaactctggaatcctatgggctcatcttgctcacccaatgtgggagtctggtttgagcaagcgagctgaatgtgactattnaaaaaaaatttaaaaaaaaaaaagaaaatcttatgtactatccaaaagtgccagaatgactcttctgtgcattcttcttaaagagctgcttggttatccaaaaatgaaa

SEQ ID NO: 3795 - DNA, 392 bp, Homo sapiens
cagcgtgaccctaagcgaggaggccgcgggcgcctacgcgccgctcacggcccagggcaccattctcatcaaccgggtgctggcctcgtgctacgcggtcatcgaggagcacagctgggcgcaccgggccttcgcgcccttccgcctggcgcacgcgctcctggctgcactggcgcccgcgcgcacggaccgcggcggggacagcggcggcggggaccgcgggggcggcggcggcagagtagccctaaccgctccaggtgctgccgacgctccgggtgcgggggccaccgcgggcatccactggtactcgcagctgctctaccaaataggcacctggctcctggacagcgaggccctgcacccgctgggcatggcggtcaagtccagctgaa

SEQ ID NO: 3796 - DNA, 380 bp, Homo sapiens
  misc_feature (153)..(191): n includes a, c, g, or t, or contains no nucleotide
  misc_feature (230)..(230): n includes a, c, g, or t, or contains no nucleotide
tcctcagctgaaaaaggaagttggttatgccaccttcttggccttaatggcattaaatgaaatttataggaagaaggtttttgctcagtacctggcatgcaacagacattggataaatgttagttggatccagatatacacagaaagatatcnnnnnnnnnnnnnnnnnnnnnnnnnnnnnnnnnnnnnnngtccatagtctagaaagccagtgcttctaatccttaagncagatctttgactaccttttcagttgcttctttaacactctttgttgcttccctgagctttttaaataccctgtgaaaattttctttcctcccttggtcatcatgcatctaattgtggggaaatgtttgtcaaaccaacctgcaaagcag

SEQ ID NO: 3797 - DNA, 589 bp, Homo sapiens
  misc_feature (29)..(29): n includes a, c, g, or t, or contains no nucleotide
  misc_feature (496)..(497): n includes a, c, g, or t, or contains no nucleotide
  misc_feature (500)..(500): n includes a, c, g, or t, or contains no nucleotide
  misc_feature (514)..(514): n includes a, c, g, or t, or contains no nucleotide
  misc_feature (521)..(521): n includes a, c, g, or t, or contains no nucleotide
  misc_feature (525)..(525): n includes a, c, g, or t, or contains no nucleotide
  misc_feature (527)..(531): n includes a, c, g, or t, or contains no nucleotide
  misc_feature (533)..(534): n includes a, c, g, or t, or contains no nucleotide
  misc_feature (537)..(538): n includes a, c, g, or t, or contains no nucleotide
  misc_feature (540)..(541): n includes a, c, g, or t, or contains no nucleotide
acttaggacagaagcctacctcatcccanggcctgcccctccgtgcatagctctgcctttgggtcttgttcatagtgctgttcaggcaaaatggaatagtctcaggtgggaacaccttctcttgctagctccaggaaggctttgtgggaaatgagttgagaccatggacttgggagttgggggccagagttgagcctggacttgaccaattaattcccttacctttcagcccaagatagctacatgtctttacttgctgtataagttttccttttgtcctgggggtgcctgattgatcctatctcttcacccttcattctttcaacaaacatgccatctatctcccaggacatttattcccttctattcaaggccagttaggaatgcaattattttttttttcagttaaatacagacttgtttggacgcaaggtaccctttctctttttaaaaactttttatcatgaaaactttcaaatacaaaaataaaatggtnnagngtgaacctccatgnacccagnaaanannnnnannaannannaacatgtaccattatttcatctctcttcctgcacatgctcttctgatg

SEQ ID NO: 3798 - DNA, 613 bp, Homo sapiens
  misc_feature (264)..(442): n includes a, c, g, or t, or contains no nucleotide
  misc_feature (563)..(565): n includes a, c, g, or t, or contains no nucleotide
  misc_feature (568)..(570): n includes a, c, g, or t, or contains no nucleotide
  misc_feature (578)..(581): n includes a, c, g, or t, or contains no nucleotide
  misc_feature (583)..(583): n includes a, c, g, or t, or contains no nucleotide
tttatgccctcttggggaaagattttaggaagaaagcaaggcagtccattcagggaattctggaggcagccttcagtgaggagctcacacgttccacccactgtccctcaaacaatgtcatttcagaaagaaatagtacaactgtgtgaaaatgtggagcagccaacaagcaggggctcttaggcaatcacatagtgaaagtttataagaggatgaagtgatatggtgagcagcggacttcaaaaactgtcaaagaatcaatcnnnnnnnnnnnnnnnnnnnnnnnnnnnnnnnnnnnnnnnnnnnnnnnnnnnnnnnnnnnnnnnnnnnnnnnnnnnnnnnnnnnnnnnnnnnnnnnnnnnnnnnnnnnnnnnnnnnnnnnnnnnnnnnnnnnnnnnnnnnnnnnnnnnnnnnnnnnnnnnnnnnnnnnnnnnnnnnnnnntaaacattagttctatttctatcccaaactaagctatgtgaaataagagaagctactttgtttttaaatgatgttgaatatttgtcgatatttccatcattaaatttttccttagcattgnnnaannnttccagannnnanttaaaaccatttcttgttctccaaagtgag

SEQ ID NO: 3799 - DNA, 529 bp, Homo sapiens
  misc_feature (77)..(105): n includes a, c, g, or t, or contains no nucleotide
  misc_feature (109)..(109): n includes a, c, g, or t, or contains no nucleotide
  misc_feature (241)..(255): n includes a, c, g, or t, or contains no nucleotide
  misc_feature (310)..(310): n includes a, c, g, or t, or contains no nucleotide
  misc_feature (472)..(473): n includes a, c, g, or t, or contains no nucleotide
  misc_feature (481)..(484): n includes a, c, g, or t, or contains no nucleotide
  misc_feature (486)..(487): n includes a, c, g, or t, or contains no nucleotide
  misc_feature (498)..(502): n includes a, c, g, or t, or contains no nucleotide
catggaaccagatggcaaggatgaggaggaggaggaggaggaagagaaggcagagaaaggcctcatgttgcctccannnnnnnnnnnnnnnnnnnnnnnnnnnnncccnagctggacggctccctcatctcacggcgggcagtttatgtgtgacctggacacagacagagacagagccaggcccggccctcccgcccccgacctgaccacgccggcctagggttccagactggttggactnnnnnnnnnnnnnnncactggagtggaacactgcctcccactttcttgggacttggagggaggtggaacngcacactggacttctcccgtctctagggctgcatggggagcccggggagctgagtagtggggatccagagaggacccccgcccccagagacttggttttggctccagccttcccctggccccgtgacactcaggagttaataaatgccttggaggaaaacannaaaaaaannnnannaaaaaaaaaannnnncctggccccgtgacactcaggagctca

SEQ ID NO: 3800 - DNA, 421 bp, Homo sapiens
caactgtgagcgtaccttcattgcgatcaaaccagatggggtccagcggggtcttgttggagagattatcaagcgttttgagcagaaaggattccgccttgtgggtctgaaattcatgcaagcttccgaagatcttctcaaggaacactacgttgacctgaaggaccgtccattctttgccggcctggtgaaatacatgcactcagggccggtagttgccatggtctgggaggggctgaatgtggtgaagacgggccgagtcatgctcggggagaccaaccctgcagactccaagcctgggaccatccgtggagacttctgcatacaagttggcaggaacattatacatggcagtgattctgtggagagtgcagagaaggagatcggcttgtggtttcaccctgaggaactggtagattac

SEQ ID NO: 3801 - DNA, 416 bp, Homo sapiens
  misc_feature (46)..(46): n includes a, c, g, or t, or contains no nucleotide
  misc_feature (49)..(50): n includes a, c, g, or t, or contains no nucleotide
  misc_feature (52)..(52): n includes a, c, g, or t, or contains no nucleotide
  misc_feature (54)..(55): n includes a, c, g, or t, or contains no nucleotide
  misc_feature (57)..(57): n includes a, c, g, or t, or contains no nucleotide
  misc_feature (310)..(325): n includes a, c, g, or t, or contains no nucleotide
tgattgacctcatcgcagccgtgcagaagcagcagcagcagacagncanncncnncntcaccgtgcactgcagtgccggagctgggcgaacaggtacattcatagccctcagcaacattttggagcgagtaaaagccgagggacttttagatgtatttcaagctgtgaagagtttacgacttcagagaccacatatggtgcaaaccctggaacagtatgaattctgctacaaagtggtacaagattttattgatatattttctgattatgctaatttcaaatgaagattcctgccttaaaatattttttnnnnnnnnnnnnnnnntattttgtaaaaatcatgttaatttatttcatagttgacattaatatcttccctaatttctttgtatatattttgttatgccttaaaggcc

SEQ ID NO: 3802 - DNA, 408 bp, Homo sapiens
  misc_feature (47)..(47): n includes a, c, g, or t, or contains no nucleotide
  misc_feature (93)..(93): n includes a, c, g, or t, or contains no nucleotide
  misc_feature (101)..(101): n includes a, c, g, or t, or contains no nucleotide
  misc_feature (136)..(136): n includes a, c, g, or t, or contains no nucleotide
  misc_feature (173)..(188): n includes a, c, g, or t, or contains no nucleotide
aagatgaagctgcagggacagttcaaaggcctggtgaaggctgcccngcgaggttcccaggtgggacacaaaaaccgcagaaaggatcgtcgnaccctganggcccagggcccctgggctgccctgtggtccagtntgaggccctttcagcccccaggctgccttgccaccannnnnnnnnnnnnnnnattctggcagagcctggactcaggatgacttggaactagggcttggctctcagaagtcctggattttggaaactccaaatggaatcacccttcagagacatccctggtgcctggagatgggaatgtggcctcagtgcctctgagtaggtgccatgaggcacctttgctttctgcccagagtggccatgagcaccagaacagatgatctccatttccgcca

SEQ ID NO: 3803 - DNA, 88 bp, Homo sapiens
agcagtgttagcttagttctcttttgatgtaggttattatgattagctttgtcactgtttcactactcagcatggaaacaagatgaaa

SEQ ID NO: 3804 - DNA, 238 bp, Homo sapiens
  misc_feature (28)..(42): n includes a, c, g, or t, or contains no nucleotide
  misc_feature (46)..(46): n includes a, c, g, or t, or contains no nucleotide
  misc_feature (83)..(83): n includes a, c, g, or t, or contains no nucleotide
  misc_feature (104)..(104): n includes a, c, g, or t, or contains no nucleotide
  misc_feature (166)..(166): n includes a, c, g, or t, or contains no nucleotide
  misc_feature (173)..(173): n includes a, c, g, or t, or contains no nucleotide
gacaggccttcatccgcaaggtgttccnnnnnnnnnnnnnnnagcngtcggtgaccctgtccacggtgtctgtgttcactttngttgcggaggtgaagggcttngtccgggagaatgtctggacctactatgtctcctatgctgtcttcttcatctctctcatcgncctcagntgttgtggggacttccggcgaaagcacccctggaaccttgttgcactgtcggtcctgaccgccag

SEQ ID NO: 3805 - DNA, 281 bp, Homo sapiens
  misc_feature (28)..(28): n includes a, c, g, or t, or contains no nucleotide
  misc_feature (50)..(50): n includes a, c, g, or t, or contains no nucleotide
  misc_feature (119)..(120): n includes a, c, g, or t, or contains no nucleotide
aagtacttggtgcagtcggagctttacntgagatattcacagaattgganatttcctatttcctgcttagacggcttctaggtgtacgcactgaaggagacaagaaagcagcaaaggtnnaaaagctgtctaagaatgaagtgctcatggtgaacataggatccctgtcaacaggagggagagttagtgctgtcaaggccgatttgggtaaaattgttttgaccaatccagtgtgcacagaggtaggagaaaaaattgcccttagccgaagagttgaaaaa

SEQ ID NO: 3806 - DNA, 527 bp, Homo sapiens
  misc_feature (43)..(57): n includes a, c, g, or t, or contains no nucleotide
  misc_feature (364)..(364): n includes a, c, g, or t, or contains no nucleotide
  misc_feature (366)..(369): n includes a, c, g, or t, or contains no nucleotide
  misc_feature (371)..(461): n includes a, c, g, or t, or contains no nucleotide
  misc_feature (463)..(463): n includes a, c, g, or t, or contains no nucleotide
  misc_feature (472)..(472): n includes a, c, g, or t, or contains no nucleotide
  misc_feature (499)..(500): n includes a, c, g, or t, or contains no nucleotide
  misc_feature (502)..(502): n includes a, c, g, or t, or contains no nucleotide
caaagcatactcttgcccctcaggtgttgcttgtgtacatcgnnnnnnnnnnnnnnncttcacctgcagccaacggcctggaatcgcaaagagacaccactctgggcagagcagagcagggtatggggtggggagagagggtggagggttttataaacaaacttaacagcaatattgaaaggaggtgggggattgagggagggacagagtgttggagggccagagactagtcctgagatggaaacagcaacttgtacagtggctgagaaaataggatatagttttgatttttttaattgtaaaatattttggagggagaacaaaatcttttaacattttgaataaatttagagttttataaaanannnnannnnnnnnnnnnnnnnnnnnnnnnnnnnnnnnnnnnnnnnnnnnnnnnnnnnnnnnnnnnnnnnnnnnnnnnnnnnnnnnnnnnnnnnnnntngaggctacnacttaagtgatgtcaagatgtcctganngntgccaaccagctgtcagtgtgactg

SEQ ID NO: 3807 - DNA, 267 bp, Homo sapiens
acaatgggctctatcttcatcacacaactcatcacatgcttccagaaatattcttggtgctgccacctagaggaagtatttcggaaggtacagcaatcatttgaaactccaagggccaaagctcaaatgcccaccatagaacgactgtccatgacaagatatttctacctctttcctggcaattgaaaatggaagccacaagcagcccagccctccttaatcaacttcaaggagcaccttcattagtacagcttgcatatttaacat

SEQ ID NO: 3808 - DNA, 408 bp, Homo sapiens
  misc_feature (84)..(130): n includes a, c, g, or t, or contains no nucleotide
  misc_feature (275)..(289): n includes a, c, g, or t, or contains no nucleotide
cccaacggggacacaaggaggcagaggagctaacccctctactccactttcaaaactacattttaaagggaatgtgtatgtgannnnnnnnnnnnnnnnnnnnnnnnnnnnnnnnnnnnnnnnnnnnnnntttttttttttgcttgtttttaaagccaaaacaaaaaacaaccaagcactcttccatatataaatctggctgtattcagtagcaatacaagagatatgtagaaagactctttggttcacattccgatattaaaatagtgacatgnnnnnnnnnnnnnnntttaaaagctttcacgtgggataaatgattttctttttttcttttctttcttcctatggtcttgtctgaataaactactctcctgaataaaacaacatccaacccaggtcattgaaatg

SEQ ID NO: 3809 - DNA, 182 bp, Homo sapiens
  misc_feature (45)..(45): n includes a, c, g, or t, or contains no nucleotide
cggccagggttctcgctcttgtcgtgtctgttcaaaccggcacgntctgatccggaaatatggcctcaatatgtgccgccagtgtttccgtcagtacgcgaaggatatcggtttcattaagttggactaaatgctcttccttcagaggattatccggggcatctactcaatgaaaaaccatg

SEQ ID NO: 3810 - DNA, 566 bp, Homo sapiens
  misc_feature (26)..(26): n includes a, c, g, or t, or contains no nucleotide
  misc_feature (67)..(67): n includes a, c, g, or t, or contains no nucleotide
  misc_feature (81)..(81): n includes a, c, g, or t, or contains no nucleotide
  misc_feature (86)..(86): n includes a, c, g, or t, or contains no nucleotide
  misc_feature (98)..(112): n includes a, c, g, or t, or contains no nucleotide
  misc_feature (265)..(301): n includes a, c, g, or t, or contains no nucleotide
  misc_feature (541)..(541): n includes a, c, g, or t, or contains no nucleotide
gcaagacagcagctgctatgcacacntggagtccaccataccaaagcacgaaccagactgtttcttnggggtcagccctanaccgngatttcagtctnnnnnnnnnnnnnnncatctggctaaacaacctgacaaactgtggccaggggaaccgacacaaccctcaagcatttctatgtattgagaattgtcagtgccctaaggtatccattggttcccttgatgccaacttacaatttttaccggatttgctgaaatgggcacnnnnnnnnnnnnnnnnnnnnnnnnnnnnnnnnnnnnngaacacaatgtctcatactaaccaagaagcaagaaaagccccatgctttcatttttcacttggagtgacaatgggagaggtcaggaatcaagttcactttcaagatctaagggagtccactatctgtgcaattgtatttggcttttttttgcactgtttcaatgctggtaattgaaaccattttaatatatttggttgtattcactttatatgtccttccaaaaatgttgttgtgtacanaccatgctttcaatgttggcttcca

SEQ ID NO: 3811 - DNA, 535 bp, Homo sapiens
taagatcagccatatttcattttgaatctgcagtggaaaaaaagcccacatttgaggtggctcatctagacctggcaagaatgtatatagaagcaggcaatcacagaaaagctgaagagaattttcaaaaattgttatgcatgaaaccagtggtagaagaaacaatgcaagacatacatttctactatggtcggtttcaggaatttcaaaagaaatctgacgtcaatgcaattatccattatttaaaagctataaaaatagaacaggcatcattaacaagggataaaagtatcaattctttgaagaaattggttttaaggaaacttcggagaaaggcattagatctggaaagcttgagcctccttgggttcgtctataaattggaaggaaatatgaatgaagccctggagtactatgagcgggccctgagactggctgctgactttgagaactctgtgagacaaggtccttaggcacccagatatcagccactttcacatttcatttcattttatgctaacatttactaatcatc

SEQ ID NO: 3812 - DNA, 451 bp, Homo sapiens
  misc_feature (94)..(94): n includes a, c, g, or t, or contains no nucleotide
  misc_feature (246)..(274): n includes a, c, g, or t, or contains no nucleotide
  misc_feature (417)..(419): n includes a, c, g, or t, or contains no nucleotide
  misc_feature (421)..(421): n includes a, c, g, or t, or contains no nucleotide
accccaattgtgtggaagtggatgtgaacttcaatccggaccccgccgacctggtgctctccagtgtgccaggcggggagctcttcaaccctcngaagcacaagtttgctgaggaggacctgaagccccagcctatgatcaaaaaggccaagaaggtctttgtccccgacgagcagaaggatgaaaagtactggacaagacgcaagaagaacaacgtggcagctaaacggtcacgggatgcccggnnnnnnnnnnnnnnnnnnnnnnnnnnnnnggcagccttcctggagaaggagaacacagccctgcggacggaggtggccgagctacgcaaggaggtgggcaagtgcaagaccatcgtgtccaagtatgagaccaaatacgggcccttgtaacccgtgccccccgcccgggcgnnntnctgcctgcacctcagacctctgcctggggg

SEQ ID NO: 3813 - DNA, 434 bp, Homo sapiens
  misc_feature (168)..(168): n includes a, c, g, or t, or contains no nucleotide
  misc_feature (171)..(192): n includes a, c, g, or t, or contains no nucleotide
  misc_feature (198)..(198): n includes a, c, g, or t, or contains no nucleotide
ttcgagcgcgtctaccgagcccaggtgaactgcagcgagtacttcccgctgttcctcgccacgctctgggtcgccggcatcttctttcatgaaggggcggcggccctgtgcggcctggtctacctgttcgcgcgcctccgctacttccagggctacgcgcgctccgcncannnnnnnnnnnnnnnnnnnnnngcgagngcgcgcgccctctggctgctggtggcgctggctgcgctcggcctgctcgcccacttcctcccggccgcgctgcgcgccgcgctcctcggacggctccggacgctgctgccgtgggcctgagaccaaggcccccgggccgacggagccgggaaagaagagccggagcctccagctgccccggggaggggcgctcgcttccgcatcctagtctctatcattaaagttctagtgaccga

SEQ ID NO: 3814 - DNA, 535 bp, Homo sapiens
  misc_feature (125)..(147): n includes a, c, g, or t, or contains no nucleotide
  misc_feature (502)..(510): n includes a, c, g, or t, or contains no nucleotide
gtgcaaccaggtagcagcatgtctaccagaaaaatggtttgaaaattctgccatgaggacatctattccacagctagaaaacttcattcagtttttattgcagtctgcacataaattatctagannnnnnnnnnnnnnnnnnnnnnnagaaataattcttattttggtgaaaataaaagctttgaatcaagcagaatccttcataggagagcatcacctagaccatcttaaatcactaattaaagaagattgaataaactttattggaaaatgctaaaattttaatatagttacactcagttcctttgtttgagaagaagctggtgcctctctcttctttattccctgtaatagaaggtaggatttgaaaaaaagcaggactccacctctgtattcccccgtgctttaccttctggcatcatgaaaagctgccatgattctgtggtgttctaaggaattaaatgcactggagctttaagagctcaacgtgtttccctttgannnnnnnnnctggtctttcaattttcttaagagg

SEQ ID NO: 3815 - DNA, 449 bp, Homo sapiens
  misc_feature (70)..(70): n includes a, c, g, or t, or contains no nucleotide
  misc_feature (72)..(72): n includes a, c, g, or t, or contains no nucleotide
  misc_feature (77)..(77): n includes a, c, g, or t, or contains no nucleotide
  misc_feature (324)..(354): n includes a, c, g, or t, or contains no nucleotide
ctctctgggcctgtgcagtgagcatggggattcccatcaaggggcctggcacctgtgctagttacgtagncngctgntcacgcgctcactcctgaccacatgcacgttccctagatgcagactgctttgaactttaaagctgtacaatttggttatgtttgtgctgacttaaaatatattttaatgaggaaaaaataatggagaaccctgggaaggacctggttcttttgcttctcggggaactgtaagccctcgcgttctgggaatcgctctctgctgctctttcctggaagctaagcctgtctccaccgcccgaggcctgcnnnnnnnnnnnnnnnnnnnnnnnnnnnnnnnttggaccttgcgtgcgggggagggggtgctcggtccgagcccgctcctttctgtacacctagcgctgcccgccccgcttgtgtctgaggtcgtgt

SEQ ID NO: 3816 - DNA, 577 bp, Homo sapiens
  misc_feature (138)..(138): n includes a, c, g, or t, or contains no nucleotide
  misc_feature (166)..(166): n includes a, c, g, or t, or contains no nucleotide
  misc_feature (180)..(181): n includes a, c, g, or t, or contains no nucleotide
  misc_feature (208)..(209): n includes a, c, g, or t, or contains no nucleotide
  misc_feature (353)..(353): n includes a, c, g, or t, or contains no nucleotide
aaagccgctgtgtcctgcctcagcacaaagacccagtgtcatttgctcctcctgttcctgtgccactccagaacctcagcagatctgagccaccgcctgccagtgtgagaggcggccactttcatggcagctcatcangcgcagggccccagacagcttcccagcnggccctagagcccnngcctgggccaatgatggagggcggccnnccagcccagggcctgcccatccagaagggactccccagggcctgggggaggagacccttggaaaagtcctctcttcccagctcctgattctggatctgagattctcagatcacaggcccctgtgctccaggccgaggctgggcnaccctcagggagatccagagactcatgcccatggccatccatgcgtggacgctgtgtggagagtccaggatgacgggatcccgcacaagctcccttcagtccttcagggctgggccatgtggttgatttttctaaagctggagaaaggaagaattgtgccttgcatattacttgagcttaaactgacaacctggatgtaaataggagcctttctactggtttat

SEQ ID NO: 3817 - DNA, 416 bp, Homo sapiens
  misc_feature (153)..(153): n includes a, c, g, or t, or contains no nucleotide
  misc_feature (184)..(204): n includes a, c, g, or t, or contains no nucleotide
  misc_feature (324)..(324): n includes a, c, g, or t, or contains no nucleotide
  misc_feature (328)..(328): n includes a, c, g, or t, or contains no nucleotide
  misc_feature (330)..(331): n includes a, c, g, or t, or contains no nucleotide
gtccctgagaaacatattgtgatgaagtggaggtttaaatcttggccagagggacactttgccaccatcaccttgaccttcatcgacaagaacggagagactgagctgtgcatggaaggtcgaggcatccctgctcctgaggaagagcggacncgacagggctggcagcggtactactttgagnnnnnnnnnnnnnnnnnnnnntatggcgcacgcttattttagggccagcggcaggggactccagcctgctggacacttcagtccagctctctcctgactggggcttgcgactcacaggattgcatcgtcccagctgctaancttngnnccggggcccctcccttccacatataccttgggtttgtgcatgttttctgctgggtgggttcagagggcaatttctcttttatgtg

SEQ ID NO: 3818 - DNA, 494 bp, Homo sapiens
  misc_feature (207)..(207): n includes a, c, g, or t, or contains no nucleotide
  misc_feature (209)..(212): n includes a, c, g, or t, or contains no nucleotide
  misc_feature (261)..(261): n includes a, c, g, or t, or contains no nucleotide
  misc_feature (264)..(264): n includes a, c, g, or t, or contains no nucleotide
  misc_feature (269)..(269): n includes a, c, g, or t, or contains no nucleotide
  misc_feature (298)..(298): n includes a, c, g, or t, or contains no nucleotide
  misc_feature (310)..(310): n includes a, c, g, or t, or contains no nucleotide
  misc_feature (337)..(358): n includes a, c, g, or t, or contains no nucleotide
  misc_feature (373)..(373): n includes a, c, g, or t, or contains no nucleotide
  misc_feature (377)..(377): n includes a, c, g, or t, or contains no nucleotide
  misc_feature (380)..(387): n includes a, c, g, or t, or contains no nucleotide
  misc_feature (389)..(392): n includes a, c, g, or t, or contains no nucleotide
  misc_feature (398)..(398): n includes a, c, g, or t, or contains no nucleotide
  misc_feature (402)..(402): n includes a, c, g, or t, or contains no nucleotide
  misc_feature (405)..(405): n includes a, c, g, or t, or contains no nucleotide
  misc_feature (407)..(407): n includes a, c, g, or t, or contains no nucleotide
  misc_feature (409)..(410): n includes a, c, g, or t, or contains no nucleotide
  misc_feature (412)..(419): n includes a, c, g, or t, or contains no nucleotide
  misc_feature (423)..(424): n includes a, c, g, or t, or contains no nucleotide
  misc_feature (426)..(426): n includes a, c, g, or t, or contains no nucleotide
  misc_feature (429)..(462): n includes a, c, g, or t, or contains no nucleotide
acagacggacgtcttcctcatctgcttctccctcgtcagcccagcctcttatgagaacgtccgcgccaagtggttcccagaagtgcggcaccactgccccagcacacccatcatcctggtgggcaccaagctggacctgcgggacgacaaggacaccatcgagaaactgaaggagaagaagctggctcccatcacctacccgcaggncnnnnggcactggccaaggagattgactcggtgaaatacctggagtgctcagcnctnacccnagagaggcctgaaaaccgtgttcgacgangccatccgggcngtgctgtgccctcagcccacgcggcannnnnnnnnnnnnnnnnnnnnnctcctctaggggttngcanccnnnnnnnncnnnntagatnggtntgntncnncnnnnnnnnaggnncncgnnnnnnnnnnnnnnnnnnnnnnnnnnnnnnnnnnggagcccttcacgggacgctacagcctgtgcc

SEQ ID NO: 3819 - DNA, 279 bp, Homo sapiens
  misc_feature (169)..(184): n includes a, c, g, or t, or contains no nucleotide
ggtcaaggcaacatctccacacagaaaatctgcaccagttatgtaagctaaaaagctgtgtgaacccaggtgtcccggaaaggggctgcaggacacagcaaaatgccagcagcatgccggacccctcccttccatcctcctctccaaagaagagaggtcaggaaaaacnnnnnnnnnnnnnnnngaagggtcatgtgttaactataatcacatttatggtttggaaccatcaccccaaggtaaaaaaaaaataaaaggtattcccaggtatgtttggca

SEQ ID NO: 3820 - DNA, 395 bp, Homo sapiens
  misc_feature (77)..(113): n includes a, c, g, or t, or contains no nucleotide
  misc_feature (225)..(245): n includes a, c, g, or t, or contains no nucleotide
  misc_feature (313)..(329): n includes a, c, g, or t, or contains no nucleotide
caccgtcatcgtcatggtgggcctccccgcccggggcaagacctacatctccaagaagctgactcgctacctcaacnnnnnnnnnnnnnnnnnnnnnnnnnnnnnnnnnnnnnagtatcgccgggaggctgtgaagcagtacagctcctacaacttcttccgccccgacaatgaggaagccatgaaagtccggaagcaatgtgccttagctgccttgagagatgnnnnnnnnnnnnnnnnnnnnnaagggggacaaattgcggttttcgatgccaccaatactactagagagaggagacacatgatccttcannnnnnnnnnnnnnnnnactttaaggcgtttttcatcgagtcggtgtgcgacgaccctacagttgtggcctccaatatcatgg

SEQ ID NO: 3821 - DNA, 388 bp, Homo sapiens
  misc_feature (49)..(64): n includes a, c, g, or t, or contains no nucleotide
  misc_feature (169)..(183): n includes a, c, g, or t, or contains no nucleotide
cagtgtaaagctgccctggatgagcagtttgaacctcagaagactctgnnnnnnnnnnnnnnnntggctgaccagcaacaactgagagacacttttagaaaagttgtagaccactttggaagactggacattttggtcaataatgctggagtgaataataagaaaaacnnnnnnnnnnnnnnncaaattaatttggtttctgttatcagtggaacctatcttggtttggattacatgagtaagcaaaatggaggtgaaggcggcatcattatcaatatgtcatctttagcaggactcatgcccgttgcacagcagccggtttattgtgcttcaaagcatggcatagttggattcacacgctcagcagcgcccaccattgattgccaat

SEQ ID NO: 3822 - DNA, 590 bp, Homo sapiens
ccgggcatggcagtgccacgggacattgcagccgcctacctgctccagggaagcttctatggccactccatctacgctacgctatacatggacacctggcgcaaggactcggtggtcatgctgctccaccacgtggtcactctcatcctcatcgtctcctcctacgccttccggtaccacaatgtgggcatccttgtgctcttcctgcacgatatcagtgacgtgcagcttgagttcaccaagctcaacatttacttcaagtcccgcggcggctcctaccatcggctgcatgccttggcagcagacttgggctgcctcagcttcggcttcagctggttctggttccgcctctactggttcccgctcaaggtcctgtatgccaccagtcactgcagtctgcgcacggtgcctgacatccccttctacttcttcttcaatgcgctcctgctgctgctcacccttatgaacctctactggttcctgtacatcgtggcgtttgcagccaaggtgttgacaggccaggtgcacgagctgaaggacctgcgggagtatgacacagccgaggcccagagcctgaagcccagcaaagc

SEQ ID NO: 3823 - DNA, 602 bp, Homo sapiens
  misc_feature (208)..(223): n includes a, c, g, or t, or contains no nucleotide
ggaacatgaccctcctagaccaactccacactggacttcatcagcaactgcaacacctggagacctgcttgctgcaggtagtgggagaaggagaatctgctggggcaattagcagccctgcactgaccttgaggaggtacttccagggaatccgtgtctacctgaaagagaagaaatacagcgactgtgcctgggaagttgtcagaannnnnnnnnnnnnnnncttgttcttatcaacaaacatgcaagaaagactgagaagtaaagatagagacctgggctcatcttgaaatgattctcattgattaatttgccatataacacttgcacatgtgactctggtcaattcaaaagactcttatttcggctttaatcacagaattgactgaattagttctgcaaatactttgtcggtatattaagccagtatatgttaaaaagacttaggttcaggggcatcagtccctaagatgttatttatttttactcatttatttattcttacattttatcatatttatactatttatattcttatataacaaatgtttgcctttacattgtattaagataacaaaacatgttcagctttccatttggtt

SEQ ID NO: 3824 - DNA, 582 bp, Homo sapiens
  misc_feature (79)..(79): n includes a, c, g, or t, or contains no nucleotide
  misc_feature (85)..(85): n includes a, c, g, or t, or contains no nucleotide
  misc_feature (89)..(89): n includes a, c, g, or t, or contains no nucleotide
  misc_feature (128)..(128): n includes a, c, g, or t, or contains no nucleotide
  misc_feature (143)..(145): n includes a, c, g, or t, or contains no nucleotide
  misc_feature (149)..(159): n includes a, c, g, or t, or contains no nucleotide
  misc_feature (161)..(163): n includes a, c, g, or t, or contains no nucleotide
  misc_feature (165)..(168): n includes a, c, g, or t, or contains no nucleotide
  misc_feature (170)..(188): n includes a, c, g, or t, or contains no nucleotide
  misc_feature (279)..(279): n includes a, c, g, or t, or contains no nucleotide
  misc_feature (302)..(321): n includes a, c, g, or t, or contains no nucleotide
  misc_feature (506)..(520): n includes a, c, g, or t, or contains no nucleotide
tgtccactgagaacgtgggcagtgtccaaattcctgtactgtaaagactaaaaggcgtttgctctgagactgacaaggnggaaanttcnatgtgtctcctgccaggctctgtccccctacgccatccngacacgtccccgttnnnccgnnnnnnnnnnncnnngnnnnannnnnnnnnnnnnnnnnnntccttcaccatggtactgtctccacagccctcagtccccaccccaggagaggcgcctgccacctcctcctcatctccggtggttcaatcgntccgcctgtccccaacccagtcnnnnnnnnnnnnnnnnnnnnattctgaaacaaaatgaaactgcaaacctcgtgtgtcttaactccccccagggatgccactccattcctccgccccgtggtctggtgcgtgacaatccaaagcgccgagacgagggtgctgtgtccctcaaacccagagtggtgggcgcctctgaaaccatacagccactcctggccccaaacannnnnnnnnnnnnnnggttcctcgcccacctacccccgccacaccccgtctttttagagatctctctaataaatcgg

SEQ ID NO: 3825 - DNA, 363 bp, Homo sapiens
gagacttttggaggagaaggaccctgtacccctgttcaagatctatgtggcggagctgatccagcagctgcagcagcaggcactgtcagagccggcggtggtgcagaagacagccagtggccagtgaccacacagctcctccatgcctgaccaacaggcccagctttccctgccaggccctttgcactgaggacacagatcccggggagctgtgagggccaccggtgggcagtgggtggatcctggtttcgtgtgctgcccatgcaccttccagcccggggccagcttggcagggatccccaggaggcctgggccgcccagaggctcctctcaggctgggccccgacgtttgcggcagtgttc

SEQ ID NO: 3826 - DNA, 331 bp, Homo sapiens
cctgccacagcatcgcctggagggcagggagtgggagccaatgaacaggcatgcaagtgagagcttcctgagctttctctgtcggtttggtctgttttgccttcacccataagcccctcgcactctggtggcaggtgccttgtcctcagggctacagcagtagggaggtcagtgcttcgtgcctcgattgaaggtgacctctgccccagataggtggtgcagtggcttattaattccgatactagtttgctttgctgaccaaatgcctggtaccagaggatggtgaggcgaaggccaggttgggggcagtgttgtggccctggggccagcc

SEQ ID NO: 3827 - DNA, 397 bp, Homo sapiens
gcttcagccccgaggggcccaggaatgcccaacagcctgaaccaggggatcccagggagatacctgacagggggcctctgggcctggaaagcggggacaggagcccagagagtctgctgcctccgatgctgcttcagccccctcaagaaagtgtggaacctgcagggcctctagatgtgctgggccccagtctccaagggcgagaatggaccctgatggacttggacatggagctgtccttgatgcagcccttggttccagagcggggtgagcctgagctggcggtcaaggggttaaattctccaagcccagggaaggaccccacgctcggggccccactcctgctggatgtccaggcggccttgggaggcccagccctgggcctgcctggggcttt

SEQ ID NO: 3828 - DNA, 574 bp, Homo sapiens
tcctgggaaacctgcctttgtatgtggaagtatacctggctttttaaaatatatgtatttaaaaacaaaaagcaacagtaatctatgtgttctgtaacaaattgggatctgtcttggcattaaaccacatgatggaccaaatgtgccatactaatgatgagcatttagcacaatttgagactgaaatttagtacactatgttcatggtcagcttaacagtttgctggtgatttatagtaacattttctttgactgtcaagcaaaaggtaactaactgcttcatctccttttgcgcttattggaaattttagttatagtgtttactggcatggattaatagagttggagttttatttttaagaaaaattcacaagctaagttccactaatccattatcctttattttattgaaatgtataattaacttaactgaacaaaaggttcttcttgggagtatgttgtcataacatttaaagagatttcccttcatttaaactaaattactgttttatgttgatctgcatatttctgtatatttgtcatgacagtgcttgcatcctatttggtgtactca

SEQ ID NO: 3829 - DNA, 412 bp, Homo sapiens
  misc_feature (205)..(205): n includes a, c, g, or t, or contains no nucleotide
tcagcaaactctatggaagtgcaggccctcccccaactggtgaagaggatacagcagaaaaagatgagttgtagacactgatctgctagtgctgtaatattgtaaatactggactcaggaacttttgttaggaaaaaattgaaagaacttaagtctcgaatgtaattggaatcttcacctcagagtggagttgaaactgctatancctaagcggctgtttactgcttttcattagcagttgctcacatgtctttgggtgggggggagaagaagaattggccatcttaaaaagcgggtaaaaaacctgggttagggtgtgtgttcaccttcaaaatgttctatttaacaactgggtcatgtgcatctggtgtaggaagttttttctaccataagtgacaccaataaatgtttg

SEQ ID NO: 3830 - DNA, 460 bp, Homo sapiens
  misc_feature (215)..(216): n includes a, c, g, or t, or contains no nucleotide
  misc_feature (252)..(252): n includes a, c, g, or t, or contains no nucleotide
cgtcttttgggatttacatctgtctgtgttaaaataatcaaacgaaaaatcagtcctgtgttgtcagcatgattcatgtatttatatagatttgattattttaattttcctgtctcttttttttgtaaattttatgtacagatttgatttttcatagttttaactagatttccaagatattttgtgcatttgtttcaactgaattttggtggtgnnagtgccattatctagcaccctgattttttttttttnactataaccagggtttcattctgtctttttccactgaagtgtgacattttgttagtacatttcagtgtagtcattcatttctagctgtacataggatgaaggagagatcagatacatgaacatgtcttacatgggttgctgtatttagaattataaacatttttcattattggaaagtgtaacggggaccttctgcatacctgtttag

SEQ ID NO: 3831 - DNA, 408 bp, Homo sapiens
  misc_feature (26)..(48): n includes a, c, g, or t, or contains no nucleotide
  misc_feature (56)..(56): n includes a, c, g, or t, or contains no nucleotide
  misc_feature (60)..(61): n includes a, c, g, or t, or contains no nucleotide
  misc_feature (299)..(315): n includes a, c, g, or t, or contains no nucleotide
aggcaagaacgttggctgcctgcagnnnnnnnnnnnnnnnnnnnnnnnccttcgcnccanntgcgcctcggggatgtaaagaactgagtggggaaggaggaggctcccactggatccatccgtccagccaagagctcttcatctgctacaagaacatttgaatcttgggacctttaaagagcccctcctaacccagcagtaactggaacacacttgggagcagtcctatgtctcagtgccccttaaatttctgccctgagccctccacgtcagtgccatcggtctagaaccactaaccnnnnnnnnnnnnnnnnngtcacgctcgcatctatagataacggctctccagacctgagctttccgcgtcagcaagtaggaatcgtttttgctgcagagaataaaaggacc

SEQ ID NO: 3832 - DNA, 304 bp, Homo sapiens
aacagccacaataatcagagatggagcaaaccagtgccatccagtctttatgcaaatgaaatgctgcaaagggaagcagattctgtatatgttggtaactacccaccaagagcacatgggtagcagggaagaagtaaaaaaagagaaggagaatactggaagataatgcacaaaatgaagggactagttaaggattaactagccctttaaggattaactagttaaggattaatagcaaaagatattaaatatgctaacatagctatggaggaattgagggcaagcacccaggactgatgaggtc

SEQ ID NO: 3833 - DNA, 207 bp, Homo sapiens
  misc_feature (82)..(98): n includes a, c, g, or t, or contains no nucleotide
  misc_feature (162)..(177): n includes a, c, g, or t, or contains no nucleotide
gcctcttctgagcttacgtagttctaccggctttgccgtgtgcttctgccaccctgctgagtctgttctggtaatcggggtnnnnnnnnnnnnnnnnnacagagggatggaggaagaactgaaaggcttttcaaccacaaaactcatctggagttctcaaannnnnnnnnnnnnnnngaagctggaactgcgggagccccatctagg

SEQ ID NO: 3834 - DNA, 355 bp, Homo sapiens
tgtgccattcgacaacacattgttatagctacatggagaaagctctgtggattcatcactgtggtgttctccatgtctgctagccatttaggtaagggtagggcacttttaatttaaatgacttcttgcaccatcttgcctaatggactagattggactgtatcaacattgatttactccactttttatgccttccattgtgatgacgtcaaacacagtgaaagccttcagtcatgctatgggatttaattgtgtatcctcattactgtatcatttgtggggtacaccccttccccctttttttaaattaaatacagctcattcttactgtggcttgtagcattcctcctcttct

SEQ ID NO: 3835 - DNA, 391 bp, Homo sapiens
tgtctcagcgcctgacagaatctccgtgtgctttggtggccagccagtacggatggtctggcaacatggagagaatcatgaaagcacaagcgtaccaaacgggcaaggacatctctacaaattactatgcgagtcagaagaaaacatttgaaattaatcccagacacccgctgatcagagacatgcttcgacgaattaaggaagatgaagatgataaaacagttttggatcttgctgtggttttgtttgaaacagcaacgcttcggtcagggtatcttttaccagacactaaagcatatggagatagaatagaaagaatgcttcgcctcagtttgaacattgaccctgatgcaaaggtggaagaagagcccgaagaagaacctgaagagac

SEQ ID NO: 3836 - DNA, 200 bp, Homo sapiens
gtgatagccaagtgggactacaccgcccagcaggaccaggagctggacatcaagaagaacgagcggctgtggttgctggacgactccaagacgtggtggcgggtgaggaacgcggccaacaggacgggctatgtaccgtccaactacgtggagcggaagaacagcctgaagaagggctccctcgtgaagaacctgaagga

SEQ ID NO: 3837 - DNA, 476 bp, Homo sapiens
  misc_feature (132)..(169): n includes a, c, g, or t, or contains no nucleotide
  misc_feature (273)..(273): n includes a, c, g, or t, or contains no nucleotide
  misc_feature (434)..(444): n includes a, c, g, or t, or contains no nucleotide
  misc_feature (446)..(451): n includes a, c, g, or t, or contains no nucleotide
gcagctcacgaaacccaggcctgtgatcctggacccggcggaccctacaggaaacttgggtggtggagacccaaagggttggaggcagctggcacaagaggctgaggcctggctgaattacccatgctttannnnnnnnnnnnnnnnnnnnnnnnnnnnnnnnnnnnnnctggtgagacctcctgcttcctccctgccattcatccctgcccctctccatgaagcttgagacatatagctggagaccattctttccaaagaacttacctcttnccaaaggccatttatattcatatagtgacaggctgtgctccatattttacagtcattttggtcacaatcgagggtttctggaattttcacatcccttgtccagaattcattcccctaagagtaataataaataatctctaacaccaaaaaaaaaaaaaaannnnnnnnnnnannnnnngtcctagagccctttaatatgcact

SEQ ID NO: 3838 - DNA, 232 bp, Homo sapiens
gagctgggacacttaacagatgcaatgtgctactgattgtttcattgcgaatcttttttagcataaaattttctactctttttgttttttgtgttttgttctttaaagtcaggtccaatttgtaaaaacagcattgctttgtaaattagggcccaattaataatcagcaagaatttgatcgttcagttccacttggaggccttcatcctcgggtgtgctatggatggcttct

SEQ ID NO: 3839 - DNA, 570 bp, Homo sapiens
  misc_feature (70)..(70): n includes a, c, g, or t, or contains no nucleotide
  misc_feature (74)..(144): n includes a, c, g, or t, or contains no nucleotide
  misc_feature (232)..(232): n includes a, c, g, or t, or contains no nucleotide
  misc_feature (249)..(249): n includes a, c, g, or t, or contains no nucleotide
  misc_feature (279)..(294): n includes a, c, g, or t, or contains no nucleotide
  misc_feature (394)..(439): n includes a, c, g, or t, or contains no nucleotide
  misc_feature (454)..(468): n includes a, c, g, or t, or contains no nucleotide
  misc_feature (497)..(497): n includes a, c, g, or t, or contains no nucleotide
  misc_feature (519)..(519): n includes a, c, g, or t, or contains no nucleotide
tggggtagcctcctatccaccactgcttaagtgcctatgggaatgtgggtctgcaccttgtcccctcatnggannnnnnnnnnnnnnnnnnnnnnnnnnnnnnnnnnnnnnnnnnnnnnnnnnnnnnnnnnnnnnnnnnnnnnnggtacaaatgcacgtcacaggctcagctcctccccactagcatcttctctaccttcaagaaccaggcagccctgccatgtcacaatanggccaggggagtttccnaaagatgtgggtggcaaatgcccctatagnnnnnnnnnnnnnnnnaagcactgtagccctggacctgcctccttccctcggggccatacttctgtttccatctgctgggccaccagccactttagtgacccctgcctacttcctnnnnnnnnnnnnnnnnnnnnnnnnnnnnnnnnnnnnnnnnnnnnnntctttgtggtagagnnnnnnnnnnnnnnnagctgtactgaggatgatgttattcacancccctggcccacccactaatantactgcacagagtcaggatctcacatttcaccccaggctcaactgaggatg

SEQ ID NO: 3840 - DNA, 539 bp, Homo sapiens
  misc_feature (132)..(181): n includes a, c, g, or t, or contains no nucleotide
ggctgtgaagcgttcccaccggcgcctcggtctggctcagaaactgatggaccaggcctctcgagccatgatagagaacttcaatgccaaatatgtctccctgcatgtcaggaagagtaaccgggccgcccnnnnnnnnnnnnnnnnnnnnnnnnnnnnnnnnnnnnnnnnnnnnnnnnnnccaaatactatgcagatggggaggacgcctatgccatgaagcgggacctcactcagatggccgacgagctgaggcggcacctggagctgaaagagaagggcaggcacgtggtgctgggtgccatcgagaacaaggtggagagcaaaggcaattcacctccgagctcaggagaggcctgtcgcgaggagaagggcctggctgccgaggatagtggtggggacagcaaggacctcagcgaggtcagcgagaccacagagagcacagatgtcaaggacagctcagaggcctccgactcagcctcctagagcctgccccatcccctcctcaccccacgagctttcacaataaattcgctccg

SEQ ID NO: 3841 - DNA, 519 bp, Homo sapiens
  misc_feature (36)..(36): n includes a, c, g, or t, or contains no nucleotide
  misc_feature (92)..(108): n includes a, c, g, or t, or contains no nucleotide
  misc_feature (398)..(424): n includes a, c, g, or t, or contains no nucleotide
  misc_feature (430)..(444): n includes a, c, g, or t, or contains no nucleotide
taaagagtatcttggactggacatcttttaaccagnagagaattgttgatgttgctggaccagggggttggaatgacccagatatgttagtnnnnnnnnnnnnnnnnntcagctggaatcagcaagtaactcagatggccctctgggctatcatggctgctcctttattcatgtctaatgacctccgacacatcagccctcaagccaaagctctccttcaggataaggacgtaattgccatcaatcaggaccccttgggcaagcaagggtaccagcttagacagggagacaactttgaagtgtgggaacgacctctctcaggcttagcctgggctgtagctatgataaaccggcaggagattggtggacctcgctcttataccatcgcagttgcttcnnnnnnnnnnnnnnnnnnnnnnnnnnntgcctnnnnnnnnnnnnnnntcctccctgtgaaaaggaagctagggttctatgaatggacttcaaggttaagaagtcacataaatcccacaggca

SEQ ID NO: 3842 - DNA, 278 bp, Homo sapiens
  misc_feature (163)..(163): n includes a, c, g, or t, or contains no nucleotide
  misc_feature (199)..(199): n includes a, c, g, or t, or contains no nucleotide
  misc_feature (202)..(202): n includes a, c, g, or t, or contains no nucleotide
  misc_feature (237)..(251): n includes a, c, g, or t, or contains no nucleotide
ggtcatcactaaccagatttacttggagtacatgtgaaagaaaacgtcagtctgcctgtaaatttcagcaagccgtgttagatggggagcgtggaacgtcactgtacacttgtataagtaccgtttacttcatggcatgaataaatggatctgtgagatgcantgctacctggtactgctttcagtgtgttccccctcnagnccctccggcgtgtcaggcatactctgagtagatannnnnnnnnnnnnnncatgcaatcagaatctcactgagccac

SEQ ID NO: 3843 - DNA, 101 bp, Homo sapiens
tttggtgctttccagaatcccgtaacacctgattaactgaggcatccacttctttcagcagactgatcaggacctccaagccactgagcaatgtataaccc

SEQ ID NO: 3844 - DNA, 461 bp, Homo sapiens
  misc_feature (86)..(86): n includes a, c, g, or t, or contains no nucleotide
  misc_feature (173)..(173): n includes a, c, g, or t, or contains no nucleotide
  misc_feature (178)..(178): n includes a, c, g, or t, or contains no nucleotide
  misc_feature (190)..(190): n includes a, c, g, or t, or contains no nucleotide
  misc_feature (225)..(225): n includes a, c, g, or t, or contains no nucleotide
  misc_feature (349)..(349): n includes a, c, g, or t, or contains no nucleotide
  misc_feature (352)..(353): n includes a, c, g, or t, or contains no nucleotide
agcagcatctgagaacataagaacagttggacattggaaagaggtttgttgccctcatccctccttgaacctcttttctctcccgnttccaccaccaccacacatatatacccctttttctcagtcttaagcatcaaacaatttctgcctctttctttttaattctcccaganggatnggttaatgcatncacaatttaacttgtctattcaggtattaatagtncaagggatgcatctgtttgcttatagtaccagttatattcctaggaccttagagagcagtagtgtgagaatagaatgcctttctatttgggttaaactatgtgggaggaaaaagtaacagagtnaanngctttgccttaatgaagtcaagtgttctgcctggtgggaagtggccacacgctgcactgcgctgctcttgtttactctgttctttcagagcctttgtactttgccatc

SEQ ID NO: 3845 - DNA, 241 bp, Homo sapiens
  misc_feature (135)..(149): n includes a, c, g, or t, or contains no nucleotide
acatacacagaattgggagatcaggtcgatacggccggaagggtgtggccattaactttgtaaagaatgacgacatccgcatcctcagagatatcgagcagtactattccactcagattgatgagatgccgatgnnnnnnnnnnnnnnnatctgaagcagcagatcagtgggatgagggagactgttcacctgctgtgtactcctgtttggaagtatttagatccagattctacttaatgg

SEQ ID NO: 3846 - DNA, 610 bp, Homo sapiens
tccccatgagtttggcccgcagagtcaaaaaggacaccaagtttcgggatttcttcctccctaagggcaccgaagtgtaccctatgctgggctctgtgctgagagaccccagtttcttctccaacccccaggacttcaatccccagcacttcctgaatgagaaggggcagtttaagaagagtgatgcttttgtgcccttttccatcggaaagcggaactgtttcggagaaggcctggccagaatggagctctttctcttcttcaccaccgtcatgcagaacttccgcctcaagtcctcccagtcacctaaggacattgacgtgtcccccaaacacgtgggctttgccacgatcccacgaaactacaccatgagcttcctgccccgctgagcgagggctgtgccggtgcaggtctggtgggcggggccagggaaagggcagggccaagaccgggcttgggagaggggcgcagctaagactgggggcaggatggcggaaaggaaggggcgtggtggctagagggaagagaagaaacagaaggggctcagttcaccttgataaggtgcttccgagctgggatgagaggaaggaaacccttacattatgctatg

SEQ ID NO: 3847 - DNA, 445 bp, Homo sapiens
tgctctgccgaagaccttaaaatggccagaagtctggtccccaaggctctggagccatacgtgacagaaatggctcagggaactgttggaggcgtgttcatcacgacggcaggttccacgtctaacggcacaaggttctctgccagtgacctgaccaacggtgcagatgggatgctggccacaagctccaatgggtctcagtacagcggctccagggtggagactccggtgtcctacgtcggggaggacgacgaggaggacgatgacttcaacgagaatgacgaggacgactgacgtcctccccacttcagattcggcttcaggaaaacgtttagcgaaaagaaactttttttttaatgtgggttttctgtttccttttggcctagtcccaagaagatattggtaagctattgaatttagatatgcacctctgataagcaaggat

SEQ ID NO: 3848 - DNA, 497 bp, Homo sapiens
  misc_feature (223)..(223): n includes a, c, g, or t, or contains no nucleotide
  misc_feature (270)..(270): n includes a, c, g, or t, or contains no nucleotide
  misc_feature (363)..(363): n includes a, c, g, or t, or contains no nucleotide
  misc_feature (365)..(367): n includes a, c, g, or t, or contains no nucleotide
  misc_feature (369)..(369): n includes a, c, g, or t, or contains no nucleotide
  misc_feature (409)..(446): n includes a, c, g, or t, or contains no nucleotide
  misc_feature (449)..(464): n includes a, c, g, or t, or contains no nucleotide
agatcttgaacctggtgctccatccatgggagctaaaagcctttgcatccccttcaaaccactctgtgaactgcagcctggagccaaatgtgtctgtggcaagaaccctgccaagtactacaccttatttggtcgcagctactgagggatgaacgaaagccccctcttcaactcctctcactttttaaagcattgatattagtatcttctcagatacagaccnttttatgattttttaaaaagtaaaagttctaaaatgaagtcacacangacaattattcttatgcctaagttaacagtggataaaagacttttctgtaaacaactccagtaataaatatcatgaactaaaaaaaaaaaaanannnanttgtttctgaaaaatgtgcattatgtactatgaggaaatnnnnnnnnnnnnnnnnnnnnnnnnnnnnnnnnnnnnnntgnnnnnnnnnnnnnnnntcccaacatgtctcagaccctgaaccgccagtt

SEQ ID NO: 3849 - DNA, 205 bp, Homo sapiens
  misc_feature (156)..(170): n includes a, c, g, or t, or contains no nucleotide
gaacagctccgggcccggtctgcctggctgcctccatcacagccctcctgccctgccagggagaaagcccaggagctgtcggactggatccaccagctggagtctgagaagttcgacctgatggcgaagctgaaacagcagaaatatgagatcaannnnnnnnnnnnnnncatcagccacgcccagaagttccggaagggggcag

SEQ ID NO: 3850 - DNA, 361 bp, Homo sapiens
  misc_feature (113)..(178): n includes a, c, g, or t, or contains no nucleotide
  misc_feature (182)..(209): n includes a, c, g, or t, or contains no nucleotide
ccgggccaagtacttcattcgagatgagtttctgaggatcagcactgccagtggagatgggcgtcactactgctaccctcatttcacctgcgctgtggacactgagaacatcnnnnnnnnnnnnnnnnnnnnnnnnnnnnnnnnnnnnnnnnnnnnnnnnnnnnnnnnnnnnnnnnnntaannnnnnnnnnnnnnnnnnnnnnnnnnnncttaagcacaattaattaaaagtgaaacgtaattgtacaagcagttaatcacccaccatagggcatgattaacaaagcaacctttcccttcccccgagtgattttgcgaaacccccttttcccttcagcttgcttagatgttccaaatttag

SEQ ID NO: 3851 - DNA, 57 bp, Homo sapiens
atcttccctggaggccttcggcctgcctgcctgcctgcctgaggtccccgctgccag

SEQ ID NO: 3852 - DNA, 598 bp, Homo sapiens
  misc_feature (251)..(281): n includes a, c, g, or t, or contains no nucleotide
  misc_feature (298)..(298): n includes a, c, g, or t, or contains no nucleotide
  misc_feature (318)..(318): n includes a, c, g, or t, or contains no nucleotide
  misc_feature (327)..(327): n includes a, c, g, or t, or contains no nucleotide
  misc_feature (342)..(342): n includes a, c, g, or t, or contains no nucleotide
ggagggactcatcatttccatttacccttcttttctgactatttttcagaatctctcttcttttcaagttgggtgatatgttggtagattctaatggctttattgcagcgattaataacaggcaaaaggaagcagggttggtttcccttctttttgttcttcatctaagccttctggttttatgggtcagagttccgactgccatcttggacttgtcagcaaaaaaaaaaaataataataataataaggcnnnnnnnnnnnnnnnnnnnnnnnnnnnnnnnatagggggttgggaggnaagtgtctactaggagggtngggtgagantctgtgttgatgtangaggccgagaaggcccttaactcaaagtagcttatttatccaaaatgttctggatgcatcatctccaaccaaggaccccttatttatcatgcctttgttctcttttccctcagatgtatatttctttaaaaataattttcctaataacaaaacttatttctaaaacagcttaaaaattcaaagaaaaaccccaaacactgacattacctacacttccactacccaaagacaaaatgtgcccactgtgtgcttttga

SEQ ID NO: 3853 - DNA, 464 bp, Homo sapiens
  misc_feature (54)..(54): n includes a, c, g, or t, or contains no nucleotide
  misc_feature (66)..(66): n includes a, c, g, or t, or contains no nucleotide
  misc_feature (72)..(88): n includes a, c, g, or t, or contains no nucleotide
  misc_feature (137)..(166): n includes a, c, g, or t, or contains no nucleotide
  misc_feature (301)..(359): n includes a, c, g, or t, or contains no nucleotide
ctatgttcctaacaaaatgagatgataggatagatcctggttaccactcttttnctgtgcacatangggctnnnnnnnnnnnnnnnnntcaccttcatgattatagcaactaatgtttgaacaaagctcaaagtatnnnnnnnnnnnnnnnnnnnnnnnnnnnnnnataatgttgataatatatattaagtgtgccaaatcagtttgactactctctgttttagtgtttatgtttaaaagaaatatattttttgttattattagataatatttttgtatttctctattttcataatcagtnnnnnnnnnnnnnnnnnnnnnnnnnnnnnnnnnnnnnnnnnnnnnnnnnnnnnnnnnnnaagtagtaaatcagaaagtaacaatctatggcttatttctatgacaaattcaagagctagaaaaataaaatgtttcattatgcacttttagaaatgcatatttgc

SEQ ID NO: 3854 - DNA, 416 bp, Homo sapiens
  misc_feature (65)..(65): n includes a, c, g, or t, or contains no nucleotide
  misc_feature (193)..(193): n includes a, c, g, or t, or contains no nucleotide
  misc_feature (252)..(266): n includes a, c, g, or t, or contains no nucleotide
  misc_feature (304)..(318): n includes a, c, g, or t, or contains no nucleotide
cattttctgttacaatgcttggtcattgcatcgaaatgtacattggtgattctgaagcttatatnggagcagacattaaagacaaattaaaatgttatgactttgatgtgcatacaatgaagacactaaaaaacattatttcacctccgtgggatttcagggaatttgaagtagaaaaacagactgcagaagnaaacggggcttacgccattggaaacctcaaggaaaactccagattccagaccttccttnnnnnnnnnnnnnnnaattgaaatgaatgaaagtgacatgatgttagagacannnnnnnnnnnnnnnagcacgtgactccagtcagtggtcctggtcccactgtcccagtgtaggaacagagacccgccttaagagactggatcgcacacctttgcaacagatgt

SEQ ID NO: 3855 - DNA, 524 bp, Homo sapiens
  misc_feature (27)..(27): n includes a, c, g, or t, or contains no nucleotide
  misc_feature (42)..(42): n includes a, c, g, or t, or contains no nucleotide
  misc_feature (176)..(200): n includes a, c, g, or t, or contains no nucleotide
  misc_feature (282)..(282): n includes a, c, g, or t, or contains no nucleotide
  misc_feature (285)..(285): n includes a, c, g, or t, or contains no nucleotide
  misc_feature (299)..(300): n includes a, c, g, or t, or contains no nucleotide
  misc_feature (312)..(312): n includes a, c, g, or t, or contains no nucleotide
  misc_feature (323)..(323): n includes a, c, g, or t, or contains no nucleotide
  misc_feature (327)..(327): n includes a, c, g, or t, or contains no nucleotide
  misc_feature (335)..(335): n includes a, c, g, or t, or contains no nucleotide
  misc_feature (347)..(347): n includes a, c, g, or t, or contains no nucleotide
  misc_feature (356)..(356): n includes a, c, g, or t, or contains no nucleotide
  misc_feature (359)..(359): n includes a, c, g, or t, or contains no nucleotide
  misc_feature (363)..(412): n includes a, c, g, or t, or contains no nucleotide
  misc_feature (415)..(491): n includes a, c, g, or t, or contains no nucleotide
atgggaagcccatcttcatctgccagncctccttccagcagncccagcccagccccatgcagcaccagttctccatgcccactgtgccaccaccagaagagctgcttgactgtgagaccctcattgaccagtatttaagggaccctaacctccaaaagaggtacccattggcgctnnnnnnnnnnnnnnnnnnnnnnnnncccattgagatcaagccagtaaacccatcccccctgagccagctgcagagaatggagcccaaacagatgttctgggtgcganccnggggctatattggnnggctctcggggnctggtccatgngcgnctgtggcntcaggatggagncctagctgngancctnnnnnnnnnnnnnnnnnnnnnnnnnnnnnnnnnnnnnnnnnnnnnnnnnnctnnnnnnnnnnnnnnnnnnnnnnnnnnnnnnnnnnnnnnnnnnnnnnnnnnnnnnnnnnnnnnnnnnnnnnnnnnnnntcccttttggccctcacatccaataaagagact

SEQ ID NO: 3856 - DNA, 497 bp, Homo sapiens
  misc_feature (55)..(55): n includes a, c, g, or t, or contains no nucleotide
  misc_feature (372)..(374): n includes a, c, g, or t, or contains no nucleotide
  misc_feature (423)..(437): n includes a, c, g, or t, or contains no nucleotide
tttcagctgcatcctggtgtcccacccaggtcgagcccccaggcttctggaaaanagtgtgtgctctactttgatggaaacatggcaaggaatttaaagacaggaatgtattaatattattgaaggtgtgttcgtaacctctgattctgtggacttgccactttctccaaacgctcggttcctttgaagatttcttctgaacgtgtgtgcgcacgctgggcgggttcgtgcatacatgcggggaccccagactgtcagcacagggaagatggatcccatcctaatttttatcacctgaaggttggaaccagtgagggactgggagagagtgatttataagcaccaatatcaacttcatgtggatttttgacnnngaggggtagtttgtaatttcatttaaattcttttcagcagctggaaatnnnnnnnnnnnnnnnacactgaatctccttttgtaactggtgttcactgacaccttgatggctcttgatggctct

SEQ ID NO: 3857 - DNA, 541 bp, Homo sapiens
gcctttgcccacactggcgcatggggaaaggggcttcctgcaccacacatgctctcccacagtgggctttcgtgagccatggattgagggccgtccctgtgctcctgcccagccaggccgcgcaggcagaagggatctcccaacctgccccagcacatggggattttgcctacaccgcccaggctcctccagaaggggcgctctcccacactcacactcctaggtggcatccacacaagggcaaaatccggaaggactgggacgcgcagcgcgacggccttccgggcacttgcgcggtgggacagcctgggccctctcaagcggggccacagggccaaggtgtgcttgcgccacccgcgtcccagggaagtccgtggtgggggtggagcaggggtacccaggtcgccggtgtggcgtggaacctcaagcaggggcaattccacctcaccagcccacgcccccagaggcctccacacggcaggggcagatgcaaggcatctcagcaccctcccaggcgctcctggagccagggtgctcgtct

SEQ ID NO: 3858 - DNA, 449 bp, Homo sapiens
  misc_feature (110)..(124): n includes a, c, g, or t, or contains no nucleotide
actgtggaacggtgcagagccagaaggagtttgtgacttttcatcttcaaattgtccaaatgaggctctcatgtctagtgattattaccattactgcagaactctgtgtnnnnnnnnnnnnnnntgcccacggagaacaggcacagctgccaaggggtgtgtgtgtgttggggaccggcacgtctcctgcttggtctcctgtcttgctcggtaggctgccattcccgcattaacagccaacaatgcctgaagcgtagccttcatggagagtccacacgtctaggcaggccagagatttgagttcttgagaataaagccactgggccaggaactcacctttcaaaccctggtagagcattaaaatttccttgcaagaccagccaatgaataatggtaatcaatcaaatacaaaataactttcaaatagcattgtgctttatagcacacaa

SEQ ID NO: 3859 - DNA, 360 bp, Homo sapiens
  misc_feature (65)..(69): n includes a, c, g, or t, or contains no nucleotide
  misc_feature (84)..(84): n includes a, c, g, or t, or contains no nucleotide
  misc_feature (87)..(87): n includes a, c, g, or t, or contains no nucleotide
gtgtaggcctttccattccatttattcacactgagtgtcctacaataaacttccgtatttttaannnnnaaaaaaaaaaaaaanaangtgtatctttaggtgcaatcacagcagtcctctcatctctcacccttctttttcaaccctgagccaccgtaattgagctttcctttctgttccttgtggctaagacagtaagccagtgtgagacacaggttcctcccttgggaagtcagagctgctgccctgggtcctgcagagaaacctggccttcagcagacctgtttctctgttgtagacacagaatgacttccgtttgcttttagaccttcattctagtcccctaatgaatgtataatg

SEQ ID NO: 3860 - DNA, 463 bp, Homo sapiens
  misc_feature (27)..(27): n includes a, c, g, or t, or contains no nucleotide
  misc_feature (34)..(34): n includes a, c, g, or t, or contains no nucleotide
  misc_feature (36)..(37): n includes a, c, g, or t, or contains no nucleotide
  misc_feature (40)..(41): n includes a, c, g, or t, or contains no nucleotide
  misc_feature (43)..(45): n includes a, c, g, or t, or contains no nucleotide
  misc_feature (183)..(184): n includes a, c, g, or t, or contains no nucleotide
  misc_feature (186)..(189): n includes a, c, g, or t, or contains no nucleotide
  misc_feature (191)..(192): n includes a, c, g, or t, or contains no nucleotide
  misc_feature (214)..(214): n includes a, c, g, or t, or contains no nucleotide
  misc_feature (220)..(225): n includes a, c, g, or t, or contains no nucleotide
  misc_feature (294)..(430): n includes a, c, g, or t, or contains no nucleotide
tgcggtttgtggacaacatgtacaaangaggccnannttnnannnccaagatgataattgaagatgtcctaagcccagatacctgtgtatgtcggacagatgaaggccgagtcctggaaggcctgagggaagacatgctggagaccctggttcccaaggcagagggtgaccgtgtgatggtgnngnnnngnnccacagactggaagggtggganatttgnnnnnnccgggacagagcacggagccgggctttggtgcaactgccaagagaaaatcaggtggtggagcttcactnnnnnnnnnnnnnnnnnnnnnnnnnnnnnnnnnnnnnnnnnnnnnnnnnnnnnnnnnnnnnnnnnnnnnnnnnnnnnnnnnnnnnnnnnnnnnnnnnnnnnnnnnnnnnnnnnnnnnnnnnnnnnnnnnnnnnnnnnccatcctctacttctggtgcagtcctgggacaa

SEQ ID NO: 3861 - DNA, 333 bp, Homo sapiens
  misc_feature (228)..(228): n includes a, c, g, or t, or contains no nucleotide
  misc_feature (233)..(233): n includes a, c, g, or t, or contains no nucleotide
cacccctgcatgaacgggctttgagagagggagaagagtgagtctcagcacatgttgcagccagggccagtgggagggggtctgggccagtgcaccttccagggccccatccattagcttccactgcctcgtgtgatatgaggcccattcctgcctctttgaagagagcagtcagcattcttagcagtgagtttctgttctgttggatgactttgagatttatctttntttcntgttggaattgttcaaatgttccttttaacaaatggttggatgaacttcagcatccaagtttatgaatgacagtagtcacacatagtgctgtttatatag

SEQ ID NO: 3862 - DNA, 578 bp, Homo sapiens
  misc_feature (235)..(235): n includes a, c, g, or t, or contains no nucleotide
  misc_feature (338)..(338): n includes a, c, g, or t, or contains no nucleotide
  misc_feature (367)..(367): n includes a, c, g, or t, or contains no nucleotide
  misc_feature (532)..(533): n includes a, c, g, or t, or contains no nucleotide
  misc_feature (542)..(542): n includes a, c, g, or t, or contains no nucleotide
tggagtctgactgcatggaagttccagatcctgacagagagaactgggaaggatccaggttcgcttccgttggtagcttgagtcccatgcctccaccctgccatctgaggaaggggtgacaagtggtcaaggagctgtggccacagacttttccagggtggtccttggcaggtgaggtgcgtctgtgccacccttgtcaggagccattgacgacgggccccccctggaccccccngggacctcagagtgggggcaggcagaagggagaaccagctcaagacattttggaggatctggccctggggttcttcagagaacaccctctaggggctttgggnacatggcctgtccccacatccagcacttncctccgccatggtcactcggcagcccttttcccaggagaagacacctctgggagcctgctcagtgcttgtcctgccatcctgtgtcctgggactgagggttactccagttgctctgtgttgcatactctcccccgcaagcctgtgtatgaagaattgtcccctgnnttccagcangccatggctggctgttttgtgactgttacattgtgc

SEQ ID NO: 3863 - DNA, 476 bp, Homo sapiens
  misc_feature (26)..(26): n includes a, c, g, or t, or contains no nucleotide
  misc_feature (33)..(33): n includes a, c, g, or t, or contains no nucleotide
  misc_feature (39)..(39): n includes a, c, g, or t, or contains no nucleotide
  misc_feature (42)..(42): n includes a, c, g, or t, or contains no nucleotide
  misc_feature (46)..(46): n includes a, c, g, or t, or contains no nucleotide
  misc_feature (48)..(84): n includes a, c, g, or t, or contains no nucleotide
  misc_feature (86)..(86): n includes a, c, g, or t, or contains no nucleotide
  misc_feature (91)..(91): n includes a, c, g, or t, or contains no nucleotide
  misc_feature (95)..(95): n includes a, c, g, or t, or contains no nucleotide
  misc_feature (97)..(100): n includes a, c, g, or t, or contains no nucleotide
  misc_feature (105)..(106): n includes a, c, g, or t, or contains no nucleotide
  misc_feature (109)..(109): n includes a, c, g, or t, or contains no nucleotide
  misc_feature (112)..(114): n includes a, c, g, or t, or contains no nucleotide
  misc_feature (120)..(121): n includes a, c, g, or t, or contains no nucleotide
  misc_feature (126)..(126): n includes a, c, g, or t, or contains no nucleotide
  misc_feature (131)..(132): n includes a, c, g, or t, or contains no nucleotide
  misc_feature (136)..(136): n includes a, c, g, or t, or contains no nucleotide
  misc_feature (138)..(138): n includes a, c, g, or t, or contains no nucleotide
  misc_feature (143)..(143): n includes a, c, g, or t, or contains no nucleotide
  misc_feature (149)..(149): n includes a, c, g, or t, or contains no nucleotide
  misc_feature (192)..(207): n includes a, c, g, or t, or contains no nucleotide
  misc_feature (400)..(414): n includes a, c, g, or t, or contains no nucleotide
gccccgcgatgagaagccgttctgtnctacatntcgtgngtngcgnannnnnnnnnnnnnnnnnnnnnnnnnnnnnnnnnnnnncnctctntgtnannnntgttnntantannntggaanntgcanccccnntatnanaaagncagctngatgagcaagatggcacacatgcagaaggaacaactgggcacnnnnnnnnnnnnnnnnaacccaaaaggaagccaagtattaagaaatcacaaggcaggaagggacaagagggagaaagttgtctgagaacttttgactgtggccctggactttgctgtgctcgtcatttttggacgaaaatttgtaagccagtccttttggagggacaggtctgctccagaagagggcataaagacactgctcaagctcnnnnnnnnnnnnnnngttgcgactgtggccctggactactgtgtcgaagccaattgaccagcaatcggcagcatgct

SEQ ID NO: 3864 - DNA, 460 bp, Homo sapiens
  misc_feature (26)..(87): n includes a, c, g, or t, or contains no nucleotide
cctagtcagagagtgcctggcagagnnnnnnnnnnnnnnnnnnnnnnnnnnnnnnnnnnnnnnnnnnnnnnnnnnnnnnnnnnnnnnccactgcagagcacccgcttctccctggccttcatcccgagttgcactaaccatcctgggcttcctgtcctgtgtcccttggtgggtcccctccaggaaccaaggagtggccctccaggtggcagcactaaggacacccccccacaacaagagttagcagcgaggtccccatgagtcccacccatgacctgccgacagtgttgcccaccggaacttttgtggcccctaccgctcagcccttcccagcacttctcccactttgtcccgagcctccttctcccccagcaggggcacaggcctggcacctccctgccttgtgtcctgagccatagtgactcttttatctgtgtgtcttttgctaaatatgcccttt

SEQ ID NO: 3865 - DNA, 403 bp, Homo sapiens
  misc_feature (83)..(103): n includes a, c, g, or t, or contains no nucleotide
  misc_feature (259)..(274): n includes a, c, g, or t, or contains no nucleotide
  misc_feature (312)..(378): n includes a, c, g, or t, or contains no nucleotide
agcatggaagcgattcggctcatccgcttctgtggcaaatacgtctctgagaggcctcgggtgctacaagaatacacaagtgnnnnnnnnnnnnnnnnnnnnngtgacagagtctgggtccgaggctggttccccatcttattcgaactctcctgcatcattaatagatgcaagttagatgtacgaacaaggggactcacagtcatgtttgagatcatgaagagctatggccacacctttgaaaagcactggtggcagnnnnnnnnnnnnnnnntgtttcggatttttgacaatatgaaactccctgagcannnnnnnnnnnnnnnnnnnnnnnnnnnnnnnnnnnnnnnnnnnnnnnnnnnnnnnnnnnnnnnnnnntttacccagttttatgaagctttga

SEQ ID NO: 3866 - DNA, 158 bp, Homo sapiens
  misc_feature (86)..(86): n includes a, c, g, or t, or contains no nucleotide
aactatgactttggtcttaagcaattttcttcctctgtggattgatatttacatatcaatgtggataataatttcttaccacggtnactgttgtgaggtaaaaatgagttaacataagtaaaaccgagcacatgcaaaccatccgaaatggttaatac

SEQ ID NO: 3867 - DNA, 549 bp, Homo sapiens
aggcctgggccacatggcagcccagggggcaggagaagcccgggagagcccgctggctaccagactcagccctgaagcagggaacagggcccagcttccaccggcagggagttgtgagcgccttcccaacaatgtgcccctcaccccttgatgcccatgctaatggtagccaccctggttcttgttgacttgagggacctggctgtcttccctgttcttcatcctttcttctcagtccctacctactgtttgtaaccacaagtgtctctgtgtgtgggtgggtgaaggcccctctgcccagtggtgtgtctcctctccctccctccctcttctgccagtggcctgggggtgtccaggctcccatccatggcccagcccctctcccctctgtcttgatccccccctccctgcccctggcttcctcttccatgttctgccctttcccacacctttgttcctcaataactgggggctggactgaagcctcctgcaggtaccttccccccttcaaacaacacctctcaacctcctattgcttttcagcctgtg

SEQ ID NO: 3868 - DNA, 541 bp, Homo sapiens
gctgggaacgtgtgtccaggctctgggcacagtgctgccccttgcaagccataacgtgcccccagagtgtagggggccttgcggaagccatagggggctgcacgggatgcgtgggaggcagaaacctatctcagggagggaaggggatggaggccagagtctcccagtgggtgatgcttttgctgctgcttaatcctaccccctcttcaaagcagagtgggacttggagagcaaaggcccatgcccccttcgctcctcctctcatcatttgcattgggcattagtgtccccccttgaagcaataactccaagcagactccagcccctggacccctggggtggccagggcttccccatcagctcccaacgagcctcctcagggggtaggagagcactgcctctatgccctgcagagcaataacactatatttatttttgggtttggccagggaggcgcagggacatggggcaagccagggcccagagcccttggctgtacagagactctattttaatgtatatttgctgcaaagagaaaccg

SEQ ID NO: 3869 - DNA, 450 bp, Homo sapiens
  misc_feature (70)..(209): n includes a, c, g, or t, or contains no nucleotide
  misc_feature (234)..(253): n includes a, c, g, or t, or contains no nucleotide
  misc_feature (275)..(289): n includes a, c, g, or t, or contains no nucleotide
cctactttgagcagtttaaggaagttttgcctgaggattgcctgcctcggtctcgcagtcagacgtgccnnnnnnnnnnnnnnnnnnnnnnnnnnnnnnnnnnnnnnnnnnnnnnnnnnnnnnnnnnnnnnnnnnnnnnnnnnnnnnnnnnnnnnnnnnnnnnnnnnnnnnnnnnnnnnnnnnnnnnnnnnnnnnnnnnnnnnnnnnnnacagccatgtcggtgacactggagnnnnnnnnnnnnnnnnnnnncgagcatggcatggccccgcannnnnnnnnnnnnnncctggagtgcatgcgcagcattggaacacgggaggtagtcacccagaaaaacttgagcggcctggtgcccatccgagacttaaggctagaccccagcctcctctgttccatccctttattagctctgagccccaatttactgattgtgtggctctttctga

SEQ ID NO: 3870 - DNA, 595 bp, Homo sapiens
accttcttgtgcaccatgagtatttggaaagttaatccttgtttttgtcgtgtctatagagaacaaacaaataaaaacagagccctagagaaatggcgttactttttatttttacacccatcagatttaaggaaaagactttttagccattataatctagtggttggaaggaatgaagaagcttttttagtaataggtccagatatgagtgctaaaaataaagatgatagcatgttcttctgtcttccatagttattacaactatgagagcctcccaagtcatcttatcaactcaacccccttttttttgtcttaatgttgcacataagtttatacagagtggatgaccacactagcacagaagagaacaacatgtattaaagcaggtgattcctcccttggcgggagagctctctcagtgtgaacatgccttctgtgggcggaaatcaggaagccaccagctgttaatggagagtgccttgcttttatttcagacagcagagttttccaaagtttctctgctcctctaacagcattgctctttagtgtgtgttaacctgtggtttgaaagaaatgctcttgtacattaacaatg

SEQ ID NO: 3871 - DNA, 559 bp, Homo sapiens
acatggcccagctcaaatgctactactttgattacaaggagcagctccccgagtcagcctatatgcaccagctcttgggcctcaacctcctcttcctgctgtcccagaaccgggtggctgagttccacacggagttggagcggctgcctgccaaggacatacagaccaatgtctacatcaagcacccagtgtccctggagcaatacctgatggagggcagctacaacaaagtgttcctggccaagggtaacatccccgccgagagctacaccttcttcattgacatcctgctcgacactatcagggatgagatcgctgggtgcatcgagaaggcctacgagaaaatccttttcactgaggccacccggatcctcttcttcaacacacccaaaaagatgacagactacgccaagaagcgagggtgggtcctgggccccaacaactactacagttttgccagccagcagcagaagccggaagacaccaccattccctccacagaactggccaaacaggtcatcgagtatgcccggcagctggagatgatcgtctgagcccc

SEQ ID NO: 3872 - DNA, 410 bp, Homo sapiens
  misc_feature (63)..(86): n includes a, c, g, or t, or contains no nucleotide
  misc_feature (202)..(265): n includes a, c, g, or t, or contains no nucleotide
gtggcctactttgaggcctcggccaaactgcgtctcaacgtggacgaggcttttgagcagctnnnnnnnnnnnnnnnnnnnnnnnnggaacaagagctcccaccgagccctcccagtgcccccaggaagaagggcgggggctgcccctgcgtcctcctgtagcccaggcaagagagaagcaaccaccacaagctctcgggannnnnnnnnnnnnnnnnnnnnnnnnnnnnnnnnnnnnnnnnnnnnnnnnnnnnnnnnnnnnnnnggtctcccaggacacatcacatacccacccttacttcctggcctcttctgggctactgccactgtgtgccttctgccaacgcctcctgtccccacctaagcctggtgggggtgaggggctccgggtcactgctgtatataactcc

SEQ ID NO: 3873 - DNA, 553 bp, Homo sapiens
  misc_feature (47)..(47): n includes a, c, g, or t, or contains no nucleotide
  misc_feature (70)..(70): n includes a, c, g, or t, or contains no nucleotide
  misc_feature (130)..(145): n includes a, c, g, or t, or contains no nucleotide
  misc_feature (288)..(288): n includes a, c, g, or t, or contains no nucleotide
  misc_feature (372)..(373): n includes a, c, g, or t, or contains no nucleotide
  misc_feature (375)..(379): n includes a, c, g, or t, or contains no nucleotide
  misc_feature (381)..(381): n includes a, c, g, or t, or contains no nucleotide
  misc_feature (394)..(394): n includes a, c, g, or t, or contains no nucleotide
  misc_feature (471)..(471): n includes a, c, g, or t, or contains no nucleotide
  misc_feature (499)..(499): n includes a, c, g, or t, or contains no nucleotide
aagcagccttccaactagagactcgggggtgtctgaagggggccccntttccctgcccgctggggagcgncgtctcagtgaaatcggctttctcctcagactctgtccctggtaaggagtgacaaggaannnnnnnnnnnnnnnngtgcattttgaatagttttttgtaagtagtgcttttcctccttcctgacaaatcgagcgctttggcctcttctgtgcagcatccacccctgcggatccctctggggaggacaggaaggggactcccggagacctctgcagccntggtggtcagaggctgctcacctgagcacaaagacagctctgcacattcaccgcagctgccagccaggggtctgggtgggcacnncnnnnncncacagcgtcaccncactccctctgtcttatgactcccctccccaaccccctcatctaaagacaccttcctttccactggctgtcaagccnacagggcaccagtgccacccagggcccngcacaaaggggcgcctagtaaaccttaaccaacttggttttttgcttcacccag

SEQ ID NO: 3874 - DNA, 544 bp, Homo sapiens
  misc_feature (94)..(94): n includes a, c, g, or t, or contains no nucleotide
  misc_feature (105)..(105): n includes a, c, g, or t, or contains no nucleotide
  misc_feature (136)..(137): n includes a, c, g, or t, or contains no nucleotide
  misc_feature (140)..(140): n includes a, c, g, or t, or contains no nucleotide
  misc_feature (142)..(143): n includes a, c, g, or t, or contains no nucleotide
  misc_feature (145)..(146): n includes a, c, g, or t, or contains no nucleotide
  misc_feature (187)..(205): n includes a, c, g, or t, or contains no nucleotide
  misc_feature (208)..(209): n includes a, c, g, or t, or contains no nucleotide
  misc_feature (227)..(227): n includes a, c, g, or t, or contains no nucleotide
  misc_feature (254)..(254): n includes a, c, g, or t, or contains no nucleotide
  misc_feature (306)..(328): n includes a, c, g, or t, or contains no nucleotide
  misc_feature (347)..(347): n includes a, c, g, or t, or contains no nucleotide
  misc_feature (367)..(398): n includes a, c, g, or t, or contains no nucleotide
  misc_feature (477)..(493): n includes a, c, g, or t, or contains no nucleotide
acctctgctgcttcctggactcggagcgccagcgcgggcggcgcgccgcacgccagtggcagctcttcgggacccaagcatcccgggccgtgcncgaggacctgngcggctgttggcagaagctggccgagctggnnggncnncnngaggagctgctgcgggagaacctagcgcttaaggagctctnnnnnnnnnnnnnnnnnnnatnnggcccccgcggcggcccnagcggcgccgggggatcaggagccggnccagcacccgagcttgccttgcccccgtgcgggccccgcgacctaggcgatnnnnnnnnnnnnnnnnnnnnnnngggcagtccggatcagttncccctggcctgttcccccgnnnnnnnnnnnnnnnnnnnnnnnnnnnnnnnngcccgcccggattgctccccgagccccgggaccgctgtggacctcgggacctggacgccgtcctggctgcgcaggaggnnnnnnnnnnnnnnnnnaagaaatcctgacaccaagaagggcccctcgctcttgctggcagggcagca

SEQ ID NO: 3875 - DNA, 485 bp, Homo sapiens
  misc_feature (69)..(70): n includes a, c, g, or t, or contains no nucleotide
  misc_feature (120)..(139): n includes a, c, g, or t, or contains no nucleotide
  misc_feature (274)..(291): n includes a, c, g, or t, or contains no nucleotide
  misc_feature (294)..(295): n includes a, c, g, or t, or contains no nucleotide
gtgcccgaccagacgaggctgtctcctggggcaagatccgggtggatgcacagcccgtcaaggtctatnntgacgcctccctggtcttccccctgcttgtggctgaaacctttgcccagnnnnnnnnnnnnnnnnnnnntgagaagaacgaggactgagcggctgcggtcccaggaaggtcttaccccctcttctatttattaatttgcagacccagcccctcccctactttttggtcagctacgtctctagaataagatggtatctgaagtcnnnnnnnnnnnnnnnnnnaannctgtgtctcggtccttggtcctgttggtgggtcccctggcttcagcctgctccatcctctgcctcataggcctcctctcgccagcactggacgctgcctcccatggcggtcagcaggcagggctctgttgggtggtaggccagcgactgcaccacaccggaacccacaggctgggccagagccagcgcac

SEQ ID NO: 3876 - DNA, 267 bp, Homo sapiens
tacaaggagacatctgtggtttccccaaccgttccaaaaggctatttcaaaggaaccagcccacgtatgagaaatgaatgtaacactgtggacattgacttcccgcataaggcagggtgaccccctgaactccagatgtttgcacagtatcttatgtgttgttttccgttgtgacgaatgtgattggaacatttggggagcacccagagggatttttcagtgggaagcattacactttgctaaatcatgtatttattcctgattaaa

SEQ ID NO: 3877 - DNA, 571 bp, Homo sapiens
gcccagcgccgagagactgtggtacgtgtctgtgaacggcaagggccggccccgcaggggcttcaagacccgccgcacacagaagtcctccctgttcctgccccgcgtgctggaccacagggaccacgagatggtgcggcagctacagagtgggctgcccagaccccctggtaagggggtccagccccgacggcggcggcagaagcagagcccggataacctggagccctctcacgttcaggcttcgagactgggctcccagctggaggccagtgcgcactagctgggcctggtggccaccgccagagctcctggcgacatcttggcgtggcagcctcttgactctgactctcctccttgagcccttgcccctgcgtcccgcgtctgggttctcagctatttccagagccagctcaaatcagggtccagtgggaactgaagagggcccaagtcggagctcggagggggctgcctgcaatgcagggcatttgtgggtctgtgtggcaggaagccggcagggaagggcctgagtgccagccctggcagactgaggagcctcccaggagcagcg

SEQ ID NO: 3878 - DNA, 334 bp, Homo sapiens
  misc_feature (34)..(37): n includes a, c, g, or t, or contains no nucleotide
  misc_feature (45)..(45): n includes a, c, g, or t, or contains no nucleotide
  misc_feature (49)..(49): n includes a, c, g, or t, or contains no nucleotide
  misc_feature (59)..(62): n includes a, c, g, or t, or contains no nucleotide
  misc_feature (85)..(85): n includes a, c, g, or t, or contains no nucleotide
  misc_feature (112)..(112): n includes a, c, g, or t, or contains no nucleotide
  misc_feature (141)..(142): n includes a, c, g, or t, or contains no nucleotide
  misc_feature (146)..(146): n includes a, c, g, or t, or contains no nucleotide
  misc_feature (176)..(176): n includes a, c, g, or t, or contains no nucleotide
gcagggggcacaggacagagaagaggaagcggcnnnngccccagngccngaccagcagnnnncacaggacagagaagaggaagcngcagcagccccagcgccgaccagcagngggcacaggacagagaagaggaagcggcnncagnccccagcgccgaccagcagcgggcacaggnacagagaagaggaagcgcagcagccccagtgccgaccagcagcggcacaggacagagaagaggaagcgcagcagccccagcgccgaccagcagcggcacaggacagagaagaggaagtgaggaaatggaagaagagggttgacctgagctgaaggaca

SEQ ID NO: 3879 - DNA, 285 bp, Homo sapiens
  misc_feature (38)..(121): n includes a, c, g, or t, or contains no nucleotide
  misc_feature (153)..(205): n includes a, c, g, or t, or contains no nucleotide
gccccagggcagagggtcaccatctcctgcactgggannnnnnnnnnnnnnnnnnnnnnnnnnnnnnnnnnnnnnnnnnnnnnnnnnnnnnnnnnnnnnnnnnnnnnnnnnnnnnnnnnnntcctcatctatgctaatagcaaccggccctcnnnnnnnnnnnnnnnnnnnnnnnnnnnnnnnnnnnnnnnnnnnnnnnnnnnnnccatcactgggcttcaggctgaggatgaggctgattaatactgccagtcttatgacagcagcgtgagtggttcggtattc

SEQ ID NO: 3880 - DNA, 361 bp, Homo sapiens
acattggtgatctgacggcagccaagcccagctcggatcaaggtcccttcatgcgcggtgtctctgcgcctgagtaacgacatggaactgaaagaccagaggacactaggaatcaaaacaaacatttctattctgcttagtttttctgttttgtaaatctttctttcttaccactttcagcccctgggattctagaactgtgaattgtgctctgttgtagggggcaggggaagctctcactctgttgccattaaatgtatgagactgggcatctctgagcaattgtagggcctgggatagagggtacttgaatcttcagaagttgaagtagcttttatgccctcaggaaaggccctggtct

SEQ ID NO: 3881 - DNA, 492 bp, Homo sapiens
  misc_feature (84)..(84): n includes a, c, g, or t, or contains no nucleotide
  misc_feature (108)..(108): n includes a, c, g, or t, or contains no nucleotide
  misc_feature (114)..(128): n includes a, c, g, or t, or contains no nucleotide
  misc_feature (398)..(429): n includes a, c, g, or t, or contains no nucleotide
atggaggcgtctctcctcacaactggggagattctggtcccccctgcaaaaaatctcggaaggagaagaagcaaacaggatcangggccattaggaaacagctatgtnggaaannnnnnnnnnnnnnnatgagaagaatgggaaaaagatatgtaccctgcccagcccaccttcccccttggcttccttggccccagttgctgattcctccacgagggtggactctcccagccatggcctggtgaccagctccctctgcatcccttctccagcccggctgtcccaaaccccccattcacagcctcctcggcctggtacttgcaagacaagtgtggccacacaatgcgatccagaagagatcatcgtgctctcagactctgattagctgcctccccttnnnnnnnnnnnnnnnnnnnnnnnnnnnnnnnntttggaggaaggtgggaagcagatgactgaggaagggatggactaagctaatccccttttggt

SEQ ID NO: 3882 - DNA, 437 bp, Homo sapiens
agtgatgaaacccacagatcctagcaaatgtgcccaaccagctttactaaagggggaggaagggagggcaaagggatgagaagacaagtttcccagaagtgcctggttctgtgtacttgtccctttgttgtcgtcgttgtagttaaaggaatttcattttttaaaagaaatcttcgaaggtgtggttttcatttctcagtcaccaacagatgaataattatgcttaataataaagtatttattaagactttcttcagagtatgaaagtacaaaaagtctagttacagtggatttagaatatatttatgttgatgtcaaacagctgagcaccgtagcatgcagatgtcaaggcagttaggaagtaaatcggtgtcttgtagatatgtgcaaggtagcatgatgagcaacttgagtttgttgccactgagaagcaggcg

SEQ ID NO: 3883 - DNA, 88 bp, Homo sapiens
atcacctcaggcttctcagttcccttagccgtcttactcaactgccccctttcctctccctcagaatttgtgtttgctgcctctatct

SEQ ID NO: 3884 - DNA, 482 bp, Homo sapiens
tcacttaatatgcttgaactgtcgccttaactatgttaagcatctagactaaaagccaaaatataattattgctgcctttctaaaaacccaaaatgtagttctctattaacctgaaatgtacactagcccagaacagtttaatggtacttactgagctatagcatagctgcttagttgtttttgagattttttagtcaacacataatggaaacttctttcttctaaaagttgccagtgccacttttaagaagtgaatcactatatgtgatgtaaaagttattacactaaacaggataaacttttgactccccttttgttcatttgtggattaagtggtataatacttaattttggcatttgactcttaagattatgtaacctagctactttgggatggtcttagaatatttttctgataacttgttccttttcctgactcctccttgcaaacaaaatgatagttgacactttatcctgattt

SEQ ID NO: 3885 - DNA, 550 bp, Homo sapiens
  misc_feature (34)..(35): n includes a, c, g, or t, or contains no nucleotide
  misc_feature (44)..(44): n includes a, c, g, or t, or contains no nucleotide
  misc_feature (51)..(51): n includes a, c, g, or t, or contains no nucleotide
  misc_feature (92)..(92): n includes a, c, g, or t, or contains no nucleotide
  misc_feature (106)..(106): n includes a, c, g, or t, or contains no nucleotide
  misc_feature (109)..(109): n includes a, c, g, or t, or contains no nucleotide
  misc_feature (118)..(118): n includes a, c, g, or t, or contains no nucleotide
  misc_feature (325)..(325): n includes a, c, g, or t, or contains no nucleotide
gtgtggtgccccaggcctttgtgccactcctcannagacctggncccagtnggagcctgtcctggttcctgaggcacatcctaacgcaagtntgaccatgtatgtntgnacccctgtnccccaccctgaccctcccatggccctctccaggactcccacccggcagatcagctctagtgacacagatccgcctgcagatggcccctccaaccctctctgctgctgtttccatggcccagcattctccacccttaaccctgtgctcaggcacctcttcccccaggaagccttccctgcccaccccatctatgacttgagccaggtntggtccgtggtgtcccccgcacccagcaggggacaggcactcaggagggcccagtaaaggctgagatgaagtggactgagtagaactggaggacaagagtcgacgtgagttcctgggagtctccagagatggggcctggaggcctggaggaaggggccaggcctcacattcgtggggctccctgaatggcagcctgagcacagcgtaggcccttaataaacacct

SEQ ID NO: 3886 - DNA, 559 bp, Homo sapiens
ccctcattgctgtcttgccccagtttggggtgccaagatggaagtcacctttctgggctttctcctggagactagctggggcttatgggtggctttcaaggctggggcatggcaaatcaggggccagagagcaggggagcttgggactcaggtctgtaactgcccagccccttttctctgctcttgtttcactccaccatcactcactcactccccactcccccacccatggggaggagacctttgatgaattcttcctctccttcccacaaaagacagacccagtgagtgaatcaggcaaagtgcttataatgtgtgttgtgtgagcgtggccttgggaggacatgcgtgtgtcagggatgagttgaggtgatatttttatgtgcagcgacccttggtgtttcccttcctcggtggctctggggtatgtgtgtgtgggtgtgtgcgcctgagtgagtgtgtgtgcttgaatgtgagtgtgtatgtcagtggtttctacttcccctgggatgctgacccaggaatagtggacatggtcacagtcctatgtacagagctt

SEQ ID NO: 3887 - DNA, 400 bp, Homo sapiens
  misc_feature (108)..(108): n includes a, c, g, or t, or contains no nucleotide
  misc_feature (349)..(371): n includes a, c, g, or t, or contains no nucleotide
cgaggaaggcattgctgctggaggtgtaatggacgttaatactgctttacaagaggttctgaagactgccctcatccacgatggcctagcacgtggaattcgcgaagntgccaaagccttagacaagcgccaagcccatctttgtgtgcttgcatccaactgtgatgagcctatgtatgtcaagttggtggaggccctttgtgctgaacaccaaatcaacctaattaaggttgatgacaacaagaaactaggagaatgggtaggcctttgtaaaattgacagagaggggaaaccccgtaaagtggttggttgcagttgtgtagtagttaaggactatggcaaggagtcnnnnnnnnnnnnnnnnnnnnnnngagtatttcaaatgcaagaaatgaagaaa

SEQ ID NO: 3888 - DNA, 456 bp, Homo sapiens
  misc_feature (190)..(204): n includes a, c, g, or t, or contains no nucleotide
  misc_feature (398)..(430): n includes a, c, g, or t, or contains no nucleotide
gctgtcgttggctgcgcctccaaggccctagatctgctgatggggagtaacaccattgtccagtctatggctgccaagacccagaggttccgtagtaagatggaagctgctggcttcactatctcgggagccagtcaccccatctgccctgtgatgctgggtgatgcccggctggcctctcgcatggcgnnnnnnnnnnnnnnnagaggcatctttgtcatcgggttcagctaccccgtggtccccaagggcaaggcccggatccgggtacagatctcagcagtgcatagcgaggaagacattgaccgctgcgtggaggccttcgtggaagtggggcgactgcacggggcactgccctgagctctgggtaaggacgagaagagccaaggtccgcctgnnnnnnnnnnnnnnnnnnnnnnnnnnnnnnnnnccagaccagaggctctgagccctgaa

SEQ ID NO: 3889 - DNA, 376 bp, Homo sapiens
  misc_feature (63)..(63): n includes a, c, g, or t, or contains no nucleotide
  misc_feature (264)..(264): n includes a, c, g, or t, or contains no nucleotide
aagtctttcgcgaggcggcgcagaaccctgaggaggtggcggaggtcttcctcaccgctttgngcgccccgaagccgaccctgcgctacttcaccaccgagcgcttcctgcccctgctgcggatgcgcctggacgaccccagcggctccaactacgtcaccgccatgcaccgggaagtgttcggcgacgttccggcaaaggccgaggctggggccgaggctgggggcggggccgggcctggggcagaggacgaggccgggcgcngtgcggtgggggaccctgagctcggcgatcctccggccgccccgcagtaaaggcttcctcagccgctgtctcccgcgcccttctttgtcccctgggtctgtgtggtccctgg

SEQ ID NO: 3890 - DNA, 567 bp, Homo sapiens
gatatgcgaggccgagtcctggatgctggttatggagatggcagaacttggtcccctcaataagtatttgcagcagaacagacatgtcaaggataagaacatcatagaactggttcatcaggtttccatgggcatgaagtacttggaggagagcaattttgtgcacagagatctggctgcaagaaatgtgttgctagttacccaacattacgccaagatcagtgatttcggactttccaaagcactgcgtgctgatgaaaactactacaaggcccagacccatggaaagtggcctgtcaagtggtacgctccggaatgcatcaactactacaagttctccagcaaaagcgatgtctggagctttggagtgttgatgtgggaagcattctcctatgggcagaagccatatcgagggatgaaaggaagtgaagtcaccgctatgttagagaaaggagagcggatggggtgccctgcagggtgtccaagagagatgtacgatctcatgaatctgtgctggacatacgatgtggaaaacaggcccggattcgcagcagtggaactgcggct

SEQ ID NO: 3891 - DNA, 317 bp, Homo sapiens
attcctggtggctgtgtgcctccaaccctggtccccctctgtctccagccaccctctgcttgggcttctgagctggtggccctggcccagaggtctggcggaggcccaggcagcagccatggcggggtgtctctacaggggagaggcgggagcctgccaccctcttcctgccctacctcctactaacacttcctgccccatttggacccgtaccatggggctcaggacagagggagctagcagctggcctccatggccccacagcctccttcgaggctgtgctgggtgcagaaccgccagagccacccaaaaggtgt

SEQ ID NO: 3892 - DNA, 298 bp, Homo sapiens
aatcatttgcaatgccctaattagggcatcctgcccctcgccttttaggctcaggacggaaggtcagttgccatggttaccgaggaccctggttactctggtgctgtcctgttttactggaccccgcctcccagccccaggggtgcctgtgggggtccatttgggtacgtctgggcccccactttcaccagtttctgcggccttccaccgggcctgaaccacagcggaggagctccgctaagacctccccacccccgctgggggtgggggcgggtgtccgtccggaaatgaaggaata

SEQ ID NO: 3893 - DNA, 505 bp, Homo sapiens
  misc_feature (109)..(109): n includes a, c, g, or t, or contains no nucleotide
  misc_feature (225)..(243): n includes a, c, g, or t, or contains no nucleotide
  misc_feature (416)..(416): n includes a, c, g, or t, or contains no nucleotide
tttgactttcccagcgttgagtcatcaacactttgccaattagctcatggtcctggcaacctcagaaacccctgaagttttaaaaactttctcgctccccacgaccccngaatgaaacagctttaaaaatagccttaagcaaaaggatgttatttcattaaatttggtttaatggaaagaataaaagtaaatgaaaaacacaccctacacactagactccgaacnnnnnnnnnnnnnnnnnnntagcaaactctttgggaaagaaaacgaaaatgttattgcacatgtaaaatatgaaaacttaactctgctgtgtgttaggcaatcctgtaatcttttttgactcttaaaagaaattcatttctgaaatgcttggttggaagactgtgacaatagctcatgaaattgagtgttanttttttctttcttttttaaaaaaatatgtaaagtgcagtcttctgtattcctgcatattgtatatacctgtatatgttttcctgagcag

SEQ ID NO: 3894 - DNA, 154 bp, Homo sapiens
actgctcctgcaccacaggtggctcctgtgcctgcgccggctcctgcaagtgcaaagagtgcaaatgtacctcctgcaagaagtgctgctgctcttgctgccccgtgggctgtgccaagtgtgcccagggctgtgtctgcaaaggctcatcaga

SEQ ID NO: 3895 - DNA, 513 bp, Homo sapiens
  misc_feature (26)..(73): n includes a, c, g, or t, or contains no nucleotide
  misc_feature (107)..(110): n includes a, c, g, or t, or contains no nucleotide
  misc_feature (130)..(145): n includes a, c, g, or t, or contains no nucleotide
  misc_feature (424)..(424): n includes a, c, g, or t, or contains no nucleotide
atggcagaaactgctgagacctattnnnnnnnnnnnnnnnnnnnnnnnnnnnnnnnnnnnnnnnnnnnnnnnnacaggactgctttcaggctcctggtttattctcnnnntgatagactgagctccttcnnnnnnnnnnnnnnnnctgcaggaagaagatgatctgatggccgtgggtgtctgggaagctcttcgtggcctcaatgccctcctttatcctcatctttcttctatgcagaacaaaaagctgcatctaataatgttcaatacttaatattctctatttattacttactgcttactcgtaatgatctagtggggaaacatgattcattcacttaaaatactgattaagccatggcaggtactgactgaagatgcaatccaaccaaagccattacattttttgagttagatgggactntctggatagttgaacctcttcactttataaaaaaggaaagagagaaaatcactgctgtatactaaatacctcacagattagatgaaaag

SEQ ID NO: 3896 - DNA, 550 bp, Homo sapiens
  misc_feature (27)..(27): n includes a, c, g, or t, or contains no nucleotide
  misc_feature (71)..(71): n includes a, c, g, or t, or contains no nucleotide
  misc_feature (158)..(158): n includes a, c, g, or t, or contains no nucleotide
  misc_feature (359)..(368): n includes a, c, g, or t, or contains no nucleotide
  misc_feature (374)..(380): n includes a, c, g, or t, or contains no nucleotide
  misc_feature (382)..(395): n includes a, c, g, or t, or contains no nucleotide
  misc_feature (399)..(400): n includes a, c, g, or t, or contains no nucleotide
  misc_feature (407)..(407): n includes a, c, g, or t, or contains no nucleotide
  misc_feature (409)..(409): n includes a, c, g, or t, or contains no nucleotide
ttgtcaaggccagttctgcagtgacanggcccaggggctgcccaccaggtgtgctgggcagacttcagctngggacagaagtccgatctccctagggccccacctggaccattttccctccgttttattttgttaattaaattctttccaaattggancgctctgggatttcttccatggtggacttttgtttctgatcttgttttccctgtggatattggaggacagcgaggttctttctgatactaaaaacctttctttcaggcagcaaatgaacttgaaaggttgcctggactcgctggagcaaaggaaagcgattttgtttgtataattaaatgatctgttcttctacttcaaannnnnnnnnnaaaaannnnnnnannnnnnnnnnnnnnaaannaaagttngnagctcctcccatgcccaggaaagcacagaactcaagtgtggtggccgtctgagctgtcctttcgctggccccgctgtccgcaggggcttcctacctgtgtgagaggtcgtagcgggagacagcaacagagagtaggcggct

SEQ ID NO: 3897 - DNA, 86 bp, Homo sapiens
  misc_feature (46)..(46): n includes a, c, g, or t, or contains no nucleotide
caggaggtgccctggtacacctgcttgaccttccctgtgtacctcnacccccagctcccatcccagatctcaaagtgtttgagcgt

SEQ ID NO: 3898 - DNA, 77 bp, Homo sapiens
tcctgaagctgacagcattcgggccgagatgtctcgctccgtggccttagctgtgctcgcgctactctctctttctg

SEQ ID NO: 3899 - DNA, 494 bp, Homo sapiens
  misc_feature (124)..(124): n includes a, c, g, or t, or contains no nucleotide
  misc_feature (184)..(184): n includes a, c, g, or t, or contains no nucleotide
  misc_feature (237)..(262): n includes a, c, g, or t, or contains no nucleotide
  misc_feature (447)..(464): n includes a, c, g, or t, or contains no nucleotide
ccactctatgagttggacttcagtcttgcctaggcgattttgtctaccatttgtgttttgaaagcccaaggtgctgatgtcaaagtgtaacagatatcagtgtctccccgtgtcctctccctgncaagtctcagaagaggttgggcttccatgcctgtagctttcctggtccctcacccccatngccccaggcccacagcgtgggaactcactttcccttgtgtcaagacatttctnnnnnnnnnnnnnnnnnnnnnnnnnnactccatgcaggggtcagtgcagcagaggacagtctggagaaggtattagcaaagcaaaaggctgagaaggaacagggaacattggagctgactgttcttggtaactgattacctgccaattgctaccgagaaggttggaggtggggaaggctttgtataatcccacccacctcaccaaaacgannnnnnnnnnnnnnnnnngtcctttctggaagtttctggtgccatttc

SEQ ID NO: 3900 - DNA, 198 bp, Homo sapiens
  misc_feature (52)..(71): n includes a, c, g, or t, or contains no nucleotide
gcctgcttagattgcagtattcattatctgcatctaatttggtagtttccannnnnnnnnnnnnnnnnnnnaacttcagtccccattattacctgtgtctttgccaagctgcctagcatacatcagtatgtaatgtaaaagacatatgagcaagaaaaaagtgatttaacttacctcatcaagaatgtgcccctacag

SEQ ID NO: 3901 - DNA, 613 bp, Homo sapiens
ttatgggcacaacaacaaagaagctaagttcgcctacccaaatgaaagtaggctttacagtcaagtacttctgttgattgctaaataacttcattttcttgaaatagagcaactttgagtgaaatctgcaacatggataccatgtatgtaagatactgctgtacagaagagttaaggcttacagtgcaaatgaggcgtcagctttgggtgctaaaattaacaagtctaatattattaccatcaatcaggaagagataataaatgtttaaacaaacacagcagtctgtataaaaatacgtgtatatttactctttctgtgcacgctctatagcataggcaggagaggcttatgtggcagcacaagccaggtggggattttgtaaagaagtgataaaacatttgtaagtaatccaagtaggagatattaaggcaccaaaagtaacatggcacccaacacccaaaaataaaaatatgaaatatgagtgtgaactctgagtagagtatgaaacaccacagaaagtcttagaaatagctctggagtggctctcccaggacagtttccagttggctgaatagtcttttggcactgatgttctacttcttcacattcatc

SEQ ID NO: 3902 - DNA, 148 bp, Homo sapiens
  misc_feature (109)..(109): n includes a, c, g, or t, or contains no nucleotide
tatcagcattaagtaccactgaggtggcaatgcacacttcaacctcttcttcagtcacaaagagttacatctcatcacagacaaatggagaaacgggacaacttgtccnatcgtttcactgtaccagctcctgtagtgataatactca

SEQ ID NO: 3903 - DNA, 453 bp, Homo sapiens
  misc_feature (33)..(40): n includes a, c, g, or t, or contains no nucleotide
  misc_feature (44)..(44): n includes a, c, g, or t, or contains no nucleotide
  misc_feature (60)..(60): n includes a, c, g, or t, or contains no nucleotide
  misc_feature (71)..(71): n includes a, c, g, or t, or contains no nucleotide
  misc_feature (220)..(220): n includes a, c, g, or t, or contains no nucleotide
  misc_feature (319)..(343): n includes a, c, g, or t, or contains no nucleotide
  misc_feature (392)..(392): n includes a, c, g, or t, or contains no nucleotide
  misc_feature (415)..(420): n includes a, c, g, or t, or contains no nucleotide
  misc_feature (424)..(424): n includes a, c, g, or t, or contains no nucleotide
  misc_feature (426)..(426): n includes a, c, g, or t, or contains no nucleotide
  misc_feature (428)..(428): n includes a, c, g, or t, or contains no nucleotide
gaagccagctaattaccatcaggttacaacttnnnnnnnnaaanaagtgaagcagcaaanagctgaagcanaaatgacataggaaaacagcagcaaagtccttgagtcccaacagtccacctcaaagacaaacatactaaagaacaaaggcccctaatccacctcctcaatggtagggcctgacccagaccctcccttgggaccctgagccccgaagccnccaggcccgggaccaccggcaccctggtacagtccgctgatgatggggttacacacctgctccagctccttcctcttgtgctcaaactcgtccttctcnnnnnnnnnnnnnnnnnnnnnnnnngagatgacctcttgacacttgtccagaaccttcttcttgtccgcctcgntgatcttgcccttgagcccctcnnnnnncacngngntcttcatgttgaaggcgtaggactc

SEQ ID NO: 3904 - DNA, 485 bp, Homo sapiens
  misc_feature (39)..(39): n includes a, c, g, or t, or contains no nucleotide
  misc_feature (41)..(41): n includes a, c, g, or t, or contains no nucleotide
  misc_feature (53)..(53): n includes a, c, g, or t, or contains no nucleotide
  misc_feature (55)..(56): n includes a, c, g, or t, or contains no nucleotide
  misc_feature (59)..(59): n includes a, c, g, or t, or contains no nucleotide
  misc_feature (69)..(71): n includes a, c, g, or t, or contains no nucleotide
  misc_feature (74)..(74): n includes a, c, g, or t, or contains no nucleotide
  misc_feature (77)..(77): n includes a, c, g, or t, or contains no nucleotide
  misc_feature (79)..(79): n includes a, c, g, or t, or contains no nucleotide
  misc_feature (82)..(83): n includes a, c, g, or t, or contains no nucleotide
  misc_feature (85)..(85): n includes a, c, g, or t, or contains no nucleotide
  misc_feature (87)..(88): n includes a, c, g, or t, or contains no nucleotide
  misc_feature (95)..(95): n includes a, c, g, or t, or contains no nucleotide
  misc_feature (102)..(102): n includes a, c, g, or t, or contains no nucleotide
  misc_feature (114)..(114): n includes a, c, g, or t, or contains no nucleotide
  misc_feature (182)..(182): n includes a, c, g, or t, or contains no nucleotide
  misc_feature (338)..(338): n includes a, c, g, or t, or contains no nucleotide
  misc_feature (406)..(429): n includes a, c, g, or t, or contains no nucleotide
cgcacgagaagctgaggcacgcagagagcgtgggcgacngncgagcgtgtgancnncanccgcgagaannnacnccntnctnnangnncggaccnaaggagntgggctacacgntgaagaagcatctgcaggacctgtccggcaggatctccagagctcggcacaacgaactctgaaggcantggggagcccagcccggcagggaagaggccagcgtgaaggacctgggctcttggccgtggcatttccgtggacagcccgccgtcagggtggctggggctggcacgggtgtcgaggcaggaaggattgtttctggtgactgcagccgctgccgtcgngacacagggcttggtggtggtagcatttgggtctgagatcggcccagctctgactgaaggggcttggnnnnnnnnnnnnnnnnnnnnnnnngtcaccaccccagtgaggacctcgatgtccagctgctgtcaggtctgatagtcctc

SEQ ID NO: 3905 - DNA, 117 bp, Homo sapiens
cacagccgcattggtgactcacttcaatgtgtcatttccggctgctgtgtgtgagcagtggacacgtgaggggggggtgggtgagagagacaggcagctcggattcaactaccttag

SEQ ID NO: 3906 - DNA, 380 bp, Homo sapiens
  misc_feature (61)..(61): n includes a, c, g, or t, or contains no nucleotide
  misc_feature (213)..(213): n includes a, c, g, or t, or contains no nucleotide
  misc_feature (257)..(335): n includes a, c, g, or t, or contains no nucleotide
caacaagattggacgttttgtgatcgaagaggttcctggtgagctcatgcaggaagacctnggcaacggatgacgtcatgcttctggacacctgggaccaggtctttgtctgggttggaaaggattctcaagaagaagaaaagacagaagccttgacttctgctaagcggtacatcgagacggacccagccaatcgggatcggcggacgcccnatcaccgtggtgaagcaaggctttgagcctccctcctttgtggnnnnnnnnnnnnnnnnnnnnnnnnnnnnnnnnnnnnnnnnnnnnnnnnnnnnnnnnnnnnnnnnnnnnnnnnnnnnnnntgaggaggggcagggcccacccatgtcaccggtcagtgccttttg

SEQ ID NO: 3907 - DNA, 443 bp, Homo sapiens
  misc_feature (274)..(291): n includes a, c, g, or t, or contains no nucleotide
agctcagcgggacctcagccatgagacttctcatcctggccctccttggcatctgctctctcactgcatacattgtggaaggtgtagggagtgaagtctcacataggaggacctgtgtgagcctcactacccagcgactgccagttagcagaatcaagacctacaccatcacggaaggctccttgagagcagtaatttttattaccaaacgtggcctaaaagtctgtgctgatccacaagccacgtgggtgagagacgtggtcaggagcatggnnnnnnnnnnnnnnnnnngaaataacatgatccagaccaagccaacaggaacccagcaatcgaccaatacagctgtgaccctgactggctagtagtctctggcaccctgtccgtctccagccagccagctcatttcactttacaccctcatggactgagattatactcac

SEQ ID NO: 3908 - DNA, 387 bp, Homo sapiens
  misc_feature (26)..(26): n includes a, c, g, or t, or contains no nucleotide
  misc_feature (33)..(33): n includes a, c, g, or t, or contains no nucleotide
  misc_feature (36)..(36): n includes a, c, g, or t, or contains no nucleotide
  misc_feature (164)..(227): n includes a, c, g, or t, or contains no nucleotide
  misc_feature (229)..(230): n includes a, c, g, or t, or contains no nucleotide
  misc_feature (257)..(276): n includes a, c, g, or t, or contains no nucleotide
gagctggtgtataccggtttctggcnacagccntgnagtgtgaatttgtccgccactgcatcgccaagtcccaggagcgagtggaagggaaagtgcaggtgtccgtcctcaagggccaggtgtacatcctcggccgggagtccccactgtctctctacaatgannnnnnnnnnnnnnnnnnnnnnnnnnnnnnnnnnnnnnnnnnnnnnnnnnnnnnnnnnnnnnnnanntcaattccctcaggctgaaggaatatnnnnnnnnnnnnnnnnnnnncactgccaaatagacccgtgtacaatgaggagctggggcctcctcaatttgcagatcccccaagtacaggcgctaattgttgtgataatttgtaattgtgacttgttctcc

SEQ ID NO: 3909 - DNA, 439 bp, Homo sapiens
agaacgagaagctgcaccagcgcgtggagcagctcacgcgggacctggccggcctccggcagttcttcaagcagctgcccagcccgcccttcctgccggccgccgggacagcagactgccggtaacgcgcggccggggcgggagagactcagcaacgacccatacctcagacccgacggcccggagcggacgccctgctgccgacgccagagccgccgcgtgcccgctgcagtttcttggacatagaccaaagaagctacagcctggacttaccaccactaaactgcgagagaagctaaacgtgtttattttcccttaaattatttttgtaatggtagctttttctacatcttactcctgttgatgcagctaaggtacatttgtaaaaagaaaaaaaaccagacttttcagacaaaccctttgtattgtagataagagg

SEQ ID NO: 3910 - DNA, 190 bp, Homo sapiens
  misc_feature (81)..(81): n includes a, c, g, or t, or contains no nucleotide
ggacatgcctcagaaccatgaatagcccgtactagatcttgggaacatggatcttagagtcactttggaataagttcttanataaatacccccagccttttgagaacggggcttgttaaaggacgcgtatgtagggcccgtacctactggcagttgggttcagggaaatgggattgacttggccttcagg

SEQ ID NO: 3911 - DNA, 458 bp, Homo sapiens
  misc_feature (26)..(36): n includes a, c, g, or t, or contains no nucleotide
  misc_feature (38)..(42): n includes a, c, g, or t, or contains no nucleotide
  misc_feature (44)..(45): n includes a, c, g, or t, or contains no nucleotide
  misc_feature (47)..(53): n includes a, c, g, or t, or contains no nucleotide
  misc_feature (55)..(63): n includes a, c, g, or t, or contains no nucleotide
  misc_feature (65)..(65): n includes a, c, g, or t, or contains no nucleotide
  misc_feature (70)..(74): n includes a, c, g, or t, or contains no nucleotide
  misc_feature (77)..(79): n includes a, c, g, or t, or contains no nucleotide
  misc_feature (82)..(84): n includes a, c, g, or t, or contains no nucleotide
  misc_feature (87)..(87): n includes a, c, g, or t, or contains no nucleotide
  misc_feature (89)..(164): n includes a, c, g, or t, or contains no nucleotide
ctgggccgtggaggtaacgatcaccnnnnnnnnnnncnnnnncnngnnnnnnncnnnnnnnnngnggccnnnnnggnnnggnnnccncnnnnnnnnnnnnnnnnnnnnnnnnnnnnnnnnnnnnnnnnnnnnnnnnnnnnnnnnnnnnnnnnnnnnnnnnnnnnagaaggagaaacagacatgtttaccacgcgttttccaaagctcctgatctttcccaagattgtaactgaaaactgctgtctcttgttttgttcgttttgggggtggtggtgctggctgggccatgcttgtgaagtgatgtgtgtctctgatttaacggattcactgttttctctgctaattgagagagcgttatttacattatttatttgttttgacacaagtgctttcagtgttttatcctagctaatggcttcttaaaggtaataaaacccttccaacgtaattggtcagat

SEQ ID NO: 3912 - DNA, 445 bp, Homo sapiens
  misc_feature (83)..(83): n includes a, c, g, or t, or contains no nucleotide
  misc_feature (89)..(89): n includes a, c, g, or t, or contains no nucleotide
  misc_feature (109)..(109): n includes a, c, g, or t, or contains no nucleotide
  misc_feature (122)..(122): n includes a, c, g, or t, or contains no nucleotide
  misc_feature (134)..(134): n includes a, c, g, or t, or contains no nucleotide
  misc_feature (136)..(137): n includes a, c, g, or t, or contains no nucleotide
  misc_feature (142)..(142): n includes a, c, g, or t, or contains no nucleotide
  misc_feature (145)..(145): n includes a, c, g, or t, or contains no nucleotide
  misc_feature (151)..(151): n includes a, c, g, or t, or contains no nucleotide
  misc_feature (158)..(158): n includes a, c, g, or t, or contains no nucleotide
  misc_feature (163)..(163): n includes a, c, g, or t, or contains no nucleotide
  misc_feature (169)..(169): n includes a, c, g, or t, or contains no nucleotide
  misc_feature (174)..(174): n includes a, c, g, or t, or contains no nucleotide
  misc_feature (179)..(179): n includes a, c, g, or t, or contains no nucleotide
  misc_feature (185)..(191): n includes a, c, g, or t, or contains no nucleotide
  misc_feature (193)..(193): n includes a, c, g, or t, or contains no nucleotide
  misc_feature (197)..(198): n includes a, c, g, or t, or contains no nucleotide
  misc_feature (205)..(205): n includes a, c, g, or t, or contains no nucleotide
  misc_feature (207)..(211): n includes a, c, g, or t, or contains no nucleotide
ccctgcaggcggtatccagaggtgagggaggcctgaaatgtttccaggcatgaccctggagcccggcagtgcaccccctaaangatggncgcacccggcagccccccantgtccccaggggncacacttccccntnnggatnggncacagnctgcccnacccntccatngattnccaangggccnnnnnnngngggnncaggatngnnnnncccctgcctgtgagtgacatcggttcaggaggagacagtcaggaagcctcctgctgagtggtccacattctgctgcccccagaccccatccagccaggggtggggatggggttgggctctgcgtcccactgagtctcattcctctgtccccgagccgagctctcctgggccagggtctcgtcaggaggtgcctgagagcagaatgaataattgaggttaggaacccggcatgcc

SEQ ID NO: 3913 - DNA, 546 bp, Homo sapiens
gccaactgatccatagcctcttcagattccttataaaatttaaaccaagagaggagaggaaagggtaaattttctgttactgaccttctgcttaatagtcttatagaaaaaggaaaggtgatgagcaaataaaggaacttctagactttacatgactaggctgataatcttattttttaggcttctatacagttaattctataaattctctttctccctctcttctccaatcaagcacttggagttagatctaggtccttctatctcgtccctctacagatgtattttccacttgcataattcatgccaacactggttttcttaggtttctccattttcacctctagtgatggccctactcatatcttctctaatttggtcctgatacttgtttcttttcacgttttcccatttccctgtggctcactgtcttacaatcactgctgtggaatcatgataccacttttagctctttgcatcttccttcagtgtatttttgtttttcaagaggaagtagattttaactggacaactttgagtactgac

SEQ ID NO: 3914 - DNA, 479 bp, Homo sapiens
  misc_feature (49)..(49): n includes a, c, g, or t, or contains no nucleotide
  misc_feature (96)..(96): n includes a, c, g, or t, or contains no nucleotide
  misc_feature (103)..(103): n includes a, c, g, or t, or contains no nucleotide
  misc_feature (106)..(109): n includes a, c, g, or t, or contains no nucleotide
  misc_feature (113)..(115): n includes a, c, g, or t, or contains no nucleotide
  misc_feature (118)..(118): n includes a, c, g, or t, or contains no nucleotide
  misc_feature (120)..(126): n includes a, c, g, or t, or contains no nucleotide
  misc_feature (128)..(129): n includes a, c, g, or t, or contains no nucleotide
  misc_feature (131)..(131): n includes a, c, g, or t, or contains no nucleotide
  misc_feature (133)..(133): n includes a, c, g, or t, or contains no nucleotide
  misc_feature (136)..(137): n includes a, c, g, or t, or contains no nucleotide
  misc_feature (139)..(172): n includes a, c, g, or t, or contains no nucleotide
  misc_feature (178)..(179): n includes a, c, g, or t, or contains no nucleotide
  misc_feature (367)..(367): n includes a, c, g, or t, or contains no nucleotide
ctcgccgacagcaaggcaggcggctgagcagcggcctggagcagcaganccaggctttgtagcgaggccaggtcttcggccgcatccggtacgganagtgcanatnnnngaannnccngnnnnnnncnntntntanngnnnnnnnnnnnnnnnnnnnnnnnnnnnnnnnnnngcactnnccgccgggacatggcagcctggacgtggggctggggctgtgggcgctgctggcggggttgactcttccagtgagggcagaaccaggctggcaggaggggaggacggtgtacctgctgctcagagcccccaaggctctcctctgagagccaccaagcaggacagagcagctcttgtcccaggtccctcnggctgagcgccgtgtcaccaggagaatagtgctcacagcccaggcagggtgtgtggctcctggatgggctcgtggggcgggatgggacagggcacgggctctcagaaaataa

SEQ ID NO: 3915 - DNA, 379 bp, Homo sapiens
  misc_feature (196)..(216): n includes a, c, g, or t, or contains no nucleotide
ctggcttttcccttgaggatccccagacccactccaaccgcatctatcgcatgatcaagctaggtctaggtattgatgaagatgaagtggcagcagaggaacccaatgctgcagttcctgatgagatcccccctctcgagggcgatgaggatgcgtctcgcatggaagaagtcgattaggttaggagttcatagtnnnnnnnnnnnnnnnnnnnnntagtgtccccatgggctcccactgcagcctcgagtgcccctgtcccacctggctccccctgctggtgtctagtgtttttttccctctcctgtccttgtgttgaaggcagtaaactaagggtgtcaagccccattccctctctactcttgacagcaggattgga

SEQ ID NO: 3916 - DNA, 559 bp, Homo sapiens
  misc_feature (131)..(161): n includes a, c, g, or t, or contains no nucleotide
  misc_feature (202)..(228): n includes a, c, g, or t, or contains no nucleotide
  misc_feature (402)..(429): n includes a, c, g, or t, or contains no nucleotide
catagtcttaggagttcatttaaaccataggaacttttcacttatctcatgttagctgtaccagtcagtgattaagtagaactacaagttgtataggctttattgtttattgctggtttatgaccttaatnnnnnnnnnnnnnnnnnnnnnnnnnnnnnnnttttaactgtgactattgtataaaaacaaatcttgatatcnnnnnnnnnnnnnnnnnnnnnnnnnnncaccctgcccatttttgtaaaactgcagtcatcttggaccttttaaaacacaaattttaaactcaaccaagctgtgataagtggaatggttactgtttatactgtggtatgtttttgattacagcagataatgctttcttttccagtcgtctttgagaataaaggaaaaaaaannnnnnnnnnnnnnnnnnnnnnnnnnnntcttgtctatcatgttttgtaaatactggagaagctttgaccaatttgacttagagatggaatgtaactttgcttacaaaaattgctattaaactcctgcttaaggtgttctaattttctgtgagcacac

SEQ ID NO: 3917 - DNA, 382 bp, Homo sapiens
  misc_feature (279)..(279): n includes a, c, g, or t, or contains no nucleotide
  misc_feature (324)..(324): n includes a, c, g, or t, or contains no nucleotide
  misc_feature (341)..(344): n includes a, c, g, or t, or contains no nucleotide
  misc_feature (346)..(346): n includes a, c, g, or t, or contains no nucleotide
caacttgggttcttctcagcggggcgagctgagaagcggtcatgagcacctggggattttagtaagtgtgtcttcctagaattcgaaggctctctctttctagaggtgctacatagttggtaatgcttggaatggcaatagggtagaatgattaatcaaaggcatatcttctatatctgaagagtatccttccttcagggtttaatagactgagtcagatgggtctgatattaatcaaaattgtctcttctgaggaccgctgataagcattgacttgcngtcccctaaggaaatccgagcggctacaaagcgtttctttacttntcacttcaattaatgcnnnncntcgcttggtgagtgcgtactttttctacctgtacac

SEQ ID NO: 3918 - DNA, 487 bp, Homo sapiens
aatttgatgggaagagcctggtctcagttaccaaggagggtctggagctgcctgaggatgaggaggagaagaagaagatggaagagagcaaggcaaagtttgagaacctctgcaagctcatgaaagaaatcttagataagaaggttgagaaggtgacaatctccaatagacttgtgtcttcaccttgctgcattgtgaccagcacctacggctggacagccaatatggagcggatcatgaaagcccaggcacttcgggacaactccaccatgggctatatgatggccaaaaagcacctggagatcaaccctgaccaccccattgtggagacgctgcggcagaaggctgaggccgacaagaatgataaggcagttaaggacctggtggtgctgctgtttgaaaccgccctgctatcttctggcttttcccttgaggatccccagacccactccaaccgcatctatcgcatgatcaagctaggtctagg

SEQ ID NO: 3919 - DNA, 603 bp, Homo sapiens
  misc_feature (33)..(33): n includes a, c, g, or t, or contains no nucleotide
  misc_feature (57)..(57): n includes a, c, g, or t, or contains no nucleotide
  misc_feature (59)..(59): n includes a, c, g, or t, or contains no nucleotide
  misc_feature (96)..(96): n includes a, c, g, or t, or contains no nucleotide
  misc_feature (106)..(106): n includes a, c, g, or t, or contains no nucleotide
  misc_feature (121)..(121): n includes a, c, g, or t, or contains no nucleotide
  misc_feature (134)..(134): n includes a, c, g, or t, or contains no nucleotide
  misc_feature (137)..(137): n includes a, c, g, or t, or contains no nucleotide
  misc_feature (139)..(141): n includes a, c, g, or t, or contains no nucleotide
  misc_feature (143)..(145): n includes a, c, g, or t, or contains no nucleotide
  misc_feature (147)..(147): n includes a, c, g, or t, or contains no nucleotide
  misc_feature (149)..(151): n includes a, c, g, or t, or contains no nucleotide
  misc_feature (320)..(320): n includes a, c, g, or t, or contains no nucleotide
  misc_feature (389)..(389): n includes a, c, g, or t, or contains no nucleotide
  misc_feature (487)..(487): n includes a, c, g, or t, or contains no nucleotide
  misc_feature (499)..(499): n includes a, c, g, or t, or contains no nucleotide
  misc_feature (570)..(570): n includes a, c, g, or t, or contains no nucleotide
tgctgcagcttctggggcctccacagacccccntcctgcggggcacgctggcctaananacgtggcactgagcctcggctgtcgagaggggacttnccacggcccntggacctttgtgctnctggggcagagcntcngnnncnnngngnnntcccccagacagagccacccctgccgtgggaacctgtccgtgttcctgcgtggatcctgtgtttgtggctcccactccccagccccccagcagcccccagccgaggggcccagggcccacagccagcggtggaggtgtcttgctccgggcccgtagcccacgccctctntgggtggcagggccttctgaaggaaacttgcaggcgagcccaacgtggtggggggccttcctccctcanaggccatggggtgagaggggctcaggcagccaaggaggcccaggcgtgctccctcttatggagcccctcccatggagctctcttcccgccgcactttntaccccgggcanaggcgcttgcccacgggacgtttggggatggacctcggcccccgcccctgcagtcagcgtcagtgctcatntacgttaataaagtggtcctatttatggcggca

SEQ ID NO: 3920 - DNA, 346 bp, Homo sapiens
  misc_feature (211)..(267): n includes a, c, g, or t, or contains no nucleotide
tagcagttaccgtgttcacctcacactaaggcctagagtttgctctgatatgcatttggatgattaatgttatgctgttctttcatgtgaatgtcaagacatggagggtgtttgtaattttatggtaaaattaatccttcttacacataatggtgtcttaaaattgacaaaaaatgagcacttacaattgtatgtctcctcaaatgaaaannnnnnnnnnnnnnnnnnnnnnnnnnnnnnnnnnnnnnnnnnnnnnnnnnnnnnnnnagtacaataatgcacaatcagtgttgctcaaactgctttatacttataaacagccatcttaaataagcaacgtattgtg

SEQ ID NO: 3921 - DNA, 529 bp, Homo sapiens
  misc_feature (38)..(38): n includes a, c, g, or t, or contains no nucleotide
  misc_feature (50)..(51): n includes a, c, g, or t, or contains no nucleotide
  misc_feature (308)..(308): n includes a, c, g, or t, or contains no nucleotide
  misc_feature (324)..(366): n includes a, c, g, or t, or contains no nucleotide
  misc_feature (370)..(370): n includes a, c, g, or t, or contains no nucleotide
  misc_feature (397)..(446): n includes a, c, g, or t, or contains no nucleotide
aaagcgaacagaagccctgcgccaggcagctgtgggcnagggcgacttcnncctgctggatcacagaggccgggctcgctgcaaggctgacttccggggccagtgggtgctgatgtactttggcttcactcactgccctgacatctgcccagacgagctggagaagctggtgcaggtggtgcggcagctggaagcagagcctggtttgcctccagtgcagcctgtcttcatcactgtggaccccgagcgggacgacgttgaagccatggcccgctacgtccaggacttccacccaagactgttgggtntgaccggctccaccannnnnnnnnnnnnnnnnnnnnnnnnnnnnnnnnnnnnnnnnnntgcnggccccaaggatgaggaccaggactannnnnnnnnnnnnnnnnnnnnnnnnnnnnnnnnnnnnnnnnnnnnnnnnntcacggattactacggccggagcagatcggctgagcagatctcagacagtgtgcggcggcacatggcggctttccgcagtgtc

SEQ ID NO: 3922 - DNA, 533 bp, Homo sapiens
  misc_feature (443)..(443): n includes a, c, g, or t, or contains no nucleotide
  misc_feature (445)..(445): n includes a, c, g, or t, or contains no nucleotide
  misc_feature (447)..(451): n includes a, c, g, or t, or contains no nucleotide
  misc_feature (454)..(458): n includes a, c, g, or t, or contains no nucleotide
  misc_feature (468)..(468): n includes a, c, g, or t, or contains no nucleotide
  misc_feature (477)..(477): n includes a, c, g, or t, or contains no nucleotide
  misc_feature (489)..(489): n includes a, c, g, or t, or contains no nucleotide
  misc_feature (491)..(491): n includes a, c, g, or t, or contains no nucleotide
gtgcttcttactattaagcagtaaaaactgttctctattagactttagaaataaatgtacctgatgtacctgatgctatggtcaggttatactcctcctcccccagctatctatatggaattgcttaccaaaggatagtgcgatgtttcaggaggctggaggaaggggggttgcagtggagagggacagcccactgagaagtcaaacatttcaaagtttggattgtatcaagtggcatgtgctgtgaccatttataatgttagtagaaattttacaataggtgcttattctcaaagcaggaattggtggcagattttacaaaagatgtatccttccaatttggaatcttctctttgacaattcctagataaaaagatggcctttgcttatgaatatttataacagcattcttgtcacaataaatgtattcaaataccaataananannnnnaannnnntccctttacnacttttttnttcccaagttananactgaagtttttatttttagttgctgaggttaacattgctgc

SEQ ID NO: 3923 - DNA, 374 bp, Homo sapiens
  misc_feature (289)..(310): n includes a, c, g, or t, or contains no nucleotide
acttttctgaaacgattagctgtagccaaattatgtggttacgttttgctacattagaatttgaaaatgcaatatgtgtggtaaatctactgtttgaaatttataatggtctctgatatgattcgaattttggtaacttttgaaagttattttccccctttagtcatggatttctatttgttttttaatgttaatttttctagaaagcatctgaattgactaggcttttcctatataaaaaactcaaaacttgttaactctgtactttaataaaatttaaaattaaaannnnnnnnnnnnnnnnnnnnnngctagatacatatataattaaagtactcaagttagttgttttgcagagatgttgccttcagatg

SEQ ID NO: 3924 - DNA, 451 bp, Homo sapiens
  misc_feature (30)..(94): n includes a, c, g, or t, or contains no nucleotide
  misc_feature (96)..(96): n includes a, c, g, or t, or contains no nucleotide
  misc_feature (326)..(327): n includes a, c, g, or t, or contains no nucleotide
ctactggatcaggacttttgttccaggttnnnnnnnnnnnnnnnnnnnnnnnnnnnnnnnnnnnnnnnnnnnnnnnnnnnnnnnnnnnnnnnnncngagtggtgagcaccaactacaaccagcatgctatggtgttcttcaagaaagtttctcaaaacagggagtacttcaagatcaccctctacgggagaaccaaggagctgacttcggaactaaaggagaacttcatccgcttctccaaatctctgggcctccctgaaaaccacatcgtcttccctgtcccaatcgaccagtgtatcgacggctgagtgcacaggtgccgccanntgccgcaccagcccgaacaccattgagggagctgggagaccctccccacagtgccacccatgcagctgctccccaggccaccccgctgatggagccccaccttgtctgctaaataaacatgtgc

SEQ ID NO: 3925 - DNA, 397 bp, Homo sapiens
  misc_feature (237)..(252): n includes a, c, g, or t, or contains no nucleotide
  misc_feature (371)..(371): n includes a, c, g, or t, or contains no nucleotide
taaggctggcgacagccccgggacagaccctgtgttccccaaggcgtcttcagcctgccccgagggacagagactggagctcaatcttggaccgtacagacgctcgccgacaacctggccggcggcaccatgaggcaggcgggacgcgcagcgctgctggccgcgctgctgctcctggtacagctgtgccctgggagcagccagaggagccccgaggcggccggggtccaggacccnnnnnnnnnnnnnnnncccggggcacggaaccagggtggcggggcccgcgcgctcctcttgctgctggcggagcgcttcccgcgccgcgcggggcccggccgattgggactcgggacggcaggcgagcggccgcngcgggacaacccttctctgtccattg

SEQ ID NO: 3926 - DNA, 231 bp, Homo sapiens
gaaacctaaggaagcttctactgaaactaaaattgatgtggccagcatcaaggaaaaggttaagaaagcaaagaataagaaactgggagctcttacagctgaagaaattgcacttaagatggaggcagatgaaaagaaaaagaagaaaaaaaagtaacatacccaaaactccttgactagaactatctccttttgtaaaggattttgagatatcaggcattagttgcctta

SEQ ID NO: 3927 - DNA, 448 bp, Homo sapiens
  misc_feature (114)..(137): n includes a, c, g, or t, or contains no nucleotide
  misc_feature (280)..(326): n includes a, c, g, or t, or contains no nucleotide
  misc_feature (398)..(412): n includes a, c, g, or t, or contains no nucleotide
gcagggaggctttggcatgacttaagaggaagggcagtcttgggacccgctatgcaggtcctggcaaacctggctgccctgtctcatccctgtccctcagggtagcaccatggnnnnnnnnnnnnnnnnnnnnnnnncttgctgtatccctgttgtgaggttccttccaggggctggcactgaagcaagggtgctggggccccatggccttcagccctggctgagcaactgggctgtagggcagggccacttcctgaggtcaggtcttggtaggtgcctnnnnnnnnnnnnnnnnnnnnnnnnnnnnnnnnnnnnnnnnnnnnnnnaatccaggccaaaaagttcacagtcaaatggggaggggtattcttcatgcaggagaccccaggccctggagnnnnnnnnnnnnnnnaatcctgtcccaggccggatcctcctgaagcccttt

SEQ ID NO: 3928 - DNA, 187 bp, Homo sapiens
  misc_feature (93)..(108): n includes a, c, g, or t, or contains no nucleotide
caaggaaaaaccttctgccccagctttgcaggatgaaacacttccccgcttggctctcattcttccacaagagagacctttctccggacctgnnnnnnnnnnnnnnnncaactctgcagaaaatgtcctcccctgtggctgcctcagctcatgcctttggcctgaagtcccagcattgatggcagcc

SEQ ID NO: 3929 - DNA, 583 bp, Homo sapiens
tggaggcgctggacaaggtcctgctggccgtctctgaggagtacctcgacctccgcctgaccttcggaccctattccccctctggtggggacgccagcagcacctgctcctccagcgattctgtcttcagccacgaccccctgccattgggatccagctccttccccttcgggtctggggtgcagacatgagcaaggctcaaggctgtgcaggcacataggctggtggccttgggccttggggctcagccacagcctgacacagtgctcgaccttgatagcatggggcccctggcccagagttgctgtgccgtgtccaagggccgtgcccttgcccttggagctgccgtgcctgtgtcctgatggcccaaatgtcagggttctgctcggcttcttggaccaaggcgcttagtccccatcccgggtttggctgagcctggctggagagctgctatgctaaacctcctgcctcccaataccagcaggaggttctgggcctctgaaccccctttccccacacctccccctgctgctgctgccccagcgtcttgacgggagcattggcccctgagcccagagaagct

SEQ ID NO: 3930 - DNA, 433 bp, Homo sapiens
  misc_feature (38)..(64): n includes a, c, g, or t, or contains no nucleotide
  misc_feature (336)..(350): n includes a, c, g, or t, or contains no nucleotide
  misc_feature (376)..(398): n includes a, c, g, or t, or contains no nucleotide
ggacctaacatctcgcacgtgactccctcagcctcagnnnnnnnnnnnnnnnnnnnnnnnnnnnggttcctctcaatcctgcaaccccagctgtcccaccggtggatgcagaggggaatccgaggccatcaaccttggtgacagcagcgcagtgccaatgctgatcacactgcatgggagattttgttaacgtctgccacccccactctcacccccaagctctaagcccccgggaggcctggactgtcttcctcatctctgtagcaccaagcctgatagatctgtatatggtaaacaggggtttaaccacatgtggttaacatggattaatgtggnnnnnnnnnnnnnnnaacacaaccttaggaccttgggcccnnnnnnnnnnnnnnnnnnnnnnnaggagccaatttaagaagacccttatggagacctg

SEQ ID NO: 3931 - DNA, 272 bp, Homo sapiens
  misc_feature (160)..(189): n includes a, c, g, or t, or contains no nucleotide
gtctatactagtgcagatttcaacacttttttttaacgttttaattactatagtgttatgtagagatttgattgagcagctaatgtttctgaactttacttactaattttcagtgtccttaagggttctgtagtgttatcaaagcaaaaagaaaatgctnnnnnnnnnnnnnnnnnnnnnnnnnnnnnnaatactcagatcatatacctcttaataaatagcatcttatgctaattagccctgctaaactatgtacagaggaaactgttcaa

SEQ ID NO: 3932 - DNA, 435 bp, Homo sapiens
  misc_feature (26)..(26): n includes a, c, g, or t, or contains no nucleotide
  misc_feature (57)..(58): n includes a, c, g, or t, or contains no nucleotide
  misc_feature (64)..(73): n includes a, c, g, or t, or contains no nucleotide
  misc_feature (75)..(77): n includes a, c, g, or t, or contains no nucleotide
  misc_feature (79)..(135): n includes a, c, g, or t, or contains no nucleotide
  misc_feature (309)..(345): n includes a, c, g, or t, or contains no nucleotide
  misc_feature (395)..(397): n includes a, c, g, or t, or contains no nucleotide
cacctgaagctgataggccaggtcancctgtgctcggcgggtgttgacctcgatgtnnataggnnnnnnnnnngnnntnnnnnnnnnnnnnnnnnnnnnnnnnnnnnnnnnnnnnnnnnnnnnnnnnnnnnnnnnagacaccttttcctgcttggctttagcttcccggatcccagcatctctcttggcctctgcttctccaatccgtgcatctttttggacttgagctgttcgagccttccccaaagagtgcaaatagtcctggtcatcgtgaatgtccttcagagtgtagctaaccacactgatgcnnnnnnnnnnnnnnnnnnnnnnnnnnnnnnnnnnnnnctgttctgagaatttctgcctgtccttatagatctcctccacagtcatgnnngccatgatggccctctggtggccctctaacgtctccag

SEQ ID NO: 3933 - DNA, 345 bp, Homo sapiens
  misc_feature (124)..(124): n includes a, c, g, or t, or contains no nucleotide
tgcagaacagcatcatgtcataaacgattctgagccattcacactttttatttaattaaatgtatttaattaaatctcaaatttattttaatgtaaagaacttaaattatgttttaaacacatnccttaaatttgtttaattaaatttaactctggtttctaccagctcatacaaaataaatggtttctgaaaatgtttaagtattaacttacaaggatataggtttttctcatgtatctttttgttcattggcaagatgaaataatttttctagggtaatgccgtaggaaaaataaaacttcacatttatgtggcttgtttatccttagctcacagattgaggt

SEQ ID NO: 3934 - DNA, 592 bp, Homo sapiens
  misc_feature (50)..(50): n includes a, c, g, or t, or contains no nucleotide
  misc_feature (146)..(146): n includes a, c, g, or t, or contains no nucleotide
  misc_feature (204)..(236): n includes a, c, g, or t, or contains no nucleotide
  misc_feature (267)..(267): n includes a, c, g, or t, or contains no nucleotide
  misc_feature (295)..(295): n includes a, c, g, or t, or contains no nucleotide
  misc_feature (303)..(303): n includes a, c, g, or t, or contains no nucleotide
  misc_feature (305)..(305): n includes a, c, g, or t, or contains no nucleotide
  misc_feature (360)..(360): n includes a, c, g, or t, or contains no nucleotide
  misc_feature (384)..(385): n includes a, c, g, or t, or contains no nucleotide
gcagctgccaagtgcaggaccagacaagaacctggtgactggtgatcacntccccaccccacaggatctgccccagagaaagtcctcgctcgtcaccagcaagcttgcgggtggccaagttgaatgatgctgcccggggctctgcnagatcctgagacgcttcccctccctgccccacccgggtcctgtgctggctcctgcccnnnnnnnnnnnnnnnnnnnnnnnnnnnnnnnnngctcgggtgtgggctggagaggcagaagccntttcctgttggtgtcccagcacatgganccccttgngntgagcaccaagaccttgaaccttttttgttttaccttttttccaaataacagttnggagaaatatcaatgaaattctgnnggtgggggtggggttgaaagggtggggtgggagatatggaggagtatgaattagggcttggagttggtaaaaacattcctgactatccttcttaaccacgtggctgatgtggggtaggtatgaggggaaggaagtggagtagcctaatgaaaaggggttctagttgagctctgtagataaatgccttgtttcagtgtggttggagac

SEQ ID NO: 3935 - DNA, 279 bp, Homo sapiens
aaatgatcccgatgggacacttgggggaccctgaggatgtggcagatgtggtcgcattcttggcatctgaagatagtggatacatcacagggacctcagtggaagtcactggaggtcttttcatgtaactgcctcaaggaccctggactctgctcacccccccaccactctgcctggcctcctgctgatgaggactctaagttcccaggatacaaaaggggtggcagtgtatggttcaggaatgctgaatatgggaagcaggggtgcttgtgaccctaa

SEQ ID NO: 3936 - DNA, 543 bp, Homo sapiens
  misc_feature (171)..(186): n includes a, c, g, or t, or contains no nucleotide
  misc_feature (194)..(218): n includes a, c, g, or t, or contains no nucleotide
  misc_feature (289)..(303): n includes a, c, g, or t, or contains no nucleotide
gcttagaggaacttgcctgtgagcgctggtctttgtgtttggttttgtgatgtaacgatctttgctggggttttttgctttgttttgagggaaatgtcttggagtaaattttaagttcctggagttaatttgttttacaggaattttgttttttaaaaaaataggatcatnnnnnnnnnnnnnnnnaccccctnnnnnnnnnnnnnnnnnnnnnnnnngttacatgaaaaaaatttccaatgaagatgtcagcattttatgaaaaaccagaagttattagatgaaagcnnnnnnnnnnnnnnnaaaacagacttgatcacgcacacacaataagtctttctctccgaaaccggaagtaaatctatatctgttagaaataatgtagccaaaagaatgtaaatttgaggatttttttgccaatagtttatagaaaatatatgaaccaaagtgatttgagtttgtaaaaatgtaaaatagtatgaacaaaatttgcactctaccagatttgaacatctagtgaggttcacattcatactaagtttt

SEQ ID NO: 3937 - DNA, 182 bp, Homo sapiens
tgcagcgcgagagggtgtcagccaagaacgccctggagtcctacgccttcaacatgaagagcgccgtggaggatgaggggctcaagggcaagatcagcgaggccgacaagaagaaggtgctggacaagtgtcaagaggtcatctcgtggctggacgccaacaccttggccgagaaggacgag

SEQ ID NO: 3938 - DNA, 120 bp, Homo sapiens
tggccactcttcagcatctctgtcggaagaccgtcaacggccacctggactcctatgagaaagtcacccagctgccggggcccattcgggagttcctggaccagtacgatgccccgcttt

SEQ ID NO: 3939 - DNA, 474 bp, Homo sapiens
  misc_feature (46)..(60): n includes a, c, g, or t, or contains no nucleotide
  misc_feature (149)..(149): n includes a, c, g, or t, or contains no nucleotide
  misc_feature (163)..(163): n includes a, c, g, or t, or contains no nucleotide
  misc_feature (169)..(169): n includes a, c, g, or t, or contains no nucleotide
  misc_feature (178)..(178): n includes a, c, g, or t, or contains no nucleotide
  misc_feature (227)..(295): n includes a, c, g, or t, or contains no nucleotide
  misc_feature (326)..(326): n includes a, c, g, or t, or contains no nucleotide
  misc_feature (338)..(338): n includes a, c, g, or t, or contains no nucleotide
  misc_feature (345)..(345): n includes a, c, g, or t, or contains no nucleotide
  misc_feature (356)..(356): n includes a, c, g, or t, or contains no nucleotide
  misc_feature (359)..(359): n includes a, c, g, or t, or contains no nucleotide
  misc_feature (376)..(376): n includes a, c, g, or t, or contains no nucleotide
  misc_feature (438)..(438): n includes a, c, g, or t, or contains no nucleotide
  misc_feature (444)..(444): n includes a, c, g, or t, or contains no nucleotide
agcgctctcagcaccaatgggctcagaccctcccaccgcctgctgnnnnnnnnnnnnnnngaggaagcttcctcgcaactttgtggtagattactatgagaccagcagcctctgctcccagccagctgtggtattccaaaccaaaagangcaagcaagtctgngctgancccagtgantcctgggtccaggagtacgtgtatgacctggaactgaactgagctgctnnnnnnnnnnnnnnnnnnnnnnnnnnnnnnnnnnnnnnnnnnnnnnnnnnnnnnnnnnnnnnnnnnnnntactcaggactcctctccgcagttcctgtcncttctcttaatntaatctnttttatgtgcngtnttattgtattaggtgtnatttccattatttatattagtttagccaaaggataagtgtcccctatggggatggtccactntcactntttctctgctgttgcaaatacatggataac

SEQ ID NO: 3940 - DNA, 360 bp, Homo sapiens
  misc_feature (214)..(235): n includes a, c, g, or t, or contains no nucleotide
tgcctgaaccagctaagtcagctcccgccccgaagaagggctccaagaaggcggtgaccaaggcacagaagaaggatggcaagaagcgcaagcgcagccgcaaggagagctattccgtgtacgtgtacaaggtgctgaagcaggtccaccccgacaccggcatctcgtccaaggctatggggattatgaactccttcgtcaacgacattttcgnnnnnnnnnnnnnnnnnnnnnnccgcctggcgcattataacaagcgctcgaccatcacttccagggagatccaaacggctgtgcgcctgctgctacccggggagctggccaaacacgcggtgtcggagggcaccaaggcggtcacca

SEQ ID NO: 3941 - DNA, 542 bp, Homo sapiens
  misc_feature (71)..(110): n includes a, c, g, or t, or contains no nucleotide
  misc_feature (112)..(113): n includes a, c, g, or t, or contains no nucleotide
  misc_feature (117)..(117): n includes a, c, g, or t, or contains no nucleotide
  misc_feature (138)..(138): n includes a, c, g, or t, or contains no nucleotide
  misc_feature (158)..(172): n includes a, c, g, or t, or contains no nucleotide
  misc_feature (212)..(212): n includes a, c, g, or t, or contains no nucleotide
  misc_feature (217)..(217): n includes a, c, g, or t, or contains no nucleotide
  misc_feature (407)..(407): n includes a, c, g, or t, or contains no nucleotide
gtttggctgccgatgtaggaacactgcagcgcctgcccaaggtcatcgggaaccagagcctggtcaacgannnnnnnnnnnnnnnnnnnnnnnnnnnnnnnnnnnnnnnncnntggncagtgggctggtcagccgggntgttcccagacaaagaggtnnnnnnnnnnnnnnncttagcgctggcggccgagatttccagcaagagccccgtnggcgntgcagagcaccaaggtcaacctgctgtattcccgcgaccattcggtggccgagagcctcaactacgtggcgtcctggaacatgagcatgctgcagacccaagacctcgtgaagtcggtccaggccacgactgagaacaaggaactgaaaaccgtcaccttctccaagctctgagagccctcgcgtcccangccccagccagggggccggccttgtcccgcctcatccacagaaagggaggatgggcgatgacagttgtttctatgccttctgacccagtttcccagtttataactttatgacaatgagtttctcaagcccaaggc

SEQ ID NO: 3942 - DNA, 508 bp, Homo sapiens
  misc_feature (49)..(49): n includes a, c, g, or t, or contains no nucleotide
  misc_feature (63)..(63): n includes a, c, g, or t, or contains no nucleotide
  misc_feature (72)..(73): n includes a, c, g, or t, or contains no nucleotide
  misc_feature (79)..(79): n includes a, c, g, or t, or contains no nucleotide
  misc_feature (90)..(90): n includes a, c, g, or t, or contains no nucleotide
  misc_feature (93)..(93): n includes a, c, g, or t, or contains no nucleotide
  misc_feature (104)..(104): n includes a, c, g, or t, or contains no nucleotide
  misc_feature (116)..(118): n includes a, c, g, or t, or contains no nucleotide
  misc_feature (125)..(125): n includes a, c, g, or t, or contains no nucleotide
  misc_feature (132)..(133): n includes a, c, g, or t, or contains no nucleotide
  misc_feature (139)..(140): n includes a, c, g, or t, or contains no nucleotide
  misc_feature (144)..(144): n includes a, c, g, or t, or contains no nucleotide
  misc_feature (148)..(149): n includes a, c, g, or t, or contains no nucleotide
  misc_feature (156)..(158): n includes a, c, g, or t, or contains no nucleotide
  misc_feature (164)..(164): n includes a, c, g, or t, or contains no nucleotide
  misc_feature (172)..(172): n includes a, c, g, or t, or contains no nucleotide
  misc_feature (176)..(176): n includes a, c, g, or t, or contains no nucleotide
  misc_feature (182)..(182): n includes a, c, g, or t, or contains no nucleotide
  misc_feature (190)..(194): n includes a, c, g, or t, or contains no nucleotide
  misc_feature (197)..(197): n includes a, c, g, or t, or contains no nucleotide
  misc_feature (202)..(202): n includes a, c, g, or t, or contains no nucleotide
  misc_feature (209)..(210): n includes a, c, g, or t, or contains no nucleotide
  misc_feature (218)..(218): n includes a, c, g, or t, or contains no nucleotide
  misc_feature (225)..(225): n includes a, c, g, or t, or contains no nucleotide
  misc_feature (229)..(229): n includes a, c, g, or t, or contains no nucleotide
  misc_feature (235)..(235): n includes a, c, g, or t, or contains no nucleotide
  misc_feature (241)..(241): n includes a, c, g, or t, or contains no nucleotide
  misc_feature (255)..(255): n includes a, c, g, or t, or contains no nucleotide
  misc_feature (259)..(259): n includes a, c, g, or t, or contains no nucleotide
  misc_feature (265)..(265): n includes a, c, g, or t, or contains no nucleotide
  misc_feature (271)..(271): n includes a, c, g, or t, or contains no nucleotide
  misc_feature (277)..(277): n includes a, c, g, or t, or contains no nucleotide
  misc_feature (284)..(284): n includes a, c, g, or t, or contains no nucleotide
  misc_feature (290)..(292): n includes a, c, g, or t, or contains no nucleotide
  misc_feature (298)..(298): n includes a, c, g, or t, or contains no nucleotide
  misc_feature (300)..(301): n includes a, c, g, or t, or contains no nucleotide
  misc_feature (312)..(312): n includes a, c, g, or t, or contains no nucleotide
  misc_feature (317)..(317): n includes a, c, g, or t, or contains no nucleotide
  misc_feature (337)..(337): n includes a, c, g, or t, or contains no nucleotide
  misc_feature (342)..(342): n includes a, c, g, or t, or contains no nucleotide
  misc_feature (355)..(355): n includes a, c, g, or t, or contains no nucleotide
  misc_feature (361)..(361): n includes a, c, g, or t, or contains no nucleotide
  misc_feature (372)..(372): n includes a, c, g, or t, or contains no nucleotide
tgcaatgcctagacttcccaacagccttagctgccagtgctggtcactnaaccaacaaggttnggcaccccnnagctanccccttctttngcnagggctaaggncccccaaacatnnnagccccntgccccnnggaggnnaagncttnnggggaannncccatngagttgtncagnctttgnactttatnnnnnctncctgnctctttnnctacatgnactgggncctncccttngggctnggaagaattggggnattnctctanttgganggtgangatcacnagcctnnnccaggngnnccccccaaatncccangggaaggacttggagagaantcatngctgttgcatttnagaacntttctgctttngcacaggaaagagtcacacaattaatcaacatgtatattttctctatacatagagctctatttctctacggttttataaaagccttgggttccaaccaggcagtagatgtgcttctgaaccgcaaggagcaaacac

SEQ ID NO: 3943 - DNA, 375 bp, Homo sapiens
  misc_feature (265)..(279): n includes a, c, g, or t, or contains no nucleotide
  misc_feature (306)..(333): n includes a, c, g, or t, or contains no nucleotide
cacccaaacatttaaggatatgttgaaactacaccaatagagcatttcatatcataattaaaatgaatgttaggcttcttgtggccagttaatagttgatgagattggtgacattatttattgccacagcctattgtataaactatgcagagttaaatatttgcttgtaaaatattagccaatgttgtcattattttgatgtatttccttggttatgaccaaaaatatgttgagatactgaaactaatgtctgtgtgtttaaatnnnnnnnnnnnnnnngtcttatcatgttaatgagaatgttcnnnnnnnnnnnnnnnnnnnnnnnnnnnnatggcataaaagtaactttctctgaagatgtgatgttcaggc

SEQ ID NO: 3944 - DNA, 447 bp, Homo sapiens
  misc_feature (36)..(54): n includes a, c, g, or t, or contains no nucleotide
  misc_feature (62)..(62): n includes a, c, g, or t, or contains no nucleotide
  misc_feature (197)..(211): n includes a, c, g, or t, or contains no nucleotide
  misc_feature (220)..(220): n includes a, c, g, or t, or contains no nucleotide
  misc_feature (233)..(233): n includes a, c, g, or t, or contains no nucleotide
  misc_feature (242)..(242): n includes a, c, g, or t, or contains no nucleotide
  misc_feature (256)..(256): n includes a, c, g, or t, or contains no nucleotide
ctgcattccttttgcacttttggattccatatttannnnnnnnnnnnnnnnnnncccctagnaaataccttgatgttttttctatttatatgcctgcctttggtacttaattttacaaatgctgtaatataaagcatatcaagtttatgtgatacgtatcattgcaagagaatttgtttcaagatttttttttaatnnnnnnnnnnnnnnncaatagagnaacattcaagggnaaatggggnaaacataatttagnagaacaagaacaaaccatgtctcaaatttttttaaaaaaaattaatggttttaaatatatgctatagggacgttccatgcccaggttaacaaagaactgtgatatatagagtgtctaattacaaaatcatatacgatttatttaattctcttctgtattgtaacttagatgattcccaaggactctaataa

SEQ ID NO: 3945 - DNA, 113 bp, Homo sapiens
cactggaactcagtgtgactcctcagggttgaggtccagccctggctgaaggactgtgacaggcagcagagacttgggacattgccttttctagcccgaatacaaacacctgg

SEQ ID NO: 3946 - DNA, 475 bp, Homo sapiens
tcagcttcagcagcgccagcagtcttagtagcagcagcaccagtgcgggttgcgccagcagccttggcggcggcggcgcctcggagcttctccctgcaacacagcccacagccagcagcgctcccaaaagccccgagccagcccaaggcgcgcttggctgcttatagactgtactagggcggaggggatccgggccttgcgtgcagcctcccaaccatgggctgggttttgtgcttactgtatgttggcgacttggtagggcaggagacgcagcgtggagcctacctcccgacattcacgttcgccccacgctgctccgactggctgcagcggacactgcccaaagcagaggggagtctcagtgtcctgctagccagccgaacacttctctccggaagcaggctggttcgactgtgaggtgtttgactaaactgtttctctgactcgccccagaggtcgtggctcaaaggcactt

SEQ ID NO: 3947 - DNA, 556 bp, Homo sapiens
  misc_feature (31)..(32): n includes a, c, g, or t, or contains no nucleotide
  misc_feature (34)..(36): n includes a, c, g, or t, or contains no nucleotide
  misc_feature (40)..(92): n includes a, c, g, or t, or contains no nucleotide
  misc_feature (146)..(146): n includes a, c, g, or t, or contains no nucleotide
  misc_feature (155)..(155): n includes a, c, g, or t, or contains no nucleotide
  misc_feature (172)..(172): n includes a, c, g, or t, or contains no nucleotide
  misc_feature (207)..(207): n includes a, c, g, or t, or contains no nucleotide
  misc_feature (321)..(352): n includes a, c, g, or t, or contains no nucleotide
  misc_feature (354)..(356): n includes a, c, g, or t, or contains no nucleotide
  misc_feature (362)..(376): n includes a, c, g, or t, or contains no nucleotide
  misc_feature (491)..(491): n includes a, c, g, or t, or contains no nucleotide
tagcagcggggaccaatcatcagactccttnnannncccnnnnnnnnnnnnnnnnnnnnnnnnnnnnnnnnnnnnnnnnnnnnnnnnnnnnngtcctcctcgctcctccttcccagggaccagcaccttcaagcgctccagggccngtgagggcnaagagggggacctgccnaccagggagcttcctggctctgggggacccaggtngggacttagcagtgagtattggaagacttgggttgatctcttagaagccatgggacctcctccctcattcatcttgcaagcaaatcccatttcttgaaaagccttggagaactnnnnnnnnnnnnnnnnnnnnnnnnnnnnnnnncnnntgaagnnnnnnnnnnnnnnntggaccattcctgtccctttgttaccatactgtctctggagtgatggtgtccttccctgccccaccacgcatgctcagtgccttttggtttcaccttccctcgacttgacccttncctcccccagcgtcagtttcactccctcttggtttttatcaaatttgccatgacatttcatctgg

SEQ ID NO: 3948 - DNA, 438 bp, Homo sapiens
  misc_feature (34)..(62): n includes a, c, g, or t, or contains no nucleotide
  misc_feature (257)..(271): n includes a, c, g, or t, or contains no nucleotide
  misc_feature (383)..(383): n includes a, c, g, or t, or contains no nucleotide
accacgagttcctgatgcattattgtgagaggtnnnnnnnnnnnnnnnnnnnnnnnnnnnnngacagaggaacaatgtggaaagtccactttgtgacgcctgtgttccagccagagggagccggtgcctgctatggaagaaaggtctgcccgtgctttggggaaaaagtagtccaccacgatccacctttgctctttgacctctcaagagacccttctgagacccacatcctcacaccagcctcagagcccgtgttnnnnnnnnnnnnnnnacgagtccagcaggcggtgtgggaacaccagcggacactcagcccagttcctctgcagctggacaggctgggcaatatctggagaccgtggctgcagccctgctgtggcccnttccccctctgctggtgccttagggaagatgacccacaataaatgtctgcagtga

SEQ ID NO: 3949 - DNA, 413 bp, Homo sapiens
  misc_feature (29)..(29): n includes a, c, g, or t, or contains no nucleotide
  misc_feature (33)..(33): n includes a, c, g, or t, or contains no nucleotide
  misc_feature (66)..(66): n includes a, c, g, or t, or contains no nucleotide
  misc_feature (72)..(72): n includes a, c, g, or t, or contains no nucleotide
  misc_feature (76)..(77): n includes a, c, g, or t, or contains no nucleotide
  misc_feature (216)..(251): n includes a, c, g, or t, or contains no nucleotide
  misc_feature (332)..(347): n includes a, c, g, or t, or contains no nucleotide
atgcgtggacgactgcgggccctacggcnagtngcaagctgctgcgcacacacaattatctgtacncagccntgcnngtgcaaggccgggtggagaggctggggctgcaccgacagtgcagatgcgctcacctatggattccagctgctgtccacactcctgctctgcctgagcaacctcatgtttctgccacctgtggtcctggccattcggagnnnnnnnnnnnnnnnnnnnnnnnnnnnnnnnnnnnnttcaccatgttcttctccacggtatgcggtggtgtctgcatcttatcactgggtgcttgtgcatggtggtgggtcacagtnnnnnnnnnnnnnnnnttctccgagggtttgggaatgtctgtgccttcactgtgtcttctacagacagagacagcagtgctt

SEQ ID NO: 3950 - DNA, 550 bp, Homo sapiens
  misc_feature (382)..(396): n includes a, c, g, or t, or contains no nucleotide
  misc_feature (411)..(413): n includes a, c, g, or t, or contains no nucleotide
  misc_feature (487)..(491): n includes a, c, g, or t, or contains no nucleotide
  misc_feature (494)..(494): n includes a, c, g, or t, or contains no nucleotide
  misc_feature (498)..(499): n includes a, c, g, or t, or contains no nucleotide
  misc_feature (502)..(508): n includes a, c, g, or t, or contains no nucleotide
cctaagtgatttccacaggttctggaataactcttacagctttgccttgtgtcctcttgttccgtgtgggctttaaaagaaaaaaaatcaaacccacatattaaaagggggctttttatctgccatctaatggcttcagagcgataatacactattatcttcttaaaccaggaaaaaataaaagggggggtgggatttttcagaaaaattaaaaaagaaagtttttgtagctgttcagttgccactaagagattgcacagtcaaaacgactctaaacacactagtttggattcctaaatattttcaagaaaagaatcttctcgtttgaaactttgaattaaaataaaacacatttactccacatattttttaacaaaaagannnnnnnnnnnnnnnaaactctgattttgnnnggtagctgacatagtgttttcttgtacgtgaatagaatcctgacatgtagtgcacattgatgtatagctttaannnnnccngggnnttnnnnnnnaccagggtttgtttaatacactccattctaggccaaatcagg

SEQ ID NO: 3951 - DNA, 105 bp, Homo sapiens
tatatctcatgtcatcacattacaggcaggtgtctcatatgtaaaacatttacctgaatgttgtctgaggactgaactgtggactttactattcataatgataaa

SEQ ID NO: 3952 - DNA, 572 bp, Homo sapiens
  misc_feature (95)..(95): n includes a, c, g, or t, or contains no nucleotide
  misc_feature (100)..(100): n includes a, c, g, or t, or contains no nucleotide
  misc_feature (111)..(111): n includes a, c, g, or t, or contains no nucleotide
  misc_feature (324)..(338): n includes a, c, g, or t, or contains no nucleotide
tcagctaatggagctcaaagtatgagatacagaacttggtgacccatgtattgcataagctaaagcaacacagacactcctaggcaaagtttttngtttngtgaatagtancttgcaaaacttgtaaattagcagatgacttttttccattgttttctccagagagaatgtgctatatttttgtatatacaataatatttgcaactgtgaaaaacaagttgtgccatactacatggcacagacacaaaatattatactaatatgttgtacattcggaagaatgtgaatcaatcagtatgtttttagattgtattttgccttacnnnnnnnnnnnnnnntaagactctgatttccctttggacttcatgtatattgtacagttacagtaaaattcaacctttattttctaattttttcaacatattgtttagtgtaaagaatatttatttgaagttttattattttataaaaaagaatatttattttaagaggcatcttacaaattttgccccttttatgaggatgtgatagttgctgcaaatgaggggttacagatgcatatgtccaatata

SEQ ID NO: 3953 - DNA, 222 bp, Homo sapiens
  misc_feature (26)..(90): n includes a, c, g, or t, or contains no nucleotide
ctttacgccaagctgattttgaggcnnnnnnnnnnnnnnnnnnnnnnnnnnnnnnnnnnnnnnnnnnnnnnnnnnnnnnnnnnnnnnnnncattacattttgatcgggacccacttcaaaagcagccttcatgccagagatctgtggttattcgaacctttattactagtgacttcatgactggtatacctgcaacacctggcaatgagatccctgtagagg

SEQ ID NO: 3954 - DNA, 362 bp, Homo sapiens
  misc_feature (41)..(71): n includes a, c, g, or t, or contains no nucleotide
  misc_feature (73)..(77): n includes a, c, g, or t, or contains no nucleotide
  misc_feature (107)..(146): n includes a, c, g, or t, or contains no nucleotide
  misc_feature (197)..(197): n includes a, c, g, or t, or contains no nucleotide
  misc_feature (199)..(272): n includes a, c, g, or t, or contains no nucleotide
gcgccagtacagtcaagaagaggaaagtgtgtgaagacccnnnnnnnnnnnnnnnnnnnnnnnnnnnnnnncnnnnngaagctgtgacctgactccctatattgttnnnnnnnnnnnnnnnnnnnnnnnnnnnnnnnnnnnnnnnnaccttagaagacaaatgcaagggcatttcaccacagagaggacctttgtgncnnnnnnnnnnnnnnnnnnnnnnnnnnnnnnnnnnnnnnnnnnnnnnnnnnnnnnnnnnnnnnnnnnnnnnnnnnggcctcctgactcctggcccagagttcttgtccatcagttcatactgcaattttatgtgaaagcattatgactgtcctacccatgggaga

SEQ ID NO: 3955 - DNA, 471 bp, Homo sapiens
  misc_feature (68)..(100): n includes a, c, g, or t, or contains no nucleotide
  misc_feature (367)..(391): n includes a, c, g, or t, or contains no nucleotide
gcgcttcgagctgagcggcatccctccggcccccaggggcgtgccccagatcgaggtgaccttcgacnnnnnnnnnnnnnnnnnnnnnnnnnnnnnnnnnacggacaagagcaccggcaaggccaacaagatcaccatcaccaacgacaagggccgcctgagcaaggaggagatcgagcgcatggtgcaggaggcggagaagtacaaagcggaggacgaggtgcagcgcgagagggtgtcagccaagaacgccctggagtcctacgccttcaacatgaagagcgccgtggaggatgaggggctcaagggcaagatcagcgaggccgacaagaagaaggttctggacaagtgtcaagaggtcatctcnnnnnnnnnnnnnnnnnnnnnnnnngagaaggacgagtttgagcacaagaggaaggagctggagcaggtgtgtaaccccatcatcagcggactgtaccagggtgc

SEQ ID NO: 3956 - DNA, 150 bp, Homo sapiens
  misc_feature (113)..(113): n includes a, c, g, or t, or contains no nucleotide
aattatgatctctgattcattgtccattttactaccaaatattaactaaggccttattaatttttatataaattatatcttgtcctattaaatctagttacaatttatttcangcataagagctaatgttattttgcaaatgccatatat

SEQ ID NO: 3957 - DNA, 415 bp, Homo sapiens
acactttcatggtactgcaagtcatcaagtttactaaggacctgcccgtcttccgttccctgcccattgaagaccagatctcccttctcaagggagcagctgtggaaatctgtcacatcgtactcaataccactttctgtctccaaacacaaaacttcctctgcgggcctcttcgctacacaattgaagatggagcccgtgtggggttccaggtagagtttttggagttgctctttcacttccatggaacactacgaaaactgcagctccaagagcctgagtatgtgctcttggctgccatggccctcttctctcctgaccgacctggagttacccagagagatgagattgatcagctgcaagaggagatggcactgactctgcaaagctacatcaagggccagcagcgaaggcc

SEQ ID NO: 3958 - DNA, 206 bp, Homo sapiens
  misc_feature (73)..(103): n includes a, c, g, or t, or contains no nucleotide
  misc_feature (180)..(180): n includes a, c, g, or t, or contains no nucleotide
tctctgcagcctttcacttcagtgcccacctggctgacctgtgcacttggctgaggaagcagagaccgagcgnnnnnnnnnnnnnnnnnnnnnnnnnnnnnnntagctgctgctgacacccagcaggcctgggttccgtgagcgcgaactccgtggtggtgggtctggctctggtgctgnccatctacgcatgtgggaccctcgtt

SEQ ID NO: 3959 - DNA, 74 bp, Homo sapiens
actactttccagaatttgctcgctacactactcctgaggatgctactcccgagcccggagaggacccacgcgtg

SEQ ID NO: 3960 - DNA, 451 bp, Homo sapiens
  misc_feature (119)..(143): n includes a, c, g, or t, or contains no nucleotide
  misc_feature (232)..(254): n includes a, c, g, or t, or contains no nucleotide
catgttctaactcctagactagtgctttacctttattaatgaactgtgacaggaagcccaaggcagtgttcctcaccaataacttcagagaagtcagttggagaaaatgaagaaaaagnnnnnnnnnnnnnnnnnnnnnnnnncagttactggtttcagttgacaaaatatataatggtttactgctgtcattgtccatgcctacagataatttattttgtatttttgaatnnnnnnnnnnnnnnnnnnnnnnntactgggtacaagagccatgtaccagtgtactgctttcaacttaaatcactgaggcatttttactactattctgttaaaatcaggattttagtgcttgccaccaccagatgagaagttaagcagcctttctgtggagagtgagaataattgtgtacaaagtagagaagtatccaattatgtgacaacctttgtgtaa

SEQ ID NO: 3961 - DNA, 71 bp, Homo sapiens
ctatggagacccaaatgtctcagaatgtatgtcccagaaacctgtggctgcttcaaccattgacagttttg

SEQ ID NO: 3962 - DNA, 553 bp, Homo sapiens
tcatcattgctggtgtggctgtaggcatcttcctgtgcacaggtggacggcgatgttaattactctccagccccgtcagaaggggctggattgatggaggctggcaagggaaagtttcagctcactgtgaagccagactccccaactgaaacaccagaaggtttggagtgacagctcctttcttctcccacatctgcccactgaagatttgagggaggggagatggagaggagaggtggacaaagtacttggtttgctaagaacctaagaacgtgtatgctttgctgaattagtctgataagtgaatgtttatctatctttgtggaaaacagataatggagttggggcaggaagcctatgcgccatcctccaaagacagacagaatcacctgaggcgttcaaaagatataaccaaataaacaagtcatccacaatcaaaatacaacattcaatacttccaggtgtgtcagacttgggatgggacgctgatataatagggtagaaagaagtaacacgaagaagtggtggaaatgtaaaatccaagtcatatggc

SEQ ID NO: 3963 - DNA, 217 bp, Homo sapiens
ctccctgaagaatcttccagctgctgagtagaaaatcacaactaatttcacagatggtagaacctccttagagcaaaaggacacagcagttaaatgtgacatacctgattgttcaaaatgcaaggctctggacattgcattctttgacttttattttcctttgagcctgtgccagtttctgtccctgctctggtctgacctgccttctgtcccagat

SEQ ID NO: 3964 - DNA, 394 bp, Homo sapiens
cgggtcaccgcatcacaccatggctctgaagagaatccacaaggaattgaatgatctggcacgggaccctccagcacagtgttcagcaggtcctgttggagatgatatgttccattggcaagctacaataatggggccaaatgacagtccctatcagggtggagtatttttcttgacaattcatttcccaacagattaccccttcaaaccacctaaggttgcatttacaacaagaatttatcatccaaatattaacagtaatggcagcatttgtcttgatattctacgatcacagtggtctccagcactaactatttcaaaagtactcttgtccatctgttctctgttgtgtgatcccaatccagatgatcctttagtgcctgagattgctcgg

SEQ ID NO: 3965 - DNA, 130 bp, Homo sapiens
agaagatcctctaatggatcccagtgtgcccatccctcaacctcctcagtgatcaactcatggccaatcttgtttcctattcttcaacctgctgacttccctctggattcttctgcaaccagtcccagat

SEQ ID NO: 3966 - DNA, 497 bp, Homo sapiens
  misc_feature (26)..(26): n includes a, c, g, or t, or contains no nucleotide
  misc_feature (197)..(197): n includes a, c, g, or t, or contains no nucleotide
  misc_feature (199)..(213): n includes a, c, g, or t, or contains no nucleotide
  misc_feature (453)..(468): n includes a, c, g, or t, or contains no nucleotide
tcctctgagctctgaatatgggaccnagtgccaggagctggaagacaaggtgtttctgccaaacggggacctccatccagagaaaaggaagaaggtgcagggtgggccaagaggcaagtgaaggttggcctgagtctgggccggaaactcagaggatgtttctcctctgctgggagctgtagtttcttatcaaaatnannnnnnnnnnnnnnntccccctccttggcccttcaagtgggctgaagcccttggaaagtgacataggaagtccccagatcttgcccttctcactccagaggctagtggtcacagacagctgggaatggcagccacagagggtcccctctgggagaaacagcttcaccccagcctcagggccctgggccatcactgcagtggccctgggaggtgaggaagaagctggctagaggagggggctcccacctacctttnnnnnnnnnnnnnnnnctttgttcctgcttgtaataaaacttcag

SEQ ID NO: 3967 - DNA, 524 bp, Homo sapiens
  misc_feature (27)..(88): n includes a, c, g, or t, or contains no nucleotide
  misc_feature (151)..(151): n includes a, c, g, or t, or contains no nucleotide
  misc_feature (247)..(247): n includes a, c, g, or t, or contains no nucleotide
  misc_feature (258)..(258): n includes a, c, g, or t, or contains no nucleotide
  misc_feature (265)..(265): n includes a, c, g, or t, or contains no nucleotide
  misc_feature (308)..(308): n includes a, c, g, or t, or contains no nucleotide
  misc_feature (339)..(376): n includes a, c, g, or t, or contains no nucleotide
tgcggttcaaagacccacacacgcacnnnnnnnnnnnnnnnnnnnnnnnnnnnnnnnnnnnnnnnnnnnnnnnnnnnnnnnnnnnnnncaggaccttggctggacctggaggccctgcccagccctgctctgcccagcccagcaggggctncaggccttggctggccccacatcgccttttcctccccgacacctccgtgcacttgtgtccgaggagcgaggagcccctcgggccctgggtggcctntgggccctttntcctgtntccgccactccctctggcggcgctggccgtggctctgtctctntgaggtgggtcgggcgccctctgcccgcccnnnnnnnnnnnnnnnnnnnnnnnnnnnnnnnnnnnnnntgttgtggggtgggggtatattttgtaaccactgggcccccagcccctcttttgcgaccccttgtcctgacctgttctcggcaccttaaattattagaccccggggcagtcaggtgctccggacacccgaaggcaataaaacaggagc

SEQ ID NO: 3968 - DNA, 353 bp, Homo sapiens
  misc_feature (173)..(190): n includes a, c, g, or t, or contains no nucleotide
ctctaaaatgcaagatacaatggaggagaacagtgagagtgctctacggaaacgtattcgagaggacagaaaggccaccacagctcagaaggtgcagcagatgaaacagaggctaaatgagaatgaacgaaaaagaaaaaggccaagattgacagacacctaatattcatgannnnnnnnnnnnnnnnnnctataaattttgaaccattgatgtgcaaagcaagacctgaagcccactccggaaactaaagtgaggctcgctaaccctctagattgcctcacagttgtttgtttacaaagtaaactttacatccaggggatgaagagcacccaccagcagaagactttgcaga

SEQ ID NO: 3969 - DNA, 559 bp, Homo sapiens
  misc_feature (426)..(430): n includes a, c, g, or t, or contains no nucleotide
  misc_feature (449)..(451): n includes a, c, g, or t, or contains no nucleotide
  misc_feature (497)..(499): n includes a, c, g, or t, or contains no nucleotide
  misc_feature (501)..(504): n includes a, c, g, or t, or contains no nucleotide
  misc_feature (534)..(534): n includes a, c, g, or t, or contains no nucleotide
ttgccaactggaaagtcaaaattttctaacaactttaagtaagttctttgaagacttagtgctgtttttaatccagtttagaaagtaacttaattttaataccgctactaaaaattcgaaaatttcttctttaatcacattcaatatggttaaaagaacaacactaattgacattgcgtgggctttttctccctttgtttaaaatgtcatttgttgagcaagagttgtatagtattatctacttacttgaggctgttaatttttcattacagtgttttgtaaatgtatccacgagaccatgatgcattgttttgtgctcaacttgtgttttgtatttaaagcattttgaatgaagtgtattttataagcatttaatatttatgctctttagaatggaacacagaaaacaaaccttataagtcctgnnnnnattaatctgaaccaataannngtgtggcctacaaagtataattctattaaatgttccttaaaacacnnntnnnnaattaaaatctttgcaaatgcttgtgtaanttcctgccttacagctacttgtttg

SEQ ID NO: 3970 - DNA, 365 bp, Homo sapiens
  misc_feature (37)..(37): n includes a, c, g, or t, or contains no nucleotide
  misc_feature (199)..(200): n includes a, c, g, or t, or contains no nucleotide
  misc_feature (262)..(277): n includes a, c, g, or t, or contains no nucleotide
cagcctgccacgtggcactaggggcctacctctgcgncaagccagacgtgcccatctacgatggctcctgggtggagtggtacatgcgcgcccggcccgaggatgtcatctcagagggccgggggaagacccactgaagctgggcaggacacaggcgagctcaggtgatgccggccaccagcaatgcctggcctggtanntccgcttctgctttcaccaagagagtgtttcttcactcaactcaggtggcatttggggtgannnnnnnnnnnnnnnnaattccgttgacttgttggctgccagtaggggcgggaggaaaggcggaggcgagccctggaggagggaggccacaactccgagctgcc

SEQ ID NO: 3971 - DNA, 433 bp, Homo sapiens
tggcttccctgagctggggtttccctgcttgtccagttgtgagctgtcctcggtgttaccgaggctgtgcctagagagtggagatttttgatgaaaggtgtgctcgctctctgcgttctatcttctctctcctccttgttcctgcaaaccacaagataaaggtagtggtgtgtctcgaccccatcagcctctcacccactcccagacacacacaagtcctcaaaagtttcagctccgtgtgtgagatgtgcaggttttttctagggggtagggggagactaaaatcgaatataacttaaaatgaaagtatactttttataatttttctttttaaaacttggtgaaattatttcagatacatattttagtgtcaaggcagattagttatttagccaccaaaaaaaagtattgtgtacaatttggggcctcaaat

SEQ ID NO: 3972 - DNA, 486 bp, Homo sapiens
  misc_feature (80)..(80): n includes a, c, g, or t, or contains no nucleotide
  misc_feature (84)..(84): n includes a, c, g, or t, or contains no nucleotide
  misc_feature (88)..(89): n includes a, c, g, or t, or contains no nucleotide
  misc_feature (98)..(99): n includes a, c, g, or t, or contains no nucleotide
  misc_feature (102)..(149): n includes a, c, g, or t, or contains no nucleotide
  misc_feature (422)..(436): n includes a, c, g, or t, or contains no nucleotide
tgactgagcgctttgagctgtttgtcatgaagaaagagatatgcaatgcgtatactgagctgaatgatcccatgcggcancggncagnntttttgaannaannnnnnnnnnnnnnnnnnnnnnnnnnnnnnnnnnnnnnnnnnnnnnnntcatagatgaaaacttctgtactgccctggaatatgggctgccccccacagctggctggggcatgggcattgatcgagtcgccatgtttctcacggactccaacaacatcaaggaagtacttctgtttcctgccatgaaacccgaagacaagaaggagaatgtagcaaccactgatacactggaaagcacaacagttggcacttctgtctagaaaataataattgcaagttgtataactcaggcgtctttgcatttctgcgaaagatcaaggnnnnnnnnnnnnnnnttgtgtgctgctttccatttgacaccgcagttctgttcagccatcagaag

SEQ ID NO: 3973 - DNA, 517 bp, Homo sapiens
  misc_feature (128)..(128): n includes a, c, g, or t, or contains no nucleotide
  misc_feature (190)..(191): n includes a, c, g, or t, or contains no nucleotide
  misc_feature (362)..(362): n includes a, c, g, or t, or contains no nucleotide
  misc_feature (436)..(451): n includes a, c, g, or t, or contains no nucleotide
atcctgtctggctgcagtgagagaccaacccctaacaagggctgggccacagcagggagtccagccctaccttcttcccttggcagctggagaaatctggtttcaatataactcatttaaaaatttangccacagtccttataattggaaaaatactggtgcccaggttttcttggagttatccaagcanntgcgcccctagctgggatctggtacctggactaggctaattacagcttctccccaacaggaaactgtgggatttgaaaaggaaagggaagggaaaacagagaacctagtggtctaccaagtggttggcaactttcccaatgtctgcttactctgaggcttggcactggggnccagggcctgccccagggctcctggaatttcccttgatccagctaggctgggacactccctaaatcagctgcgnnnnnnnnnnnnnnnncagaatgaatggcagagagtgattctgtcttcatagagggtggggtacttctccataaggcatctc

SEQ ID NO: 3974 - DNA, 547 bp, Homo sapiens
catctctactgtactccctcagcatcagagcatgcatcaggggtccacacaggctcagctctctccaccacccagctcttccctgaccttcacgaagggatggctctccagtccttgggtcccgtagcacacagttacagtgtcctaagatactgctatcattcttcgctaatttgtatttgtattcccttccccctacaagattatgagaccccagagggggaaggtctgggtcaaattcttcttttgtatgtccagtctcctgcacagcacctgcagcattgtaactgcttaataaatgacatctcactgaacgaatgagtgctgtgtaagtgatggagatacctgaggctattgctcaagcccaggccttggacatttagtgactgttagccggtccctttcagatccagtggccatgccccctgcttcccatggttcactgtcattgtgtttcccagcctctccactcccccgccagaaaggagcctgagtgattctcttttcttcttgtttccctgattatgatgagcttccattgttctgt

SEQ ID NO: 3975 - DNA, 414 bp, Homo sapiens
gcacagtataacttcattttagttgttggtgaaaaagagaaaatcagtggcactgttaatatccgcacaagagacaataaggtccacggggaacgcaccatttctgaaactatcgagcggctacagcagctcaaagagttccgcagcaaacaggcagaagaagaattttaatgaaaaaattacccagattggctccatggaaaaggaggaacagcgtttccgtaaaattgactttgtactctgaaaacgtcaatttatattgaacttggaggagtttggcaaagtctgaataggtcaacctgcaggcgtaactatttttgacctagtcagtttttaaacaatgtgcatttgaaggagttaattaaaagagagccaataaaatgattttactcattcagtatctgagtactggaa

SEQ ID NO: 3976 - DNA, 549 bp, Homo sapiens
tactgttcctgttggccgagtggagactggtgttctcaaacccggtatggtggtcacctttgctccagtcaacgttacaacggaagtaaaatctgtcgaaatgcaccatgaagctttgagtgaagctcttcctggggacaatgtgggcttcaatgtcaagaatgtgtctgtcaaggatgttcgtcgtggcaacgttgctggtgacagcaaaaatgacccaccaatggaagcagctggcttcactgctcaggtgattatcctgaaccatccaggccaaataagcgccggctatgcccctgtattggattgccacacggctcacattgcatgcaagtttgctgagctgaaggaaaagattgatcgccgttctggtaaaaagctggaagatggccctaaattcttgaagtctggtgatgctgccattgttgatatggttcctggcaagcccatgtgtgttgagagcttctcagactatccacctttgggtcgctttgctgttcgtgatatgagacagacagttgcggtgggtgtcatcaaagcagtggacaa

SEQ ID NO: 3977 - DNA, 444 bp, Homo sapiens
  misc_feature (263)..(298): n includes a, c, g, or t, or contains no nucleotide
ccgagcatgccatgggtccgctctgcatgccctgtctgtgccatgagtgtccctggccccttcctgccatgggcaggcccgcaggaagagccggtaggggtggaaaggggactcagatgagacacaccccacagctgccaccgccttgtccctcaacaagctcacccccaatcccttgcagccaggccacaatgggggaggtgagtccagccccttggaacaggcttgcccaacatggagggatggcgttggcagtgccagcnnnnnnnnnnnnnnnnnnnnnnnnnnnnnnnnnnnnggaggggccggcccctcctcaggaagctggtatgagtaaggccttgagggtgcaggcaggcagccctgtaccccacccacatagactatactgtacatacagattttgcagtaggcttggggcagctgggtttgtccttgatgtat

SEQ ID NO: 3978 - DNA, 416 bp, Homo sapiens
  misc_feature (58)..(59): n includes a, c, g, or t, or contains no nucleotide
  misc_feature (360)..(377): n includes a, c, g, or t, or contains no nucleotide
ctcagtggttgcacagtaaggggtagagggtagatgaggacaagaacaccctgagaanntattttacagcacaagctttatgaggaataggagaacacatttttttcacattatactaagtccagcagagcccaggctctggggctgttgctcttaatcctcagtggaggcttcaggctttaccacttagaacgttctccagggctctggttacctgatcagcactgaagttgttcaaagggacattcgtctcttggccaaatgcgtagcgggcccagagcttgggctgcacatcggagcattcgcggattaggatgggtaggtcgggattcgccttcttcagctccacgtagcgtttcnnnnnnnnnnnnnnnnnnccctggctgccgggcgagcgctgacataagtggatgcga

SEQ ID NO: 3979 - DNA, 388 bp, Homo sapiens
  misc_feature (39)..(39): n includes a, c, g, or t, or contains no nucleotide
  misc_feature (174)..(174): n includes a, c, g, or t, or contains no nucleotide
  misc_feature (324)..(328): n includes a, c, g, or t, or contains no nucleotide
  misc_feature (330)..(330): n includes a, c, g, or t, or contains no nucleotide
  misc_feature (332)..(332): n includes a, c, g, or t, or contains no nucleotide
  misc_feature (336)..(337): n includes a, c, g, or t, or contains no nucleotide
  misc_feature (339)..(342): n includes a, c, g, or t, or contains no nucleotide
  misc_feature (344)..(344): n includes a, c, g, or t, or contains no nucleotide
  misc_feature (346)..(353): n includes a, c, g, or t, or contains no nucleotide
  misc_feature (363)..(363): n includes a, c, g, or t, or contains no nucleotide
cctgcaggccattatcagtgcctcatctgtgcagaagtngcagcagagagggaccatccaaatacctaagagaaaacagacctagtcaggatatgaatttgtttcagctgttcccaaaggcctgggagctttttgaaaagaaagaaaaaagtgtgttggctttttttttttttnagaaagttagaattgtttttaccaagagtctatgtggggcttgattcacccttcatccattggctggaacatggattggggatttgatagaaaaataaaccctgcttttgattcaaaaaaaaaaaaaaaaaaaaaaaaaaaaaaaaaaannnnngngnccgnnannnnantnnnnnnnnaaaagggggncggattacaaatccactgggccggc

SEQ ID NO: 3980 - DNA, 508 bp, Homo sapiens
acatggggctgaaccccagctcgccgaacgaccctgtcaccaacatttgccaagcagccgacaaacagcttttcaccctggtggagtgggccaagcggatcccacacttctcagagctgcccctggacgaccaggtcatcctgctgcgggcaggctggaatgagctgctcatcgcctccttctcccaccgctccatcgccgtgaaggacgggatcctcctggccaccgggctgcacgtccaccggaacagcgcccacagcgcaggggtgggcgccatctttgacagggtgctgacggagcttgtgtccaagatgcgggacatgcagatggacaagacggagctgggctgcctgcgcgccatcgtcctctttaaccctgactccaaggggctctcgaacccggccgaggtggaggcgctgagggagaaggtctatgcgtccttggaggcctactgcaagcacaagtacccagagcagccgggaaggttcgctaagctcttgctccgcct

SEQ ID NO: 3981 - DNA, 415 bp, Homo sapiens
  misc_feature (52)..(54): n includes a, c, g, or t, or contains no nucleotide
  misc_feature (80)..(80): n includes a, c, g, or t, or contains no nucleotide
  misc_feature (82)..(82): n includes a, c, g, or t, or contains no nucleotide
ctgacagagccatatgtaccctaccctgcacattgttatgcacttttccccnnnaattcatgtttggtggggccatccanancctctccttgtcacagaatctccatttctgctcagattccccccatctccattgcattcatgtactaccctcagtctacactcacaatcatcttctcccaagactgctcccttttgttttgtgtttttttgaggggaattaaggaaaaataagtgggggcaggtttggagagctgcttccagtggatagttgatgagaatcctgaccaaaggaaggcacccttgactgttgggatagacagatggacctatggggtgggaggtggtgtccctttcacactgtggtgtctcttggggaaggatctccccgaatctcaataaaccagtgaacagt

SEQ ID NO: 3982 - DNA, 282 bp, Homo sapiens
  misc_feature (237)..(251): n includes a, c, g, or t, or contains no nucleotide
ttccaaaagcccaagctacacctggctgcagggctgggtcagctggcctggctgagctcttctcagtggggtcccctttgatgttctcccccaagttgggcagcctagaggtgttgggaaccctggcctgcccccacctccccagtaattgtttccttccgttgcccaggacactggctggccttccttctcttctgagccctcccctgccccaggaaccctggcctcaccaaaacnnnnnnnnnnnnnnngctccaaaaccagggagcagaccatgccctc

SEQ ID NO: 3983 - DNA, 512 bp, Homo sapiens
  misc_feature (107)..(107): n includes a, c, g, or t, or contains no nucleotide
  misc_feature (365)..(365): n includes a, c, g, or t, or contains no nucleotide
  misc_feature (368)..(371): n includes a, c, g, or t, or contains no nucleotide
  misc_feature (374)..(396): n includes a, c, g, or t, or contains no nucleotide
  misc_feature (438)..(479): n includes a, c, g, or t, or contains no nucleotide
tagcaatccaggagaaggtgctggagagggtgaatgccgtcaagaccaaagtggaagctttccagacaaccatttccaagtacttctcagaacgtggggatgctgtngccaaggcctccaaggagactcatgtaatggattaccgggccttggtgcatgagcgagatgaggcagcctatggggagctcagggccatggtgctggacctgagggccttctatgctgagctttatcatatcatcagcagcaacctggagaaaattgtcaacccaaagggtgaagaaaagccatctatgtactgaacccgggactagaaggaaaataaatgatctatatgttgtgtggaaaaaaaaaaaaaaaaaaanaannnnaannnnnnnnnnnnnnnnnnnnnnncctgaagatgaatgtggtgggaaggggtgggtgtcacaaagnnnnnnnnnnnnnnnnnnnnnnnnnnnnnnnnnnnnnnnnnnaagaggggattcaggccctttctcatccagtag

SEQ ID NO: 3984 - DNA, 552 bp, Homo sapiens
  misc_feature (28)..(28): n includes a, c, g, or t, or contains no nucleotide
  misc_feature (84)..(84): n includes a, c, g, or t, or contains no nucleotide
  misc_feature (122)..(123): n includes a, c, g, or t, or contains no nucleotide
  misc_feature (126)..(130): n includes a, c, g, or t, or contains no nucleotide
  misc_feature (133)..(136): n includes a, c, g, or t, or contains no nucleotide
  misc_feature (138)..(139): n includes a, c, g, or t, or contains no nucleotide
  misc_feature (141)..(141): n includes a, c, g, or t, or contains no nucleotide
  misc_feature (144)..(145): n includes a, c, g, or t, or contains no nucleotide
  misc_feature (147)..(147): n includes a, c, g, or t, or contains no nucleotide
  misc_feature (149)..(149): n includes a, c, g, or t, or contains no nucleotide
  misc_feature (151)..(156): n includes a, c, g, or t, or contains no nucleotide
  misc_feature (160)..(160): n includes a, c, g, or t, or contains no nucleotide
  misc_feature (174)..(174): n includes a, c, g, or t, or contains no nucleotide
  misc_feature (176)..(176): n includes a, c, g, or t, or contains no nucleotide
  misc_feature (203)..(203): n includes a, c, g, or t, or contains no nucleotide
  misc_feature (229)..(229): n includes a, c, g, or t, or contains no nucleotide
  misc_feature (251)..(251): n includes a, c, g, or t, or contains no nucleotide
  misc_feature (261)..(261): n includes a, c, g, or t, or contains no nucleotide
  misc_feature (326)..(326): n includes a, c, g, or t, or contains no nucleotide
  misc_feature (384)..(384): n includes a, c, g, or t, or contains no nucleotide
  misc_feature (415)..(415): n includes a, c, g, or t, or contains no nucleotide
  misc_feature (495)..(495): n includes a, c, g, or t, or contains no nucleotide
  misc_feature (512)..(512): n includes a, c, g, or t, or contains no nucleotide
aaactgtgcctgtccccagcttctgggnagggacacagcttccccttcccaggaattgagtgggcctagccctccccccttttntccatttgagaggagagtgcttggggcttgaacccctnnccnnnnngcnnnngnntnggnngngncnnnnnncccntttatttgcacgtnangggagccggctccccccttgaatgtanccagaccctggggggggtcactgggnccctagatttttggggggtcanccagccactnccaggggcagggaccatttcttcattttctgaaagcactttaatgattccccttcccccaaactnccagggaatggaggggggaccccgccagccaaaacattccccccattcccgacccccntctcctcttctagcccatgcccttccccggnggagggagggagcagggagccctcactctccacgccccttgcttgcatctgtatatagtgtgagcagcaagtaacccttntcctccctcccccctcncccctcctcaatgtagtggccttggatatcctgtttgtta

SEQ ID NO: 3985 - DNA, 568 bp, Homo sapiens
cctgctgctcaacaccacctgtgatctcaagatctgtgactttggcctggcccgtgttgcagatccagaccatgatcacacagggttcctgacagaatatgtggccacacgttggtacagggctccagaaattatgttgaattccaagggctacaccaagtccattgatatttggtctgtaggctgcattctggcagaaatgctttctaacaggcccatctttccagggaagcattatcttgaccagctgaaccacattttgggtattcttggatccccatcacaagaagacctgaattgtataataaatttaaaagctaggaactatttgctttctcttccacacaaaaataaggtgccatggaacaggctgttcccaaatgctgactccaaagctctggacttattggacaaaatgttgacattcaacccacacaagaggattgaagtagaacaggctctggcccacccatatctggagcagtattacgacccgagtgacgagcccatcgccgaagcaccattcaagttcgacatggaattggatgacttgcctaaggaaaagctc

SEQ ID NO: 3986 - DNA, 398 bp, Homo sapiens
  misc_feature (67)..(67): n includes a, c, g, or t, or contains no nucleotide
  misc_feature (78)..(78): n includes a, c, g, or t, or contains no nucleotide
  misc_feature (275)..(277): n includes a, c, g, or t, or contains no nucleotide
  misc_feature (283)..(288): n includes a, c, g, or t, or contains no nucleotide
  misc_feature (290)..(291): n includes a, c, g, or t, or contains no nucleotide
  misc_feature (293)..(293): n includes a, c, g, or t, or contains no nucleotide
  misc_feature (346)..(346): n includes a, c, g, or t, or contains no nucleotide
  misc_feature (372)..(372): n includes a, c, g, or t, or contains no nucleotide
cggactctgtgtgtatatgtgcaatttttcaacaaatgcaaaaaaaatacagcacatgtattgacangcttctgtcangcagcttgagttgaaatttgatttaagaaaataaatcatgattgttcaaagctgctgggacgttagaattaggccatgatactggtctcattttaactacagtggtatttggcactagtgtaaacttccatataaatcactcttttggaacaacaaagggggagggagaaaaatcacggcctgttaaatgagtaccnnngccgcnnnnnngnnangagatgttctcatccttgattctcccagcctcaaacaacacagcttacttttnttttcccttgctcagaaagtacctgntaatttaacaaacagactgcctgtag

SEQ ID NO: 3987 - DNA, 520 bp, Homo sapiens
  misc_feature (132)..(152): n includes a, c, g, or t, or contains no nucleotide
  misc_feature (190)..(211): n includes a, c, g, or t, or contains no nucleotide
  misc_feature (308)..(322): n includes a, c, g, or t, or contains no nucleotide
tccagacgccctctgagcgagggcggcccctctgttctggtggccccagctgtgactgagggcctggtcaccacaattagagcttgatgcctcccggctttgcagggagaccaggcttcccaaaccaagtgnnnnnnnnnnnnnnnnnnnnngcccacagaggacagtgctgaccccaggaagtgggagnnnnnnnnnnnnnnnnnnnnnngggaactgggaagatgctggccccaaaagccttacggtcatgatgtctgcaaaggagggcctcagagacagcgcgagtagcacccccagccatctannnnnnnnnnnnnnntcagactttttaaattcctgcttaatgtcagtctacaggcctttcaggaagggagaggagggaatcgtacattttgcttgcgtgctgggacagctaggctgagatgcaccaagtacagccttcactggagaccggaattgagaggtgggggatgctgaggagggggaggacggagttcagagggtgtcgtcctgcagt

SEQ ID NO: 3988 - DNA, 88 bp, Homo sapiens
gagagtatttgtgccctcctcgggttttaccttccagccgagattcttcccctctctacaaccctctctcctcagcgcttcttctttc

SEQ ID NO: 3989 - DNA, 539 bp, Homo sapiens
  misc_feature (93)..(133): n includes a, c, g, or t, or contains no nucleotide
  misc_feature (150)..(164): n includes a, c, g, or t, or contains no nucleotide
  misc_feature (184)..(232): n includes a, c, g, or t, or contains no nucleotide
atgctctgggggacctccatctgcctggggctgctgcccgtcatgggctggaactgcctccgagacgagtccacctgcagcgtggtcagaccnnnnnnnnnnnnnnnnnnnnnnnnnnnnnnnnnnnnnnnnntcttcatgtttgcgctnnnnnnnnnnnnnnncatccagatctgtaagattnnnnnnnnnnnnnnnnnnnnnnnnnnnnnnnnnnnnnnnnnnnnnnnnncgtcgcactatgtgaccacccggaaaggggtctccaccctggctatcatcctggggacgtttgctgcttgctggatgcctttcaccctctattccttgatagcggattacacctacccctccatctatacctacgccaccctcctgcccgccacctacaattccatcatcaaccctgtcatatatgctttcagaaaccaagagatccagaaagcgctctgtctcatttgctgcggctgcatcccgtccagtctcgcccagagagcgcgctcgcccagtgatgtgtagcacccttgcacccaggagga

SEQ ID NO: 3990 - DNA, 546 bp, Homo sapiens
  misc_feature (235)..(395): n includes a, c, g, or t, or contains no nucleotide
  misc_feature (511)..(511): n includes a, c, g, or t, or contains no nucleotide
  misc_feature (517)..(521): n includes a, c, g, or t, or contains no nucleotide
gaggcaaccacaggacactaaacttctcccagcctcttcaggaaagaaacctcattctttggcaagcaggaggtgacactagatggctgtgaatgtgatccgctcactgacactctgtaaaggccaatcaatgcactgtctgtctctccttttaggagtaagccatcccacaagttctataccatatttttagtgacagttgaggttgtagatacactttataacattttatagnnnnnnnnnnnnnnnnnnnnnnnnnnnnnnnnnnnnnnnnnnnnnnnnnnnnnnnnnnnnnnnnnnnnnnnnnnnnnnnnnnnnnnnnnnnnnnnnnnnnnnnnnnnnnnnnnnnnnnnnnnnnnnnnnnnnnnnnnnnnnnnnnnnnnnnnnnnnnnnnngagatttaattgccagttagatgtggcatgaaatgagggacaaagaaagcatctcgtaggtgtgtctactgggttttaacttatttttctttaataaaatacattgttttcctaanaaaaannnnnaccctatctgctttgagagacaaat

SEQ ID NO: 3991 - DNA, 290 bp, Homo sapiens
  misc_feature (130)..(130): n includes a, c, g, or t, or contains no nucleotide
acattgcctgacaccctcatattggccagctgtaatctcgtgactatgggactgaggctcaatcttggcttggggtgtttgaatgtctatagcaaaggaattcataatgggaaatctttttcatttgagnaattgtatgatatttattggttgtgtctactgccaacatttatatccaattctaagatttctgaaaaaaaattcttatcccttgctgctcagaaaaagtttacggaaaacaccagttcactaaaagcaccgaaatctgcaaagcctgtcttccgctagaa

SEQ ID NO: 3992 - DNA, 604 bp, Homo sapiens
  misc_feature (95)..(110): n includes a, c, g, or t, or contains no nucleotide
  misc_feature (390)..(404): n includes a, c, g, or t, or contains no nucleotide
gctacttcattgacgctgccacagtcaacgacagtggagagtacaggtgccagacaaacctctccaccctcagtgacccggtgcagctagaagtnnnnnnnnnnnnnnnnttgctccaggcccctcggtgggtgttcaaggaggaagaccctattcacctgaggtgtcacagctggaagaacactgctctgcataaggtcacatatttacagaatggcaaagacaggaagtattttcatcataattctgacttccacattccaaaagccacactcaaagatagcggctcctacttctgcagggggcttgttgggagtaaaaatgtgtcttcagagactgtgaacatcaccatcactcaaggtttggcagtgtcaaccatctcatcattcnnnnnnnnnnnnnnncaagtctctttctgcttggtgatggtactcctttttgcagtggacacaggactatatttctctgtgaagacaaacatttgaagctcaacaagagactggaaggaccataaacttaaatggagaaaggaccctcaagacaaatgacccccatcccatgggagtaataagagcagtggcagcagcatctctgaacatttctc

SEQ ID NO: 3993 - DNA, 398 bp, Homo sapiens
gatagcatttatttctgtgcccttaaacccatttagaaaataactacaaagtaaaaatgtagaggaaatagaaatgtattttttcatgaacattttgatacaaatttcatcatttaatgattcaccaatttcttgcattaatttgaatttaagcatttaattcaaagagaggggagcatccattattgatacatgtgggcttttaaaaactccatcctttataaatagtcaaggtttgggccacacaaagtatatttttatcatggaaaaatttcaactcctcaagccgtaatgttgaacagaattggagtattttctttataatttcttgaacaggcaaatgaaagcttattatagaatgcatgtattttcttttatctttggaacatcagcaccag

SEQ ID NO: 3994 - DNA, 404 bp, Homo sapiens
  misc_feature (48)..(57): n includes a, c, g, or t, or contains no nucleotide
  misc_feature (59)..(73): n includes a, c, g, or t, or contains no nucleotide
  misc_feature (110)..(110): n includes a, c, g, or t, or contains no nucleotide
  misc_feature (248)..(248): n includes a, c, g, or t, or contains no nucleotide
  misc_feature (250)..(250): n includes a, c, g, or t, or contains no nucleotide
  misc_feature (285)..(285): n includes a, c, g, or t, or contains no nucleotide
gtgccactgggcttcctggaaggcctggccctcctggtccccccggcnnnnnnnnnnannnnnnnnnnnnnnnccagatgggaattcgtggccttccgggcattaagggnccccctggtgctcttggtttgaggggacctaaaggtgacttgggagaaaagggggagcgtggccctccaggaagaggtcccaacggtttgcctggagctataggtctcccaggtgacccaggccctgccagctatggnanaaatggccgagacggtgagcgaggccccccagggntggcaggaattcctggagtgcctggacccccgggacctcctgggcttcccggtttctgtgagccagcctcctgcaccatgcaggctggtcagcgagcatttaacaaagggcctgaccct

SEQ ID NO: 3995 - DNA, 541 bp, Homo sapiens
  misc_feature (26)..(26): n includes a, c, g, or t, or contains no nucleotide
  misc_feature (128)..(128): n includes a, c, g, or t, or contains no nucleotide
  misc_feature (142)..(142): n includes a, c, g, or t, or contains no nucleotide
  misc_feature (442)..(443): n includes a, c, g, or t, or contains no nucleotide
ggcctctgcagaaaccaccgtggggncccctgcctctggccctggagctgctggacccatcacagagtcttcaggcttcctggcctattatgagatctgccagttcctgaaaggagccaagatcacgnggctccaggatcancaggttccctacgcagtcaaggggaaccagtgggtgggctatgatgatgtgaagagtatggagaccaaggttcagttcttaaagaatttaaacctgggaggagccatgatctggtctattgacatggatgacttcactggcaaatcctgcaaccagggcccttaccctcttgtccaagcagtcaagagaagccttggctccctgtgaaggattaacttacagagaagcaggcaagatgaccttgctgcctggggcctgctctctcccaggaattctcatgtgggattccccttgccaggnnggcctttggatctctcttccaagcctttcctgacttcctcttagatcatagattggacctggttttgttttcctgcagctgttgacttgttgccctga

SEQ ID NO: 3996 - DNA, 354 bp, Homo sapiens
  misc_feature (106)..(126): n includes a, c, g, or t, or contains no nucleotide
  misc_feature (186)..(186): n includes a, c, g, or t, or contains no nucleotide
  misc_feature (245)..(245): n includes a, c, g, or t, or contains no nucleotide
  misc_feature (252)..(306): n includes a, c, g, or t, or contains no nucleotide
agctccaccgacgaagaaggtggtggctttgagtgggatgatgacttctccccagatccttttatgtcaaagacaacaagtaacctgctcagctccaagccttctnnnnnnnnnnnnnnnnnnnnntttccctcacacacctgaccgactcggacatcgagcagggcggaagcagcgaagacgganaaaaggactaggtggctgccaacgcgcacgctcgggtccgaggctgctcccctggagcngcgcccnnnnnnnnnnnnnnnnnnnnnnnnnnnnnnnnnnnnnnnnnnnnnnnnnnnnnnnggaggaagaatccagaggtgaagagggagacggctcttagctgcgttc

SEQ ID NO: 3997 - DNA, 145 bp, Homo sapiens
  misc_feature (57)..(82): n includes a, c, g, or t, or contains no nucleotide
gcaccgagcccaagtgcccatatgaacctctctgccctagccgagggacaaactgtnnnnnnnnnnnnnnnnnnnnnnnnnnagagtatgaagtggaatgaatgctcctgttctgagaagcacacttgtaactgcatcttttgga

SEQ ID NO: 3998 - DNA, 595 bp, Homo sapiens
  misc_feature (30)..(30): n includes a, c, g, or t, or contains no nucleotide
  misc_feature (72)..(72): n includes a, c, g, or t, or contains no nucleotide
  misc_feature (99)..(116): n includes a, c, g, or t, or contains no nucleotide
  misc_feature (119)..(119): n includes a, c, g, or t, or contains no nucleotide
  misc_feature (173)..(173): n includes a, c, g, or t, or contains no nucleotide
  misc_feature (257)..(272): n includes a, c, g, or t, or contains no nucleotide
  misc_feature (303)..(303): n includes a, c, g, or t, or contains no nucleotide
  misc_feature (355)..(385): n includes a, c, g, or t, or contains no nucleotide
  misc_feature (409)..(476): n includes a, c, g, or t, or contains no nucleotide
ctcaagtgctttggagaacagaataaaaancagccccgccaagactatcagctgggattcactttaatttgnaagaatgtgccgaagacgcagatgaannnnnnnnnnnnnnnnnngtnccccatcgaaggcgaagggaacattgcacgtttcttgttctctctgtttggccnagaagcataatgctgtcaacgcaacccttatagatagctgggtagatattgcgatttttcagttaaaagagggaagcagtaaannnnnnnnnnnnnnnntccgctccatgaactctgctcttgggaagancccttggctcgctgggaatgaactcaccgtagcagacgtggtgctgtggtcnnnnnnnnnnnnnnnnnnnnnnnnnnnnnnnacagtgccagccaatgtgcagagnnnnnnnnnnnnnnnnnnnnnnnnnnnnnnnnnnnnnnnnnnnnnnnnnnnnnnnnnnnnnnnnnnnntaactgattttaaagggtttagattttaagaatggtgctctttcatgcctattatcagtaaggggacttgtattagagtcagagtctttttatttaggccagttgtcaagtgtcaataa

SEQ ID NO: 3999 - DNA, 521 bp, Homo sapiens
  misc_feature (158)..(158): n includes a, c, g, or t, or contains no nucleotide
  misc_feature (161)..(164): n includes a, c, g, or t, or contains no nucleotide
  misc_feature (166)..(171): n includes a, c, g, or t, or contains no nucleotide
  misc_feature (173)..(177): n includes a, c, g, or t, or contains no nucleotide
  misc_feature (179)..(186): n includes a, c, g, or t, or contains no nucleotide
  misc_feature (188)..(191): n includes a, c, g, or t, or contains no nucleotide
  misc_feature (193)..(198): n includes a, c, g, or t, or contains no nucleotide
  misc_feature (200)..(214): n includes a, c, g, or t, or contains no nucleotide
  misc_feature (218)..(234): n includes a, c, g, or t, or contains no nucleotide
  misc_feature (432)..(454): n includes a, c, g, or t, or contains no nucleotide
  misc_feature (457)..(491): n includes a, c, g, or t, or contains no nucleotide
ccgaactatttgtcaatgaagattgtaaagccaaatgtgtaacaaaggcaaaggcttcatttcaagagtcatccagcaatgagagaatcctgcctctgtagaccaacatccagtgtgattttgtgtctgagaccacaccccagtagcaggttacgccntgnnnncnnnnnncnnnnntnnnnnnnngnnnntnnnnnncnnnnnnnnnnnnnnnaacnnnnnnnnnnnnnnnnntgttatctcttaagtattaaaagttttattttctaaagtttaaatcatgtttttcaaaatatttttcaaggtggctggttccatttaaaaatcatctttttatatgtgtcttcggttctagacttcagcttttggaaattgctaaatagaattcaaaaatctctgcatcctgaggtgatatacttcatatttgtaatnnnnnnnnnnnnnnnnnnnnnnnaannnnnnnnnnnnnnnnnnnnnnnnnnnnnnnnnnngcccacaaccattgctatattttgtatgga

SEQ ID NO: 4000 - DNA, 298 bp, Homo sapiens
ggcgcctgctgtctgactgcctcaagttccagcgggaggagcggcccctcttcccccagatcctggccacaattgagctgctgcaacggtcactccccaagattgagcggagtgcctcggaaccctccttgcaccgcacccaggccgatgagttgcctgcctgcctactcagcgcagcccgccttgtgccttaggccccgcccaagccaccagggagccaatctcagccctccacgccaaggagccttgcccaccagccaatcaatgttcgtctctgccctgatgctgcctcaggatc

SEQ ID NO: 4001 - DNA, 414 bp, Homo sapiens
  misc_feature (52)..(52): n includes a, c, g, or t, or contains no nucleotide
  misc_feature (65)..(65): n includes a, c, g, or t, or contains no nucleotide
  misc_feature (77)..(82): n includes a, c, g, or t, or contains no nucleotide
  misc_feature (87)..(99): n includes a, c, g, or t, or contains no nucleotide
  misc_feature (102)..(104): n includes a, c, g, or t, or contains no nucleotide
  misc_feature (107)..(110): n includes a, c, g, or t, or contains no nucleotide
  misc_feature (114)..(114): n includes a, c, g, or t, or contains no nucleotide
  misc_feature (116)..(117): n includes a, c, g, or t, or contains no nucleotide
  misc_feature (119)..(119): n includes a, c, g, or t, or contains no nucleotide
  misc_feature (121)..(152): n includes a, c, g, or t, or contains no nucleotide
  misc_feature (267)..(267): n includes a, c, g, or t, or contains no nucleotide
ggagccagtcttgagtttaaaggcattagtgttagatacagctccttgtggntggaaaacacccntctgctgataannnnnnggggnnnnnnnnnnnnnagnnnccnnnngggngnncncnnnnnnnnnnnnnnnnnnnnnnnnnnnnnnnnctctggtgctcccacgtctgttcctcaccctccatctctgggagcagctgcacctgactggccacgcgggggcagtggaggcacaggctcagggtggccgggctacctggcaccntatggcttacaaagtagagttggcccagtttccttccacctgaggggagcactctgactcctaacagtcttccttgccctgccatcatctggggtggctggctgtcaagaaaggccgggcatgctttctaaacacagccacaggagg

SEQ ID NO: 4002 - DNA, 589 bp, Homo sapiens
agaactgcctggttggcgtccacaagcaatacctctcgttccagcaggaccaagggagccagcctccagtgagtgactccagcaagtgcagccacctctcccttgatggtctgggagcctggcctcagcaaggggccttcctgacctctggctccagtgaagctgaatgtcctcactttgtgggtcacactctttacatttctgtaaggcaatcttggcacacgtggggcttaccagtggcccaggtaattttttgtttcatggactatggactctttcaaagggatctgatccttttgaattttgcacagccctagatacaatcccttttgataaaagggtctttgcttctgattacaggagcactgtggaacgtctgtaaatatgtttttataattccatgtatagttggtgtacactcaaaacctgtccccggcagccagtgctctctgtatagggccataatggaattctgaagaaatcttggggagggaaggggagttggaacaaatgtctgttccctggaggccagtccagtgctcagacctttagactcattgtaagttgccactgccaacatgagaccaaa

SEQ ID NO: 4003 - DNA, 527 bp, Homo sapiens
  misc_feature (106)..(107): n includes a, c, g, or t, or contains no nucleotide
  misc_feature (109)..(113): n includes a, c, g, or t, or contains no nucleotide
  misc_feature (115)..(128): n includes a, c, g, or t, or contains no nucleotide
  misc_feature (130)..(136): n includes a, c, g, or t, or contains no nucleotide
  misc_feature (139)..(234): n includes a, c, g, or t, or contains no nucleotide
  misc_feature (236)..(236): n includes a, c, g, or t, or contains no nucleotide
  misc_feature (239)..(239): n includes a, c, g, or t, or contains no nucleotide
tctacatagtagtaatccattgttggaatggaacccttgctatagtagtgacaaagtgaaaggaaatttaggaggcataggccatttcaggcagcataagtaatcnncnnnnntnnnnnnnnnnnnnntnnnnnnngcnnnnnnnnnnnnnnnnnnnnnnnnnnnnnnnnnnnnnnnnnnnnnnnnnnnnnnnnnnnnnnnnnnnnnnnnnnnnnnnnnnnnnnnnnnnnnnnnanttncccccagtgagctctgatttctagactgctttgaaaatgctgtattcattttgctaacttagtatttgggtaccctgctctttggctgttctttttttggagcccttctcagtcaagtctgccggatgtctttctttacctacccctcagttttccttaaaacgcgcacacaactctagagagtgttaagaataatgttacttggttaatgtgttatttattgagtattgtttgtgctaagcattgtgttagatttaaaaaattagtggattgactccactttgttgt

SEQ ID NO: 4004 - DNA, 309 bp, Homo sapiens
  misc_feature (82)..(85): n includes a, c, g, or t, or contains no nucleotide
  misc_feature (93)..(93): n includes a, c, g, or t, or contains no nucleotide
  misc_feature (154)..(154): n includes a, c, g, or t, or contains no nucleotide
  misc_feature (199)..(201): n includes a, c, g, or t, or contains no nucleotide
  misc_feature (233)..(253): n includes a, c, g, or t, or contains no nucleotide
ttgcattccatgattttacagagaatctgaagctattgatgtttccagaaaatataaatgcatgattttatacatagtcacnnnnatggtggnttgtcatatattcatgtaataaatctgagcctaaatctaatcaggttgttaatgttggganttatatctatagtagtcaattagtacagtagcttaaataaattcnnnccatttaattcataattagaacaatagctatnnnnnnnnnnnnnnnnnnnnnaataagtgctgtttgagatgtgatgctggtaccactggaatcgatctgtactgtaa

SEQ ID NO: 4005 - DNA, 365 bp, Homo sapiens
  misc_feature (318)..(318): n includes a, c, g, or t, or contains no nucleotide
  misc_feature (326)..(326): n includes a, c, g, or t, or contains no nucleotide
caagtcattactaagttgagcaaaagagtttttatctattagcagaaagggcctctctggcagcagagattaaaaactggcccaacttcatttccatacttcagggaacagcaaattgaggatttacttatctaggacttgaattccttctttgggaccaagttaataaaagaccaagaaactcctgattaaactggataatgaaggattctgtagacagggctgcacgtatcggctttgtttgacttctcttttctcagttaacatctcagagctagaacattccacattccccagcagcgtgtgggggctgactanaagtttancaattccaactaaaaatcaccctgcttctggcttatctg

SEQ ID NO: 4006 - DNA, 557 bp, Homo sapiens
  misc_feature (277)..(311): n includes a, c, g, or t, or contains no nucleotide
  misc_feature (325)..(325): n includes a, c, g, or t, or contains no nucleotide
  misc_feature (432)..(449): n includes a, c, g, or t, or contains no nucleotide
gtggcctcatccaaactgtatcttcctttactgtttatatcttcaccctgtaatggttgggaccaggccaatcccttctccacttactataatggttggaactaaacgtcaccaaggtggcttctccttggctgagagatggaaggcgtggtgggatttgctcctgggttccctaggccctagtgagggcagaagagaaaccatcctctcccttcttacaccgtgaggccaagatcccctcagaaggcaggagtgctgccctctcccatggtgcccnnnnnnnnnnnnnnnnnnnnnnnnnnnnnnnnnnnagggaataaacctngcactaggtcttgtggtttgtctgccttcactggacttgcccagataatcttcctttttgaggcagctatataaatgatcatttgtgcaagaaaaaaaaaaaaacannnnnnnnnnnnnnnnnnaacatctcttactatttttacttgaaaaaatgttttgcgtagcagactgtcatagccttgaacgccggctccctttcttcctccctccaagtggctctggggctgttg

SEQ ID NO: 4007 - DNA, 427 bp, Homo sapiens
atggacctgctcctggagtatgaagtcatctgtatctactggaccaagtactacacactccacaatgcaatcattgaggattgtgtcagaaaacagctcaaaaaagagaggcccatcatcctggatccggccgaccccaccctcaacgtggcagaagggtacagatgggacatcgttgctcagagggcctcccagtgcctgaaacaggactgttgctatgacaacagggagaaggggatctccagctggaacgtgaagagggcacgagacatccacttgacagtggagcagaggggttacccagatttcaacctcatcgtgaacccttatgagcccataaggaaggttaaagagaaaatccggagaccaggggctactctggcctgcagcgtctgtccttccaggttcctggcagtgagaggcagct

SEQ ID NO: 4008 - DNA, 337 bp, Homo sapiens
  misc_feature (26)..(67): n includes a, c, g, or t, or contains no nucleotide
  misc_feature (238)..(252): n includes a, c, g, or t, or contains no nucleotide
  misc_feature (259)..(282): n includes a, c, g, or t, or contains no nucleotide
gtgtccctggcattttaggtgtcggnnnnnnnnnnnnnnnnnnnnnnnnnnnnnnnnnnnnnnnnnncaagtcggcagtttgtaaaggactccattcggctggttaaaagatgcactaaacctgatagaaaagaattccagaagattgccatggcaacagcaataggatttgctataatgggattcattggcttctttgtgaaattgatccatattcctattaataacatcattgttnnnnnnnnnnnnnnntttggannnnnnnnnnnnnnnnnnnnnnnnggtgaacaagtgtgagggtgtgagaaactcacagaatacaaatttgcctgtatgt

SEQ ID NO: 4009 - DNA, 475 bp, Homo sapiens
  misc_feature (391)..(438): n includes a, c, g, or t, or contains no nucleotide
cttggctgtctgaagatagatcgccatcatgaacgacaccgtaactatccgcactagaaagttcatgaccaaccgactacttcagaggaaacaaatggtcattgatgtccttcaccccgggaaggcgacagtgcctaagacagaaattcgggaaaaactagccaaaatgtacaagaccacaccggatgtcatctttgtatttggattcagaactcattttggtggtggcaagacaactggctttggcatgatttatgattccctggattatgcaaagaaaaatgaacccaaacatagacttgcaagacatggcctgtatgagaagaaaaagacctcaagaaagcaacgaaaggaacgcaagaacagaatgaagaaagtcagggggactgcnnnnnnnnnnnnnnnnnnnnnnnnnnnnnnnnnnnnnnnnnnnnnnnncaatgatgttagctgtggccactgtggatttttcgca

SEQ ID NO: 4010 - DNA, 226 bp, Homo sapiens
  misc_feature (158)..(174): n includes a, c, g, or t, or contains no nucleotide
agcgtgggcacaggactgacccttcttcagagataatgacattttatcttctccttttgatgaaaactgtcactttagcatgtaatccattacagaatcccatgcagtgattccaggatttgaaattgtatgatgtgttacataagaatttatttgcnnnnnnnnnnnnnnnnnaaagagagagacatatcacgctgctgtcatgattttgtgtcaagatgatcca

SEQ ID NO: 4011 - DNA, 526 bp, Homo sapiens
  misc_feature (191)..(192): n includes a, c, g, or t, or contains no nucleotide
  misc_feature (203)..(203): n includes a, c, g, or t, or contains no nucleotide
  misc_feature (208)..(208): n includes a, c, g, or t, or contains no nucleotide
  misc_feature (215)..(215): n includes a, c, g, or t, or contains no nucleotide
  misc_feature (229)..(229): n includes a, c, g, or t, or contains no nucleotide
  misc_feature (242)..(243): n includes a, c, g, or t, or contains no nucleotide
  misc_feature (278)..(278): n includes a, c, g, or t, or contains no nucleotide
tgaaagacctttcaaacccctcgagatacttgtgcaagtgcccaaatgagtttactggtgatcgctgccaaaactacgtaatggccagcttctacagtacgtccactccctttctgtctctgcctgaataggagcatgctcagttggtgctgctttcttgttgctgcatctcccctcagattccacctagnnctagatgtgtncttanccagatnctaatattgactgncctctgcctgtcnncatgagaacattaacaaaagcaattgtattacttncctctgttcgcgactagttggctctgagatactaataggtgtgtgaggctccggatgtttctggaattgatattgaatgatgtgatacaaattgatagtcaatatcaagcagtgaaatatgataataaaggcatttcaaagtctcacttttattgataaaataaaaatcattctactgaacagtccatcttctttatacaatgaccacatcctgaaaagggtgttgctaagctgtaaccgatatgcac

SEQ ID NO: 4012 - DNA, 507 bp, Homo sapiens
  misc_feature (455)..(455): n includes a, c, g, or t, or contains no nucleotide
tcccaagccaccatttgagagggaggggtgttggtgccctgacagggactgggcagggtgtccaaacttggggcttcccaggcacctgcagtgtgaacactgcttggctggctcaagattagggccgcggagggggctgtgcacataccagttacttaagcagccacgagtgtcccccatgccttggtgcgggtcctggaggcctcttgggggtgggacctttgggcagggtttgcccactgacacgcccgccatggggcactggctgcatggggctccttggaccctgtagacccagcagaccccgcctgtgtcaggccagctgcccgaaggcacttggctgtggtcccaggggacggctctgctggcacactcaggagcctggccgcggggactgcagggagggtgcctggacccgtggggttgcttcattgagataaagcacacttatcacntagcacaaaggacgtgccatggtgctttccccaaaagttgtgttgcttttat

SEQ ID NO: 4013 - DNA, 366 bp, Homo sapiens
tagatggatttttgccccttcttaattttctcccacaatgaaaacattttagaagacattttgaatcaaaatgtattatgaccattgaaagttctctattttctaagaagctgagcagctccaagggcctcgtttcaggtggtactctatgtattgtctgtgggcttgtttctacctgtacagtggaaccatgtgaccatgtcttgtgcttgcaatatagaaaccatgcagtgctgttttgtgaattggcagtttctgtataaactcttatttatatacattggcctctctgtatgattttccatttgctacatgaattgtaaaattaattataaaattatagtacctgctaaatacaattctgag

SEQ ID NO: 4014 - DNA, 541 bp, Homo sapiens
atgctgggtgcctctggcgactacgctgatttccagtatttgaagcaagttctcggccagatggtgattgatgaggagcttctgggagatggacacagctatagtcctagagctattcattcatggctgaccagggccatgtacagccggcgctcgaagatgaaccctttgtggaacaccatggtcatcggaggctatgctgatggagagagcttcctcggttatgtggacatgcttggtgtagcctatgaagccccttcgctggccactggttatggtgcatacttggctcagcctctgctgcgagaagttctggagaagcagccagtgctaagccagaccgaggcccgcgacttagtagaacgctgcatgcgagtgctgtactaccgagatgcccgttcttacaaccggtttcaaaccgccactgtcaccgaaaaaggtgttgaaatagagggaccattgtctacagagaccaactgggatattgcccacatgatcagtggctttgaatgaaatacagatgcattatccagaactgaag

SEQ ID NO: 4015 - DNA, 523 bp, Homo sapiens
actgtgatcctggactcgctgtaggttatgatgagtttaatgctgtggacttcagtggcaccttcttcatcaacaccgaaagggacgatgactatgctggatttgtctttggctaccagtccagcagccgcttttatgttgtgatgtggaagcaagtcacccagtcctactgggacaccaaccccacgagggctcagggatactcgggcctttctgtgaaagttgtaaactccaccacagggcctggcgagcacctgcggaacgccctgtggcacacaggaaacacccctggccaggtgcgcaccctgtggcatgaccctcgtcacataggctggaaagatttcaccgcctacagatggcgtctcagccacaggccaaagacgggtttcattagagtggtgatgtatgaagggaagaaaatcatggctgactcaggacccatctatgataaaacctatgctggtggtagactagggttgtttgtcttctctcaagaaatggtgttcttctctgacctgaaata

SEQ ID NO: 4016 - DNA, 77 bp, Homo sapiens
ccccagcatggggccccgggtcctgggcctgctgacgccagcaaggtggtggccaagggcctggggctgagcaaggc

SEQ ID NO: 4017 - DNA, 537 bp, Homo sapiens
  misc_feature (63)..(78): n includes a, c, g, or t, or contains no nucleotide
  misc_feature (239)..(241): n includes a, c, g, or t, or contains no nucleotide
  misc_feature (263)..(264): n includes a, c, g, or t, or contains no nucleotide
  misc_feature (267)..(268): n includes a, c, g, or t, or contains no nucleotide
  misc_feature (270)..(270): n includes a, c, g, or t, or contains no nucleotide
tacagtaaccacatgcggctgtttaaagttaagccaattaaaatcacataagattaaaaattnnnnnnnnnnnnnnnntaaccacgtttctagaggcgtcactgtatgtagttcatggctactgtactgacagcgagagcatgtccatctgttggacagcactattctagagaactaaactggcttaacgagtcacagcctcagctgtgctgggacgacccttgtctccctgggtaggnnngggggggaatgggggagggctnnatnngnccccagctggggcctgttgtctgggaccctccctctcctgagaggggaggcctggtggcttagcctgggcaggtcgtgtctcctcctgaccccagtggctgcggtgaggggaaccaccctcccttgctgcaccagtggccattagctcccgtcaccactgcaacccagggtcccagctggctgggtcctcttctgcccccagtgcccttccccttgggctgtgttggagtgagcacctcctctgtaggcacctctcacactgttgtc

SEQ ID NO: 4018 - DNA, 470 bp, Homo sapiens
  misc_feature (295)..(295): n includes a, c, g, or t, or contains no nucleotide
  misc_feature (427)..(442): n includes a, c, g, or t, or contains no nucleotide
ctctatgaactttgggaagagtacgagacccaatctagtgcagaagccaaatttgtgaagcagctagaccaatgtgaaatgattcttcaagcatctgaatatgaagaccttgaacacaaacctgggagactgcaagacttctatgattccacagcaggaaaattcaatcaccctgagatagtccagcttgtttctgaacttgaggcagaaagaagcactaacatagctgcagctgccagtgagccacactcctgagacactctctaaattgctgcactcctgtaacaaacattanttttccatttcattgtattgtgttttgccattgttggtctgttgatttccctagatgtgagtctgtttgttttcaattgtctgaacttcagcaagaaatgtgatacaacttgggcactaaaagaagccacannnnnnnnnnnnnnnntgaaagtgccatggatgaacactggagg

SEQ ID NO: 4019 - DNA, 612 bp, Homo sapiens
  misc_feature (29)..(29): n includes a, c, g, or t, or contains no nucleotide
  misc_feature (113)..(113): n includes a, c, g, or t, or contains no nucleotide
  misc_feature (136)..(137): n includes a, c, g, or t, or contains no nucleotide
  misc_feature (139)..(216): n includes a, c, g, or t, or contains no nucleotide
  misc_feature (520)..(573): n includes a, c, g, or t, or contains no nucleotide
catcccagtagctttgcaaaaagcagggnctgacagtgagtgacgtggacatcttcgagatcaatgaggcctttgcaagccaggctgcctactgtgtggagaagctacgactncccccctgagaaggtgaaccccnngnnnnnnnnnnnnnnnnnnnnnnnnnnnnnnnnnnnnnnnnnnnnnnnnnnnnnnnnnnnnnnnnnnnnnnnnnnnnnncgccgtgggaagagggcatacggagtggtgtccatgtgcatcgggactggaatgggagccgctgccgtctttgaataccctgggaactgagtgaggtcccaggctggaggcgctacgcagacagtcctgctgctctagcagcaaggcagtaacaccacaaaagcaaaaccacatgggaaaactcagcactggtggtggtggcagtggacagatcaaggcacttcaactcatttggaaaatgtgaacactgatgacatggtataggagtgggtggggtgttgagccacccatcagaccctctttnnnnnnnnnnnnnnnnnnnnnnnnnnnnnnnnnnnnnnnnnnnnnnnnnnnnnnttcttaaggcaaggcaaatccatggatgagaagtgcaat

SEQ ID NO: 4020 - DNA, 524 bp, Homo sapiens
  misc_feature (26)..(26): n includes a, c, g, or t, or contains no nucleotide
  misc_feature (56)..(56): n includes a, c, g, or t, or contains no nucleotide
  misc_feature (60)..(60): n includes a, c, g, or t, or contains no nucleotide
  misc_feature (82)..(276): n includes a, c, g, or t, or contains no nucleotide
  misc_feature (298)..(299): n includes a, c, g, or t, or contains no nucleotide
  misc_feature (439)..(461): n includes a, c, g, or t, or contains no nucleotide
cggaacagccacctaaggcaagaatnggaacggacacaccttgctcctttctgagncccntttcccaaaaccccccttccannnnnnnnnnnnnnnnnnnnnnnnnnnnnnnnnnnnnnnnnnnnnnnnnnnnnnnnnnnnnnnnnnnnnnnnnnnnnnnnnnnnnnnnnnnnnnnnnnnnnnnnnnnnnnnnnnnnnnnnnnnnnnnnnnnnnnnnnnnnnnnnnnnnnnnnnnnnnnnnnnnnnnnnnnnnnnnnnnnnnnnnnnnnnnnnnnngtctcaggggtgacaggaccanngcagagccccggtacaaacagacaaggctgcagtcaaatgggagggtccaggtgtccgtgttggagggctgggatcttgtagggcctgtgcgtcctggctgaggatcaaaccacatatgttattgggagaaacgatttcnnnnnnnnnnnnnnnnnnnnnnntaatgaaggcagaagagaaaaacgaagtgtggaatttggggttgtcctgtgtaaattacacaa

SEQ ID NO: 4021 - DNA, 434 bp, Homo sapiens
  misc_feature (144)..(144): n includes a, c, g, or t, or contains no nucleotide
aagcagtagctatccaaggaccactgacaacggcatcactataagtgggcccagtgctgtgtagtctggaattgttaacattttaatttttacaattgatgtaacatcttaattaaccttttaattttcacaattgatgacagngtgagtttgatgaaaatatctgaagctattatggaaataccatgtaatagggagagttgaacatgaatattagagaaggaatccagttacttttttaaattacacctgtgtgcacctgtattactgaatataggaaagagatacccattacatagttactcagtaaacaaaagagaaataccaggtaggaaagaagagttactattcctgagaaataatcaagaacatatttaatttaaactaatgatgtgaactatttagttttgatgtccgttatgtgattctgcttt

SEQ ID NO: 4022 - DNA, 421 bp, Homo sapiens
  misc_feature (144)..(144): n includes a, c, g, or t, or contains no nucleotide
cgttagtaaccatttagtgacaaaggattaaaacatccatctggatgttaattttgaagatgtaaattatatgttgtttaaatttttccaggcatctgaaaaccttatctgctagacaatgtaagattcacacagagttatctngggattctgattttttaaatagtacatatcattaaaccattttctctaaatgtaagaagagcagaaaaaatcttataagattatcagatttttctaatgacacagaaatgtaagaaaaaaatccctttatattgaaaaaagatgcagtcaaagtcttttcagacatgcccaaactttgagaatttcttcaaccatctaatgctataaagatttttgttcttcctgttcacaaccagttgtataacagaaatactagctactgttttccttcctgtgt

SEQ ID NO: 4023 - DNA, 187 bp, Homo sapiens
  misc_feature (85)..(85): n includes a, c, g, or t, or contains no nucleotide
  misc_feature (88)..(90): n includes a, c, g, or t, or contains no nucleotide
  misc_feature (118)..(118): n includes a, c, g, or t, or contains no nucleotide
  misc_feature (162)..(162): n includes a, c, g, or t, or contains no nucleotide
agagccatgcactggcctggagcatcgacctcaaggagactggtctctgtgctgacttccacccgagtggggcagttgtggccgnagnnntgaacacggggaggtggttggttttggncacagagaccagagagatcgtgtctgatgtcattgatggcaatnagcagctctcagtggtccggtacag

SEQ ID NO: 4024 - DNA, 225 bp, Homo sapiens
cgccacttctctctgggcgagttgaaggagctgtttatcctggatgaagctagcctcagtgacacacatgacaggttgcactgccgacgttgtgtcaacagccgtcagatccggccaccccctgatggttctgactgcacttcagacctggcagggtggaaccactgcactgataagtgggggctccgggatgaggtactccaggctgcctgggatgctgcctcc

SEQ ID NO: 4025 - DNA, 553 bp, Homo sapiens
tgaacccatatttgtacaccaatattcatagcagcttattcacaagacccaaaaggcagaagcaacccaaatgttcatcaatgaatgaatgaatggctaagcaaaatgtgatatgtacctaacgaagtatccttcagcctgaaagaggaatgaagtactcatacatgttacaacacggacgaaccttgaaaactttatgctaagtgaaataagccagacatcaacagataaatagtttatgattccacctacatgaggtactgagagtgaacaaatttacagagacagaaagcagaacagtgattaccagggactgaggggaggggagcatgggaagtgacggtttaatgggcacagggtttatgtttaggatgttgaaaaagttctgcagataaacagtagtgatagttgtaccgcaatgtgacttaatgccactaaattgacacttaaaaatggtttaaatggtcaattttgttatgtatattttatatcaatttaaaaaaaaacctgagccccaaaaggtattttaatcaccaaggctgattaaaccaag

SEQ ID NO: 4026 - DNA, 375 bp, Homo sapiens
  misc_feature (231)..(253): n includes a, c, g, or t, or contains no nucleotide
  misc_feature (294)..(309): n includes a, c, g, or t, or contains no nucleotide
tgccaacgtagctctgcctgcctgtcaacccctcactgcactctgctcatcacgggaggatacctgtgtgccggcagcccctcagggactctcagccctggcactggcaccccagggttggccccgtcagcagaggcttggctttcgagccagtgggtgtctctcctttgggcctgggcggcttgctcctgccagccatgccttcagggtaggctctgagcaagctggcgnnnnnnnnnnnnnnnnnnnnnnncaaaaagctgggtcctctggaggaggggcgagctgtggagnnnnnnnnnnnnnnnnccccaagctcactcaggaattcacacccgcctggtttcttgaagtgtgctgggtccttccctctgc

SEQ ID NO: 4027 - DNA, 572 bp, Homo sapiens
  misc_feature (80)..(81): n includes a, c, g, or t, or contains no nucleotide
  misc_feature (198)..(212): n includes a, c, g, or t, or contains no nucleotide
  misc_feature (264)..(264): n includes a, c, g, or t, or contains no nucleotide
  misc_feature (266)..(266): n includes a, c, g, or t, or contains no nucleotide
  misc_feature (268)..(270): n includes a, c, g, or t, or contains no nucleotide
  misc_feature (277)..(280): n includes a, c, g, or t, or contains no nucleotide
  misc_feature (282)..(284): n includes a, c, g, or t, or contains no nucleotide
gacagaccttcctagagtgtttggtcgggttcacagtgaccgagagtcaggtccagcacacacctgggaaagggatgctnncccaagggggaccaaaagggccggacgttacagggtgaaaccctctgacccctcgcgacaccgtaggacttgacttttgtttagtctttctaagaaatagatcatggagccaagtgnnnnnnnnnnnnnnnaatgtaagggtctgctttgttcttgttgcttttctgttttttaaccttttgntncnnnccatttnnnnannngaaaaaaaaaaagcttatgtttcttgtcaaatgcagaaatgttccttccgccactcactgaagttttgcattctggcttgtgcagtttttattgtctgtgtcagacgtacagccagacatgttctctattggcatttttccgattctgttcagatgacagcgaccgccttttcattccccccgccacctgtactcaccctcacgctctttgaagaaaaaaaaaaaaatcaccttgtgtgttgtagctcatttgtttcaagagagaatcaacagatcatattcagtgtc

SEQ ID NO: 4028 - DNA, 543 bp, Homo sapiens
  misc_feature (28)..(28): n includes a, c, g, or t, or contains no nucleotide
  misc_feature (58)..(76): n includes a, c, g, or t, or contains no nucleotide
  misc_feature (78)..(78): n includes a, c, g, or t, or contains no nucleotide
  misc_feature (91)..(91): n includes a, c, g, or t, or contains no nucleotide
  misc_feature (100)..(100): n includes a, c, g, or t, or contains no nucleotide
  misc_feature (238)..(254): n includes a, c, g, or t, or contains no nucleotide
ccaaaagttccttcgtgtattgctctcncatctccgcagcccggttttgaccggatgnnnnnnnnnnnnnnnnnnnancctgtactgtggngtgtgtatntttcttgccaacacgccagaaataaaactaaggttgtactgaagttggaaaaattcaggttaatgtagctcatgctggctaaagtgaaacgttctctccccgccccccgttcctaagcagtgttaagttttctttgannnnnnnnnnnnnnnnntttgggcctgcttaaaccacttaaatgtagttaatgacagatggtttgaggtttaaaagtcttctggagaaagcccgccagagaacattccctttgaagccccatgtaaaaatacgtgtgggagagaaagtgttttctctgacttctgctgacagtggctaaaactctgaactgtcaggagtattcaaaataagactgccttgtaggtaagcctgtggtagtttttttgagcacaggataaaatacttgagtctttgcttaaatgttactttctcaatgaggctttgta

SEQ ID NO: 4029 - DNA, 327 bp, Homo sapiens
  misc_feature (45)..(149): n includes a, c, g, or t, or contains no nucleotide
  misc_feature (267)..(282): n includes a, c, g, or t, or contains no nucleotide
acctgcgtggctctgttactacagccactgctgggtgcccagggnnnnnnnnnnnnnnnnnnnnnnnnnnnnnnnnnnnnnnnnnnnnnnnnnnnnnnnnnnnnnnnnnnnnnnnnnnnnnnnnnnnnnnnnnnnnnnnnnnnnnnnnngtatgggaaaagacacaaagaggacacgctggccttctcggagtgggggtccccgcatgctgctgtccccagggagctcagcccgctggacttataatgccaccttctgtctcctacnnnnnnnnnnnnnnnnccagcccagctctcccctctgcacccttggctctggccaaagctt

SEQ ID NO: 4030 - DNA, 485 bp, Homo sapiens
  misc_feature (63)..(78): n includes a, c, g, or t, or contains no nucleotide
  misc_feature (177)..(177): n includes a, c, g, or t, or contains no nucleotide
  misc_feature (200)..(200): n includes a, c, g, or t, or contains no nucleotide
  misc_feature (211)..(211): n includes a, c, g, or t, or contains no nucleotide
  misc_feature (220)..(220): n includes a, c, g, or t, or contains no nucleotide
  misc_feature (230)..(230): n includes a, c, g, or t, or contains no nucleotide
  misc_feature (236)..(236): n includes a, c, g, or t, or contains no nucleotide
  misc_feature (243)..(243): n includes a, c, g, or t, or contains no nucleotide
  misc_feature (250)..(250): n includes a, c, g, or t, or contains no nucleotide
  misc_feature (268)..(268): n includes a, c, g, or t, or contains no nucleotide
  misc_feature (285)..(285): n includes a, c, g, or t, or contains no nucleotide
  misc_feature (421)..(453): n includes a, c, g, or t, or contains no nucleotide
ggctctaaagtatctattttgcatccatttatatatagatcttaaacagaaatactctaggtnnnnnnnnnnnnnnnntaagaagttatgctgctgctgttactctcttctaggattctggtggtaaagtagagaaactcggacactatattaaccttactgaaacatgctttaaancgtgtctaaaatctgatttgagncaagtcactgnccgagcttnctgagtctgncattgnacactgnctactgnactcacctctccttcccnggaataaggcttcagcnttccctatgctgtgaagacaccatttgtaagcactttgaacataagcactgtgtgacagcgctggatatcatgcttgggggggggcctctccctgactcccatccccataataatgagttttgtttggaattgtannnnnnnnnnnnnnnnnnnnnnnnnnnnnnnnnaaatatttgatcagctgtcctctctgaaaaaa

SEQ ID NO: 4031 - DNA, 415 bp, Homo sapiens
  misc_feature (28)..(28): n includes a, c, g, or t, or contains no nucleotide
  misc_feature (46)..(61): n includes a, c, g, or t, or contains no nucleotide
  misc_feature (91)..(91): n includes a, c, g, or t, or contains no nucleotide
  misc_feature (385)..(385): n includes a, c, g, or t, or contains no nucleotide
tcctgaggtctttgttctcactgtattntttttatcctggggccannnnnnnnnnnnnnnnctcttgtggttaaagactgaatttgtaaanccattcagataaatggcagtactttaggacacacacaaacacacagatacaccttttgatatgtaagcttgacctaaagtcaaaggacctgtgtagcatttcagattgagcacttcactatcaaaaatactaacatcacatggcttgaagagtaaccatcagagctgaatcatccaagtaagaacaagtaccattgttgattgataagtagagatacattttttatgatgttcatcacagtgtggtaaggttgcaaattcaaaacatgtcacccaagctctgttcatgtttttntgaattctaggctggtgctgcactgaaata

SEQ ID NO: 4032 - DNA, 509 bp, Homo sapiens
  misc_feature (269)..(289): n includes a, c, g, or t, or contains no nucleotide
  misc_feature (453)..(457): n includes a, c, g, or t, or contains no nucleotide
  misc_feature (459)..(461): n includes a, c, g, or t, or contains no nucleotide
  misc_feature (463)..(464): n includes a, c, g, or t, or contains no nucleotide
gtggtaccagagcataaggccaccgtacccttcctatggttacgagcccatgggtggatggctgcaccaccaaatcatccccgtgctgtcccaacagcaccccccgactcacaccctgcagcctcatcaccacatcccagtggtgccagctcagcagcccgtgatcccccagcaaccaatgatgcccgttcctggccaacactccatgactccaatccaacaccaccagccaaacctccctccgcccgcccagcagccctaccagcccnnnnnnnnnnnnnnnnnnnnncaccagcccatgcagccccagccacctgtgcaccccatgcagcccctgccgccacagccacctctgcctccgatgttccccatgcagcccctgcctcccatgcttcctgatctgactctggaagcttggccatcaacagacaagaccaagcgggaggaagtggnnnnnannntnngaagatgagaggggaatgaatacttcagatgctttcaggagtgac

SEQ ID NO: 4033 - DNA, 271 bp, Homo sapiens
taacagatttatctagggtccccagcagaattgacagttgaacagagctagaggccatgtctcctgcatagcttttccctgtcctgacaccaggcaagaaaagcgcagagaaatcggtgtctgacgattttggaaatgagaacaatctcaaaaaaaaaaaaaaaaaaaaaaaaaaaagaaaagagaaaaaaaagactagccagccaggaagatgaatcctagcttcttccattggaaaatttaagacaagttcaacaacaaaacatttgct

SEQ ID NO: 4034 - DNA, 77 bp, Homo sapiens
cctttttggcatcctggcttgcctccagttttaggtcctttagtttgcttctgtaagcaacgggaacacctgctgag

SEQ ID NO: 4035 - DNA, 445 bp, Homo sapiens
gctgtcccttctcagtgcttgtcagcgctgggtctggggcctctgtatgccctaggcctgtgccaaagtggccagagattgggctgcctgtgatacccatcagcccactgccccggccggcccagataggtctgcctctgccttccagctcccacagcctggtccctgatactgggctctgtcctgcagacacctctttcagaaacgcccaagcccagccctaggagggggtggggcatccctggtcaaccctcaaacattccggactcccctcataacaatagacacatgtgcccagcaataatccgccccttcctgtgtgcgcctgtggggtgcgtgctctctgtgtgtacctgtgtgggtgaaggggatagggcgaggctgtgcctgtgccccaggtcccagccctggcccttcccagactgtgatggccatcctggtccca

SEQ ID NO: 4036 - DNA, 526 bp, Homo sapiens
  misc_feature (332)..(333): n includes a, c, g, or t, or contains no nucleotide
  misc_feature (464)..(464): n includes a, c, g, or t, or contains no nucleotide
ccagcaagtcggatgtctggagttttggggtgctgctctgggaggtcttctcatatggacgggctccgtaccctaaaatgtcactgaaagaggtgtcggaggccgtggagaaggggtaccgcatggaaccccccgagggctgtccaggccccgtgcacgtcctcatgagcagctgctgggaggcagagcccgcccgccggccacccttccgcaaactggccgagaagctggcccgggagctacgcagtgcaggtgccccagcctccgtctcagggcaggacgccgacggctccacctcgccccgaagccaggagccctgaccccacccggtnnggcccttggccccagaggaccgagagagtggagagtgcggcgtgggggcactgaccaggcccaaggagggtccaggcgggcaagtcatcctcctggtgcccacagcaggggctggcccacgtagggggctntgggcggcccgtggacaccccagacctgcgaaggatgatcgcccgataaagacggattctaa

SEQ ID NO: 4037 - DNA, 413 bp, Homo sapiens
  misc_feature (54)..(54): n includes a, c, g, or t, or contains no nucleotide
  misc_feature (297)..(297): n includes a, c, g, or t, or contains no nucleotide
  misc_feature (304)..(309): n includes a, c, g, or t, or contains no nucleotide
  misc_feature (311)..(314): n includes a, c, g, or t, or contains no nucleotide
  misc_feature (316)..(320): n includes a, c, g, or t, or contains no nucleotide
attcaacttggcttgggagcagaatgcattgcattgtataaatgactctggccntgtgtgtactttgattttataacttgtaatcttttgtttacaatgaggggctttctgtaacttgttttaatttagaacactttggtagcaatagaaactttggatacatttttgtatggtacctgtgatgtatatagaattagtactttatttttatttttaagaggtaaagcattatgttggggaaagtagggtgggtttccaaatttgcattttttatattaaaaataaagtcaagatttngaaaaannnnnnannnnannnnnacagccctagacggctaggtgagccccaaggacgggtggggtgctggctgcagggggcggggacacgcctttatcttgaaaactgtcatggga

SEQ ID NO: 4038 - DNA, 514 bp, Homo sapiens
  misc_feature (99)..(99): n includes a, c, g, or t, or contains no nucleotide
  misc_feature (112)..(112): n includes a, c, g, or t, or contains no nucleotide
  misc_feature (125)..(125): n includes a, c, g, or t, or contains no nucleotide
acagctcctattctcagctgacctgactgagccaacccatgaactcttcactccttggggaagccacctcccatcacacccctgagcagagttaggganggaattctacttncccataaaaggancctctcctgagaggcaaaacctgttgcctccaccacggcttccctcttggctcattccaagcttggccaaattggggaagtgggatggaggttgccctgcatcccccctcctctgcctgagtgtgtctttgtaatgtcagctggcatcatacaaagagcaggagaagcaaacacccagaactcttttgctggtcagagattccctgagtgtctgtcctcacccaagcctgctctgtgtctgtgttgtgaagcttgagactctggaaagaaatggggagggggggcaggggaaatgttgccctaagaatgcttctcattcctctgttcttattgggtcctgtttttcgggagggtgggggttgggggaagcttgaccttgtgtcttcgtc

SEQ ID NO: 4039 - DNA, 267 bp, Homo sapiens
aaggaaactcttatctcagtcatgcataaatatgcagtgatatggcagaagacaccagagcagatgcagagagccattttgtgaatggattggattatttaataacattaccttactgtggaggaaggattgtaaaaaaaaatgcctttgagacagtttcttagctttttaattgttgtttctttctagtggtctttgtaagagtgtagaagcattccttctttgataatgttaaatttgtaagtttcaggtgacatgtgaaacctt

SEQ ID NO: 4040 - DNA, 506 bp, Homo sapiens
agatgtatcttttgctctctcttgctctcttatttgtaccggtttttgtatataaaattcatgtttccaatctctctctccctgatcggtgacagtcactagcttatcttgaacagatatttaattttgctaacactcagctctgccctccccgatcccctggctccccagcacacattcctttgaaataaggtttcaatatacatctacatactatatatatatttggcaacttgtatttgtgtgtatatatatatatatatgtttatgtatatatgtgattctgataaaatagacattgctattctgttttttatatgtaaaaacaaaacaagaaaaaatagagaattctacatactaaatctctctccttttttaattttaatatttgttatcatttatttattggtgctactgtttatccgtaataattgtggggaaaagatattaacatcacgtctttgtctctagtgcagtttttcgagatattccgtagtacatattta

SEQ ID NO: 4041 - DNA, 240 bp, Homo sapiens
agtctcagtttcttgcttggggaacttgtgtccctaatgtgtttagattgctagattgctaaggagctgatactttgacagtgtttttagacctgtgttactaaaaaaaagatgaatgtcctgaaaagggtgttgggagggtggttcaacaaagaaacaaagatgttatggtgtttagatttatggttgttaaaaatgtcatctcaagtcaagtcactggtctgtttgcatttgatacat

SEQ ID NO: 4042 - DNA, 613 bp, Homo sapiens
gctgatgctgcaagggctgattgccgctcggaaacacatggacaaggtggtgcagatcgtggagatcatgcagcaaggttctcagcttccttgcttccatggctccagcaccattcgaaacctcaaagagaggttccacatgagcatgactgaggagcagctgcagctgctggtggagcagatggtggatggcagtatgcggtctatcaccaccaaactctatgacggcttccagtacctcaccaacggcatcatgtgacacgctcctcagcccaggagtggtggggggtccagggcaccctccctagagggcccttgtttgagaaaccccaaaccaggaaaccccacctacccaaccatccacccaagggaaatggaaggcaagaaacacgaaggatcatgtggtaactgcgagagcttgctgaggggtgggagagccagctgtggggtccagacttgttggggcttccctgcccctcctggtctgtgtcagtattaccaccagactgactccaggactcactgccctccagaaaacagaggtgacaaatgtgagggacactggggcctttcttctccttgtaggggtctctcagaggttctttccacaggc

SEQ ID NO: 4043 - DNA, 602 bp, Homo sapiens
  misc_feature (31)..(33): n includes a, c, g, or t, or contains no nucleotide
  misc_feature (47)..(70): n includes a, c, g, or t, or contains no nucleotide
  misc_feature (254)..(256): n includes a, c, g, or t, or contains no nucleotide
  misc_feature (258)..(272): n includes a, c, g, or t, or contains no nucleotide
  misc_feature (330)..(370): n includes a, c, g, or t, or contains no nucleotide
gagctctttgacaggctcccaggcctcccannncctggacaagcatnnnnnnnnnnnnnnnnnnnnnnnnggccagggctgggctgtgcacctgcctcccactgacccagacccacttcctccagagaggcctctctccgcctgagctatttcccttgctagtgtgcagatatttccctaacatgtccttttttgtatttgtttgtacggaccataaatataactgtagctttaagactaaaaaaaaaaaaaannnannnnnnnnnnnnnnntttcccagaacttctctgacccaagaatggtgaagtggtggtacagtggcagaggcannnnnnnnnnnnnnnnnnnnnnnnnnnnnnnnnnnnnnnnnacatctgcccagattctgaggttctgcactgtggggctgggagggccaagtaggggccctcattcctcactctagctgccaccctgcaccgtccttacggcaatatgcttttgtagcatgtttgactttccaaaacgtttccagcatctttcagatttccccaaccagcccttggggcagtggccctgtgcaaaccttggctcaggaaggagattgggctcgctccacacac

SEQ ID NO: 4044 - DNA, 494 bp, Homo sapiens
  misc_feature (26)..(77): n includes a, c, g, or t, or contains no nucleotide
  misc_feature (187)..(203): n includes a, c, g, or t, or contains no nucleotide
  misc_feature (206)..(208): n includes a, c, g, or t, or contains no nucleotide
gcttggagccttggtcgccatgtatnnnnnnnnnnnnnnnnnnnnnnnnnnnnnnnnnnnnnnnnnnnnnnnnnnnnccagtggggagtggagctgggaaagcagctggctaagaaaatagagcctgagcttgatggcagtgctcaagtgacctctcacgacgcttctaccaatgggctcatcaacnnnnnnnnnnnnnnnnncgnnnggccagagtccaataaactcgtgctcatctgcagcctcctctgtgactcccctttctcttctcgtccctcctccccggagccggcactgcatgttcctggacaccacccagagcaccctctggttgtgggcttggaccacgagcccttagcagggaaggctggtctcccccagcctaacccccagcccctccatgtctatgctccctctgtgttagaattggctgaagtgtttttgtgcagctgacttttctgacccatgttcacgttgttcacatcccatgtaga

SEQ ID NO: 4045 - DNA, 133 bp, Homo sapiens
gtctgtgttctggttgcgctggccattgtctatctcattgccttggctgtctgtcagtgccgccgaaagaactacgggcagctggacatctttccagcccgggatacctaccatcctatgagcgagtacccca

SEQ ID NO: 4046 - DNA, 337 bp, Homo sapiens
  misc_feature (189)..(189): n includes a, c, g, or t, or contains no nucleotide
  misc_feature (246)..(276): n includes a, c, g, or t, or contains no nucleotide
catgaaaccagtggtagaagaaacaatgcaagacatacatttccactatggtcggtttcaggaatttcaaaagaaatctgacgtcaatgcaattatccattatttaaaagctataaaaatagaacaggcatcattaacaagggataaaagtatcaattctttgaagaaattggttttaaggaaacttcnggagaaaggcattagatctggaaagcttgagcctccttgggttcgtctacaaattgnnnnnnnnnnnnnnnnnnnnnnnnnnnnnnnatgagcgggccctgagactggctgctgactttgagaactctgtgagacaaggtccttaggc

SEQ ID NO: 4047 - DNA, 445 bp, Homo sapiens
ctaatggcatcctgagcgtgacagccactgacaggagcacaggtaaggctaacaagatcaccatcaccaatgacaagggccggctgagcaaggaggaggtggagaggatggttcatgaagccgagcagtacaaggctgaggatgaggcccagagggacagagtggctgccaaaaactcgctggaggcccatgtcttccatgtgaaaggttctttgcaagaggaaagccttagggacaagattcccgaagaggacaggcgcaaaatgcaagacaagtgtcgggaagtccttgcctggctggagcacaaccagctggcagagaaggaggagtatgagcatcagaagagggagctggagcaaatctgtcgccccatcttctccaggctctatggggggcctggtgtccctgggggcagcagttgtggcactcaagcccgccaggggga

SEQ ID NO: 4048 - DNA, 448 bp, Homo sapiens
  misc_feature (347)..(347): n includes a, c, g, or t, or contains no nucleotide
  misc_feature (364)..(423): n includes a, c, g, or t, or contains no nucleotide
aaggtcacccttgtggttggagcgtcccaggacatcatcccccagctgaagaagaagtatgatgtggacacactggacatggtcttcctcgaccactggaaggaccggtacctgccggacacgcttctcttggaggaatgtggcctgctgcggaaggggacagtgctactggctgacaacgtgatctgcccaggtgcgccagacttcctagcacacgtgcgcgggagcagctgctttgagtgcacacactaccaatcgttcctggaatacagggaggtggtggacggcctggagaaggccatctacaagggcccaggcagcgaagcagggccctgactgcccccccnggcccccctctcgggcnnnnnnnnnnnnnnnnnnnnnnnnnnnnnnnnnnnnnnnnnnnnnnnnnnnnnnnnnnnncgggctgtgtcctaaatgcaaagca

SEQ ID NO: 4049 - DNA, 582 bp, Homo sapiens
  misc_feature (109)..(109): n includes a, c, g, or t, or contains no nucleotide
  misc_feature (118)..(118): n includes a, c, g, or t, or contains no nucleotide
  misc_feature (124)..(125): n includes a, c, g, or t, or contains no nucleotide
  misc_feature (130)..(130): n includes a, c, g, or t, or contains no nucleotide
  misc_feature (143)..(143): n includes a, c, g, or t, or contains no nucleotide
  misc_feature (164)..(164): n includes a, c, g, or t, or contains no nucleotide
  misc_feature (189)..(189): n includes a, c, g, or t, or contains no nucleotide
  misc_feature (196)..(196): n includes a, c, g, or t, or contains no nucleotide
  misc_feature (201)..(201): n includes a, c, g, or t, or contains no nucleotide
  misc_feature (209)..(210): n includes a, c, g, or t, or contains no nucleotide
  misc_feature (220)..(220): n includes a, c, g, or t, or contains no nucleotide
  misc_feature (232)..(232): n includes a, c, g, or t, or contains no nucleotide
  misc_feature (502)..(502): n includes a, c, g, or t, or contains no nucleotide
  misc_feature (525)..(526): n includes a, c, g, or t, or contains no nucleotide
  misc_feature (528)..(529): n includes a, c, g, or t, or contains no nucleotide
  misc_feature (531)..(540): n includes a, c, g, or t, or contains no nucleotide
  misc_feature (542)..(547): n includes a, c, g, or t, or contains no nucleotide
  misc_feature (549)..(550): n includes a, c, g, or t, or contains no nucleotide
ctcgctcagggatccccctttgaggggttagggtcccagttcccagtggaagaaacaggccaggagaagtgcgtgccgagctgaggcagatgttcccacagtgaccccnagagccctngggctnnatagntctctgacccctnccaaggaaagaccaccttctnggggacatgggctggagggcaggancctaganggcanccaagggnnaaggccccanttccggggctgnttccccgaggaggaagggaaggggctctgtgtgccccccaggaggaagaggccctgagtcctgggatcagacaccccttcacgtgtatccccacacaaatgcaagctcaccaaggtcccctctcagtccccttccctacaccctgaccggccactgccgcacacccacccagagcacgccacccgccatgggagtgtgctcaggagtcgcgggcagcgtggacatctgtcccagagggggcagaatctccaatagaggactgagcactgnaaaaaaaaaaaaaaaaaaaaaannannannnnnnnnnnannnnnngnnatgttggcaccgcgggatttcggacgaggatt

SEQ ID NO: 4050 - DNA, 165 bp, Homo sapiens
agaagcatcgtgtctggcgttgtggggatgaactttttgttttgtttcttccttttttagttcttcaaagatagggagggaagggggaacatgagcctttgttgctatcaatccaagaacttatttgtacattttttttttcaataaaacttttccaatgacaaa

SEQ ID NO: 4051 - DNA, 560 bp, Homo sapiens
  misc_feature (161)..(161): n includes a, c, g, or t, or contains no nucleotide
  misc_feature (319)..(336): n includes a, c, g, or t, or contains no nucleotide
  misc_feature (458)..(477): n includes a, c, g, or t, or contains no nucleotide
  misc_feature (508)..(508): n includes a, c, g, or t, or contains no nucleotide
  misc_feature (511)..(511): n includes a, c, g, or t, or contains no nucleotide
  misc_feature (515)..(517): n includes a, c, g, or t, or contains no nucleotide
  misc_feature (521)..(521): n includes a, c, g, or t, or contains no nucleotide
tcatcctgtctgtgttatgtgggtggagatggttttcattctttcattactgttttgttttatcctttgtatctgaaatacctttaatttatttaatatctgttgttcagagctctgccatttcttgagtacctgttagttagtattatttatgtgtatcngggagtgtgtttagtctgttttatttgcagtaaaccgatctccaaagatttccttttggaaacgctttttcccctccttaatttttatattccttactgttttactaaatattaagtgttctttgacaattttggtgctcatgtgttttggggacaannnnnnnnnnnnnnnnnnattataccagaaagttaaattctcagatcaaatgtgccttaataaatttgttttcatttagatttcaaacagtgatagacttgccattttaatacacgtcattggagggctgcgtatttgtnnnnnnnnnnnnnnnnnnnnggaaaaataaaccagtgaacaatatttttcnatngtannnttcngaaccattttgtctcattattcctgttttagctgaagaa

SEQ ID NO: 4052 - DNA, 407 bp, Homo sapiens
  misc_feature (200)..(214): n includes a, c, g, or t, or contains no nucleotide
  misc_feature (327)..(346): n includes a, c, g, or t, or contains no nucleotide
tcctgctgagataaatgcgtctttaaaaatagtctctgtggcaggtcactgggggacaatgtacagcattctggccatccacttctttttcacttcatgttctaccccaagagactcccgatgtcggctgtggagggttaaagggatgaggctttcctttgtttagcaaatctgttcacagttcttgatgatgtattttnnnnnnnnnnnnnnngaaatagttgctttccatagtctcaactgtattgtgtcatctcctgatgctgatttttgatcttttgttttattaaaaataattagtgaaagaggtgtgcctatctgtgaagnnnnnnnnnnnnnnnnnnnnggtcatgtaacaagtaaaccccaacccagcgttccctcctacgttgtgttagttcattaaa

SEQ ID NO: 4053 - DNA, 373 bp, Homo sapiens
  misc_feature (58)..(58): n includes a, c, g, or t, or contains no nucleotide
  misc_feature (61)..(61): n includes a, c, g, or t, or contains no nucleotide
  misc_feature (130)..(130): n includes a, c, g, or t, or contains no nucleotide
  misc_feature (204)..(241): n includes a, c, g, or t, or contains no nucleotide
  misc_feature (282)..(282): n includes a, c, g, or t, or contains no nucleotide
  misc_feature (304)..(304): n includes a, c, g, or t, or contains no nucleotide
  misc_feature (346)..(347): n includes a, c, g, or t, or contains no nucleotide
gaagcgcctcagccaggacgcctatcgccgcaacagcgtccgttttctgcagcagcgnacnccgccaggcgcggccgggaccgcagagccccgggagcccgctcgaggaggagcggcagacgcagcgctntaaaccgcagccggcggtgcccccgcggccgagcgccgacctcatcctgaaccgctgcagcgagagcaccaagnnnnnnnnnnnnnnnnnnnnnnnnnnnnnnnnnnnnnnccccagctagcgtctcggcccttgccgccccgtgcctgtanatacgtgttctatagagcctgncgtctggacgccgagggcagccccgacccctgtccagcgcgnntcccgccaccctcaataaatgttgct

SEQ ID NO: 4054 - DNA, 166 bp, Homo sapiens
aggtgacagtgcgggacccatcaggcaggcccctccgcctgccgcctgtccttcctcatcccatctttgacaatcacgatcgtcaccggattgaggagaaacgtaaaaggacatatgagaccttcaagagcatcatgaagaagagtcctttcagcggacccaccga

SEQ ID NO: 4055 - DNA, 478 bp, Homo sapiens
ggtgcctcaccaaggcgtgtgtatatacatttcataaggccaccctccatgttgcatgcctattgtactctacagccaaagtgtagcctcctctggagctctgcctgcttcctttctgggagggcggggtgggggtgactgaatttgggcctcttgtacagttaatgctcccaggtggattttgtggaggtaggaaaaggggcattgagactctaaagcagtagacaatccccaaatactatctgtagagagttggaactgcattcttttaaaattttatatgcatatatttagggctgtagactactttctaattgtttccatggcttattcttgagcacaaaatgataatcaattattacatttatacatcacctttttgacttttctcgagcctttacagctcttggcattttcctcacccaggcctgtgaggaactgggaccggcagcattatctttatacagagacctgaggc

SEQ ID NO: 4056 - DNA, 344 bp, Homo sapiens
ggatgacctcgtcaactgggcccgccggagttctctgtggcccatgaccttcggcctggcctgctgcgccgtggagatgatgcacatggcagcaccccgctacgacatggaccgctttggcgtggtcttccgcgccagcccgcgccagtccgacgtcatgatcgtggccggcacactcaccaacaagatggccccagcgcttcgcaaggtctacgaccagatgccggagccgcgctacgtggtctccatggggagctgcgccaacggaggaggctactaccactattcctactcggtggtgaggggctgcgaccgcatcgtgcccgtggacatctacatcccag

SEQ ID NO: 4057 - DNA, 493 bp, Homo sapiens
  misc_feature (163)..(163): n includes a, c, g, or t, or contains no nucleotide
  misc_feature (344)..(360): n includes a, c, g, or t, or contains no nucleotide
  misc_feature (402)..(449): n includes a, c, g, or t, or contains no nucleotide
ttccaggaaccttggctggaaccaggggaggctgagatggggaagtggtggctctgggtaccaagttctaagcagtgcagcccaggtgccttgcaggagagctggttgatgccctcgatgtagtagcagacgcctccattgacgcaataggacttggctgtcncgttgcacttccgggcgtgccccgaccaggatgacagggtggtcgtcacgctgttgacgtaaagccggcctccgacggtgtccttccccaggatgttctcggcctcgcagacatactccccagcgtcctccaccttcaccttgttgaactgtagtcgtgagttctttctgccgttgccatnnnnnnnnnnnnnnnnncggctgcggttgagctccttgccatccttgaaccaacggtannnnnnnnnnnnnnnnnnnnnnnnnnnnnnnnnnnnnnnnnnnnnnnnctcacccacctgtcccgtctggctcttcatcttcttcaacttgg

SEQ ID NO: 4058 - DNA, 588 bp, Homo sapiens
ctggctattaccgctgtgtcctgacatttgcccatgaaggccagcaatacaacatcactaggagtattgagctacgcatcaagaaaaaaaaagaagagaccattcctgtgatcatttcccccctcaagaccatatcagcttctctggggtcaagactgacaatcccgtgtaaggtgtttctgggaaccggcacacccttaaccaccatgctgtggtggacggccaatgacacccacatagagagcgcctacccgggaggccgcgtgaccgaggggccacgccaggaatattcagaaaataatgagaactacattgaagtgccattgatttttgatcctgtcacaagagaggatttgcacatggattttaaatgtgttgtccataataccctgagttttcagacactacgcaccacagtcaaggaagcctcctccacgttctcctggggcattgtgctggccccactttcactggccttcttggttttggggggaatatggatgcacagacggtgcaaacacagaactggaaaagcagatggtctgactgtgctatggcctcatcatcaagactttcaatcctatccca

SEQ ID NO: 4059 - DNA, 521 bp, Homo sapiens
  misc_feature (71)..(107): n includes a, c, g, or t, or contains no nucleotide
ctgaccactttggttgatgtattttttccatgcgtctccacatctgttggggtagacgtgttgattgattnnnnnnnnnnnnnnnnnnnnnnnnnnnnnnnnnnnnnatgctttaattctaacatacagcccgtaccacatccaggagatgtaaaaagtgtgtttgtgaatgtcttcacttgtactctaattcagacttgccaaagtatttgctatttactattatgggtaatactcttctctggcctagttcttacagagctactaaaatagaaatttacttttatggatagaagtacagaattttgagaagaaactaaattttcaccaaattttaaggaaaaattgtcattatctaaaaatgttcttatatatctgcttcatcttaccttcatactctgaaattccctatagcagacagagctagggaaatattaaaaatttaccctatttattttctggaactaaatcaagccttaactataacattatgagagtaatgggaactactgctggcttta

SEQ ID NO: 4060 - DNA, 390 bp, Homo sapiens
cagccctgcatttgagataagttgccttgattctgacatttggcccagcctgtactggtgtgccgcaatgagagtcaatctctattgacagcctgcttcagattttgcttttgttcgttttgccttctgtccttggaacagtcatatctcaagttcaaaggccaaaacctgagaagcggtgggctaagataggtcctactgcaaaccacccctccatatttccgtaccatttacaattcagtttctgtgacatctttttaaaccactggaggaaaaatgagatattctctaatttattcttctataacactctatatagagctatgtgagtactaatcacattgaataatagttataaaattattgtatagacatctgcttcttaaacag

SEQ ID NO: 4061 - DNA, 247 bp, Homo sapiens
ggaagacccattccttcccagaggggcctgccacctggacccctgcattggaactggaggcagggaacatggggaggaggagggtcggtgccttcaagaaaacaggcactgccctggtggccctctcccctgccccctgcaggaaggagctgcctggacccgttcatgggggagggggcagaagtgttttttatatatgtgtatatatttttttttaagctctgagctgtcaacgagacgtttccta

SEQ ID NO: 4062 - DNA, 578 bp, Homo sapiens
  misc_feature (141)..(156): n includes a, c, g, or t, or contains no nucleotide
  misc_feature (195)..(195): n includes a, c, g, or t, or contains no nucleotide
  misc_feature (478)..(478): n includes a, c, g, or t, or contains no nucleotide
  misc_feature (493)..(494): n includes a, c, g, or t, or contains no nucleotide
  misc_feature (498)..(500): n includes a, c, g, or t, or contains no nucleotide
  misc_feature (536)..(550): n includes a, c, g, or t, or contains no nucleotide
  misc_feature (552)..(553): n includes a, c, g, or t, or contains no nucleotide
aagatgcctttttggcaaccagatctgtggggagcctgccatcctgctgtacgatgagctggggtctggtgcagatgcatctgcaacgcaggctgccagatctacggatgttgctgctgtggtggtgcccatcttattccnnnnnnnnnnnnnnnngggggtggggtttgccatcctgtacacgaagcaccggangctgcagagcagcttcaccgccttcgccaacagccactacagctccaggctggggtccgcaatcttctcctctggggatgacctgggggaagatgatgaagatgcccctatgataactggattttcagatgacgtccccatggtgatagcctgaaagagctttcctcactagaaaccaaatggtgtaaatattttatttgataaagatagttgatggtttattttaaaagatgcactttgagttgcaatatgttatttttatatgggccaaaaacaaaaaacnaaaaaaaaaaaaaannaaannnaggaatgaataaactttgtagtaatcaactgtgaannnnnnnnnnnnnnnannttagtaacccaattgctttgatttg

SEQ ID NO: 4063 - DNA, 563 bp, Homo sapiens
  misc_feature (52)..(66): n includes a, c, g, or t, or contains no nucleotide
  misc_feature (74)..(74): n includes a, c, g, or t, or contains no nucleotide
  misc_feature (86)..(86): n includes a, c, g, or t, or contains no nucleotide
  misc_feature (89)..(111): n includes a, c, g, or t, or contains no nucleotide
  misc_feature (130)..(130): n includes a, c, g, or t, or contains no nucleotide
  misc_feature (135)..(135): n includes a, c, g, or t, or contains no nucleotide
  misc_feature (173)..(173): n includes a, c, g, or t, or contains no nucleotide
  misc_feature (193)..(193): n includes a, c, g, or t, or contains no nucleotide
  misc_feature (214)..(214): n includes a, c, g, or t, or contains no nucleotide
  misc_feature (223)..(223): n includes a, c, g, or t, or contains no nucleotide
  misc_feature (237)..(237): n includes a, c, g, or t, or contains no nucleotide
  misc_feature (263)..(299): n includes a, c, g, or t, or contains no nucleotide
  misc_feature (336)..(357): n includes a, c, g, or t, or contains no nucleotide
  misc_feature (363)..(383): n includes a, c, g, or t, or contains no nucleotide
  misc_feature (411)..(411): n includes a, c, g, or t, or contains no nucleotide
  misc_feature (417)..(417): n includes a, c, g, or t, or contains no nucleotide
  misc_feature (419)..(419): n includes a, c, g, or t, or contains no nucleotide
  misc_feature (474)..(475): n includes a, c, g, or t, or contains no nucleotide
  misc_feature (477)..(477): n includes a, c, g, or t, or contains no nucleotide
  misc_feature (494)..(508): n includes a, c, g, or t, or contains no nucleotide
caagggggtcaacgtctcagccaatcaggatgatgaactagcccacgagacnnnnnnnnnnnnnnnttgaccangagacaaagaantgnnnnnnnnnnnnnnnnnnnnnnngctactggaccctggtcanccatnggggcattcacgccacagccacacaagtttctgccaanaccatgtttgagatggagtngcgtggccggcgggtagcacntcaaagccnagcaacgggcgctnacgtgtgcatgaagaagaatgggcannnnnnnnnnnnnnnnnnnnnnnnnnnnnnnnnnnnnccgcccggcctggacagggaaggtggcgggaggggcnnnnnnnnnnnnnnnnnnnnnnccaggnnnnnnnnnnnnnnnnnnnnncaagctcatcaaccggcccatcctggtntgcgcngnctggacggcttcgtctgccaccaccgcggctccaaccagctggacaccaaccgcnncntctacgacgtcttccannnnnnnnnnnnnnncggcgcctaccggatccgaggccgcgacggagggttctggtacacgggcagccac

SEQ ID NO: 4064 - DNA, 595 bp, Homo sapiens
  misc_feature (304)..(304): n includes a, c, g, or t, or contains no nucleotide
  misc_feature (430)..(434): n includes a, c, g, or t, or contains no nucleotide
  misc_feature (451)..(452): n includes a, c, g, or t, or contains no nucleotide
  misc_feature (454)..(455): n includes a, c, g, or t, or contains no nucleotide
  misc_feature (461)..(468): n includes a, c, g, or t, or contains no nucleotide
catgctcatgtatatttagttacgtataatgctttctgagtgagttttactcttaaatcatttggttaaatcatttggcttgctgtttactcccttctgtagtttttaattaaaaactttaaagataagtctacattaaacaatgatcacatctaaagctttatctttgtgtaatctaagtatatgtgagaaatcagaattggcataatttgtcttagttgatattcaaggctttaaaagtcattattcctgggcttggtaagtgaatttatgagatttactgctctagaaagtatagatggcnaaaggaccgttttgtattgcttcctgattaccagtctgattataccatgtgtgctaatatactttttttgttatagattgtcttaatggtaggtcaagtaataaaaagagatgaaataatttaaannnnnaaaaaaaaaaaaaaaannannaaaaannnnnnnntctttcctctctctgtccttccccgaaagtctactcgggtgggcaaaatgaaaagggggaaagtgaattatgggatcggtgttttgaaagagcaatgtttattttcagtgcttttcagtttgtcaaa

SEQ ID NO: 4065 - DNA, 268 bp, Homo sapiens
  misc_feature (81)..(81): n includes a, c, g, or t, or contains no nucleotide
  misc_feature (139)..(171): n includes a, c, g, or t, or contains no nucleotide
  misc_feature (202)..(202): n includes a, c, g, or t, or contains no nucleotide
  misc_feature (230)..(230): n includes a, c, g, or t, or contains no nucleotide
  misc_feature (238)..(238): n includes a, c, g, or t, or contains no nucleotide
  misc_feature (240)..(240): n includes a, c, g, or t, or contains no nucleotide
atctgccccagagaaagtcctcgctcgtcaccagcaagcttgcgggtggccaagttgaatgatgctgcccggggctctgcnagatcctgagacgcttcccctccctgccccacccgggtcctgtgctggctcctgcccnnnnnnnnnnnnnnnnnnnnnnnnnnnnnnnnngctcgggtgtgggctggagaggcagaagccntttcctgttggtgtcccagcacatgganccccttgngntgagcaccaagaccttgaaccttttttg

SEQ ID NO: 4066 - DNA, 388 bp, Homo sapiens
  misc_feature (45)..(45): n includes a, c, g, or t, or contains no nucleotide
  misc_feature (47)..(52): n includes a, c, g, or t, or contains no nucleotide
  misc_feature (56)..(60): n includes a, c, g, or t, or contains no nucleotide
  misc_feature (62)..(67): n includes a, c, g, or t, or contains no nucleotide
  misc_feature (69)..(69): n includes a, c, g, or t, or contains no nucleotide
  misc_feature (72)..(73): n includes a, c, g, or t, or contains no nucleotide
  misc_feature (76)..(76): n includes a, c, g, or t, or contains no nucleotide
  misc_feature (355)..(355): n includes a, c, g, or t, or contains no nucleotide
agtggtccttctgtccgcctgcctgtgttggctgcatcgaagagnannnnnnctgnnnnngnnnnnngnccnnggnctcctcagagcaggaactccactatgcatctctgcagaggctgccagtgcccagcagtgagggacctgacctcaggggcagagacaagagaggcaccaaggaggatccaagagctgactatgcctgcattgctgagaacaaacccacctgagcaccccagacaccttcctcaacccaggcgggtggacagggtccccctgtggtccagccagtaaaaaccatggtccccccacttctgtgtctcagtcctctcagtccatctcgagcctccgttcaaantgatcatcatcaaaacttatgtggctttttgac

SEQ ID NO: 4067 - DNA, 399 bp, Homo sapiens
ccgggactttctgaaccgctgtctcgatatggatgtggagaagagaggttcagctaaagagctgctacagcatcaattcctgaagattgccaagcccctctccagcctcactccactgattgctgcagctaaggaggcaacaaagaacaatcactaaaaccacactcaccccagcctcattgtgccaagctctgtgagataaatgcacatttcagaaattccaactcctgatgccctcttctccttgccttgcttctcccatttcctgatctagcactcctcaagactttgatccttggaaaccgtgtgtccagcattgaagagaactgcaactgaatgactaatcagatgatggccatttctaaataaggaatttcctcccaattcatggatatgagg

SEQ ID NO: 4068 - DNA, 531 bp, Homo sapiens
  misc_feature (50)..(50): n includes a, c, g, or t, or contains no nucleotide
  misc_feature (343)..(343): n includes a, c, g, or t, or contains no nucleotide
tgagccccaagtcctgaagaggcgggccagccaggcgggctcaaggaaangggggtcccagtgggaggggcaggctgacatctgtgtttcaagtggggctcgccatgccgggggttcataggtcactggctctccaagtgccagaggtgggcaggtggtggcactgagcccccccaacactgtgccctggtggagaaagcactgacctgtcatgcccccctcaaacctcctcttctgacgtgccttttgcacccctcccattaggacaatcagtcccctcccatctgggagtccccttttcttttctaccctagccattcctggtacccagccatctgcccangggtgccccctcctctcccatccccctgccctcgtggccagcccggctggttttgtaagatactgggttggtgcacagtgatttttttcttgtaatttaaacaggcccagcattgctggttctatttaatggacatgagataatgttagaggttttaaagtgattaaacgtgcagactatgcaaacca

SEQ ID NO: 4069 - DNA, 382 bp, Homo sapiens
  misc_feature (173)..(174): n includes a, c, g, or t, or contains no nucleotide
  misc_feature (176)..(177): n includes a, c, g, or t, or contains no nucleotide
  misc_feature (179)..(182): n includes a, c, g, or t, or contains no nucleotide
  misc_feature (184)..(187): n includes a, c, g, or t, or contains no nucleotide
  misc_feature (190)..(192): n includes a, c, g, or t, or contains no nucleotide
  misc_feature (194)..(199): n includes a, c, g, or t, or contains no nucleotide
  misc_feature (212)..(212): n includes a, c, g, or t, or contains no nucleotide
  misc_feature (215)..(215): n includes a, c, g, or t, or contains no nucleotide
  misc_feature (236)..(236): n includes a, c, g, or t, or contains no nucleotide
  misc_feature (251)..(251): n includes a, c, g, or t, or contains no nucleotide
  misc_feature (254)..(254): n includes a, c, g, or t, or contains no nucleotide
  misc_feature (257)..(257): n includes a, c, g, or t, or contains no nucleotide
  misc_feature (272)..(272): n includes a, c, g, or t, or contains no nucleotide
  misc_feature (275)..(275): n includes a, c, g, or t, or contains no nucleotide
  misc_feature (290)..(290): n includes a, c, g, or t, or contains no nucleotide
  misc_feature (317)..(317): n includes a, c, g, or t, or contains no nucleotide
agggctccaagaaggcggtgaccaaggcccagaagaaggatggcaagaagcgcaagcgcagccgcaaggagagctactccgtgtacgtgtacaaggtgctgaagcaggtccaccccgacaccggcatctcttctaaggccatgggaatcatgaactccttcgtcaacgacatnntnnannnnannnnaannnannnnnnccgcctggcgcantanaacaagcgctcgaccatcacntccagggagatccanacngcngtgcgcctgctgctnccnggggagctggccaancacgcggtgtcggagggcaccaaggcngtcaccaagtacaccagctccaagtaaattctcaagctcttgtccaacccaaaggctcttttcag

SEQ ID NO: 4070 - DNA, 553 bp, Homo sapiens
  misc_feature (30)..(46): n includes a, c, g, or t, or contains no nucleotide
  misc_feature (308)..(309): n includes a, c, g, or t, or contains no nucleotide
  misc_feature (372)..(373): n includes a, c, g, or t, or contains no nucleotide
  misc_feature (392)..(392): n includes a, c, g, or t, or contains no nucleotide
ctcagtggagcctggcgagcttcactgtgnnnnnnnnnnnnnnnnngcatctgcgccttcggtcgcaatacttccaagaacgtcaactctgtcattgccatctgcgtagatgggaccttccacaaatatgtcttcactcctgatggaaactgcaacagagaggctttcgacgtgtaccttgacatctgtgatgatgatgacttttaaggaccctgggggctgtgctagggacctgcagtggcagaactgcagagctgagccttggcagtggggcgtgcttggaagccaccagccagcaagcattaatnngggctggtgcccactttccactcagcagagctatgtctaaataaagagctcacttccccccannacttcttgatgactgtgtnccccaagggccaggccagagacccaggaaggcagcgaccccttgggatccctaacctggaggaaattgccagggacccagagggagtgccctaatccaacctggggattttttaaaagcttcctaggaagagatgatctccgatgtgatgaatacgaataa

SEQ ID NO: 4071 - DNA, 115 bp, Homo sapiens
  misc_feature (61)..(61): n includes a, c, g, or t, or contains no nucleotide
ctaattcatgttgtagcacttacagatcatatagtacaattatttgtctttatgctctccnaggaaaaatctgagacagaaaatttttcacccctatggataggttttcacctgt

SEQ ID NO: 4072 - DNA, 404 bp, Homo sapiens
  misc_feature (124)..(195): n includes a, c, g, or t, or contains no nucleotide
  misc_feature (253)..(271): n includes a, c, g, or t, or contains no nucleotide
agggggcagctgattccccgctgcgtctaaaatcaaagcgccaatctcataagtaccaggctgaattccccatgagtcctgtgacctcggcccacgcggggacctacaggtgctacggctcacnnnnnnnnnnnnnnnnnnnnnnnnnnnnnnnnnnnnnnnnnnnnnnnnnnnnnnnnnnnnnnnnnnnnnnnnccctcagcccaccacaaaacaagtccgactccaaggctggtgagtgaggagatgcttnnnnnnnnnnnnnnnnnnncagagggtcaggtcctgtcaagaggagctgggtgtcctgggtggacatttgaagaattatattcattccaacttgaagaattattcaacacctttaacaatgtatatgtgaagtactttattctttcatattt

SEQ ID NO: 4073 - DNA, 47 bp, Homo sapiens
atgatggggccttgcagtaagcagcctgacaggagcaatggccacca

SEQ ID NO: 4074 - DNA, 110 bp, Homo sapiens
aagctcctgggcaaggggacgtctgcagctgatgccgtggaggtcccagcccccgctgcggttctcggaggtccggagcccctgatgcagtgcacagcctggctgaatgc

SEQ ID NO: 4075 - DNA, 83 bp, Homo sapiens
  misc_feature (51)..(51): n includes a, c, g, or t, or contains no nucleotide
ttctaaagtggcattccacttggatttcctgtgctacctatccaaattccnagtaactacttcagtgtcattgcctttgttac

SEQ ID NO: 4076 - DNA, 511 bp, Homo sapiens
gaaagctttcccaattgcacttgcatctaaacaaaactgttgcagtttttactctatttattttgttccccatgtttatgaaagtcctgcacagtttcaaaggcatggtaaataatatatcaatgtttatgtagtctgttacagaaacagctatagataacattatccagtgaagagcaaaattcaagctttagaaaatattcatgcatgcaattttgacatatctaaaaataggtttttgtatatttatggtgggaggtggttgggaacttttaacaaaatggggtgttaatttttgtacagtctgtgggcatttacacatttttaatgtattaaaatttggtaattatgtgtacattaaattaataaaagttacttctagttatgatttgtgaattccctaagaccttggatttttttaagtaactttatatcagaaatgatactgcatctttatatttttaaaattgtattgctgctcaagaatggtaccctcttgtcaaaaaggcat

SEQ ID NO: 4077 - DNA, 523 bp, Homo sapiens
  misc_feature (79)..(79): n includes a, c, g, or t, or contains no nucleotide
  misc_feature (87)..(101): n includes a, c, g, or t, or contains no nucleotide
  misc_feature (171)..(171): n includes a, c, g, or t, or contains no nucleotide
  misc_feature (173)..(200): n includes a, c, g, or t, or contains no nucleotide
  misc_feature (319)..(320): n includes a, c, g, or t, or contains no nucleotide
  misc_feature (363)..(363): n includes a, c, g, or t, or contains no nucleotide
  misc_feature (365)..(365): n includes a, c, g, or t, or contains no nucleotide
ggtgttcagctaccaccaaggcctgaagaagtgggtggaggtcggaaactcgggggtcttccgtccagagatgctgctncccatggnnnnnnnnnnnnnnntgtcggtcattgcctggggcctctccctggagcgcccaacgatgatcaaatatggcatcaacaatatccngnnnnnnnnnnnnnnnnnnnnnnnnnnnncagatggtgtatgacagtcccctgtgccgcctggatgccgagccgaggccccctcccacacaggaggctgcgtgacatgggccactctaggacaggtcatcctccccgagtccctgctnntgcgctcctttgcatccctggccagtgaccttgtatttatgangnctctgtgaggccagcccccaccttcctctttcccacctgtcccaggaccagaatcccagggacagaggactgggtagcaggttccttctgttgtcctgtgtggtgtgtctactgtgagggtgggccctgaggagacctgtgggccacctattgtctaa

SEQ ID NO: 4078 - DNA, 255 bp, Homo sapiens
ttggccctcaactggggcaagtgaagccagaggagggtccccagctgggtgggctggaatggaactcctcactagctgcctgcgcgcccaccctgctccttccggacaatgaagaagcctttgcaccctgggaggaaggaccaccccgggccctctatgcctggccagcctccagctcctcagacctcctgggtggggtttggcttcagggtggggtttggaagcttctggaagtcgtgctggtctcccaggtga

SEQ ID NO: 4079 - DNA, 361 bp, Homo sapiens
  misc_feature (33)..(67): n includes a, c, g, or t, or contains no nucleotide
gcctgaaggtggtccctgctttctctttctctnnnnnnnnnnnnnnnnnnnnnnnnnnnnnnnnnnntgccaagaaaatgcttcactcaacagtcctcatgtgcccagagatgtttatagaactgtttgaattgcagccatcccctgccccctcccaggctgaagatctgttctttttaagttgattcgggagtggcattcttttatacccaaagactgtagtgcatcttgaagagctcaaagcacatgaccgcacaaatgcttacagggtttcctcccgagtaatccaatctcactccccttgtaagggaattctggggcagctatggtttgagtatgcagtttgcatcgtgtttctacc

SEQ ID NO: 4080 - DNA, 281 bp, Homo sapiens
  misc_feature (27)..(84): n includes a, c, g, or t, or contains no nucleotide
  misc_feature (236)..(252): n includes a, c, g, or t, or contains no nucleotide
tagccacatctcagcaaggaaactagnnnnnnnnnnnnnnnnnnnnnnnnnnnnnnnnnnnnnnnnnnnnnnnnnnnnnnnnnnaacaaagataggagaagattagggggaaaatctgtatccttgctggaaaccagggcagtgcacatataagagtatgctgttcactggatgggaaagaaaaaaacttagaagtgtagtagtcaaagcacacaaacaaccctaacccagagtannnnnnnnnnnnnnnnngggaagaccatgtagcagctgtgtgagag

SEQ ID NO: 4081 - DNA, 426 bp, Homo sapiens
  misc_feature (186)..(202): n includes a, c, g, or t, or contains no nucleotide
  misc_feature (239)..(256): n includes a, c, g, or t, or contains no nucleotide
  misc_feature (267)..(281): n includes a, c, g, or t, or contains no nucleotide
gaggcctccagcttggtctgtctccccacctctaccagcatctgctgagctatgagccaaaccagggatttacagggaggaaaagctttcggactgctgaaggcccagcaggaagagaggctggatgagatcaacaagcaattcctagacgatcccaaatatagcagtgatgaggatctgccctcnnnnnnnnnnnnnnnnnaagagaaatacatggagtttgaccttaatggaaatgnnnnnnnnnnnnnnnnnnccctgaaacgnnnnnnnnnnnnnnntggagtccccaagactcacctagagctaaagaaattaattggagaggtgtccagtggctccggggagacgttcagctaccctgactttctcaggatgatgctgggcaagagatctgccatcctaaaaatgatcctgatgtatgag

SEQ ID NO: 4082 - DNA, 529 bp, Homo sapiens
  misc_feature (27)..(64): n includes a, c, g, or t, or contains no nucleotide
  misc_feature (121)..(136): n includes a, c, g, or t, or contains no nucleotide
  misc_feature (380)..(396): n includes a, c, g, or t, or contains no nucleotide
  misc_feature (411)..(425): n includes a, c, g, or t, or contains no nucleotide
  misc_feature (497)..(497): n includes a, c, g, or t, or contains no nucleotide
tgtgaccagggttgactaaactctgcnnnnnnnnnnnnnnnnnnnnnnnnnnnnnnnnnnnnnncccctcccaagtgtcctcccaagtgtaccccaaaatgtccacctaagtgtccccctnnnnnnnnnnnnnnnngcccagctccatgttcccctgcagtctcttcttgctgtggtcccatctctgggggctgctgtggtcccagctctgggggctgctgcaactctggggctggtggctgctgcctgagccaccacaggccccgtctcttccaccggcgccggcaccagagccccgactgctgtgagagtgaaccttctgggggctctggctgctgccacagctctgggggctgctgctgacctgggctaagaaaaannnnnnnnnnnnnnnnnttaagaacctcctannnnnnnnnnnnnnnccctttccatttcctctcattccattcatgggtggacagcgaccacaaagactcatggggcttccctggganaactttgcacttgatggaacacctcaattgca

SEQ ID NO: 4083 - DNA, 439 bp, Homo sapiens
attaactctacctgcacactgtcctattatattcattctttttgaaatgtcaaccccaagttagttcaatctggattcatatttaatttgaaggtagaatgttttcaaatgttctccagtcattatgttaatatttctgaggagcctgcaacatgccagccactgtgatagaggctggcggatccaagcaaatggccaatgagatcattgtgaaggcaggggaatgtatgtgcacatctgttttgtaactgtttagatgaatgtcagttgttatttattgaaatgatttcacagtgtgtggtcaacatttctcatgttgaaactttaagaactaaaatgttctaaatatcccttggacattttatgtctttcttgtaaggcatactgccttgtttaatggtagttttacagtgtttctggcttagaacaaaggggctta

SEQ ID NO: 4084 - DNA, 559 bp, Homo sapiens
  misc_feature (71)..(72): n includes a, c, g, or t, or contains no nucleotide
  misc_feature (100)..(150): n includes a, c, g, or t, or contains no nucleotide
  misc_feature (161)..(161): n includes a, c, g, or t, or contains no nucleotide
  misc_feature (173)..(173): n includes a, c, g, or t, or contains no nucleotide
  misc_feature (440)..(469): n includes a, c, g, or t, or contains no nucleotide
  misc_feature (475)..(476): n includes a, c, g, or t, or contains no nucleotide
gcttttctctaaatattgtgcaaagtttttgctagttttatcttctgactttgggactagtttttgctgcnnagttgtgttgctttgtgattttcctctnnnnnnnnnnnnnnnnnnnnnnnnnnnnnnnnnnnnnnnnnnnnnnnnnnnagtttgtcctngagtgacatacncatccaccatggaaagggaagcatctctgcctgtggattctcaagtacttggaagcacctctcctgaggaacctacaggattctaaggtttcctaggtcactgaacaactaatcttggtccctgaatatttctaggtttgtaagtgcagcagttttatttcctctagaactcatcctgtttcaagggaagtacctaagaagatatagagtgtttctagggtaagggacctgcaggtgtaagcatagatgaaataactgtcctgtcannnnnnnnnnnnnnnnnnnnnnnnnnnnnngcatcnntgccgccattcctgcagcatcaccataagcagtgcagggtgtctccatcgagctgtttggttccatgtgtgtttaacatgtgc

SEQ ID NO: 4085 - DNA, 495 bp, Homo sapiens
  misc_feature (105)..(135): n includes a, c, g, or t, or contains no nucleotide
  misc_feature (168)..(168): n includes a, c, g, or t, or contains no nucleotide
  misc_feature (171)..(171): n includes a, c, g, or t, or contains no nucleotide
  misc_feature (173)..(173): n includes a, c, g, or t, or contains no nucleotide
  misc_feature (175)..(177): n includes a, c, g, or t, or contains no nucleotide
  misc_feature (179)..(179): n includes a, c, g, or t, or contains no nucleotide
  misc_feature (181)..(181): n includes a, c, g, or t, or contains no nucleotide
  misc_feature (184)..(185): n includes a, c, g, or t, or contains no nucleotide
  misc_feature (187)..(189): n includes a, c, g, or t, or contains no nucleotide
  misc_feature (191)..(191): n includes a, c, g, or t, or contains no nucleotide
  misc_feature (338)..(338): n includes a, c, g, or t, or contains no nucleotide
  misc_feature (346)..(347): n includes a, c, g, or t, or contains no nucleotide
  misc_feature (350)..(350): n includes a, c, g, or t, or contains no nucleotide
  misc_feature (353)..(353): n includes a, c, g, or t, or contains no nucleotide
  misc_feature (356)..(356): n includes a, c, g, or t, or contains no nucleotide
  misc_feature (363)..(370): n includes a, c, g, or t, or contains no nucleotide
  misc_feature (373)..(373): n includes a, c, g, or t, or contains no nucleotide
  misc_feature (445)..(459): n includes a, c, g, or t, or contains no nucleotide
tcttcccttgcactgaggtcctggaggccttgatgaggcccagcaaacaggcattctcacagctgggtttatagtctttgggccccttactcagtatcctgggannnnnnnnnnnnnnnnnnnnnnnnnnnnnnntaattgctgaagagatcccctcccctgcccctnggntncnnncntnccnncnnnangcaggcacccaggctttagagaagtatagggggcttcttccctgctgggcttaccacactgctctcaggcctcaaaccctttcatacctttattcttttttttaaccaaaaaagtttttcttataaaataaattttgggcaaacatnaaaaaaannaanaanaanaaaaaannnnnnnnaanaaaattcaacagggccctgtggagcaaggagccccttttccctatctccttcctctaagagctacacccagnnnnnnnnnnnnnnngcggaggccccgctgctcctcatgagaacgctggtg

SEQ ID NO: 4086 - DNA, 231 bp, Homo sapiens
  misc_feature (155)..(169): n includes a, c, g, or t, or contains no nucleotide
atgattgactgtaatgctttccatttacctgactaaacagatcattattatatataggtattgattgctaccctgaccacagtgctttggactatgagaaacttcttagatttttatatgtaaatgctgtggaccactgggagcacaatgcccannnnnnnnnnnnnnnagtttatgtgcagcatttaaatcactgtgttttccttgttaactaaaacagacatgggcttt

SEQ ID NO: 4087 - DNA, 57 bp, Homo sapiens
actcttaatcagtggtggaagaacggtctcagaactgtttgtttcaattggccattt

SEQ ID NO: 4088 - DNA, 325 bp, Homo sapiens
agtgtgcactttcaatctaactgtgaaagaatcttctgatgtttgtattatccttcttatattatattaacaaaataaatcaagttgtggtatagtcaatctatttcttaataatactgcaaaaataatgctgacacatcacaatttcatattttaaaatttccagaattttaagcaaaaagcattatgaaggaaggcttggtttaataaagactgattttgttcagtgttatatgttagctgatacatatttgttcatttatgtgattgcagtactttatagctacatatttaccttgaatgttacaattagcttgccaataaa

SEQ ID NO: 4089 - DNA, 301 bp, Homo sapiens
  misc_feature (126)..(126): n includes a, c, g, or t, or contains no nucleotide
  misc_feature (128)..(128): n includes a, c, g, or t, or contains no nucleotide
  misc_feature (130)..(142): n includes a, c, g, or t, or contains no nucleotide
  misc_feature (206)..(226): n includes a, c, g, or t, or contains no nucleotide
tttgcacagttagcaaactttgtatgtcatttccttcaaggcatcatgcagagttgacatgagatttataaggttttaagttgtttgcatgtgaaaatcaaatacatactttggtagtctttgaananannnnnnnnnnnnntcttgtttttcaagaattttgagacacaaagttgtatgtaaaggaatatattaatttgccgttnnnnnnnnnnnnnnnnnnnnnaagagtgaatcaacttaatatgtacaaatgatagctgtgaaactgtagaatatctttgtgtcaggcttggagttc

SEQ ID NO: 4090 - DNA, 200 bp, Homo sapiens
  misc_feature (97)..(97): n includes a, c, g, or t, or contains no nucleotide
ctccccgaatcccggacctgcgctgaggaggctgttcatctgtggccagcggtgcttcgggacccgcgctgggggaaccctggcgacggggcctggncctgctatatgcgggggcctcggctggagtgagcggcgtggacgcctctttcctccggctcttcccttgttgctgcgagagcgagagggccgcgggcggcgga

SEQ ID NO: 4091 - DNA, 571 bp, Homo sapiens
tcactcagcaggaccttgaggacgggaggctggggctggaggtgggcaggccagaggggagggcccccggccccgcaggtgacagtctcactctggagctgtgggcacagggcgtcccgcctgctgtggcctccctggactttgccactgagccttacaatgctgcccggccctacagcgtggccctgctcagtgtccccgaggccgcccggacggaagcagggaagccagagagcagcacccccacaggcgagccaggccccatggcatccagccctgagcccgctgtggccaagggaggcttcctgagcttccttgaggccaacatgttcagcgtcatcatccccatgtgcctggtacttctgctcctggcgctcatcctgcccctgctcttctacctccgaaaacgcaacaagacgggcaagcatgacgtccaggtcctgactgccaagccccgcaacggcctggctggtgacaccgagacctttcgcaaggtggagccaggccaggccatcccgctcacagctgtgcctggccaggggccccctccaggaggccagcctgacccaga

SEQ ID NO: 4092 - DNA, 55 bp, Homo sapiens
aattatactacttctaaggtagctgcagataagtggccttgacacattacaagcc

SEQ ID NO: 4093 - DNA, 290 bp, Homo sapiens
  misc_feature (134)..(151): n includes a, c, g, or t, or contains no nucleotide
gggtgcatttctaggacttttctaacatatgtctataatatagtgtttaggttcttttttttttcaggaatacatttggaaattcaaaacaattggcaaactttgtattaatgtgttaagtgcaggagacattnnnnnnnnnnnnnnnnnnctaatatgctttacaatctgcactttaactgacttaagtggcattaaacatttgagagctaactatatttttataagactactatacaaactacagagtttatgatttaaggtacttaaagcttctatggttgacattg

SEQ ID NO: 4094 - DNA, 575 bp, Homo sapiens
  misc_feature (126)..(158): n includes a, c, g, or t, or contains no nucleotide
  misc_feature (191)..(191): n includes a, c, g, or t, or contains no nucleotide
  misc_feature (194)..(194): n includes a, c, g, or t, or contains no nucleotide
  misc_feature (203)..(203): n includes a, c, g, or t, or contains no nucleotide
  misc_feature (206)..(206): n includes a, c, g, or t, or contains no nucleotide
  misc_feature (211)..(211): n includes a, c, g, or t, or contains no nucleotide
  misc_feature (215)..(215): n includes a, c, g, or t, or contains no nucleotide
  misc_feature (219)..(219): n includes a, c, g, or t, or contains no nucleotide
  misc_feature (228)..(228): n includes a, c, g, or t, or contains no nucleotide
  misc_feature (261)..(261): n includes a, c, g, or t, or contains no nucleotide
  misc_feature (324)..(324): n includes a, c, g, or t, or contains no nucleotide
  misc_feature (347)..(347): n includes a, c, g, or t, or contains no nucleotide
  misc_feature (447)..(447): n includes a, c, g, or t, or contains no nucleotide
  misc_feature (453)..(453): n includes a, c, g, or t, or contains no nucleotide
  misc_feature (474)..(474): n includes a, c, g, or t, or contains no nucleotide
  misc_feature (482)..(482): n includes a, c, g, or t, or contains no nucleotide
  misc_feature (523)..(523): n includes a, c, g, or t, or contains no nucleotide
  misc_feature (525)..(525): n includes a, c, g, or t, or contains no nucleotide
ccctcttctgagaggcctctgtggcccctctgcccccttcctggccccacgagagtggagggggagactgtgcaggggggagccatcgggccctcaaccctctccccagagcctagggcctggccnnnnnnnnnnnnnnnnnnnnnnnnnnnnnnnnngggacggtccagcgggggacacagggcctcccntcntgggggcangcntgccnaccntccntacttgccntatctacactcccaatgtggtaatgcccttggnaccaccacccacctcctgtccccagtgtccgtcaaccagccctgcctactggggggtggcccntgaaacccgagggcccccagggntgctctgcgatctagacgccctcttccaaggggtgccacccaacaaaagcatctacgacgtttgggtcagccaccctcgggacctggcggcccctggccnaggctnggctgctctcctggtgcagcntgtgaggntcttaagacaggggccgctcctccctcccgctcccaccccnancttgttgacagggagcaagggaggcggctgtctgcgacacagcagctcga

SEQ ID NO: 4095 - DNA, 421 bp, Homo sapiens
  misc_feature (33)..(54): n includes a, c, g, or t, or contains no nucleotide
  misc_feature (171)..(216): n includes a, c, g, or t, or contains no nucleotide
tggctacggtgttggctttgacctggaggaatnnnnnnnnnnnnnnnnnnnnnngggcgtggctgatgggccacaggatggccaggcagattcagcctctctctcagcctccctgcttgctgactggctcgaaggccatggcatgaaccctgccgatattgagtccctgcnnnnnnnnnnnnnnnnnnnnnnnnnnnnnnnnnnnnnnnnnnnnnntgacctccaggacccctgaggcccccagcctgtgccttgctgccacagtagacctagttccaggatccatgggagcattctcaaaggctttagccctggacccagcaggtgaggctcggcttggattattctgcaggttcatctcagacccacctttcagccttaagcagccacctgagccaccaccgagccatggcaggatcgg

SEQ ID NO: 4096 - DNA, 592 bp, Homo sapiens
  misc_feature (31)..(31): n includes a, c, g, or t, or contains no nucleotide
  misc_feature (34)..(62): n includes a, c, g, or t, or contains no nucleotide
  misc_feature (149)..(149): n includes a, c, g, or t, or contains no nucleotide
  misc_feature (197)..(197): n includes a, c, g, or t, or contains no nucleotide
  misc_feature (199)..(199): n includes a, c, g, or t, or contains no nucleotide
  misc_feature (335)..(335): n includes a, c, g, or t, or contains no nucleotide
  misc_feature (337)..(341): n includes a, c, g, or t, or contains no nucleotide
  misc_feature (344)..(345): n includes a, c, g, or t, or contains no nucleotide
  misc_feature (347)..(347): n includes a, c, g, or t, or contains no nucleotide
  misc_feature (349)..(352): n includes a, c, g, or t, or contains no nucleotide
  misc_feature (354)..(355): n includes a, c, g, or t, or contains no nucleotide
  misc_feature (551)..(551): n includes a, c, g, or t, or contains no nucleotide
ccttgcagggaacagctttggggctgggggnaannnnnnnnnnnnnnnnnnnnnnnnnnnnnagaaggtggcagtgaggaagtatcccctcaggtgactggatctgtgttcctccttaacatcatctgatggaatggcaatgaaaagcntggattgtggaaaatacagaaaaacataaaggaaaaaactccaatccncngagcccaccactgttcaggacccctgcttttgtcacctactatttccctttagtttttagcagcggctggatgtgatatgtctagtttaaccagtccccttgatctttctatataataaataacacaggagtgaanannnnnaannanannnnannagagatgctcacattcggggtaactgtccatggtgtgtggaggggtcctcggaaccccctcttaggatcatctccacatactctcccagttctgagattcgttaccaatagcaggtttccgtcacactgcgatatcaagagcagtgcaaggaactctccgctccaaggggttttttcctcctaggggaacactctnctaagtaatgggcagagaacaaaggggctcctaattcaagg

SEQ ID NO: 4097 - DNA, 445 bp, Homo sapiens
  misc_feature (186)..(186): n includes a, c, g, or t, or contains no nucleotide
  misc_feature (274)..(274): n includes a, c, g, or t, or contains no nucleotide
  misc_feature (280)..(308): n includes a, c, g, or t, or contains no nucleotide
  misc_feature (313)..(313): n includes a, c, g, or t, or contains no nucleotide
  misc_feature (317)..(317): n includes a, c, g, or t, or contains no nucleotide
gctggaggcccatgtcttccatgtgaaaggttctttgcaagaggaaagccttagggacaagattcccgaagaggacaggcgcaaaatgcaagacaagtgtcgggaagtccttgcctggctggagcacaaccagctggcagagaaggaggagtatgagcatcagaagagggagctggagcaaatctntcgccccatcttctccaggctctatggggggcctggtgtccctgggggcagcagttgtggcactcaagcccgccagggggaccccagnaccggnnnnnnnnnnnnnnnnnnnnnnnnnnnnnccctncgtnataagtcagctgtgactgtcagggctatgctatgggccttctagactgtcttctatgatcctgcccttcagagatgaactttccctccaaagctagaactttcttcccaggataactgaagtcttttg

SEQ ID NO: 4098 - DNA, 529 bp, Homo sapiens
  misc_feature (39)..(40): n includes a, c, g, or t, or contains no nucleotide
  misc_feature (42)..(44): n includes a, c, g, or t, or contains no nucleotide
  misc_feature (121)..(121): n includes a, c, g, or t, or contains no nucleotide
  misc_feature (392)..(406): n includes a, c, g, or t, or contains no nucleotide
taattctctcccttggcatccggttagccccccaggggnngnnncattgtggagaacttgatatttagttactgatgctcttccaggacacgaaaagaacccatctttgaatatcaatganttttttttttttaagtactgttccggggagaaaaacagtctcaaaacttgaacttcttgggaagagaagtgttgggctgagaagtaacattcccaggaaatagtgagaagctcgccctgtgtttgaaaccgtgttggtctctgtgttcctggaagaaaacagggaagcagcatcttttaaagcctgttctttaaggtgtctcgttagagcccaaagtggaatccggaaggcagccagagctgaggctgccccaagactcagacttgctaannnnnnnnnnnnnnncttcaaacccagagagcatctttcttttaggcgaaaacgcatatatttattttttgtaagttataccattctttcacattagataaactaagttttgggggatccttttgtaatgacttacac

SEQ ID NO: 4099 - DNA, 573 bp, Homo sapiens
  misc_feature (31)..(31): n includes a, c, g, or t, or contains no nucleotide
  misc_feature (51)..(51): n includes a, c, g, or t, or contains no nucleotide
  misc_feature (114)..(114): n includes a, c, g, or t, or contains no nucleotide
  misc_feature (136)..(136): n includes a, c, g, or t, or contains no nucleotide
  misc_feature (177)..(177): n includes a, c, g, or t, or contains no nucleotide
  misc_feature (346)..(346): n includes a, c, g, or t, or contains no nucleotide
  misc_feature (351)..(351): n includes a, c, g, or t, or contains no nucleotide
  misc_feature (358)..(358): n includes a, c, g, or t, or contains no nucleotide
  misc_feature (471)..(472): n includes a, c, g, or t, or contains no nucleotide
taggtagcctgctgtggggtatacagcattngactcagatatagatcctgnagctcacagagtttatagttaaaaaaacaaacagaaacacaaacaatttggatcaaaaggagnaaatgataagtgacaaaagcancacaaggaatttccctgtgtggatgctgagctgtgatggcnggcactgggtacccaagtgaaggttcccgaggacatgagtctgtaggagcaagggcacaaactgcagctgtgagtgcgtgtgtgtgatttggtgtaggtaggtctgtttgccacttgatggggcctgggtttgttcctggggctggaatgctgggtatgctctgtgacnaaggntacgctnacaatcagttaaacacaccggagaagaaccatttacatgcaccttatatttctgtgtacacatctattctcaaagctaaagggtatgaaagtgcctgccttgtttatagccanntgtgagtaaaaatttttttgcattttcacaaattatactttatataaggcattccacacctaagaactagttttgggaaatgtagccctgggtttaatgtc

SEQ ID NO: 4100 - DNA, 582 bp, Homo sapiens
agtctgctttgcagaccgagattgccaacctgctgaaggagaaggaaaaactagagttcatcctggcagctcaccgacctgcctgcaagatccctgatgacctgggcttcccagaagagatgtctgtggcttcccttgatctgactgggggcctgccagaggttgccaccccggagtctgaggaggccttcaccctgcctctcctcaatgaccctgagcccaagccctcagtggaacctgtcaagagcatcagcagcatggagctgaagaccgagccctttgatgacttcctgttcccagcatcatccaggcccagtggctctgagacagcccgctccgtgccagacatggacctatctgggtccttctatgcagcagactgggagcctctgcacagtggctccctggggatggggcccatggccacagagctggagcccctgtgcactccggtggtcacctgtactcccagctgcactgcttacacgtcttccttcgtcttcacctaccccgaggctgactccttccccagctgtgcagctgcccaccgcaagggcagcagcagcaatgagccttcctctg

SEQ ID NO: 4101 - DNA, 95 bp, Homo sapiens
agggagactccacattgtttccatctcctcccctcaaacaattatcaaaccatgtagaacaaacggctgtctgccaactggtagaggcaaagcag

SEQ ID NO: 4102 - DNA, 566 bp, Homo sapiens
  misc_feature (230)..(248): n includes a, c, g, or t, or contains no nucleotide
  misc_feature (339)..(371): n includes a, c, g, or t, or contains no nucleotide
tatgccaggaatgtgccccttctctaagaaaatgccctatttgcaggggtataatcaagggtactgttcgtacatttctctcttaaagaaaaatagtctatattttaacctgcataaaaaggtctttaaaatattgttgaacacttgaagccatctaaagtaaaaagggaattatgagtttttcaattagtaacattcatgttctagtctgctttggtactaataatctnnnnnnnnnnnnnnnnnnntcatatatttaatcttaatctgtttatttacaagggaagatttatgtttggtgaactatattagtatgtatgtgtacctaagggagtagtnnnnnnnnnnnnnnnnnnnnnnnnnnnnnnnnnactggatttgttgttctttcagaaagctttgaatactaaattatagtgtagaaaagaactggaaaccaggaactctggagttcatcagagttatggtgccgaattgtctttggtgcttttcacttgtgttttaaaataaggatttttctcttatttctccccctagtttgtgagaaacatctcaataaagtgctt

SEQ ID NO: 4103 - DNA, 167 bp, Homo sapiens
  misc_feature (88)..(88): n includes a, c, g, or t, or contains no nucleotide
  misc_feature (101)..(101): n includes a, c, g, or t, or contains no nucleotide
gtggaacattccttggaccaggtgttgtattgcaggaccccttcccccagcagccaagccccctcttctctccctcccgccctggctncagctcccgcggnccccgcccgtcccccctcccaggactggtctgttgtcttttcatctgttcaagaggagattgaaac

SEQ ID NO: 4104 - DNA, 449 bp, Homo sapiens
  misc_feature (59)..(60): n includes a, c, g, or t, or contains no nucleotide
  misc_feature (63)..(63): n includes a, c, g, or t, or contains no nucleotide
  misc_feature (66)..(66): n includes a, c, g, or t, or contains no nucleotide
  misc_feature (202)..(202): n includes a, c, g, or t, or contains no nucleotide
  misc_feature (210)..(210): n includes a, c, g, or t, or contains no nucleotide
  misc_feature (286)..(286): n includes a, c, g, or t, or contains no nucleotide
  misc_feature (305)..(324): n includes a, c, g, or t, or contains no nucleotide
caccttcaaaggaggcaagcacagaggcagggcgggcagcgctgctggagcgggcgctnnggnacntggaggtacagaatgccgtgttggtgagcccctcgctgagtggccactatgccctgcccttcctgatgcgaggccaccaccagctacatggatttgtgcccatcgcacccacctccacccagaactacacccaggnagcaattntgggctgtgaagactccaacccttatcctgtatggagagctggaccacatcctggctcgagagtcactgcggcagntccgccacctgcccaaccnnnnnnnnnnnnnnnnnnnnaatgcaggccatgcctgttacctccacaagccgcaagacttccaccttgtcctgcttgccttccttgaccatctaccttgaactaacccactcccagctcccagcctggcatgagcttggacagt

SEQ ID NO: 4105 - DNA, 612 bp, Homo sapiens
  misc_feature (83)..(87): n includes a, c, g, or t, or contains no nucleotide
  misc_feature (89)..(89): n includes a, c, g, or t, or contains no nucleotide
  misc_feature (121)..(121): n includes a, c, g, or t, or contains no nucleotide
  misc_feature (125)..(125): n includes a, c, g, or t, or contains no nucleotide
  misc_feature (129)..(129): n includes a, c, g, or t, or contains no nucleotide
  misc_feature (135)..(135): n includes a, c, g, or t, or contains no nucleotide
  misc_feature (137)..(420): n includes a, c, g, or t, or contains no nucleotide
  misc_feature (422)..(422): n includes a, c, g, or t, or contains no nucleotide
  misc_feature (424)..(425): n includes a, c, g, or t, or contains no nucleotide
  misc_feature (430)..(430): n includes a, c, g, or t, or contains no nucleotide
  misc_feature (433)..(434): n includes a, c, g, or t, or contains no nucleotide
  misc_feature (437)..(462): n includes a, c, g, or t, or contains no nucleotide
  misc_feature (465)..(465): n includes a, c, g, or t, or contains no nucleotide
  misc_feature (471)..(472): n includes a, c, g, or t, or contains no nucleotide
  misc_feature (474)..(474): n includes a, c, g, or t, or contains no nucleotide
  misc_feature (477)..(477): n includes a, c, g, or t, or contains no nucleotide
  misc_feature (484)..(484): n includes a, c, g, or t, or contains no nucleotide
  misc_feature (486)..(486): n includes a, c, g, or t, or contains no nucleotide
  misc_feature (520)..(520): n includes a, c, g, or t, or contains no nucleotide
  misc_feature (548)..(562): n includes a, c, g, or t, or contains no nucleotide
tcttttcctctaccatgctgaaggctgaaagacaggaagatggtgccatcagcaaatattattcttaattgaaaacttgaaannnnnangtttcttactaatttttaaaaatgtattcctngccngggnaggcangnnnnnnnnnnnnnnnnnnnnnnnnnnnnnnnnnnnnnnnnnnnnnnnnnnnnnnnnnnnnnnnnnnnnnnnnnnnnnnnnnnnnnnnnnnnnnnnnnnnnnnnnnnnnnnnnnnnnnnnnnnnnnnnnnnnnnnnnnnnnnnnnnnnnnnnnnnnnnnnnnnnnnnnnnnnnnnnnnnnnnnnnnnnnnnnnnnnnnnnnnnnnnnnnnnnnnnnnnnnnnnnnnnnnnnnnnnnnnnnnnnnnnnnnnnnnnnnnnnnnnnnnnnnnnnnnnnnnnnnnnnnnancnntttgnttnntannnnnnnnnnnnnnnnnnnnnnnnnnaanggaagnngntcnccttgangngaacttaggacagcaaggccagatgcacatcccngggaggacatccatgttccgaggaaggnnnnnnnnnnnnnnntattttcaaggacctctgttgcacttattttatggaaccttgccctgctt

SEQ ID NO: 4106 - DNA, 577 bp, Homo sapiens
gaacttcgcatcaaaagacaattctttatacaacagtgctaaaaatgggacttcttttcacattcttataaatatgaagctcacctgttgcttacaatttttttaattttgtattttccaagtgtgcatattgtacacttttttggggatatgcttagtaatgctacgtgtgatttttctggaggttgataactttgcttgcagtagattttctttaaaagaatgggcagttacatgcatacttcaaaagtattttcctgtaaaaaaaaaaaaagttatataggttttgtttgctatcttaattttggttgtattctttgatgttaacacattttgtataattgtatcgtatagctgtattgaatcatgtagtatcaaatattagatgtgatttaatagtgttaatcaatttaaacccattttagtcactttttttttccaaaaaaatactgccagatgctgatgttcagtgtaatttctttgcctgttcagttacagaaagtggtgctcagttgtagaatgtattgtaccttttaacacctgatgtgtacatcccatgtaacagaaagggcaacaa

SEQ ID NO: 4107 - DNA, 538 bp, Homo sapiens
aggctgtgacatcaatgctatcatctttcacacaaagaaaaagttgtctgtgtgcgcaaatccaaaacagacttgggtgaaatatattgtgcgtctcctcagtaaaaaagtcaagaacatgtaaaaactgtggcttttctggaatggaattggacatagcccaagaacagaaagaaccttgctggggttggaggtttcacttgcacatcatggagggtttagtgcttatctaatttgtgcctcactggacttgtccaattaatgaagttgattcatattgcatcatagtttgctttgtttaagcatcacattaaagttaaactgtattttatgttatttatagctgtaggttttctgtgtttagctatttaatactaattttccataagctattttggtttagtgcaaagtataaaattatatttgggggggaataagattatatggactttcttgcaagcaacaagctattttttaaaaaaaactatttaacattcttttgtttatattgttttgtctcctaaattgttgtaattgc

SEQ ID NO: 4108 - DNA, 283 bp, Homo sapiens
tgtgccatactttgcagatgtggtgagcacgactgaaaatgtagctgtttatatctgggacaacctccagaaagttcttcctgtaggagttctttataaagtaaaagtatacgaaactgacaataatattgtggtttataaaggagaatagctattggggttagcattgcacaaagcccagtttctttctgtgtttgaaaaagattttgatccccttggaatattaagaggtcaacacgtgattgttgtacgtacacattgtgctctggagtgcctatttatt

SEQ ID NO: 4109 - DNA, 345 bp, Homo sapiens
  misc_feature (234)..(237): n includes a, c, g, or t, or contains no nucleotide
  misc_feature (240)..(240): n includes a, c, g, or t, or contains no nucleotide
  misc_feature (242)..(243): n includes a, c, g, or t, or contains no nucleotide
  misc_feature (245)..(249): n includes a, c, g, or t, or contains no nucleotide
  misc_feature (251)..(254): n includes a, c, g, or t, or contains no nucleotide
gagttacagatgcagccacagattgatcatctgccttaacgtgatcggagatgctttgtaatctactgtccagctgaaagcactcatgttacgaggaagaaactacaagtgatgttcaaatctattttgggtcatttttatgtacctttgggttcaggcattatttggggggttttgtttccaaaggaactaaataaagtcatattgcttataaaaaaaaaaaaaaaaaaaaannnnaanannannnnnannnncttcctcgtaacatgagtgctttcagctggacagtagattacaaagcatctccgatcacgttaaggcagatgatcaatctgtggctgcatc

SEQ ID NO: 4110 - DNA, 291 bp, Homo sapiens
tttcaggctgacagtccaattaagggtagccaagaccttgcatggtagagtaggaatcatagtgtcagtgaggtcccgtgagtctttgtgagtccttgtgtcatcgttcgggcactgtttttttatgcaagggcaaaaatctttgtatctggggaaaaaaaacttttttttaaattaaaaaggaaaataaaagatattgaggtcttcctagtgttacttaaattaagatcaaggtaagaaacattgtaaaaaaaaattacaaaagtgctatttgtttcctaaaaacagtga

SEQ ID NO: 4111 - DNA, 581 bp, Homo sapiens
  misc_feature (60)..(78): n includes a, c, g, or t, or contains no nucleotide
  misc_feature (95)..(96): n includes a, c, g, or t, or contains no nucleotide
  misc_feature (104)..(104): n includes a, c, g, or t, or contains no nucleotide
  misc_feature (116)..(116): n includes a, c, g, or t, or contains no nucleotide
cctgaggaacaactggggcagcccccggcgggagggcccggatgcacaccccatcctggnnnnnnnnnnnnnnnnnnnagctgggccccgatggnnatccaggnccaggcaccgcntaggttcccatgtcccagcctggcctgtggctgccctccatcccttccccagagatggctccttgggatgaagagggtagagtgggctgctggtgtcgcatcaagatttggcaggatcggcttcctcaggggcacagacctctcccacccacaagaactcctcccacccaacttccccttagagtgctgtgagatgagagtgggtaaatcagggacagggccatggggtagggtgagaagggcaggggtgtcctgatgcaaaggtggggagaagggatcctaatcccttcctctcccattcaccctgtgtaacaggaccccaaggacctgcctccccggaagtgccttaacctagagggtcggggaggaggttgtgtcactgactcaggctgctccttctctagtttcccctctcatctgaccttagtttgctgccatcagtctagtggtttcgtggtttcgtct

SEQ ID NO: 4112 - DNA, 109 bp, Homo sapiens
gctccaagccttctctccaaacatccaagtacttttctccgccgccaccggcccggagcacggagcagagctggccgcactcggcgccttactcccggttctccatctc

SEQ ID NO: 4113 - DNA, 183 bp, Homo sapiens
atatttttggagtcccattgtttcagtgggcattaacagaatgctttaaaaacttctaagacaagaatctatagcattagtatacactggcacataattttttaaaaagttttaagaaaagattcatttggaattttattcacagtataaaatttcctcacctgaagtaactttgtttgccaa

SEQ ID NO: 4114 - DNA, 490 bp, Homo sapiens
  misc_feature (39)..(39): n includes a, c, g, or t, or contains no nucleotide
  misc_feature (44)..(44): n includes a, c, g, or t, or contains no nucleotide
  misc_feature (48)..(48): n includes a, c, g, or t, or contains no nucleotide
  misc_feature (50)..(50): n includes a, c, g, or t, or contains no nucleotide
  misc_feature (137)..(137): n includes a, c, g, or t, or contains no nucleotide
  misc_feature (146)..(146): n includes a, c, g, or t, or contains no nucleotide
  misc_feature (158)..(158): n includes a, c, g, or t, or contains no nucleotide
  misc_feature (170)..(171): n includes a, c, g, or t, or contains no nucleotide
  misc_feature (180)..(181): n includes a, c, g, or t, or contains no nucleotide
  misc_feature (185)..(185): n includes a, c, g, or t, or contains no nucleotide
  misc_feature (193)..(193): n includes a, c, g, or t, or contains no nucleotide
  misc_feature (199)..(199): n includes a, c, g, or t, or contains no nucleotide
  misc_feature (208)..(208): n includes a, c, g, or t, or contains no nucleotide
  misc_feature (213)..(213): n includes a, c, g, or t, or contains no nucleotide
  misc_feature (218)..(218): n includes a, c, g, or t, or contains no nucleotide
  misc_feature (249)..(249): n includes a, c, g, or t, or contains no nucleotide
  misc_feature (288)..(288): n includes a, c, g, or t, or contains no nucleotide
  misc_feature (323)..(323): n includes a, c, g, or t, or contains no nucleotide
  misc_feature (326)..(326): n includes a, c, g, or t, or contains no nucleotide
  misc_feature (333)..(333): n includes a, c, g, or t, or contains no nucleotide
  misc_feature (353)..(354): n includes a, c, g, or t, or contains no nucleotide
  misc_feature (432)..(459): n includes a, c, g, or t, or contains no nucleotide
cctttaggcatgtgagaaaatcagcctagcagtttaaancccantttncnccacttagcaccataggcaagggggcagatcccagagcccctctcaccccccccaccacaggcctgctccttccttagccttggctnaagatggtnccttctgtgtcnttgcaaagactnnccccaagtnnggancagggagncccctngggagggcnagccnagtgnagggtggggtgggactgaagcgttgtgtgcnaaatccagcttccatcccctccccaacctggcaggattntccatgtgtaaacttcacccccaggacccaggatnttntcctttntgggcatccctttgtgggtnngcagagccctgacccacagctgtgttactgcttggagaagcatatgtaggggcataccctgtggtgttgtgctgtgtnnnnnnnnnnnnnnnnnnnnnnnnnnnntattgaaacatcgcctaggaattgtggtttg

SEQ ID NO: 4115 - DNA, 505 bp, Homo sapiens
  misc_feature (214)..(228): n includes a, c, g, or t, or contains no nucleotide
  misc_feature (315)..(315): n includes a, c, g, or t, or contains no nucleotide
  misc_feature (336)..(369): n includes a, c, g, or t, or contains no nucleotide
  misc_feature (455)..(469): n includes a, c, g, or t, or contains no nucleotide
  misc_feature (479)..(480): n includes a, c, g, or t, or contains no nucleotide
ttgcccatgaaggtggccatccgcagcgtggccgtgaccaaggagcgcagccacgtgctggtgggcctggaggatggcaagctcatcgtggtggtcgcggggcagccctctgaggtgcgcagcagccagttcgcgcggaagctgtggcggtcctcgcggcgcatctcccaggtgtcctcgggagagacggaatacaaccctactgaggcgcgcnnnnnnnnnnnnnnncggctgctcgggccccgcccccggcaggcctggcccgggaggccccgcccagaagtcggcgggaacaccccggggtgggcagcccangggggtgagcggggcccaccnnnnnnnnnnnnnnnnnnnnnnnnnnnnnnnnnnccctcagggattggcgggcggaagtcccgcccctcgccggctgaggggccgccctgagggccagcactggcgtctgcggccgctgnnnnnnnnnnnnnnnagtctggggnngggttccccggcttccaagtcgctg

SEQ ID NO: 4116 - DNA, 541 bp, Homo sapiens
acctatatgtgcaatgggagaatccacagaattttattagcagatgcctattttatgaagtagaagtcaataacagccaaactgagacacataatgttttctacgtccaagaggctaaatgtgagaatccagaatttgagagaaatgtggagaatacatcttgtttcatggtccctggtgttcttcctgatactttgaacacagtcagaataagagtcaaaacaaataagttatgctatgaggatgacaaactctggagtaattggagccaagaaatgagtataggtaagaagcgcaattccacactctacataaccatgttactcattgttccagtcatcgtcgcaggtgcaatcatagtactcctgctttacctaaaaaggctcaagattattatattccctccaattcctgatcctggcaagatttttaaagaaatgtttggagaccagaatgatgatactctgcactggaagaagtacgacatctatgagaagcaaaccaaggaggaaaccgactctgtagtgctgatagaaaacct

SEQ ID NO: 4117 - DNA, 552 bp, Homo sapiens
  misc_feature (268)..(268): n includes a, c, g, or t, or contains no nucleotide
  misc_feature (337)..(337): n includes a, c, g, or t, or contains no nucleotide
gttattactatgagtcaggctctgtttattgtttcaattctttacaccaaagtatgaactggagagggtacctcagttataaggagtctgagaatattggccctttctaacctatgtgcataattaaaaccagcttcatttgttgctccgagagtgtttctccaaggttttctatcttcaaaaccaactaagttatgaaagtagagagatctgccctgtgttatccagttatgagataaaaaatgaatataagagtgcttgtcattanaaaagtttccttttttattctctcaagccaccagctgccagccaccagcagccagctgccagcctagcnttttttttttttttttttttttagcacttagtatttagcatttattaacaggtactctaagaatgatgaagcattgtttttaatcttaagactatgaaggtttttcttagttcttctgcttttgcaattgtgtttgtgaaatttgaatacttgcaggctttgtatgtgaataattctagcgggggacctgggagataattcctacggggaattct

SEQ ID NO: 4118 - DNA, 311 bp, Homo sapiens
  misc_feature (53)..(69): n includes a, c, g, or t, or contains no nucleotide
atatgtgaagctccatatttctgttgctttaaagaagtaaaaccttccatttnnnnnnnnnnnnnnnnntaagataacaaagcttccttgatttccttttcctgtgtaatttaatagatttgttgactagtgcttgggcacattataaatcagtgttatttgctcttggagccattttttaaaaaaaattttggcagtgagcagttgaatttatcttgaatttatcatgtgtgtgtatttctgaagcagctacatagcagaacattttaagagattctgttagcccacatgttcatgttggttgctgctga

SEQ ID NO: 4119 - DNA, 382 bp, Homo sapiens
  misc_feature (31)..(31): n includes a, c, g, or t, or contains no nucleotide
  misc_feature (47)..(47): n includes a, c, g, or t, or contains no nucleotide
  misc_feature (84)..(84): n includes a, c, g, or t, or contains no nucleotide
  misc_feature (126)..(157): n includes a, c, g, or t, or contains no nucleotide
  misc_feature (301)..(302): n includes a, c, g, or t, or contains no nucleotide
acacagatgtcttagagtttgacgatggcanccccagctaccatgtncccagatagccaaggatgtgtgcaccttcctgcgctngggcatctgagccagagcacgaccatcgaaaacgcatggggnnnnnnnnnnnnnnnnnnnnnnnnnnnnnnnnggtgcccctggtctacaccataaagcggcacaagtggtcagtcctgaagagtcggaagctggcatatcggccgcccaagtgaccctgtccagtgtctgcttgccatcctgccagaacaggccctcaagcccaagagccatcccnngcctgttcaggcctcagctaagcctctcttcatctggaagaagaggcaagggggcaggagaccaggctctagctctgggc

SEQ ID NO: 4120 - DNA, 40 bp, Homo sapiens
tataaaacttgttgacaatgcactgactttagaaagatgt

SEQ ID NO: 4121 - DNA, 423 bp, Homo sapiens
  misc_feature (30)..(30): n includes a, c, g, or t, or contains no nucleotide
  misc_feature (352)..(352): n includes a, c, g, or t, or contains no nucleotide
  misc_feature (364)..(366): n includes a, c, g, or t, or contains no nucleotide
  misc_feature (368)..(373): n includes a, c, g, or t, or contains no nucleotide
  misc_feature (376)..(389): n includes a, c, g, or t, or contains no nucleotide
  misc_feature (391)..(392): n includes a, c, g, or t, or contains no nucleotide
catgaatcacatagagcagtggagttttanccaagtggtgtgtgtggtttttgttttttactatgcaaagatgggaaatgcacaaacttttcaaagactagtgtctgaagaactttacaaacaatacttgaaccctttctttaaagttatcccatcatgttttatagtcattgttgcttccattgttagtttccattttcaagtgctttgtaattttttaagtgcactacctgaaattttgtttgaaattaataaattcattcgtatcttgttggctgcctatgaatggagattcagtagtcattgtatgcatctttaagtcaaatgtgtattaaaactttcgttaacgtanaaaaaaaaaaannnannnnnnaannnnnnnnnnnnnncnnccttttctgtttcctcttgtagtgctgatta

SEQ ID NO: 4122 - DNA, 367 bp, Homo sapiens
  misc_feature (200)..(214): n includes a, c, g, or t, or contains no nucleotide
  misc_feature (251)..(272): n includes a, c, g, or t, or contains no nucleotide
ttaattcatccaaatgtactgaggttaccacacacttgactacggatgtgatcaacactaacaaggaaacaaattcaaggacaacctgtctttgagccagggcaggcctcagacaccctgcctgtggccccgcctccacttcatcctgcccggaatgccagtgctccgagctcagacagaggaagccctgcagaaagttnnnnnnnnnnnnnnnctaaaggatgtgtgaacgggagatgatgcactgtgtnnnnnnnnnnnnnnnnnnnnnncattttagcacagttcatagtccacagttgatgcagcatcctgagattttaaatcctgaagtgtgggtggcgcacacaccaagtagggagctagt

SEQ ID NO: 4123 - DNA, 349 bp, Homo sapiens
accaaatcgaccagcttcagcgagagcagcgacacctgaagaggcagctggagaagctgggcattgagaggatccggatggacagcatcggctccaccgtctcctcggagcgctccgactccgacagggaagaaatcgacgttgacgtggagagcacggactatctcacaggtgatctggactggagcagcagcagtgtgagcgactctgacgagcggggcagcatgcagagcctcggcagtgatgagggctattccagcaccagcatcaagagaataaagctgcaggacagtcacaaggcgtgtcttggtctctaagagagtgggcactgcggctgtctccttgaagg

SEQ ID NO: 4124 - DNA, 223 bp, Homo sapiens
  misc_feature (28)..(28): n includes a, c, g, or t, or contains no nucleotide
  misc_feature (87)..(87): n includes a, c, g, or t, or contains no nucleotide
  misc_feature (104)..(104): n includes a, c, g, or t, or contains no nucleotide
  misc_feature (112)..(112): n includes a, c, g, or t, or contains no nucleotide
tggtccactgtgctcccgtagagcccgntgaggttggcgtagtggcagttcctgtaccaccaggcccctcggtaggagacagcgcangagatgagcaagctgtnggggtccngatcacgggcagagaggacactgccgctgtggtagctcaaggagtcccctgcggggccgtggtagccctccaagtagaggcggtagtactctgagccgatctacgtggaag

SEQ ID NO: 4125 - DNA, 473 bp, Homo sapiens
  misc_feature (99)..(99): n includes a, c, g, or t, or contains no nucleotide
  misc_feature (104)..(123): n includes a, c, g, or t, or contains no nucleotide
  misc_feature (443)..(444): n includes a, c, g, or t, or contains no nucleotide
  misc_feature (447)..(447): n includes a, c, g, or t, or contains no nucleotide
taaagtcggcagcagccgctactcaaagaaaagccccaagtctttatacagaacaaagggcgggtcttatcattcccctctttctggtgctggcttccnggacnnnnnnnnnnnnnnnnnnnngtgttgctctaaccctcctccagccctgcagcctccccttgcagtcatcattcgtgttctgtgtataccaaatgattctgttatctaaagaagctttttgctgggaaaacgatgtcctgaaaatggtatttcaatgaggcatatgttcaggatttcagaaacaagaagttagttctatttagcaggttaaaaaatgctgcattagaattaaagcaagttattttcttatttgtataatgacacaaagcattgggagtcagactgcttgtatattatcaaacattttaagagaattctaataaagctgtattttacatcannaanattttcctatatctccagcaggcacg

SEQ ID NO: 4126 - DNA, 183 bp, Homo sapiens
  misc_feature (56)..(72): n includes a, c, g, or t, or contains no nucleotide
  misc_feature (90)..(90): n includes a, c, g, or t, or contains no nucleotide
aagtcccacttcttaagtcacatggcttctgtcttggaaattttacctttaaaagnnnnnnnnnnnnnnnnnccaggaggcttgggaacnagggaaagagggaaatgttgtattatgtgggtcttggggcctctaaccatcagtatagggttttttctttccttgatggcagtagaaagacct

SEQ ID NO: 4127 - DNA, 566 bp, Homo sapiens
  misc_feature (171)..(189): n includes a, c, g, or t, or contains no nucleotide
  misc_feature (336)..(368): n includes a, c, g, or t, or contains no nucleotide
  misc_feature (397)..(422): n includes a, c, g, or t, or contains no nucleotide
atgctgatcttgcataactataagtactatgaatgaatttggttggttttggtgttgtacagctcacatgtttacacactcagtgccctaatttcccctgagggaatcgctttttaagtgatccttacagtggtgttttatgttactttattacagagctccttggttttnnnnnnnnnnnnnnnnnnntttttaaataacatgatgatggtacattttcctctattgtctagctaagggctttcggtccaccagtaaataagatcaaatgctcttaaatgttcctgttaccatcctaatgtaaatactggatttttctgtcatttagcaccatgnnnnnnnnnnnnnnnnnnnnnnnnnnnnnnnnntcatgagccctttttctccagtagtacannnnnnnnnnnnnnnnnnnnnnnnnntattgatgcaatttgatattttttcataatctatatttaaacaaaattacatcattgcatcatcttttctaaattcatctccattaaaacttgccttaagctaccagattgcttttgccaccattggccatactgtgtgtttgt

SEQ ID NO: 4128 - DNA, 545 bp, Homo sapiens
  misc_feature (164)..(178): n includes a, c, g, or t, or contains no nucleotide
  misc_feature (238)..(260): n includes a, c, g, or t, or contains no nucleotide
  misc_feature (315)..(344): n includes a, c, g, or t, or contains no nucleotide
  misc_feature (470)..(470): n includes a, c, g, or t, or contains no nucleotide
  misc_feature (473)..(473): n includes a, c, g, or t, or contains no nucleotide
tcctggagacaagagctggagactggaggtttctaaccagcatccagaaggttcgttagccaggtggtcccttctacaatcgagcagctccttggacagactgtttctcagttatttccagagacccagctacagttccctggctgtttctagagacccagctnnnnnnnnnnnnnnntttccagagacccagctaaagtcacctgcctgttctaaaggcccagctacagccaatcannnnnnnnnnnnnnnnnnnnnnncacctccaagcttgtcctaggtgtctgctgtgaacctccagtgaccccagagacnnnnnnnnnnnnnnnnnnnnnnnnnnnnnnaaagaccttcctagaagtcaagagctagccttgagactgtgctatacacacacagctgagagccaagcccagttctctgggttgtgctttactccacgcatcaataaataattttgaaggcctcanatntggcagccccaggcctggtcctgggtgcataggtctctcggacccactctctgccttcacagttgttcaaag

SEQ ID NO: 4129 - DNA, 543 bp, Homo sapiens
  misc_feature (56)..(56): n includes a, c, g, or t, or contains no nucleotide
  misc_feature (92)..(106): n includes a, c, g, or t, or contains no nucleotide
  misc_feature (148)..(150): n includes a, c, g, or t, or contains no nucleotide
  misc_feature (156)..(156): n includes a, c, g, or t, or contains no nucleotide
  misc_feature (165)..(165): n includes a, c, g, or t, or contains no nucleotide
  misc_feature (201)..(201): n includes a, c, g, or t, or contains no nucleotide
  misc_feature (221)..(221): n includes a, c, g, or t, or contains no nucleotide
  misc_feature (242)..(242): n includes a, c, g, or t, or contains no nucleotide
  misc_feature (255)..(255): n includes a, c, g, or t, or contains no nucleotide
  misc_feature (261)..(261): n includes a, c, g, or t, or contains no nucleotide
  misc_feature (298)..(298): n includes a, c, g, or t, or contains no nucleotide
  misc_feature (300)..(301): n includes a, c, g, or t, or contains no nucleotide
  misc_feature (307)..(308): n includes a, c, g, or t, or contains no nucleotide
caggcccaggtatgaatgagccagccatgcttcctcctgcctgtgtgacgctgggngagtctcttcccctgtctgggccaaacagggagcgnnnnnnnnnnnnnnngctctaagatccattttagatcaatgtctaaaatagctctannnctctgnggagtcccnagcagaggctatggaatgtttctgcaaccctaaggncacagagagcccaaccctgnagtgtctcagaggccccctgnagtgttccccttngcctgnagccccttacccattcctgcagccagtgagagacctngnncctcanncctggcagggctctctcttcaaggccatatccacctgtgccctggggcttgggagaccccatagggccgggactcttgggtcagcccggccactggcttctctctttttctccgtttcattctgtgtgcgttgtggggtgggggagggggtccacctgccttacctttctgagttgcctttagagagatgcgtttttctaggactctgtgcaactgtcgtatatggtcccgtggg

SEQ ID NO: 4130 - DNA, 361 bp, Homo sapiens
ttttcctagatattgcacgggagaatatacaaatagcaaaattgggccaagggccaagagaatatccgaactttaatttcaggaattgaatgggtttgctagaatgtgatatttgaagcatcacataaaaatgatgggacaataaattttgccataaagtcaaatttagctggaaatcctggatttttttctgttaaatctggcaaccctagtctgctagccaggatccacaagtccttgttccactgtgccttggtttctcctttatttctaagtggaaaaagtattagccaccatcttacctcacagtgatgttgtgaggacatgtggaagcactttaagttttttcatcataacataa

SEQ ID NO: 4131 - DNA, 535 bp, Homo sapiens
ccagtgccatcaatggcaacccatcctggcacctggcagacagccccgcggtgaatggagccactgcgcacagcagcagtttggatgcccgggaggtgatccccatggcagcagtaaagcaagcgctgagggaggcaggcgacgagtttgaactgcggtaccggcgggcattcagtgacctgacatcccagctccacatcaccccagggacagcatatcagagctttgaacaggtagtgaatgaactcttccgggatggggtaaactggggtcgcattgtggcctttttctccttcggcggggcactgtgcgtggaaagcgtagacaaggagatgcaggtattggtgagtcggatcgcagcttggatggccacttacctgaatgaccacctagagccttggatccaggagaacggcggctgggatacttttgtggaactctatgggaacaatgcagcagccgagagccgaaagggccaggaacgcttcaaccgctggttcctgacgggcatgactgtggccggcgtggttctgct

SEQ ID NO: 4132 - DNA, 168 bp, Homo sapiens
gcctccaaagtattgtacaaataagtgtgcagtatctgtgaactgaattcaccacagactttagctttctgagcaagaggattttgcgtcagagaaatgtctgtccatttttattcaggggaaacttgatttgagatttttatgcctgtgacttccttggaaatcaaa

SEQ ID NO: 4133 - DNA, 448 bp, Homo sapiens
  misc_feature (269)..(280): n includes a, c, g, or t, or contains no nucleotide
  misc_feature (282)..(284): n includes a, c, g, or t, or contains no nucleotide
  misc_feature (286)..(286): n includes a, c, g, or t, or contains no nucleotide
  misc_feature (326)..(340): n includes a, c, g, or t, or contains no nucleotide
  misc_feature (410)..(410): n includes a, c, g, or t, or contains no nucleotide
tctacagtcaaaatgttggctttttcttattttttaatgtatgggagaaaaatgtaaaattccagttcttttctaattgtgtttctgaaattaggagtcagctgccagcgtttttgtgtggctgcagtgtgcctgggcccagctcacgggcagtgggtggacctaactgcccaggcaggcgagagctacttccagagccttccagtgcatgggagggcagggctaggtgtagcggtgtctcctctttgaaattaagaactatctttctnnnnnnnnnnnngnnnangatgatgctgcctctcctctctgtgttgtctgggcccttnnnnnnnnnnnnnnnttacccttcctgaggggagccatgctctagcccctggagggcctgttgcaggggcagggcgggcccgttncctttggcagctcctggagagctgtggacatgcagtcc

SEQ ID NO: 4134 - DNA, 538 bp, Homo sapiens
  misc_feature (46)..(46): n includes a, c, g, or t, or contains no nucleotide
  misc_feature (204)..(204): n includes a, c, g, or t, or contains no nucleotide
  misc_feature (244)..(244): n includes a, c, g, or t, or contains no nucleotide
  misc_feature (319)..(319): n includes a, c, g, or t, or contains no nucleotide
  misc_feature (420)..(420): n includes a, c, g, or t, or contains no nucleotide
  misc_feature (501)..(501): n includes a, c, g, or t, or contains no nucleotide
  misc_feature (510)..(510): n includes a, c, g, or t, or contains no nucleotide
ccactttgacgaaaagaaggagatcaacaaacggaagcagctgatnctggaggggaaggaccctgacctggaggccaagcgcaaggctgagctggccaagatcaagcagaagaaccggcgcttcaaggagaaggtggaggagacgctgaagcgacagaaggctggcagggctggccacaaggggcgtccacccaggacaccgtntgggtcccactcaggcccagtcccctcccagggcctggtntgagccccacacggccatctgcccagtccttgactcgtccatggagctgagggtcggaggaaccttccttggggncagcagcccttcccgggggcctacccagtgccccacagcagaacccgtgggcgctcgtgttgtgcgggccctgctcctctgccccgaaaccactggctggncccttccctgagccctggccaagattcaggctgcaggggaagaaagaacatgaccgggaggttgtgaccccaacccaaggntcacccccnaggggtgccgcatacaggaggtgcttaa

SEQ ID NO: 4135 - DNA, 529 bp, Homo sapiens
acgcctgcacagccaggagtatacaacaacatgagcatcaccgtttccatggcaggtggaaatacgaatgttcagaacatgaacccaatgatggcccagatgcagatgagctctttgcagatgccaggaatgaacactgtgtgccctgagcagataaatgatcccgcactgagacacacaggcctctactgcaaccagctctcatccactgaccttctcaaaacagaagcagatggaacccaggtgcaacaggttcaggtgtttgctgacgtccagtgtacagtgaatctggtaggcggggacccttacctgaaccagcctggtccactgggaactcaaaagcccacgtcaggaccacagaccccccaggcccagcagaagagcctccttcagcagctactgactgaataaccacttttaaaggaatgtgaaatttaaataatagacatacagagatatacaaatatattatatatttttctgagatttttgatatctcaatctgcagccattcttcaggtcgtagcat

SEQ ID NO: 4136 - DNA, 451 bp, Homo sapiens
cagcatcgcgggtctgcaagtggatgatgagattgtggagttcggctctgtgaacacccagaacttccagtcactgcataacattggcagtgtggtgcagcacagtgagggggccctggcacccaccatcctactttctgtctctatgaatttgactactccagggacctcatctagaagcccctgaatgtgacagtgatccgcaggggggaaaaacaccagcttagacttgttccaacacgctgggcaggaaaaggactgctgggctgcaacattattcctctgcaaagatgattgtccctggggaacagtaacaggaaagcatcttcccttgccctggacttgggtctagggatttccaacttgtcttctctccctgaagcataaggatctggaagaggcttgtaacctgaacttctgtgtggtggcagtactgtggcccaccagtgta

SEQ ID NO: 4137 - DNA, 462 bp, Homo sapiens
  misc_feature (163)..(177): n includes a, c, g, or t, or contains no nucleotide
cgcaggtgttcttcaacggtgccaacgtccggcaggtggacgtgcccacgctgaccggagccttcggcatcctggcggcccacgtgcccacgctgcaggtcctgcggccggggctggtcgtggtgcatgcagaggacggcaccacctccaaatactttgtgannnnnnnnnnnnnnncagtgaacgccgactcttcggtgcagttgttggccgaagaggccgtgacgctggacatgttggacctgggggcagccaaggcaaacttggagaaggcccaggcggagctggtggggacagctgacgaggccacgcgggcagagatccagatccgaatcgaggccaacgaggccctggtgaaggccctggagtaggcgagccagccgccaaggttgacctcagcttcggagccacctctggatgaactgcccccagcccccgccccattaaagacccggaagcctg

SEQ ID NO: 4138 - DNA, 512 bp, Homo sapiens
  misc_feature (45)..(52): n includes a, c, g, or t, or contains no nucleotide
  misc_feature (154)..(154): n includes a, c, g, or t, or contains no nucleotide
  misc_feature (405)..(425): n includes a, c, g, or t, or contains no nucleotide
  misc_feature (433)..(433): n includes a, c, g, or t, or contains no nucleotide
  misc_feature (440)..(440): n includes a, c, g, or t, or contains no nucleotide
ccaagtatagctatttgtgtatactaaacacatcatttttggtannnnnnnntctgtgtgtttggctagtgttactacttcataagttcattgtaaaatggctttactgccatcaacatgggtcatctacctagcagttaatgagtattgctgnatcaggtgtccaccttccaatgatgaagcaaggtaaggggtaatgttttgctcttgacacagagaaatttaatagctttatgtactaaaatataatatcttttaaagatagtgaaattcttcagttttttaaatctctagggattttttttcaatgttgtagaagatgcagctgcttaatggtcttgactaggactttttaaatgaatggtgtctgcaggtagatgatcatgaaaatatctctaacaaagnnnnnnnnnnnnnnnnnnnnnagaatttntagtacntgcctcctttgtttttgtaataattaaaatacttcttgtataaagagattagttcagcctgttagtaagtct

SEQ ID NO: 4139 - DNA, 569 bp, Homo sapiens
  misc_feature (33)..(33): n includes a, c, g, or t, or contains no nucleotide
  misc_feature (39)..(39): n includes a, c, g, or t, or contains no nucleotide
  misc_feature (42)..(42): n includes a, c, g, or t, or contains no nucleotide
  misc_feature (46)..(46): n includes a, c, g, or t, or contains no nucleotide
  misc_feature (53)..(53): n includes a, c, g, or t, or contains no nucleotide
  misc_feature (60)..(60): n includes a, c, g, or t, or contains no nucleotide
  misc_feature (65)..(65): n includes a, c, g, or t, or contains no nucleotide
  misc_feature (93)..(93): n includes a, c, g, or t, or contains no nucleotide
gtatcattgacacttcctgcagggtggtccctngccctnacnaganctgaaantgaaaangagancagcagctttctagggacagctggaaanggacttaatgtgtttgactatttcttacgagggttctacttatttatgtatttatttttgaaagcttgtattttaatattttacatgctgttatttaaagatgtgagtgtgtttcatcaaacatagctcagtcctgattatttaattggaatatgatgggttttaaatgtgtcattaaactaatatttagtgggagaccataatgtgtcagccaccttgataaatgacagggtggggaactggagggtggggggattgaaatgcaagcaattagtggatcactgttagggtaagggaatgtatgtacacatctattttttatactttttttttaaaaaaagaatgtcagttgttatttattcaaattatctcacattatgtgttcaacatttttatgctgaagtttcccttagacattttatgtcttgcttgtagggcataatgccttgtttaatgtccattctgcagcgtttctc

SEQ ID NO: 4140 - DNA, 482 bp, Homo sapiens
  misc_feature (198)..(212): n includes a, c, g, or t, or contains no nucleotide
gttcaggccacttttctgtcttttatttggttactgttgttatttgtttttaagttaggatgctttttaacagcctttagaagccgctgctgaaattgatactgggggaagggttccccttccttctagagcagaaaagggagagaggtgttgtattcctgtttggtaacctcagtctcctgtaagacctcctaccannnnnnnnnnnnnnnccaatcaggagagggtagctgcctgcataggagcctcgcttccgattattcccttcccaatattattcatccagacttagccacagtgcacaaaagcaaacctgctagagaggcagtgaacaccacagcttctccccagctaggtgccttttacatcgggtttgttctccttccatggtgtgttgctgacattgtcactgagtcccatgtgaggtgctggtgagtattacctttcatctgtgccatgctctagaaccttgaccttgatag

SEQ ID NO: 4141 - DNA, 64 bp, Homo sapiens
gagcttctgaggcgctgctttgtcaaaaggaagtctctaggttctgagctctggctttgccttg

SEQ ID NO: 4142 - DNA, 508 bp, Homo sapiens
  misc_feature (70)..(72): n includes a, c, g, or t, or contains no nucleotide
  misc_feature (74)..(74): n includes a, c, g, or t, or contains no nucleotide
  misc_feature (85)..(85): n includes a, c, g, or t, or contains no nucleotide
  misc_feature (110)..(110): n includes a, c, g, or t, or contains no nucleotide
  misc_feature (165)..(165): n includes a, c, g, or t, or contains no nucleotide
  misc_feature (169)..(169): n includes a, c, g, or t, or contains no nucleotide
  misc_feature (371)..(371): n includes a, c, g, or t, or contains no nucleotide
  misc_feature (403)..(419): n includes a, c, g, or t, or contains no nucleotide
gtggacaccgggagcaacgacctgccggtgctgtttgagctgggagagggctcctacttctccgaagggnnngncttcgccgagnaccccaccatctccctgctgacagnctcggagcctcccaaagccaaggaccccactgtctcctagaggccccggaggagntggnccagccgcccacccccacccccagtgcagggctggtcttggggaggcagggcagcctcgcggtcttgggcactggtgggtcggccgccatagccccagtaggacaaacgggctcgggtctgggcagcacctctggtcaggagggtcaccctggcctgccagtctgccttcccccaaccccgtgtcctgtggtttggttgggncttcacagccacacctggactgaccctgcagnnnnnnnnnnnnnnnnnttgtattttggatttttacacaactgtcccgttccccgctccacagagatacacagatatatacacacagtggatggacggacaagaca

SEQ ID NO: 4143 - DNA, 278 bp, Homo sapiens
  misc_feature (88)..(105): n includes a, c, g, or t, or contains no nucleotide
  misc_feature (114)..(115): n includes a, c, g, or t, or contains no nucleotide
  misc_feature (198)..(198): n includes a, c, g, or t, or contains no nucleotide
  misc_feature (203)..(204): n includes a, c, g, or t, or contains no nucleotide
  misc_feature (206)..(216): n includes a, c, g, or t, or contains no nucleotide
  misc_feature (250)..(250): n includes a, c, g, or t, or contains no nucleotide
ctggttcttgccactaccagagttctctagcaaatctgagcatctgacagggtgaaaaattctgaatggcttcctgatgcctgacttnnnnnnnnnnnnnnnnnnttgcacgcnngcactcagtgcccttctggtatcatctgccaagaccagggcctgcttcaccacagccacaataaagtcctttcaagccctganaaaannannnnnnnnnnnaaccttttgctgcagttaattactcttcctattnatcttccatgaacttaagactgggcaaa

SEQ ID NO: 4144 - DNA, 253 bp, Homo sapiens
  misc_feature (150)..(150): n includes a, c, g, or t, or contains no nucleotide
ggtacatatttcatcccacaagagaaaacaataataatcagaaattttcggtgaaaaaaacgcaaaactgtacaggaaaatcatcctccaagtaccagacataaaatgctgcaagcttttgaactaatggcgagagtgtaagaaaatggnctctacttcagtgatcctgtggcaggacgtggatcaagacttggaaccgcagaaaacgaaatcccatagtagcacaaagcttggctgttcagtgaataacatt

SEQ ID NO: 4145 - DNA, 321 bp, Homo sapiens
  misc_feature (103)..(103): n includes a, c, g, or t, or contains no nucleotide
  misc_feature (233)..(251): n includes a, c, g, or t, or contains no nucleotide
  misc_feature (276)..(291): n includes a, c, g, or t, or contains no nucleotide
gaaggtgacgttcaactccgctctggcccagaaggaggccaagaaggacgagcccaagagcggcgaggaggcgctcatcatcccccccgacgccgtcgcggtnggactgcaaggacccagatgatgtggtaccagttggccaaagaagagcctggtgttggtgcatgtgctttggactagcatttatgcttgcaggtgttattctaggaggagcatacttgtacaaatatttnnnnnnnnnnnnnnnnnnngtgtactactgtggaataaagtacnnnnnnnnnnnnnnnntcttaaatgagccctctgcagatgccccag

SEQ ID NO: 4146 - DNA, 340 bp, Homo sapiens
  misc_feature (95)..(127): n includes a, c, g, or t, or contains no nucleotide
  misc_feature (142)..(142): n includes a, c, g, or t, or contains no nucleotide
  misc_feature (145)..(146): n includes a, c, g, or t, or contains no nucleotide
  misc_feature (148)..(148): n includes a, c, g, or t, or contains no nucleotide
  misc_feature (150)..(152): n includes a, c, g, or t, or contains no nucleotide
  misc_feature (157)..(157): n includes a, c, g, or t, or contains no nucleotide
  misc_feature (161)..(163): n includes a, c, g, or t, or contains no nucleotide
  misc_feature (166)..(167): n includes a, c, g, or t, or contains no nucleotide
  misc_feature (172)..(174): n includes a, c, g, or t, or contains no nucleotide
  misc_feature (177)..(177): n includes a, c, g, or t, or contains no nucleotide
  misc_feature (180)..(180): n includes a, c, g, or t, or contains no nucleotide
  misc_feature (182)..(183): n includes a, c, g, or t, or contains no nucleotide
  misc_feature (185)..(185): n includes a, c, g, or t, or contains no nucleotide
  misc_feature (187)..(187): n includes a, c, g, or t, or contains no nucleotide
  misc_feature (191)..(191): n includes a, c, g, or t, or contains no nucleotide
  misc_feature (194)..(194): n includes a, c, g, or t, or contains no nucleotide
  misc_feature (196)..(196): n includes a, c, g, or t, or contains no nucleotide
  misc_feature (203)..(203): n includes a, c, g, or t, or contains no nucleotide
  misc_feature (241)..(241): n includes a, c, g, or t, or contains no nucleotide
  misc_feature (243)..(243): n includes a, c, g, or t, or contains no nucleotide
  misc_feature (253)..(253): n includes a, c, g, or t, or contains no nucleotide
  misc_feature (283)..(283): n includes a, c, g, or t, or contains no nucleotide
  misc_feature (303)..(303): n includes a, c, g, or t, or contains no nucleotide
cttaaacgcagctgccaggtgtaatttttcaagtgtcaaagatcccaagtgatccctgacacccaccccttcctactcttacattcatgcgtctnnnnnnnnnnnnnnnnnnnnnnnnnnnnnnnnntgctccgatcagaanaannanannnaaaanaacnnncanncacannnggnccntnnanancagnaananacacaanccacctccacgacctccgacctcccccctccctccggntngctctgaggnagcacgtgcctcttccttcaccctgggccnggctggggcgggagcagccnagctgctctctggatgtcacaccactgttaactgtca

SEQ ID NO: 4147 - DNA, 478 bp, Homo sapiens
cagaaggcatcttctcactgtgctgcaaatctttatagcctttacaatacggacttctgtgtatatgttatactgattctactctgcttttatcctttggagcctgggagactccccaaaaaggtaaatgctatcaagagtagaactttgtagctgtagattagttatgtttaaaacgcctacttgcaagtcttgcttctttgggatatcaaaatgtattttgtgatgtactaaggatactggtcctgaagtctaccaaatattatagtgcattttagcctaattcattatctgtatgaagttataaaagtagctgtagatggctaggaattatgtcatttgtattaaacccagatctatttctgagtatgtggttcatgctgttgtgaaaaatgttttaccttttacctttgtcagtttgtaatgagaggatttccttttaccctttgtagctcagagagcacctgatgtatcatct

SEQ ID NO: 4148 - DNA, 133 bp, Homo sapiens
tgagcgtccgcagaggtgaccgaaaagccgtatgatgatgttcccgatttctctgttggtcggagtcggccagttgcctgaagtagggaagctgagtgtgtcgctccctggtccactgtttctcctataaatg

SEQ ID NO: 4149 - DNA, 370 bp, Homo sapiens
tgtcttcgcttcgtccagaccaacatctcccgcctcctgcaggagacctccgagcagctggtggcgctgaagccctggatcactcgccagaacttctcccggtgcctggagctgcagtgtcagcccgactcctcaaccctgccacccccatggagtccccggcccctggaggccacagccccgacagccccgcagccccctctgctcctcctactgctgctgcccgtgggcctcctgctgctggccgctgcctggtgcctgcactggcagaggacgcggcggaggacaccccgccctggggagcaggtgccccccgtccccagtccccaggacctgctgcttgtggagcactgacctggccaaggcctca

SEQ ID NO: 4150 - DNA, 396 bp, Homo sapiens
  misc_feature (176)..(190): n includes a, c, g, or t, or contains no nucleotide
  misc_feature (208)..(230): n includes a, c, g, or t, or contains no nucleotide
ctcctagtccagacgccatgggtcatttcacagaggaggacaaggctactatcacaagcctgtggggcaaggtgaatgtggaagatgctggaggagaaaccctgggaaggctcctggttgtctacccatggacccagaggttctttgacagctttggcaacctgtcctctgcctcnnnnnnnnnnnnnnnccccaaagtcaaggcacnnnnnnnnnnnnnnnnnnnnnnnttgggagatgccataaagcacctggatgatctcaagggcacctttgcccagctgagtgaactgcactgtgacaagctgcatgtggatcctgagaacttcaagctcctgggaaatgtgctggtgaccgttttggcaatccatttcggcaaagaattcacccctgagg

SEQ ID NO: 4151 - DNA, 428 bp, Homo sapiens
  misc_feature (385)..(385): n includes a, c, g, or t, or contains no nucleotide
tgcagttatacacattaaagcagatctggagtctgaagtagctataaagcagctataaaacagaaatacatgcatagctgcagaaaccatgataggtagaggacttttcttttggttttgttttgttttgttttgttttgtttttggttttacagagaagagatttttattacaaagaaaaaaattccagtgaattgtgcagaaatgctggtttttacaccatcctaaagaaaaactttacaagggtgttttggagtagaaaaaaggttataaagttggaatcttaaattgtaaaattaaccattgagtgtcaaagttctaaaagcagaactcattttgtgcaatgaacataaggaaagactactgtataggttttttttttttnctccttttaaatgaagaaaagctttgcttaagggttgcatact

SEQ ID NO: 4152 - DNA, 310 bp, Homo sapiens
  misc_feature (78)..(78): n includes a, c, g, or t, or contains no nucleotide
  misc_feature (93)..(93): n includes a, c, g, or t, or contains no nucleotide
  misc_feature (97)..(97): n includes a, c, g, or t, or contains no nucleotide
  misc_feature (99)..(116): n includes a, c, g, or t, or contains no nucleotide
  misc_feature (223)..(223): n includes a, c, g, or t, or contains no nucleotide
  misc_feature (228)..(228): n includes a, c, g, or t, or contains no nucleotide
cggcttgagttctgcgcacgcaggattcagtgtggggacggcccctgccggataggcctagccctggcccaggtggtnagcggtttgcagtgnccgntnnnnnnnnnnnnnnnnnncccagataaaggcccccgctgtccagcctccctggacggccctcgcggtccctgcagcccaagatgggactcagaccctgtgccccagagctcccctgccgcagaantgggnccccagccggccccgaccgggtccaggagcactgctcgcctgtacatactgttgccctagcccacctggtgccgtgggagcc

SEQ ID NO: 4153 - DNA, 470 bp, Homo sapiens
  misc_feature (73)..(92): n includes a, c, g, or t, or contains no nucleotide
  misc_feature (241)..(300): n includes a, c, g, or t, or contains no nucleotide
  misc_feature (310)..(310): n includes a, c, g, or t, or contains no nucleotide
  misc_feature (350)..(350): n includes a, c, g, or t, or contains no nucleotide
tgtgatgtcccaacttgtaaaaattaaaagttatggtactatgttagccccataattttttttttccttttannnnnnnnnnnnnnnnnnnnctcctctgtccaggcactgctgcccagcctccaagctccatctccactccagattttttacagctgcctgcagtactttacctcctatcagaagtttctcagctcccaaggctctgagcaaatgtggctcctgggggttctttcttccnnnnnnnnnnnnnnnnnnnnnnnnnnnnnnnnnnnnnnnnnnnnnnnnnnnnnnnnnnnnatgaaagatngctgtgcctctgcctgtctcccccaccgggctgggagctntgcagagcaggaaacatgactcgtatatgtctcaggtccctgcagggccaagcacctagcctcgctcttggcaggtactcagcgaatgaatgctgtatatgttgggtgcaaagttcccta

SEQ ID NO: 4154 - DNA, 523 bp, Homo sapiens
attactgacatgagcgataccaattggtggaaaggcacctccaaaggcaggactggactaattccaagcaactatgtggctgagcaggcagaatccattgacaatccattgcatgaagcagcaaaaagaggcaacttgagctggttgagagagtgtttggacaacagagtgggtgttaatggcttagacaaagctggaagcactgccttatactgggcttgccacgggggccacaaagatatagtggaaatgctatttactcaaccaaatattgaactgaaccagcagaacaagttgggagatacagctttcgatgctgctgcctggaagggttatgcagatatcgtccagttgcttctggcaaaaggtgctagaacagacttaagaaacattgagaagaagctggccttcgacatggctaccaatgctgcctgtgcatctctcctgaaaaagaaacagggaacagatgcagttcgaacattaagcaatgccgaggactatctcgatgatgaagactcagatt

SEQ ID NO: 4155 - DNA, 106 bp, Homo sapiens
agtctgcagaatggtcgcactggaggttcaagctaactggcctccagccacattctcatagcaggtaggacttcagccttccagacactgcccttagaatctggaa

SEQ ID NO: 4156 - DNA, 345 bp, Homo sapiens
  misc_feature (66)..(84): n includes a, c, g, or t, or contains no nucleotide
  misc_feature (140)..(140): n includes a, c, g, or t, or contains no nucleotide
  misc_feature (181)..(181): n includes a, c, g, or t, or contains no nucleotide
  misc_feature (217)..(217): n includes a, c, g, or t, or contains no nucleotide
  misc_feature (238)..(264): n includes a, c, g, or t, or contains no nucleotide
ctcctgcttggattctgagtggtcagagatctgtaaagcatgactttcaaggatggttcttagggnnnnnnnnnnnnnnnnnnncttcctccaggatgcctgcatgggaccccacccggagctggtgtggccattccccnagtgccactggcccatggatgggggtgggtgctggtgccanctgggctgggtgtgggttctgtgtccttccaggatntgtgtcatttcccatgagggnnnnnnnnnnnnnnnnnnnnnnnnnnncaggctggagtattcttagttctactggttctacactgtgaggtggcaatgggatttgctcagatgccacccaataaaatg

SEQ ID NO: 4157 - DNA, 494 bp, Homo sapiens
  misc_feature (128)..(143): n includes a, c, g, or t, or contains no nucleotide
  misc_feature (376)..(377): n includes a, c, g, or t, or contains no nucleotide
  misc_feature (380)..(381): n includes a, c, g, or t, or contains no nucleotide
  misc_feature (383)..(390): n includes a, c, g, or t, or contains no nucleotide
  misc_feature (392)..(392): n includes a, c, g, or t, or contains no nucleotide
  misc_feature (394)..(394): n includes a, c, g, or t, or contains no nucleotide
  misc_feature (445)..(445): n includes a, c, g, or t, or contains no nucleotide
tcgtctcctatgagcaacgccagaattataaggatgacttcaatgcagagtatgatgagtacagagctttgcatgccaggatggagactgtagctagaagatttatcaaactagatgcacaaagaaannnnnnnnnnnnnnnntcaaaagagtatcagaatgttcatgaagaagtcttacaagaatatcagaagataaagcagtctagtcccaattaccatgaagaaaaatacagatgtgaatatcttcataacaagctggctcacatcaaaaggctaataggtgaatttgaccaacagcaagcagagtcatggtcctagaactctgcttggaccagaagatgtgaataaacttaagcttatttatttaaaattcnnaannannnnnnnnanantctaaaaaggtgaaactttggctgttgaaagtttcagtattagtaaacttngagttactttttcttttccattttactttgcttccctgcatttcggaag

SEQ ID NO: 4158 - DNA, 589 bp, Homo sapiens
  misc_feature (256)..(272): n includes a, c, g, or t, or contains no nucleotide
  misc_feature (465)..(479): n includes a, c, g, or t, or contains no nucleotide
tgaactgcacgataaaggaactcaggcgcctcttcttagttgatgatttagttgattctctgaagtttgcagtgttgatgtgggtatttacctatgttggtgccttgtttaatggtctgacactactgattttggctctcatttcactcttcagtgttcctgttatttatgaacggcatcaggcacagatagatcattatctaggacttgcaaataagaatgttaaagatgctatggctaaaatccaagcaaaaannnnnnnnnnnnnnnnnaaagctgaatgaaaacgcccaaaataattagtaggagttcatctttaaaggggatattcatttgattatacgggggagggtcagggaagaacgaaccttgacgttgcagtgcagtttcacagatcgttgttagatctttatttttagccatgcactgttgtgaggaaaaattacctgtcttgactgccatgtnnnnnnnnnnnnnnntattgtaagctgctatgtatggatttaaaccgtaatcatatctttttcctatctgaggcactggtggaataaaaaacctgtatattttactttgttgcagatagtcttgc

SEQ ID NO: 4159 - DNA, 403 bp, Homo sapiens
  misc_feature (45)..(45): n includes a, c, g, or t, or contains no nucleotide
tctccacagtgctggcctctgctggggaaggcatctttcccaaanggtatccccaagtaccatgttgaaaatgtcctcagtctgttgctccatctttctgagcctctgcttggtatgtcatgtttatggtcactacggatgagtgtgtgcagagtttgggttgattcttttaaatgctacaaacaagagctatttcttttcaataaaaaaggtttggattcggcctcttcctctgagcccacctcccagccctccagggagcatcagtgtacctgagtcactttgtctgcatctcttcatcccacaaaacacgaggctgggtctcattcagcggcctctcaccaaccttcaagatccagaagaaaacaggaacgttcagctctgccctgtgtcgtatctaatc

SEQ ID NO: 4160 - DNA, 508 bp, Homo sapiens
  misc_feature (152)..(152): n includes a, c, g, or t, or contains no nucleotide
  misc_feature (207)..(208): n includes a, c, g, or t, or contains no nucleotide
  misc_feature (222)..(222): n includes a, c, g, or t, or contains no nucleotide
  misc_feature (231)..(231): n includes a, c, g, or t, or contains no nucleotide
  misc_feature (241)..(241): n includes a, c, g, or t, or contains no nucleotide
  misc_feature (246)..(246): n includes a, c, g, or t, or contains no nucleotide
  misc_feature (251)..(251): n includes a, c, g, or t, or contains no nucleotide
  misc_feature (273)..(273): n includes a, c, g, or t, or contains no nucleotide
  misc_feature (277)..(277): n includes a, c, g, or t, or contains no nucleotide
  misc_feature (292)..(292): n includes a, c, g, or t, or contains no nucleotide
  misc_feature (298)..(298): n includes a, c, g, or t, or contains no nucleotide
  misc_feature (306)..(306): n includes a, c, g, or t, or contains no nucleotide
  misc_feature (314)..(314): n includes a, c, g, or t, or contains no nucleotide
  misc_feature (320)..(320): n includes a, c, g, or t, or contains no nucleotide
  misc_feature (333)..(333): n includes a, c, g, or t, or contains no nucleotide
  misc_feature (360)..(360): n includes a, c, g, or t, or contains no nucleotide
cctgggcctgtctcagattgggattaacataaaagagtggaactatccaaaagagacagggagaaataaataaattgcctcccttcctccgctcccctttcccatcaccccttccccatttcctcttccttctctactcatgccagattttngggattacaaatagaagcttcttgctcctgtttaactccctagttacccaccctnnaatttgcccttcanggacccttnctactttttnccttncctgnccctgtacctctctctgctccntcancccccacccctgtancccagnccaccttncctgactngggaanggacataaaaggntttaatgtcagggtcaaactacattgnagcccctgaggacaggggcatctctgggctgagcctactgtctccttcccactgtcctttctccaggccctcagatggcacattagggtgggcgtgctgcgggtgggtatcccacctccagcccacagtgctcagttgtactttttat

SEQ ID NO: 4161 - DNA, 473 bp, Homo sapiens
  misc_feature (116)..(119): n includes a, c, g, or t, or contains no nucleotide
  misc_feature (121)..(122): n includes a, c, g, or t, or contains no nucleotide
  misc_feature (146)..(146): n includes a, c, g, or t, or contains no nucleotide
  misc_feature (239)..(239): n includes a, c, g, or t, or contains no nucleotide
  misc_feature (251)..(251): n includes a, c, g, or t, or contains no nucleotide
  misc_feature (331)..(346): n includes a, c, g, or t, or contains no nucleotide
  misc_feature (382)..(443): n includes a, c, g, or t, or contains no nucleotide
tgctgactgagtgactggagacagggatgatggagagttcaggaagggctgggcagaggaggctggggccacctctggagggtgtcctgctgttcctgttggccccagctgcactnnnngnnccttcctgtggcccctttccccangcaggggcggccgcagctctcacccactttctcctgcagacggcgaggggaccgacctgtttgccgtggctgtccatgagtttggccacgccntgggcctgggcnactcctcagcccccaactccattatgaggcccttctaccagggtccggtgggcgaccctgacaagtaccgcctgtctcannnnnnnnnnnnnnnnctgcagcaactctatggtagggggagagggacctgnnnnnnnnnnnnnnnnnnnnnnnnnnnnnnnnnnnnnnnnnnnnnnnnnnnnnnnnnnnnnncctgactctttcctcacagggaaggcgccc

SEQ ID NO: 4162 - DNA, 582 bp, Homo sapiens
  misc_feature (138)..(139): n includes a, c, g, or t, or contains no nucleotide
  misc_feature (146)..(146): n includes a, c, g, or t, or contains no nucleotide
  misc_feature (153)..(153): n includes a, c, g, or t, or contains no nucleotide
ccactttgatgctatttgggttatgatggggcaagatggcagaggtattgggtttttttgtttttttccattcctctctacttctgtttcctagctttttctttctggagtttaagtacagtgatggttggcttgagnnccttttnaaatctngcccagtataaacattagcctgcttaatatttagacatttataggtagaattctgagcactcaactcatgtttggcattttaaagtaaaaacaagtgtgacttcgaggaccaaagaaattgtcagctatacatttatctttatgaactcatttatattcctttttaatgactcgttgttctaacatttcctagaagtgttcttataaaggtctaatgtatccacaggctgttgtcttattagtaaatgcaaagtaatgactttgtctgttttactctagtctttagtacttcaaaattaccttttcatatccatgatcttgagtccatttgggggatttttaagaatttgatgtatttcaatacactgttcaaaattaaattgtttaattttatgtatgagtatgtatgttcctgaagttggtcctatt

SEQ ID NO: 4163 - DNA, 550 bp, Homo sapiens
  misc_feature (51)..(51): n includes a, c, g, or t, or contains no nucleotide
  misc_feature (123)..(139): n includes a, c, g, or t, or contains no nucleotide
  misc_feature (272)..(274): n includes a, c, g, or t, or contains no nucleotide
  misc_feature (301)..(369): n includes a, c, g, or t, or contains no nucleotide
aatgtggactcaatccctagggctggcagaaagggaacagaaaggtttttnagtacggctatagcctggactttcctgttgtctacaccaatgcccaactgcctgccttagggtagtgctaannnnnnnnnnnnnnnnncagccaggacagtcagctctctcctttcagggccaatccccagcccttttgttgagccaggcctctctcacctctcctactcacttaaagcccgcctgacagaaaccacggccacatttggttctaagaaacnnncctctgtcattcgctcccacattctgnnnnnnnnnnnnnnnnnnnnnnnnnnnnnnnnnnnnnnnnnnnnnnnnnnnnnnnnnnnnnnnnnnnnnaagggggcaagaagtagcagtgtctgtaaaagagcctagtttttaatagctatggaatcaattcaatttggactggtgtgctctctttaaatcaagtcctttaattaagactgaaaatatataagctcagattatttaaatgggaatatttataaatgagcaaatatcatactgttcaatg

SEQ ID NO: 4164 - DNA, 247 bp, Homo sapiens
ctagtcaccgacagcggccttgaagacagagcaaagcgcccacccaggtcccccgactgcctgtctccatgaggtactggtcccttccttttgttaatgtgatgtgccactatattttacacgtatctcttggtatgcatcttttatagacgctcttttctaagtggcgtgtgcatagcgtcctgccctgccccctcgggggcctgtggtggctccccctctgcttctcggggtccagtgcattttg

SEQ ID NO: 4165 - DNA, 216 bp, Homo sapiens
aaatcatgttgattttgctctttgctttttcgttgtctgagaaattgttggcgtagatttggcttctggtatgtgtttctgattgcttcctgttgagcacaaagtgagagctgccactgagcagccctgccaggggtgctgtttcaggctgggcatcgccaggcggcctccctgcaaaccaagggctgggggcaaaggggcatgatccagggtccc

SEQ ID NO: 4166 - DNA, 608 bp, Homo sapiens
  misc_feature (26)..(26): n includes a, c, g, or t, or contains no nucleotide
  misc_feature (32)..(32): n includes a, c, g, or t, or contains no nucleotide
  misc_feature (69)..(84): n includes a, c, g, or t, or contains no nucleotide
  misc_feature (111)..(111): n includes a, c, g, or t, or contains no nucleotide
  misc_feature (116)..(117): n includes a, c, g, or t, or contains no nucleotide
  misc_feature (119)..(137): n includes a, c, g, or t, or contains no nucleotide
  misc_feature (185)..(185): n includes a, c, g, or t, or contains no nucleotide
gtgctgcctttgcatgggcctggccnggctcncattcgtcagtgactccaaccctcctgcttgctgtannnnnnnnnnnnnnnnccccacaggtcaggtggagggtggggncgtgnncnnnnnnnnnnnnnnnnnnnacagtctttttctcaggagctacaaagatctcttcctgttactaaatngtcgcaccccagcagcctctctcgcacaccggggccctgcatgtcagatggcgtggtctgcagggggagctctgtgccttagtggctcttggcaggacactgagggcctgcctgtggtgtgcccggctctgccactcccgggaggggaagggctgctcagctcaaggtgtcctgttcggtagagcaagtgtcctctgacagccgtgtccccggacagttcagacacccttggggatggcactccacacacgacagagatgcaggggccagggaagcccagcgctcggtgcccttcgtccagggttaaaatcggcctgtggggtgtggtgagaaggcaggttgtgcgggtgttgaccgatgtatcttttccttaaagttattataataatgggtaatttgtcaataaagcattcctttggggga

SEQ ID NO: 4167 - DNA, 531 bp, Homo sapiens
  misc_feature (34)..(71): n includes a, c, g, or t, or contains no nucleotide
  misc_feature (123)..(137): n includes a, c, g, or t, or contains no nucleotide
  misc_feature (139)..(139): n includes a, c, g, or t, or contains no nucleotide
  misc_feature (256)..(284): n includes a, c, g, or t, or contains no nucleotide
  misc_feature (372)..(398): n includes a, c, g, or t, or contains no nucleotide
  misc_feature (487)..(503): n includes a, c, g, or t, or contains no nucleotide
gttctcggccagatggtgattgatgaggagcttnnnnnnnnnnnnnnnnnnnnnnnnnnnnnnnnnnnnnncattcatggctgaccagggccatgtacagccggcgctcgaagatgaaccctnnnnnnnnnnnnnnngntcatcggaggctatgctgatggagagagcttcctcggttatgtggacatgcttggtgtagcctatgaagccccttcgctggccactggttatggtgcatacttggctcagcctctgnnnnnnnnnnnnnnnnnnnnnnnnnnnnngctaagccagaccgaggcccgcgacttagtagaacgctgcatgcgagtgctgtactaccgagatgcccgttcttacaaccggtttcannnnnnnnnnnnnnnnnnnnnnnnnnntgaaatagagggaccattgtctacagagaccaactgggatattgcccacatgatcagtggctttgaatgaaatacagatgcattatccnnnnnnnnnnnnnnnnnacttttaactttgaacttggctagttca

SEQ ID NO: 4168 - DNA, 595 bp, Homo sapiens
ttgtacagaagcacatgtctttaatgtcttcagacaaaaaagccttacattaatttaatgtttgcactctgaggtgcaacttaacagggagggcctgagaaaagaatgggagggggctattaattattttttagcaaaatgttgcctttgtcttgtgcaaacatgtagaatatgctctttaatctagtaaaatatttttttaaaaggtagagatgctttgttattgtaatcataaacttcctgaaattcttgtaattttttcccatacttatcagaagtgtgtttaccaacttatttttgtttgaaagtgtgattttttttttccttcccaacctctcttgcaaaaaaagaaatgggtttctgctaatgaattgagcagagatctaatattttatatgccttttgagctgtgtaagttaatatttgatacttgacaatttgttttattatgtaattgataaaatggtgatgtgtattaatgttagttcaaccatatatttatactgtctggggatgtgtggttatagttctgtgggagaaataattttgtcagtgttcaccagcttgtaaaaacttagtgcgagagctgaaacat

SEQ ID NO: 4169 - DNA, 469 bp, Homo sapiens
tctcctgcccggagggcctgcggctggtggggtccgaagtgggagacaggacgctgcctggatggccagtcacactgccagaccctggcatgtccctgacagacaggggagtgatgagctacgtgaggcatgtgctgagctgcctgggtgggggactggctctctggcgggccgggcagtggctctgggcccagcggctggggcactgccacacatactgggcagtgagcgaggagctgctccccaacagcgggcatgggcctgatggcgaggtccccaaggacaaggaaggaggcgtgtttgacctggggcccttcattgtagatctgattaccttcacggaaggaagcggacgctcaccacgctatgccctctggttctgtgtgggggagtcatggccccaggaccagccgtggaccaagaggctcgtgatggtcaaggttgtgcccacgtgcctcagggccttggt

SEQ ID NO: 4170 - DNA, 509 bp, Homo sapiens
  misc_feature (100)..(100): n includes a, c, g, or t, or contains no nucleotide
  misc_feature (110)..(110): n includes a, c, g, or t, or contains no nucleotide
  misc_feature (163)..(163): n includes a, c, g, or t, or contains no nucleotide
  misc_feature (185)..(185): n includes a, c, g, or t, or contains no nucleotide
  misc_feature (257)..(260): n includes a, c, g, or t, or contains no nucleotide
  misc_feature (300)..(300): n includes a, c, g, or t, or contains no nucleotide
  misc_feature (307)..(307): n includes a, c, g, or t, or contains no nucleotide
  misc_feature (348)..(367): n includes a, c, g, or t, or contains no nucleotide
  misc_feature (422)..(483): n includes a, c, g, or t, or contains no nucleotide
tgacgcagaccgtggcccacctgaagcagcaagtgagcgggctggagggtgtgcaggacgacctgttctggctgaccttcgaggggaagcccctggaggnaccagctccngctgggggagtacggcctcaagcccctgagcaccgtgttcatgaatctgcgcntgcggggaggcggcacagagcntggcgggcggagctaagggcctccaccagcatccgagcaggatcaagggccggaaataaaggctgttgtaannnngaaaaaaaaaaaaaaaaaaaaaaaaaaaaaaaaaaaaaanccgttgntaggtaatttacttgcatgccgctgtttaaatgtactggannnnnnnnnnnnnnnnnnnngagaaccgttccgatggtatagaagccgccgtgcgtctaaatccatgatgcatgnnnnnnnnnnnnnnnnnnnnnnnnnnnnnnnnnnnnnnnnnnnnnnnnnnnnnnnnnnnnnngttggtttcccaaaagggtgcctgat

SEQ ID NO: 4171 - DNA, 123 bp, Homo sapiens
aaagttcaggtagttcatctagttcttcctcctctgttaagcagtatatatcctctcacaactctgtttttaaccatcccttaccccctcctccccctgtcacataccaggtgggctacggac

SEQ ID NO: 4172 - DNA, 520 bp, Homo sapiens
  misc_feature (139)..(153): n includes a, c, g, or t, or contains no nucleotide
  misc_feature (278)..(279): n includes a, c, g, or t, or contains no nucleotide
  misc_feature (333)..(455): n includes a, c, g, or t, or contains no nucleotide
  misc_feature (461)..(461): n includes a, c, g, or t, or contains no nucleotide
  misc_feature (472)..(495): n includes a, c, g, or t, or contains no nucleotide
ttcaagccagaggagctgcaccccacggccaccgtgctgaaggcccagttcccgagtgtggctgtggaagccagtgggggcatcaccctggacaacctcccccagttctgcgggccgcacatagacgtcatctccatgnnnnnnnnnnnnnnngcggccccagcccttgatttctccctcaagctgtttgccaaagaggtggctccagtgcccaaaatccactagtcctaaaccggaagaggatgacaccggccatgggttaacgtggctcctcaggnncctctgggtcacacatctttagggtcagtggccaatggggcacatttggcactnnnnnnnnnnnnnnnnnnnnnnnnnnnnnnnnnnnnnnnnnnnnnnnnnnnnnnnnnnnnnnnnnnnnnnnnnnnnnnnnnnnnnnnnnnnnnnnnnnnnnnnnnnnnnnnnnnnnnnnnnnnaaaaanaaaaaaaaaannnnnnnnnnnnnnnnnnnnnnnnaatgtcagaagttacctgggacagc

SEQ ID NO: 4173 - DNA, 453 bp, Homo sapiens
  misc_feature (166)..(168): n includes a, c, g, or t, or contains no nucleotide
  misc_feature (170)..(170): n includes a, c, g, or t, or contains no nucleotide
  misc_feature (222)..(384): n includes a, c, g, or t, or contains no nucleotide
agaagaggccaggttcgtgaagttcgtaaagaagagcaacgttatagtggtgaattatctggcattcgtgcaggagttaaaaagagcattaagcttaaatgaagtttttgcttagcataaggtttttggcagttttggatcaataaatttttacttttaactaaannnantgtattaatatataatactttaaattttaaaaattcttgtccacaaggaaannnnnnnnnnnnnnnnnnnnnnnnnnnnnnnnnnnnnnnnnnnnnnnnnnnnnnnnnnnnnnnnnnnnnnnnnnnnnnnnnnnnnnnnnnnnnnnnnnnnnnnnnnnnnnnnnnnnnnnnnnnnnnnnnnnnnnnnnnnnnnnnnnnnnnnnnnnnnnnnnnnacatgtgtaacttttcacataaagagaatgcatctttgacagttatcttatttgtaaggcagcctataa

SEQ ID NO: 4174 - DNA, 484 bp, Homo sapiens
atgagctggacagcaagctcaattataagcctccaccacagaagtccctgaaagagctgcaggaaatggacaaagatgatgagagtctaattaagtacaagaaaacgctgctgggagatggtcctgtggtgacagatccgaaagcccccaatgtcgttgtcacccggctcaccctggtttgtgagagtgccccgggaccaatcaccatggaccttactggagatctggaagccctcaaaaaggaaaccattgtgttaaaggaaggttctgaatatagagtcaagattcacttcaaagtgaacagggatattgtgtcaggcctgaaatacgttcagcacacctacaggactggggtgaaagtggataaggcaacatttatggttggcagctatggacctcggcctgaggagtatgagttcctcactccagttgaggaggctcccaagggcatgctggcgcgaggcacgtaccacaacaagtcctt

SEQ ID NO: 4175 - DNA, 216 bp, Homo sapiens
  misc_feature (126)..(126): n includes a, c, g, or t, or contains no nucleotide
agtcggtgacctttgaggacgtggctgtgtacttcacccaggcggaatgggatggcctgtcccctgcacagaggaccctgtacagggatgtgatgctggagaattatgggaatgtggcctccctgnggatttccacttctcaaacctgctgtgatctcacaactggagggaggaagtgagctggggggctcatctccactggctgcaggaacaggc

SEQ ID NO: 4176 - DNA, 576 bp, Homo sapiens
  misc_feature (36)..(36): n includes a, c, g, or t, or contains no nucleotide
  misc_feature (77)..(77): n includes a, c, g, or t, or contains no nucleotide
  misc_feature (98)..(98): n includes a, c, g, or t, or contains no nucleotide
  misc_feature (116)..(130): n includes a, c, g, or t, or contains no nucleotide
  misc_feature (156)..(156): n includes a, c, g, or t, or contains no nucleotide
  misc_feature (247)..(285): n includes a, c, g, or t, or contains no nucleotide
  misc_feature (309)..(309): n includes a, c, g, or t, or contains no nucleotide
  misc_feature (314)..(314): n includes a, c, g, or t, or contains no nucleotide
  misc_feature (363)..(449): n includes a, c, g, or t, or contains no nucleotide
ggccatgacagacgaagagaaggcaaaggcagtgcnacttatccaccaggagggcaaccggttgtaccgcgaggggncatgtgaaggaggctgctgcnaagtactacgatgccatnnnnnnnnnnnnnnncctgcagatgaaggaacagcctgggntcccctgaatggatccagctggacaagcagatcacgccgctgctgctcaactactgccagtgcaagctggtggtcgaggagtactacgagnnnnnnnnnnnnnnnnnnnnnnnnnnnnnnnnnnnnnnngacaacgtcaaggcctacttcaancgggncaaggcccacgcggccgtgtggaatgcccaggaggcccaggctgacttnnnnnnnnnnnnnnnnnnnnnnnnnnnnnnnnnnnnnnnnnnnnnnnnnnnnnnnnnnnnnnnnnnnnnnnnnnnnnnnnnnnnnnncgaagaggacaaagcccggttccgggggatcttctcccattgacaggagcacttggccctgccttacctgccaagcccactgctgcagctgccagcccccctgcccgtgctgcgtcatgcttctgtg

SEQ ID NO: 4177 - DNA, 75 bp, Homo sapiens
tggtagtgacctcaccagaggagttggcaattcctaagtgctgcctggaggcctctacagagacataatgttgga

SEQ ID NO: 4178 - DNA, 505 bp, Homo sapiens
  misc_feature (259)..(278): n includes a, c, g, or t, or contains no nucleotide
  misc_feature (384)..(400): n includes a, c, g, or t, or contains no nucleotide
  misc_feature (420)..(427): n includes a, c, g, or t, or contains no nucleotide
  misc_feature (429)..(429): n includes a, c, g, or t, or contains no nucleotide
  misc_feature (437)..(455): n includes a, c, g, or t, or contains no nucleotide
  misc_feature (458)..(458): n includes a, c, g, or t, or contains no nucleotide
  misc_feature (461)..(462): n includes a, c, g, or t, or contains no nucleotide
  misc_feature (464)..(464): n includes a, c, g, or t, or contains no nucleotide
  misc_feature (467)..(470): n includes a, c, g, or t, or contains no nucleotide
ccaacttctgttattgtgtgttaagtttttcatctgtgcatcaaatcacaaaaagaataaatagagctttttcctttatcagtcccttgggcacagcaggtcctgaacaccctgctctacaatgttgcatcaagagttcaaacaacaaaataaaaaatattaagaggaaatccccatcctgtgacttgagtcccttaagtctacaggggctggtgacctctttttgctaataggaaaatcacattactacaaaatgggnnnnnnnnnnnnnnnnnnnngtagacacctgcacgcataggattgaagacagtacaggctgctgtacagagaagcgcctctcacatctgaactgcatactgagcgggcaagtcggttgtaagttcnnnnnnnnnnnnnnnnnatgcaaaaaaaaaaaaaaannnnnnnntntcacaagnnnnnnnnnnnnnnnnnnnttntcnnanttnnnnctttttttttttttttgcctgtggtagacacctgc

SEQ ID NO: 4179 - DNA, 616 bp, Homo sapiens
  misc_feature (26)..(26): n includes a, c, g, or t, or contains no nucleotide
  misc_feature (62)..(62): n includes a, c, g, or t, or contains no nucleotide
  misc_feature (69)..(69): n includes a, c, g, or t, or contains no nucleotide
  misc_feature (81)..(81): n includes a, c, g, or t, or contains no nucleotide
  misc_feature (85)..(85): n includes a, c, g, or t, or contains no nucleotide
  misc_feature (88)..(90): n includes a, c, g, or t, or contains no nucleotide
  misc_feature (332)..(333): n includes a, c, g, or t, or contains no nucleotide
  misc_feature (335)..(339): n includes a, c, g, or t, or contains no nucleotide
  misc_feature (426)..(426): n includes a, c, g, or t, or contains no nucleotide
caagcccagggcatagatgctgaganagcctctccctctcagtgcagggacgtcacccctgnccaggcnaagcccagggcnacanagnnngggacggcctctccctctcagtgtgaggcttcacccatgctaggcaagcccagggcacagatgccgggatggcccctccctctcagtgcgggaacgtcacccctgccaggcaagcccagggcacagatgctgcgatggcctcttcctcttaagtgtggggcctcacccctgcttttctttctttttttgtattgtcaaaattgtatttccatattgaagcagcttgagtttctactgaaaannannnnnaattatttcactattactgtaaagggttcatcttactctggcattctgagaattagactgaaagtttaatttctgcagttccctcanattcagattctttctttgatgttataacacaaagtcattcctactcaaatgtaataaaattgaggctccacggaggcccgtgtccacatcagctgcagctcccactcagacagacggcctgccccacagcctgccctttgctgaagataccctcgctttatacttgcatttcgcttttcagtaaaaacag

SEQ ID NO: 4180 - DNA, 567 bp, Homo sapiens
  misc_feature (79)..(119): n includes a, c, g, or t, or contains no nucleotide
  misc_feature (283)..(283): n includes a, c, g, or t, or contains no nucleotide
  misc_feature (285)..(285): n includes a, c, g, or t, or contains no nucleotide
  misc_feature (445)..(460): n includes a, c, g, or t, or contains no nucleotide
  misc_feature (465)..(481): n includes a, c, g, or t, or contains no nucleotide
tccagtctggatcgtttgacgggacttcaggttctttctgaaatcgccgtgttactgttgcactgatgtccggagagannnnnnnnnnnnnnnnnnnnnnnnnnnnnnnnnnnnnnnnnagggattggcaattgtccccagggacaaaacactgtgtcccccccagtgcagggaaccgtgataagcctttctggtttcggagcacgtaaatgcgtccctgtacagatagtggggattttttgttatgtttgcactttgtatattggttgaaactgttatcacntntatatatatatatacacacatatatataaaatctatttatttttgcaaaccctggttgctgtatttgttcagtgactattctcggggccctgtgtagggggttattgcctctgaaatgcctcttctttatgtacaaagattatttgcacgaactggactnnnnnnnnnnnnnnnngggannnnnnnnnnnnnnnnntatgtatgagtggcttctgggagatgggtgtcactttttaaaccactgtatagaaggtttttgtagcctgaatgtcttactgtgat

SEQ ID NO: 4181 - DNA, 524 bp, Homo sapiens
  misc_feature (183)..(198): n includes a, c, g, or t, or contains no nucleotide
  misc_feature (272)..(272): n includes a, c, g, or t, or contains no nucleotide
gggcaagataacctctcaagtgtgaaggagactcagaagaagtgggccgagcaatacctgaagatcatggggaagatcttagaccaaggggaggacttcccagcatcagagatgacacggatcgccaggctgattgagaagaacaagatgagtgacgggaagaaggaggagctccagaagagnnnnnnnnnnnnnnnngccttccagaagaagggggccgagaaagaggagctgtaaaaaggctgtctgtgattttccagggtttggtgggngtagggaggggagagttaacctgctggctgtgagtcccttgtggaatataagggggtagtgggaaaagtggtactaacccacgattctgagccctgagtatgcctggacattgatgctaacatgaccatgcttgggatgtctctagctggtctggggatagctggagcacttactcaggtggctggtgaaatgacacctcagaaggaatgagtgctatagagaggagagaggagtgtactgcccaggtcttt

SEQ ID NO: 4182 - DNA, 371 bp, Homo sapiens
  misc_feature (55)..(55): n includes a, c, g, or t, or contains no nucleotide
  misc_feature (68)..(93): n includes a, c, g, or t, or contains no nucleotide
  misc_feature (256)..(273): n includes a, c, g, or t, or contains no nucleotide
  misc_feature (340)..(340): n includes a, c, g, or t, or contains no nucleotide
ggagactatcgacaatatcagtaggacttctttcctaggatttctttaacagaancgagttgtggttnnnnnnnnnnnnnnnnnnnnnnnnnnacagtctgtttttaaaaccataggtgggacagctatggccaataggctataaagagacatttagcacttttttctatttaaaggaacaagcggggaagggtgctaaaagataatacgtttatttattcacacttgaattgcatttgtgatcaaaataaatgtnnnnnnnnnnnnnnnnnnatacagtaagtgcttgaaagatgaaggaccaaaaggccaaaaaacagtgaaatatgatcatcatctncttgcggacttctctgcctggttttgtgtgt

SEQ ID NO: 4183 - DNA, 579 bp, Homo sapiens
  misc_feature (32)..(47): n includes a, c, g, or t, or contains no nucleotide
  misc_feature (225)..(225): n includes a, c, g, or t, or contains no nucleotide
  misc_feature (286)..(345): n includes a, c, g, or t, or contains no nucleotide
  misc_feature (372)..(374): n includes a, c, g, or t, or contains no nucleotide
  misc_feature (398)..(408): n includes a, c, g, or t, or contains no nucleotide
  misc_feature (540)..(554): n includes a, c, g, or t, or contains no nucleotide
ccatggcccaccttggagcagagagccaagcnnnnnnnnnnnnnnnnctttctggccaagtctggccagcctggccctgcaggtctcccatgaaggccaccccatggtctgatgggcatgaagcatctcagactccttggcaaaaaacggagtccgcaggccgcaggtgttgtgaagaccactcgttctgtggttggggtcctgcaagaaggcctcctcagcccnggggctatggccctgaccccagctctccactctgctgttagagtggcagctccgagctggnnnnnnnnnnnnnnnnnnnnnnnnnnnnnnnnnnnnnnnnnnnnnnnnnnnnnnnnnnnnttaaagcattgatggcctgtggacctnnnaaaaaaaaaaaaaaaaaaaaaaannnnnnnnnnntacagtggcctggtgcctcatactcctcaggtgcaggggcagggacaagagaagggggaagtaaccccatcagggaggagtggagggtgcctgagccgccatgtgggcattgggggagtgatgggaatgccnnnnnnnnnnnnnnngactactgactgagcacccactact

SEQ ID NO: 4184 - DNA, 533 bp, Homo sapiens
  misc_feature (67)..(124): n includes a, c, g, or t, or contains no nucleotide
  misc_feature (176)..(176): n includes a, c, g, or t, or contains no nucleotide
  misc_feature (375)..(389): n includes a, c, g, or t, or contains no nucleotide
  misc_feature (405)..(407): n includes a, c, g, or t, or contains no nucleotide
  misc_feature (411)..(411): n includes a, c, g, or t, or contains no nucleotide
  misc_feature (413)..(413): n includes a, c, g, or t, or contains no nucleotide
  misc_feature (415)..(430): n includes a, c, g, or t, or contains no nucleotide
tcagcactgtttagccagctctggctaatgaccaagcaagtggtttgtttttgcactcctcccttannnnnnnnnnnnnnnnnnnnnnnnnnnnnnnnnnnnnnnnnnnnnnnnnnnnnnnnnncttctacttcctgggaaagcaggatatggccattggaacctgcaacatggcnctggatgtcctacgagatccagagctcaactggcaggcgtactgcacaagggccaagatccacatcagagcctacctgcatgacctcaagcgggccaagatgggtctcgggggcatgcctgacaggaaccacctggcctgtgccaaggctgaccttgaggaagtggtcagggtgtgcccaggcttcaaggcgtacctgnnnnnnnnnnnnnnntactactatatgggcnnngacncngnnnnnnnnnnnnnnnncggtggacgaggcggcgctgaaccaggcgctggtgttcctggccaaggcgggcgagtcggagctgggtgccacgctgcccgagctgcagctgctgcgcggcaa

SEQ ID NO: 4185 - DNA, 299 bp, Homo sapiens
  misc_feature (256)..(273): n includes a, c, g, or t, or contains no nucleotide
gtgatttttctatcggcacaaaagcactatatggactggtaatggttacaggttcagagattacccagtgaggccttattcctcccttccccccaaaactgacacctttgttagccacctccccacccacatacatttctgccagtgttcacaatgacactcagcggtcatgtctggacatgagtgcccagggaatatgcccaagctatgccttgtcctcttgtcctgtttgcatttcactgggagcttgcactannnnnnnnnnnnnnnnnngcagtgatcagggtcctgcaagcagt

SEQ ID NO: 4186 - DNA, 401 bp, Homo sapiens
  misc_feature (70)..(70): n includes a, c, g, or t, or contains no nucleotide
  misc_feature (97)..(97): n includes a, c, g, or t, or contains no nucleotide
  misc_feature (118)..(118): n includes a, c, g, or t, or contains no nucleotide
  misc_feature (192)..(233): n includes a, c, g, or t, or contains no nucleotide
  misc_feature (242)..(257): n includes a, c, g, or t, or contains no nucleotide
  misc_feature (265)..(299): n includes a, c, g, or t, or contains no nucleotide
  misc_feature (315)..(315): n includes a, c, g, or t, or contains no nucleotide
  misc_feature (328)..(329): n includes a, c, g, or t, or contains no nucleotide
  misc_feature (334)..(334): n includes a, c, g, or t, or contains no nucleotide
  misc_feature (336)..(336): n includes a, c, g, or t, or contains no nucleotide
  misc_feature (338)..(359): n includes a, c, g, or t, or contains no nucleotide
  misc_feature (373)..(373): n includes a, c, g, or t, or contains no nucleotide
gtttcaaatctctcctttcagggctttatttgaatggacagttcgacctcttactctctcttgtggtttngaggcacccacaccccccgctttcctntatctccagggactctcaggntaacctttgagatcactcagctcccatctcctttcagaaaaattcaaggtcctcctctagaagtttcaaatctnnnnnnnnnnnnnnnnnnnnnnnnnnnnnnnnnnnnnnnnnntactcgtcnnnnnnnnnnnnnnnnttgattcnnnnnnnnnnnnnnnnnnnnnnnnnnnnnnnnnnngtccccgattccgtgnccacttcacatcnnccccnancnnnnnnnnnnnnnnnnnnnnnngagtagaattcagnttggccttaccaggtgacttgcaaaggg

SEQ ID NO: 4187 - DNA, 521 bp, Homo sapiens
caagctggaggacttggtgccccctccacccatcattgacaagatcttcatggacacgctgcccttctgacccctgcctgggaacacgtgtgcacatgcgcactctcatatgccaccccatgtgcctttagtccacggacccccagagcacccccaagcctgggcttgagctgcagaatgactccaccttctcacctgctccaggaggtttgcagggagctcaagcccttggggagggggatgccttcatgggggtgaccccacgatttgtcttatcccccccagcctggccccggcctttatgttttttgtaagataaaccgtttttaacacatagcgccgtgctgtaaataagcccagtgctgctgtaaatacaggaagaaagagcttgaggtgggagcggggctgggaggaagggatgggccccgccttcctgggcagcctttccagcctcctgcctggctctctcttcctaccctccttccacatgtacataaactgtcactctaggaagaagacaa

SEQ ID NO: 4188 - DNA, 38 bp, Homo sapiens
cagtgacatagtgcagaggtagcagcagtcaggggtca

SEQ ID NO: 4189 - DNA, 193 bp, Homo sapiens
tgtcagggggacctgggcattctctggggccctcctttgacatatacccagcgagcactttgtgcacgcccagccccgcgcccggctctggagcacagaggtgccctgcgcataggtccccgcctcacggccgcaggtccatcagaacgcggcctcataggctgttgccggatcatggtgataggaggaaccc

SEQ ID NO: 4190 - DNA, 399 bp, Homo sapiens
  misc_feature (31)..(31): n includes a, c, g, or t, or contains no nucleotide
  misc_feature (45)..(45): n includes a, c, g, or t, or contains no nucleotide
tgtcagcatgtaaatcaggaacaactttctnccttattgacaatncccataataaaactcaggaaccaaggcaaaatgaattggcttctaggggtctgaaccttactgcccatacaagtgttgattcattttaatgctgtttatgatttctgcattggcagaaattttcatactttctatgtttttttaattactcagttttttattactaaaaatagcacatttgagtacatttgaaaagtagaaaaattagaaattattaactttattgaataagcaagaagtgcatcctaatcctttgattattaatgaggttgaatatttgtgtgctatcggtagctgtgtttctttgatcagatgttcctgtccttttgcccttctgttatctgttggagttgc

SEQ ID NO: 4191 - DNA, 611 bp, Homo sapiens
acttcaccatgcaatttgtgtcttcctaaagagagctgtacccagagagtcctgtgctgaatgtggactcaatccctagggctggcagaaagggaacagaaaggtttttgagtacggctatagcctggactttcctgttgtctacaccaatgcccaactgcctgccttagggtagtgctaagaggatctcctgtccatcagccaggacagtcagctctctcctttcagggccaatccccagcccttttgttgagccaggcctctctcacctctcctactcacttaaagcccgcctgacagaaaccacggccacatttggttctaagaaaccctctgtcattcgctcccacattctgatgagcaaccgcttccctatttatttatttatttgtttgtttgttttgattcattggtctaatttattcaaagggggcaagaagtagcagtgtctgtaaaagagcctagtttttaatagctatggaatcaattcaatttggactggtgtgctctctttaaatcaagtcctttaattaagactgaaaatatataagctcagattatttaaatgggaatatttataaatgagcaaatatcatactgttcaatggttc

SEQ ID NO: 4192 - DNA, 427 bp, Homo sapiens
cctggcacttggactctcctagtgactggggatgggacaagaagcctgtttggtggtctcttcacacggacgcgcgtgacacaatgctgggtggttttcccacgaatggaccctctcctggactcgcgttcccaaagatccacccaaatatcaaacacggacccatagacagccctgggggagcctcttacggaaaatccgacaagccttcagccacaggggagccacacagagatgtccaaactgtcgtgcaaacccagtgagacagaccgccaaataaacggactcagtggacactcagaccagctcccagatggccctggacagcaggagagggtgtgggatgaggcttcccagagaccctgggtctagaaagcggctcctgaaggtcccttattgtggctgatattaactgtcaatggttatg

SEQ ID NO: 4193 - DNA, 475 bp, Homo sapiens
  misc_feature (405)..(442): n includes a, c, g, or t, or contains no nucleotide
tgaggaactcattgtcactttcagaaattgagaaattgttagcaatgggtgaactgagctcatcaactccttggcatttgcagcctacctgtgcaatcataggagatggcctaaaggaaggacttgagaaactacatgatatgatcattaaaagaagaaaaatgttgcggcaacagaaaaagaaaagatgaatatcaatacctattatatctgtgtggagtaggttttctctggtctgattttgacaaatagaagagtgtctacagcgtggtttgcctgtctgccctcctggatgctattaaagctttgttttgttgaacaatcagatgcccaactctgttgccttgtggaagatgagtaaatgcagtgcttcttaaagtggtctcttctccctaccccacaaannnnnnnnnnnnnnnnnnnnnnnnnnnnnnnnnnnnnnagtaaattgaccagaacacagttgtgggaattt

SEQ ID NO: 4194 - DNA, 367 bp, Homo sapiens
  misc_feature (120)..(120): n includes a, c, g, or t, or contains no nucleotide
gaattggcaccaaagcagcagctgtattgccgcagttctagcttcaccttcacgatgtttcccttggtcaaaagcgcactaaatcgtctccaagttcgaagcattcagcaaacaatggcnaaggcagagccaccagaaacgtacacctgattttcatgacaaatacggtaatgctgtattagctagtggagccactttctgtattgttacatggacatatgtagcaacacaagtcggaatagaatggaacctgtcccctgttggcagagttaccccaaaggaatggaggaatcagtaatcatcccagctggtgtaataatgaattgtttaaaaaacagctcataattgatgccaaattaaagcactg

SEQ ID NO: 4195 - DNA, 597 bp, Homo sapiens
  misc_feature (117)..(117): n includes a, c, g, or t, or contains no nucleotide
  misc_feature (137)..(137): n includes a, c, g, or t, or contains no nucleotide
  misc_feature (141)..(142): n includes a, c, g, or t, or contains no nucleotide
  misc_feature (145)..(145): n includes a, c, g, or t, or contains no nucleotide
  misc_feature (147)..(147): n includes a, c, g, or t, or contains no nucleotide
  misc_feature (150)..(150): n includes a, c, g, or t, or contains no nucleotide
  misc_feature (154)..(154): n includes a, c, g, or t, or contains no nucleotide
  misc_feature (167)..(167): n includes a, c, g, or t, or contains no nucleotide
  misc_feature (169)..(169): n includes a, c, g, or t, or contains no nucleotide
  misc_feature (174)..(175): n includes a, c, g, or t, or contains no nucleotide
  misc_feature (179)..(179): n includes a, c, g, or t, or contains no nucleotide
  misc_feature (181)..(181): n includes a, c, g, or t, or contains no nucleotide
  misc_feature (184)..(184): n includes a, c, g, or t, or contains no nucleotide
  misc_feature (186)..(186): n includes a, c, g, or t, or contains no nucleotide
  misc_feature (188)..(188): n includes a, c, g, or t, or contains no nucleotide
  misc_feature (201)..(204): n includes a, c, g, or t, or contains no nucleotide
  misc_feature (208)..(208): n includes a, c, g, or t, or contains no nucleotide
  misc_feature (211)..(211): n includes a, c, g, or t, or contains no nucleotide
  misc_feature (217)..(217): n includes a, c, g, or t, or contains no nucleotide
  misc_feature (219)..(220): n includes a, c, g, or t, or contains no nucleotide
  misc_feature (235)..(235): n includes a, c, g, or t, or contains no nucleotide
  misc_feature (239)..(239): n includes a, c, g, or t, or contains no nucleotide
  misc_feature (242)..(242): n includes a, c, g, or t, or contains no nucleotide
  misc_feature (253)..(253): n includes a, c, g, or t, or contains no nucleotide
  misc_feature (261)..(261): n includes a, c, g, or t, or contains no nucleotide
  misc_feature (278)..(278): n includes a, c, g, or t, or contains no nucleotide
  misc_feature (298)..(298): n includes a, c, g, or t, or contains no nucleotide
  misc_feature (303)..(303): n includes a, c, g, or t, or contains no nucleotide
  misc_feature (315)..(315): n includes a, c, g, or t, or contains no nucleotide
  misc_feature (423)..(423): n includes a, c, g, or t, or contains no nucleotide
  misc_feature (428)..(428): n includes a, c, g, or t, or contains no nucleotide
  misc_feature (443)..(443): n includes a, c, g, or t, or contains no nucleotide
  misc_feature (445)..(445): n includes a, c, g, or t, or contains no nucleotide
tgacggcagccgtgcggacctaccgctggcagtgcatcgagtgcaaatcctgcagcctgtgcggaacctccgagaacgacggtgccagctgggcgggtctcaccccccaggaccagntgctgttttgtgatgactgngatnnggntnacnacantgtactgcctgantnccccnntggngnagncncnggaagggagctgnnnntgtnacntctgtntnnggcacctgaaggaanaggnttntgcttacatcnccctcacntaggccggctcggctcnccgcgactctggggtggtgntcgcntacctgcctctncgagctcctcaattctcccccaccctgaacatcccgcagggggagggggagagggggaagccgagagggggctgggccaccccctcccctctgtgcaagtggaatgtntgccntgtgggtgggtgggncnggccagggcctctccctccctccctccctctctgtcccttggcaaatggacaccaggggcttctcccctcaaagccataccccgcctctgggcgggcatggggggtggtgggtgccagccaggggcatggacagagcctttttctaaagaaa

SEQ ID NO: 4196 - DNA, 361 bp, Homo sapiens
gagccgggtcctggtttccaatttgggttctgctgtgtgactctgggcaagtcactctccctctctgggcatgtctgctacaaatggacaagattatttcagaggtcactgaagactgtgattacatgcacctgccttagaaggtaggattttcttcccagggacctcctatcaccctaccctgcttcttgaggtccctggagccccaggtgggctgaggggcagggagccggctgtgcccagtatgcctcctggaccctccagttctgccacaggtctgccgatgccctgtccactgcctacacatgacagacaagtaaccccctcatgggggatggggacctacctggctcctcagcca

SEQ ID NO: 4197 - DNA, 517 bp, Homo sapiens
  misc_feature (32)..(32): n includes a, c, g, or t, or contains no nucleotide
  misc_feature (42)..(58): n includes a, c, g, or t, or contains no nucleotide
  misc_feature (60)..(62): n includes a, c, g, or t, or contains no nucleotide
  misc_feature (400)..(400): n includes a, c, g, or t, or contains no nucleotide
ttctttctagagagggaattctcttggctggnttccttaccnnnnnnnnnnnnnnnnntnnngggcctccagccctctcactgtgtccctctctctggaaaggaggaaggagcctatggcatcttccccaacgaaaagcacatccaggcaatggcctaaacttcagagggggcgaagggatcagccctgcccttcagcatcctcagttcctgcagcagagcctggaagacaccctaatgtggcagctgtctcaaacctccaaaagccctgagtttcaagtatccttgttgacacggccatgaccactttccccgtgggccatggcaatttttacacaaacctgaaaagatgttgtgtcttgtgtttttgtcttatttttgttggagccactctgttcctngctcagcctcaaatgcagtatttttgttgtgttctgttgtttttatagcagggttggggtggtttttgagccatgcgtgggtggggagggaggtgtttaacggcactgtggccttgg

SEQ ID NO: 4198 - DNA, 521 bp, Homo sapiens
  misc_feature (29)..(63): n includes a, c, g, or t, or contains no nucleotide
  misc_feature (73)..(73): n includes a, c, g, or t, or contains no nucleotide
  misc_feature (176)..(176): n includes a, c, g, or t, or contains no nucleotide
  misc_feature (185)..(185): n includes a, c, g, or t, or contains no nucleotide
gcgtataggtgcagccctgtcacaacacnnnnnnnnnnnnnnnnnnnnnnnnnnnnnnnnnnncaccccaaanctggaaggatctggttcaacatagcacaaacccttaggaaaaatgaaattaacatcactgatgtgtaatccagtaaaatctccctttttcgggtgtgtatgtnggcatgtgncccatttctatgtgtgtgtctacgtgcagctcactaccaacagcctcatgtgcacttgacctgacagtgctcgctgagaactctcaccaggttggcgcctgaatgccttactctcagcagtcagaggcttgcttgctctgtgcagatttttaattttcttttttggccctaggctggttgggacctctacagcttcattctttcaccattaaatagtggcctttttcagtattttccctcttcccctttataaattatgctaaagccacaaagcacatttttggggatcatagaaggttggggttccagaaaggcatctgtgtgatggttccattg

SEQ ID NO: 4199 - DNA, 354 bp, Homo sapiens
  misc_feature (26)..(26): n includes a, c, g, or t, or contains no nucleotide
  misc_feature (68)..(68): n includes a, c, g, or t, or contains no nucleotide
  misc_feature (71)..(72): n includes a, c, g, or t, or contains no nucleotide
  misc_feature (89)..(89): n includes a, c, g, or t, or contains no nucleotide
  misc_feature (99)..(99): n includes a, c, g, or t, or contains no nucleotide
  misc_feature (102)..(103): n includes a, c, g, or t, or contains no nucleotide
  misc_feature (105)..(156): n includes a, c, g, or t, or contains no nucleotide
  misc_feature (300)..(315): n includes a, c, g, or t, or contains no nucleotide
ctgtgttcactctttggaacaagctngatggactgcgcatctctgagaatgccaaccagaggcggcanccnncccttcctgcctcctgnccccactcanggnntnnnnnnnnnnnnnnnnnnnnnnnnnnnnnnnnnnnnnnnnnnnnnnnnnnnnaacacgcctctcctggcagggtagacccaggcctctaaccatctgacagagactcggcctggacaccatgcgatgcactctggcaccaaggctttatgtgcccatcactctcagagaccacgtttccctgactgtcatagagannnnnnnnnnnnnnnnaaaaccaggccctgttgccttttaagcatgtaccgctcc

SEQ ID NO: 4200 - DNA, 358 bp, Homo sapiens
  misc_feature (297)..(332): n includes a, c, g, or t, or contains no nucleotide
aagcaatcagccaaaatgatacctggaggcttatctgaggccaaacccgccactccagaaatccaggagattgttgataaggttaaaccacagcttgaagaaaaaacaaatgagacttatggaaaattggaagctgtgcagtataaaactcaagttgttgctggaacaaattactacattaaggtacgagcaggtgataataaatatatgcacttgaaagtattcaaaagtcttcccggacaaaatgaggacttggtacttactggataccaggttgacaaaaacaaggatgacgannnnnnnnnnnnnnnnnnnnnnnnnnnnnnnnnnnnctgattccttcaactggctactgagt

SEQ ID NO: 4201 - DNA, 264 bp, Homo sapiens
  misc_feature (116)..(132): n includes a, c, g, or t, or contains no nucleotide
tgcggctacaggacctggtggacaagctgcaactgaaggtcaaggcctacaagcgccaggccgaggaggcggaggagcaagccaacaccaacctgtccaagttccgcaaggtgcannnnnnnnnnnnnnnnncagaggagcgggcggacatcgctgagtcccaggtcaacaagcttcgagccaagagccgtgacattggtgccaagcaaaaaatgcacgatgaggagtgacactgcctcgggaacctcactcttgccaacctgt

SEQ ID NO: 4202 - DNA, 72 bp, Homo sapiens
agaagtccacggccagctgggcagagcgctttgctgccctggagaagcccaccacggcctcaagaggaggaa

SEQ ID NO: 4203 - DNA, 562 bp, Homo sapiens
  misc_feature (26)..(26): n includes a, c, g, or t, or contains no nucleotide
  misc_feature (234)..(234): n includes a, c, g, or t, or contains no nucleotide
  misc_feature (264)..(264): n includes a, c, g, or t, or contains no nucleotide
  misc_feature (278)..(278): n includes a, c, g, or t, or contains no nucleotide
  misc_feature (288)..(288): n includes a, c, g, or t, or contains no nucleotide
  misc_feature (412)..(445): n includes a, c, g, or t, or contains no nucleotide
  misc_feature (450)..(450): n includes a, c, g, or t, or contains no nucleotide
gagtggtcgccctggacaagaacttncacatgaagtgttacaagtgtgaggactgcgggaagcccctgtcgattgaggcagatgacaatggctgcttccccctggacggtcacgtgctctgtcggaagtgccacactgctagagcccagacctgagtgaggacaggccctcttcagaccgcagtccatgccccattgtggaccacccacactgagaccacctgcccccacctcnagttattgttttgatgtctagcccctcccnatttccaacccctnccctagcatncccaggtgccctgacccaggacccaacatggtctagggatgcaggatccccgccctggggtctggtcctcgcccatcctgcagggattgcccaccgtcttccagacaccccacctgaggggggnnnnnnnnnnnnnnnnnnnnnnnnnnnnnnnnnncccgncgccctcggccggccccccgagcagcctttgtactctgcttgcggagggctgggagaccctccaggacattcccaccctcccccatgctgccaagttgtagctatagctaca

SEQ ID NO: 4204 - DNA, 565 bp, Homo sapiens
agtcagagcatcatgctttgaggtttggggtgctcaggctgggagggtagaatgccattccagaggacaagccacaaaaatgccttaatttgagctcgtatttacccctgctgataagtgacttgagagttcccggttttttcctcttgtccttccctcccttctgtccttccatgtgtggggaaagggtgtttttggtagagcttggtttccaaagcgcctggctttctcacttcacattctcaagtggcagtttcattatttagaatgcaaggtggacatcttttggatatctttttctatatatttctaaagctttacatatgagagggtatagggaggtgtttataaaacacttgagaacttttttccttaatatcagaaagcaaaaaaataaaaccacaattgagatttgcctttcaaaccctcaggtttgcctctaaccaggtgtccctggtcaccatcagagtactggaatacgggaaccgaggaggaccttggtccttttgtttttgttctggactcttgggagtggaaatgggatgagtttatccactggagctta

SEQ ID NO: 4205 - DNA, 536 bp, Homo sapiens
  misc_feature (284)..(311): n includes a, c, g, or t, or contains no nucleotide
  misc_feature (419)..(419): n includes a, c, g, or t, or contains no nucleotide
ccatttagtggttggtggcaacaattttatgtacaggtgtatatacctctatattatatatcgacatacatatatatttttgggggggggcggacaggagatgggtgcaactccctcccatcctactctcacagaagggcctggatgcaaggttacccttgagctgtgtgccacagtctggtgcccagtctggcatgcagctacccaggcccacccatcacgtgtgattgacatgtaggtaccctgccacggcctatgccccacctgccctgcttcctggctcnnnnnnnnnnnnnnnnnnnnnnnnnnnntacctggccttcctgccaggagctctccacccactcacattccgtccccgccgcctcactgcagccagcgtggccctaggacaggaggagcttcgggcccagcttcancctgcggtggggctgaggggtggccatctcctgccctggggccactggcttcacattctgggctgactcataggggagtaggggtggagtcaccaaaaccagtgctgggacaaagat

SEQ ID NO: 4206 - DNA, 482 bp, Homo sapiens
  misc_feature (251)..(283): n includes a, c, g, or t, or contains no nucleotide
  misc_feature (320)..(339): n includes a, c, g, or t, or contains no nucleotide
caatactattgaaactggtgagttctgattattaaatattctctgtaaatcagtaaacatgtataaagtatttgtaatgtttggtcataatttatttatgaagacagcaaaagactgatttcatgatggggaaaacaattagccaaagtttaatttcttacactgtggttgtcaagaatactgatttactataatgatatatacatgcaagatatttaacttaatatcttagacaagagttctgggtacannnnnnnnnnnnnnnnnnnnnnnnnnnnnnnnngtatttttaatttttaatggaatgtagcttttaaaannnnnnnnnnnnnnnnnnnnaaaggaattataccatgagaccttatagctgtacttaaaagccattcagttcagctattgggagttcatgatgaattagcatatgccagaaaggttgctaaccttaacatctgagagcagtaacactgattttatctgctgta

SEQ ID NO: 4207 - DNA, 434 bp, Homo sapiens
  misc_feature (164)..(164): n includes a, c, g, or t, or contains no nucleotide
  misc_feature (222)..(222): n includes a, c, g, or t, or contains no nucleotide
  misc_feature (327)..(327): n includes a, c, g, or t, or contains no nucleotide
gcgtgtccttcttcgcctggcatcgctcaccccgccccgagctcggcgcccagcccagcgcctcgccgcatccgctcagcccggaccagcccaacggtggcacgctcgagaactgcgtggcgcaggcctctgacgacggctcctggtgggaccacgactgccancggcgtctctactacgtctgcgagttccccttctagcggggccggtaccccgcctccntgcccatcccaccacccggcctttccctgcgccgtgcccaccctcctccggaatcgcccttcccttcctggccacgaatggcagcgtcctccccgacccccagtntgggcgcttctgggagggctcttgcggtgccggcactcctccttgttagtgtctttccttgaaggggcgggcaccaggctaggtccggtgccaataaatccttgtgg

SEQ ID NO: 4208 - DNA, 325 bp, Homo sapiens
  misc_feature (202)..(222): n includes a, c, g, or t, or contains no nucleotide
tgggcacctcagattgttgttgttaatgggcattccttcttctggtcagaaacctgtccactgggcacagaacttatgttgttctctatggagaactaaaagtatgagcgttaggacactattttaattatttttaatttattaatatttaaatatgtgaagctgagttaatttatgtaagtcatatttatatttttaagannnnnnnnnnnnnnnnnnnnntgtattagttttgaaataataatggaaagtggctatgcagtttgaatatcctttgtttcagagccagatcatttcttggaaagtgtaggcttacctcaaataa

SEQ ID NO: 4209 - DNA, 210 bp, Homo sapiens
  misc_feature (126)..(142): n includes a, c, g, or t, or contains no nucleotide
atattatactttagggcaaccctagttggcagctttgagagaagttcttcattacagaagaattccattaaacatggaaggaataactaaactaaaaatcatcactttgcaattctgaatgaaatnnnnnnnnnnnnnnnnnatttattattggataaaaccatcagatataaggttaatagggaacttgacagcagacagagggaagag

SEQ ID NO: 4210 - DNA, 590 bp, Homo sapiens
  misc_feature (44)..(44): n includes a, c, g, or t, or contains no nucleotide
  misc_feature (47)..(47): n includes a, c, g, or t, or contains no nucleotide
  misc_feature (52)..(52): n includes a, c, g, or t, or contains no nucleotide
  misc_feature (137)..(137): n includes a, c, g, or t, or contains no nucleotide
  misc_feature (173)..(173): n includes a, c, g, or t, or contains no nucleotide
  misc_feature (201)..(201): n includes a, c, g, or t, or contains no nucleotide
  misc_feature (248)..(248): n includes a, c, g, or t, or contains no nucleotide
  misc_feature (255)..(255): n includes a, c, g, or t, or contains no nucleotide
  misc_feature (262)..(262): n includes a, c, g, or t, or contains no nucleotide
  misc_feature (278)..(278): n includes a, c, g, or t, or contains no nucleotide
  misc_feature (284)..(284): n includes a, c, g, or t, or contains no nucleotide
  misc_feature (321)..(321): n includes a, c, g, or t, or contains no nucleotide
  misc_feature (330)..(330): n includes a, c, g, or t, or contains no nucleotide
caccatgtgtttgctttgtgaaggtgaagaatatgttggtttangangaaangaaattggatgtaattttatgcaatttacttttaaagacaaacataactatttagcagagaatattttaataaatgcaaaacaancagctggactgctgtacatcaaggacagattaactnggaaaacatatgttccttatgtgtgatngagagccattcagaaaagacttcctttgtgttcagcctatacttttnccatatnggtatanccttgaaaaaaattangcacanccatggttatttttctaccttttataaaagacagagncctgtttanctcatttagaagatagagaaaattggtctaaaattgaacatcctagattcacactcccaagtcacttaaggtgatttgatggtgaggaaaatgattgacaaagcccaacaatgatctcaggaattacattttccaacagaccaaaaaatgttttcatgtagcagcaatgcagatttggtgaatatttaatatatattttagtatgtatttcactttatgactgacaattaaaaaatattgtttggccaaatagtaaacac

SEQ ID NO: 4211 - DNA, 500 bp, Homo sapiens
  misc_feature (116)..(152): n includes a, c, g, or t, or contains no nucleotide
  misc_feature (397)..(397): n includes a, c, g, or t, or contains no nucleotide
  misc_feature (443)..(443): n includes a, c, g, or t, or contains no nucleotide
  misc_feature (445)..(445): n includes a, c, g, or t, or contains no nucleotide
  misc_feature (455)..(455): n includes a, c, g, or t, or contains no nucleotide
gcagtcctgcgttaactgcggccgggaggctatgagcgagtgcaccggctgccacaaggtcaactactgctccaccttctgccaacgcaaggactggaaggatcaccagcacatannnnnnnnnnnnnnnnnnnnnnnnnnnnnnnnnnnnnaagtccacgtggctgaaagcgtgatggagaaggtgaccgtgtgaggctccatcggccgccctgggagctggggcccctcgcactcctgtgaggcttttgcaggtcgaaggcccccctgaggactctggggggacgttgagaagaggggtgtgggaaggtaaagaaacttgctggacaagtcattaacacactttaagcgaatggtgccctgggaagcgcactccccctgcccgggccccctgccngctcgcggacagattttttatccctgggatcatgagcgtccggtcntncccacagggncctgtgctgcgacgcacatacatacgtgttgtgtctgtcaataaa

SEQ ID NO: 4212 - DNA, 555 bp, Homo sapiens
  misc_feature (26)..(54): n includes a, c, g, or t, or contains no nucleotide
  misc_feature (318)..(332): n includes a, c, g, or t, or contains no nucleotide
catagctaccgtgagttctcagcagnnnnnnnnnnnnnnnnnnnnnnnnnnnnnaattagccacgtaacaagagtctatttgccttgaaaaaacaattatccttgaacttcctccagctatgcagggattctcattaaagagctgatctgcatctgtttatccattttagtagcttttaaatatgattttatgtgaagtgccatttctttattctactaaagagagacagcagaaataaagatcagaagcaaatgtgagcaaatctgttttactgttaacttcaattatgaacttgaaattgtgccacatgacttttnnnnnnnnnnnnnnnatcctagtgttttaattacctgtgtgcagctattttaaatagcattttacttgaataatatgtatgttgtcattgtttcatgctatactttgtgggataaaacttgggaatgagtgtggtaagaaatttataaagttttgcttttaaaacgtggacataactcatttttctagtttttgacaattgtgtgttttagtgtctagtctgcagagagctgtgtgat

SEQ ID NO: 4213 - DNA, 40 bp, Homo sapiens
ttccagcccgggagcatcacagaggtgtgcatcacctttg

SEQ ID NO: 4214 - DNA, 522 bp, Homo sapiens
  misc_feature (121)..(121): n includes a, c, g, or t, or contains no nucleotide
  misc_feature (154)..(154): n includes a, c, g, or t, or contains no nucleotide
  misc_feature (156)..(171): n includes a, c, g, or t, or contains no nucleotide
  misc_feature (199)..(261): n includes a, c, g, or t, or contains no nucleotide
  misc_feature (285)..(285): n includes a, c, g, or t, or contains no nucleotide
  misc_feature (303)..(303): n includes a, c, g, or t, or contains no nucleotide
  misc_feature (323)..(341): n includes a, c, g, or t, or contains no nucleotide
  misc_feature (428)..(428): n includes a, c, g, or t, or contains no nucleotide
  misc_feature (431)..(432): n includes a, c, g, or t, or contains no nucleotide
  misc_feature (435)..(435): n includes a, c, g, or t, or contains no nucleotide
  misc_feature (438)..(439): n includes a, c, g, or t, or contains no nucleotide
  misc_feature (443)..(443): n includes a, c, g, or t, or contains no nucleotide
  misc_feature (449)..(449): n includes a, c, g, or t, or contains no nucleotide
  misc_feature (453)..(458): n includes a, c, g, or t, or contains no nucleotide
  misc_feature (460)..(461): n includes a, c, g, or t, or contains no nucleotide
  misc_feature (464)..(465): n includes a, c, g, or t, or contains no nucleotide
  misc_feature (496)..(496): n includes a, c, g, or t, or contains no nucleotide
gcgtttctccactgacagacatttaaaaacaaccttcagctccgtttcaatcaatcacctcgacttgttttttagcatggacactgccagcaggacagacagggatggagtaaaccgaagncaatttcagggctcttggcgtgttggacacagnannnnnnnnnnnnnnnncctttggtagctaacagtcactgatttnnnnnnnnnnnnnnnnnnnnnnnnnnnnnnnnnnnnnnnnnnnnnnnnnnnnnnnnnnnnnnnggaggtaaataaactaagatattnccgagggaagggacccanggccacctcccttccgcagnnnnnnnnnnnnnnnnnnnttttttgaatgaaatgccactgtgcattttcagaaaaaaaaatctctgataaacagactttgaatggatgtttgttcctcctgattntcnnttnctnnttcntggcgncttnnnnnngnnggnnatccggactgtgaatgtcatgcgtgagtaanccttgtgtgtagcaggcgcacggccc

SEQ ID NO: 4215 - DNA, 382 bp, Homo sapiens
cctgtgggcttgtacagtagataattaatttctaaaaagaacagctgcctattttcttcctaggttaggttatatcttcataatcacaagaattagtgatggcaaaataaaattttgcttatgaatcttttacattgtttatatatgattaatatcatcatatatattttctgtattaagctcatttggcttcatttaagctgtatacttagtcatatatctttcattagttctatggatatgagcagatccctttactggagcccagtatgtgctgtgtgagttagaagtcattcttgctgagaaggtgaataggtagggatttgccttgttttgtaagtctacaatttgccaagagtaaataacactggaccagctgtaa

SEQ ID NO: 4216 - DNA, 212 bp, Homo sapiens
agattgcagctgctggactggatgtgacgagcccagaaccactgcctacaaaccaccctctcctgaccctgaagaactgtgtgattctgccccacattggcagtgccacccacagaacccgcaacaccatgtccttgttggcagctaacaacttgctggctggcctgagaggggagccgatgcctagtgaactcaagctgtagccaaacagt

SEQ ID NO: 4217 - DNA, 519 bp, Homo sapiens
  misc_feature (28)..(28): n includes a, c, g, or t, or contains no nucleotide
  misc_feature (412)..(431): n includes a, c, g, or t, or contains no nucleotide
agtccatgagttatatcctggctcagtnggagtgatatttatgtattatttttacttttctctcagtgtcttatattaagattaacatgttgttaatagttgctttgttgattaatctctcttgttggtgttttaataaatgaaataggcttgcctttagatcgggtgctgatattgcctgtttcctagtaatgggctgatcaaatgatcagtggaattcttggtttgatgataaccttattaattgaaattttttactgatgtggctttaaaagaggtttattttgtatatgtttagaactctctgattttgatgaattatatgggaatgagaaacagaagaagtggtatttgctggcgagttaaataggcaaggtacccagtgataacaccaaccaaaccactcctatcnnnnnnnnnnnnnnnnnnnngatgcctgttgttttactgtgtatattttatttttaatatattaactttgtggattcatttaaggtctactcaaaagtaacactgtca

SEQ ID NO: 4218 - DNA, 504 bp, Homo sapiens
agaagtcaaccagaccaccttataccagcgttatgagatcaagatgaccaagatgtataaagggttccaagccttaggggatgccgctgacatccggttcgtctacacccccgccatggagagtgtctgcggatacttccacaggtcccacaaccgcagcgaggagtttctcattgctggaaaactgcaggatggactcttgcacatcactacctgcagtttcgtggctccctggaacagcctgagcttagctcagcgccggggcttcaccaagacctacactgttggctgtgaggaatgcacagtgtttccctgtttatccatcccctgcaaactgcagagtggcactcattgcttgtggacggaccagctcctccaaggctctgaaaagggcttccagtcccgtcaccttgcctgcctgcctcgggagccagggctgtgcacctggcagtccctgcggtcccagatagcctgaatcctgcccggagtggaactgaagcctgc

SEQ ID NO: 4219 - DNA, 530 bp, Homo sapiens
  misc_feature (26)..(83): n includes a, c, g, or t, or contains no nucleotide
  misc_feature (96)..(96): n includes a, c, g, or t, or contains no nucleotide
  misc_feature (153)..(153): n includes a, c, g, or t, or contains no nucleotide
  misc_feature (483)..(483): n includes a, c, g, or t, or contains no nucleotide
  misc_feature (491)..(505): n includes a, c, g, or t, or contains no nucleotide
gtgtagatgcgtaccccactttcctnnnnnnnnnnnnnnnnnnnnnnnnnnnnnnnnnnnnnnnnnnnnnnnnnnnnnnnnnnctgatgtacttgnttgtgaggcaaaagtactttgtcggttacctaggagagagaacgcagagcacccctnggctacatatttgggaaacgcatcatactcttcctgttcctcatgtccgttgctggcatattcaactattacctcatcttctttttcggaagtgactttgaaaactacataaagacgatctccaccaccatctcccctctacttctcattccctaactctctgctgaatatggggttggtgttctcatctaatcaatacctacaagtcatcataattcagctcttgagagcattctgctcttctttagatggctgtaaatctattggccatctgggcttcacagcttgagttaaccttgcttttccgggaacaaaatgatgtcatgtcanctccgccnnnnnnnnnnnnnnntggccccaaatttgctattcccatg

SEQ ID NO: 4220 - DNA, 567 bp, Homo sapiens
  misc_feature (59)..(59): n includes a, c, g, or t, or contains no nucleotide
  misc_feature (67)..(67): n includes a, c, g, or t, or contains no nucleotide
  misc_feature (71)..(72): n includes a, c, g, or t, or contains no nucleotide
  misc_feature (208)..(210): n includes a, c, g, or t, or contains no nucleotide
  misc_feature (213)..(218): n includes a, c, g, or t, or contains no nucleotide
tccccagggaagaccctgaccgtgtacatagccctggtgctcctgcccagccacccctnagatgcgnttcnnctctggccctggggtgtgtctcggtgacgttttctatcagacgtgctccctcccatcctccagccctgcccaccctccctccactcctctcaactgcctcagcgatttcaagaaggaaataaagggataaagaaannnatnnnnnnaccgagtacaaggacagacagcaggcacggcccgcagcctggcatctgtgcgtgtggcgtggcccgtggcttggcatctgtgtgcgtggtgtggcccgtggcctggcatctgtgtgcgtggcgtggcccgtggcctggcatctgtgtgtgtggcgtggcccgtggcctggcatctgtgcgcgtggcgtggcccgtggcctggcatctgtgtgcgtggctatcaggagttctaggaactcagtgcaatacgggagtgacccagctactgaaccagccacgaacagcccgccagaggcctgaagctgagcgtgtacgttaatgtgaatgtatatagtctttgcagaggtcc

SEQ ID NO: 4221 - DNA, 533 bp, Homo sapiens
  misc_feature (80)..(94): n includes a, c, g, or t, or contains no nucleotide
  misc_feature (148)..(162): n includes a, c, g, or t, or contains no nucleotide
  misc_feature (398)..(414): n includes a, c, g, or t, or contains no nucleotide
tgcccttgcacttggctgccaaagaaggccacctccgggtggtggagttcctggtgaagcacacggccagcaatgtgggnnnnnnnnnnnnnnngggggacaccgcctgtgatttggccaggctctatgggaggaatgaggttgttannnnnnnnnnnnnnnacggggctgggggagccacaaatcttcaataaacgtggggagggctcccccacgttgcctctactttatcaattaactgagtagctctcctgacttttaatgtcatttgttaaaatacagttctgtcatatgttaagcagctaaattttctgaaactgcataagtgaaaatcttacaacaggcttatgaatatatttaagcaacatctttttaacctgcaaaatctgttctaacannnnnnnnnnnnnnnnnttgactttcttctgaatattttatctttccttggcttttcccttgcttccccttttgccaatctcaacacccaagttgaagactttgtttttaaaatggtttgtcctgatgcttttgtc

SEQ ID NO: 4222 - DNA, 279 bp, Homo sapiens
  misc_feature (42)..(57): n includes a, c, g, or t, or contains no nucleotide
  misc_feature (110)..(110): n includes a, c, g, or t, or contains no nucleotide
ccaggacctggaaaggtgcaaagaaaacctggattcccaccnnnnnnnnnnnnnnnncacctcggagctgaatacagcctgaggcctcagcagccgccttaagctgatcntgcggagaacacccttggtggcttatgggtccccctcagcaagccctacagagctgtggaggattgctatctggaggccttccagctgctgtcttctggacaggctctgcttctccaaggaaaccgcctagtttactgttttgaaatcaatgcaagagtgattgcagct

SEQ ID NO: 4223 - DNA, 312 bp, Homo sapiens
  misc_feature (89)..(103): n includes a, c, g, or t, or contains no nucleotide
  misc_feature (276)..(286): n includes a, c, g, or t, or contains no nucleotide
tcacagatgcccagcctcatagctgaagttgcctgaatgatcctcctgttgcatgtaacccactggcctccctgagcatgtccattgannnnnnnnnnnnnnncctcatctctccttgccaaatagtttgtgccttgtcttgaagggggttgctccccttgccaacctcacactgctatgattgccaactccagcggtcccatgtcagccttctgatgatcccactccaccccacctcaacttatttaacttcctaattaaatcagactgtttgannnnnnnnnnnagaatattttcctgaccaagactgag

SEQ ID NO: 4224 - DNA, 278 bp, Homo sapiens
  misc_feature (69)..(69): n includes a, c, g, or t, or contains no nucleotide
  misc_feature (74)..(74): n includes a, c, g, or t, or contains no nucleotide
  misc_feature (113)..(113): n includes a, c, g, or t, or contains no nucleotide
  misc_feature (124)..(124): n includes a, c, g, or t, or contains no nucleotide
  misc_feature (160)..(160): n includes a, c, g, or t, or contains no nucleotide
  misc_feature (226)..(226): n includes a, c, g, or t, or contains no nucleotide
  misc_feature (232)..(232): n includes a, c, g, or t, or contains no nucleotide
  misc_feature (240)..(240): n includes a, c, g, or t, or contains no nucleotide
  misc_feature (249)..(249): n includes a, c, g, or t, or contains no nucleotide
  misc_feature (252)..(252): n includes a, c, g, or t, or contains no nucleotide
gggcattatatgctaccgatattaggataaaatgtgtttacctagaggtttctaggagagagtactgtnctctnctggtgagggaagagaggattgtgaaaatatttctcctngaagcatcagnatgtctcagatcaaaatcttgacccgaggcctcagnatttttcttgaagatgggtgactaatatccagaaatcctcttgcctcaactcaactccaagttgangtccanccagcctngtgcacgtnctncaccaatacgtacagggaagatatct

SEQ ID NO: 4225 - DNA, 615 bp, Homo sapiens
  misc_feature (422)..(425): n includes a, c, g, or t, or contains no nucleotide
  misc_feature (430)..(432): n includes a, c, g, or t, or contains no nucleotide
  misc_feature (434)..(434): n includes a, c, g, or t, or contains no nucleotide
  misc_feature (436)..(438): n includes a, c, g, or t, or contains no nucleotide
  misc_feature (441)..(441): n includes a, c, g, or t, or contains no nucleotide
  misc_feature (443)..(445): n includes a, c, g, or t, or contains no nucleotide
ggctaaagaatctcaatctcttgaaatttatttttttaatgtcatattcatctggtaaatatctactgtttgccaggcatttaagaatatggcaaagaacataaaagatggtgtcaccagattttggtcaccaatgagtacccgacccgttgccatgattaagagagaatgctttctattggagtttcaggaaatataatttgagaatactttaaagggaagtggaagtataagtgaatgatatttttcttttacatgtaaacaatgaagttatttcaaagttaagttttaaacaaaatacatgaagtagtgtctgccatacatgttaatattctacattcttgcttccttaaattaatatgtttgtgtgtatatatgtgcctcacacctgaattgaaaattaaagactggtttaaaagtgnnnnaaaannnanannnaangnnnctccattacgtttggggtaaccagcctaagtggaatcttggaaggaaagtaagggaaaaacttgtatttgccttcaatgaattaaaccagtgatatgtgttaacgtatgaatgaaaggattgatggtgattttataattatatatattgccgcagtaaccagttaataaa

SEQ ID NO: 4226 - DNA, 381 bp, Homo sapiens
  misc_feature (297)..(314): n includes a, c, g, or t, or contains no nucleotide
ttaggagcaaatctccccaggggtgtacggtatttcttgactctgggaacagctgctacccccaagacttgccacgttgttctgccctcagatggaattaggtgaatgtgtgtagctgctttttcactcgtggtcctctccccatcccttgctctgaccccagagctctgtgtatttgcatccagaggccatggaaacattctttgcatttaagagacagatttattccctgtggagagtgggtggattcattgccacactcttttctcccagggacccaggaaactaggactttgnnnnnnnnnnnnnnnnnncccttttattttttaaatgcattaaaaactgtgctagtctcctttgcatggacttcaagctgcatga

SEQ ID NO: 4227 - DNA, 398 bp, Homo sapiens
  misc_feature (56)..(56): n includes a, c, g, or t, or contains no nucleotide
ttgccagacaatgaaaacagtatgcagtatttcttaaagtattgaaattagaatancatgaaataaatcaaaacatacaatggcaagtagtatgcatgcatattcaagagactcttccatttttgcaagctgtagaaggaaatgtctgaatgtctataagttatggggtagattcttgagaagcatttcatataatttcactgaagaaccttgataattttgacccactgtaacttagccactgatgaaccttaaagctgagtattttattaacacctgatttgtattccattatattcaaaatgcatctttggtattgtgcctctgctcccatctctctctttgcctcatagatttagctatgttgggaagcacatgcttgctctaggaatatctcc

SEQ ID NO: 4228 - DNA, 473 bp, Homo sapiens
  misc_feature (44)..(44): n includes a, c, g, or t, or contains no nucleotide
  misc_feature (93)..(110): n includes a, c, g, or t, or contains no nucleotide
tacgaaaacaattcccctgtggcctgctggactgggtggaaccnagaacaggctaaggcatacagttcttgactttggacaatccaagagtgnnnnnnnnnnnnnnnnnncttgagatacctgttttaaaaggtttttcagacaattttgcagaaaggtgcattgattcttaaattctctctgttgagagcatttcagccagaggactttggaactgtgaatatacttcctgaaggggagggagaagggaggaagctcccatgttgtttaaaggctgtaattggagcagcttttggctgcgtaactgtgaactatggccatatataattttttttcattaatttttgaagatacttgtggctggaaaagtgcattccttgttaataaactttttatttattacagcccaaagagcagtatttattatcaaaatgtctttttttttatgttgaccattttaaaccgttggcaat

SEQ ID NO: 4229 - DNA, 176 bp, Homo sapiens
acaatcagtatgtgcttacctgtgttcaagtagagaaaaatacagtagagtctgataggacatattcttgtaccacagacaaaacaaatcttatgttgcatttactatcaactgctgctaatacgttattataaaacttacctagctcctgaattcttcctatcttatagcttaaa

SEQ ID NO: 4230 - DNA, 607 bp, Homo sapiens
  misc_feature (26)..(109): n includes a, c, g, or t, or contains no nucleotide
  misc_feature (228)..(228): n includes a, c, g, or t, or contains no nucleotide
  misc_feature (283)..(283): n includes a, c, g, or t, or contains no nucleotide
  misc_feature (338)..(338): n includes a, c, g, or t, or contains no nucleotide
  misc_feature (341)..(341): n includes a, c, g, or t, or contains no nucleotide
  misc_feature (358)..(398): n includes a, c, g, or t, or contains no nucleotide
  misc_feature (471)..(518): n includes a, c, g, or t, or contains no nucleotide
  misc_feature (535)..(549): n includes a, c, g, or t, or contains no nucleotide
tccaggctgtacactacaacggtgtnnnnnnnnnnnnnnnnnnnnnnnnnnnnnnnnnnnnnnnnnnnnnnnnnnnnnnnnnnnnnnnnnnnnnnnnnnnnnnnnnnnnctccaattttgagcgaaacccacccgagaacaccttccttagactcaccgccatggcaacacactctgaatccaaccttagctgctttgctcaggaagacattgccatttgtagaccanaccttgccatcaagatgccagagaaagcagagcagtatcaacccctcacagcctnagtcagcctccagaactccctagatgcccccatggaggactgtgtgatctccatnccngggaagggggctcattnnnnnnnnnnnnnnnnnnnnnnnnnnnnnnnnnnnnnnnnnaaacaccatgtgtgccaagttccagttcacgccaacacatgtggggctccagagactcactgtggaagtggannnnnnnnnnnnnnnnnnnnnnnnnnnnnnnnnnnnnnnnnnnnnnnnagcccctgaactatcannnnnnnnnnnnnnntctatcaccactctcctgccaacccttgttctacaatctaaaccaaacatgtgctagg

SEQ ID NO: 4231 - DNA, 35 bp, Homo sapiens
tgcgtagtacagtgccaccgctgccgtgtgcgcaa

SEQ ID NO: 4232 - DNA, 114 bp, Homo sapiens
gttccctgttatacagataatgttctcactacccataatatgtaggaacattgtttctccttagccgtagtatgcatacacctatccatgttcattctgacatcctttgttgtc

(The sequence listing continues in the following parts.)
